United States Patent Application Publication US 2002/0048763 A1 - sequence listing, part 2

SEQ ID NO: 2920 - DNA, 463 bp, Homo sapiens
  MAP TO AC007603.1; EXPRESSED IN FETAL LIVER, SIGNAL = 0.71; EXPRESSED IN LUNG, SIGNAL = 0.67; EXPRESSED IN PLACENTA, SIGNAL =   1; EXPRESSED IN BT474, SIGNAL = 0.77; EXPRESSED IN BONE MARROW, SIGNAL = 0.91; EXPRESSED IN BRAIN, SIGNAL = 0.73; EXPRESSED IN HEART, SIGNAL = 0.78
tgaccaatagatctgtggtagcctaagaggtaggttgaaatccttgtggcagaggctgctcttggccttccccaccacccagttttcctttcctctttgaggttatcaaacgctgatgtttagcctgcatatttctctacttcccttgcagccaaagatagtcccagccagtgagaagtgagcataactgttgaacaggacttttgggaaggatgttgaaagggaactgccagagctgggaggagcctctttttgctcttctgcttttcctgtacctatgactttcttgtgatcctggtcatgatggctggagctctggcagccatcttgggccatgcagtgatcttggggatgaacaccagtgctgtgtttggtggggcagaagaggagaagcgtgtcactgatggtagagctattctaccaccctcaactccccatatctgggcttgttttataggagaga

SEQ ID NO: 2921 - DNA, 449 bp, Homo sapiens
  MAP TO AC010856.2; EXPRESSED IN HELA, SIGNAL = 2.7; EXPRESSED IN HBL100, SIGNAL = 2.3; EXPRESSED IN HEART, SIGNAL = 1.7; EXPRESSED IN ADULT LIVER, SIGNAL = 4.6; EXPRESSED IN BT474, SIGNAL = 2.7; EXPRESSED IN BONE MARROW, SIGNAL = 1.7; EXPRESSED IN PLACENTA, SIGNAL = 2.6; EXPRESSED IN FETAL LIVER, SIGNAL = 2.5; EXPRESSED IN BRAIN, SIGNAL = 1.5; EXPRESSED IN LUNG, SIGNAL =   3
gcttagagccctggttcctctggctaagattaggcctagatatttgacttgtaggcagagctgggccttcagtttagatgccatgtacccttgattagctagaaagttcaagagagctagagtagcctgctggcatgaggcttttgaactggtaaccataagtaaatcatccacatactgaaggaccagagtgcctgtacttgagaagtggcctagatcttgggccagtgcctgaccaaacagatgaaggctatccctaaacccttgaggcaagaccatccacgaaagttgggacgtgtggtctgtgggatcctcaaaggcaaagagaaccttggagtcagagtgcaggagaatgcagaggaaggcatccttgaggtccagaacaatgaaccattctgcttcctctggtatttgagagagcagggtataggggttgggtatagctggat

SEQ ID NO: 2922 - DNA, 484 bp, Homo sapiens
  MAP TO AC006432.15; EXPRESSED IN FETAL LIVER, SIGNAL = 0.67; EXPRESSED IN HELA, SIGNAL = 1.1; EXPRESSED IN ADULT LIVER, SIGNAL = 0.79; EXPRESSED IN PLACENTA, SIGNAL = 0.75; EXPRESSED IN BT474, SIGNAL = 0.8; EXPRESSED IN BONE MARROW, SIGNAL = 0.82; EXPRESSED IN HEART, SIGNAL = 0.82
ctcctccacttgaacagaaatctaagaaaacaatcatggcaatgaggatagcactggaacacacatcactatgaaacaccatgctcaatacactgtttaaactgtcactgtgaatgaaagcaattgtatttgtttgaggaatacggacctaagtcttacacctttatagtagcattttgcatttgaggataaagagaatatggaaatattaagaaatattttagctttgttagatttttgcctccagatcaaacagaacaactcacctctacacatgtattccggtagctgaagacattgacaatcaaatcaaattgttcattttgaacaaccgaaaagggtgaggcaatctcaataaagaaaggttgggagacttctagagtggttgtagaggaaatgccaaatccaacgtcaccattcacacaaaagccacttgcctcccattgggttatcgtatcaggaatgaggaacgaaagattggcag

SEQ ID NO: 2923 - DNA, 420 bp, Homo sapiens
  MAP TO AC009490.4; EXPRESSED IN FETAL LIVER, SIGNAL = 1.6; EXPRESSED IN LUNG, SIGNAL = 1.8; EXPRESSED IN BONE MARROW, SIGNAL = 1.5; EXPRESSED IN HELA, SIGNAL = 1.7; EXPRESSED IN HEART, SIGNAL = 1.5; EXPRESSED IN PLACENTA, SIGNAL = 1.9; EXPRESSED IN BT474, SIGNAL = 1.6; EXPRESSED IN ADULT LIVER, SIGNAL =   2; EXPRESSED IN BRAIN, SIGNAL = 1.7; EXPRESSED IN HBL100, SIGNAL = 1.7
atgccttttgtgaaactgccataatacctgagactgttacaccagcagcaactatgaaagcctgtatttccaactgagacactcttcttcataaaaaaaatgcattgacttgttctataggtcttaatgatacggacaggaggcagagaaatactgggtagatgagggcagttcacgggagggctccaccctcgagtctggaactgtggcccaaagtgagaactttacatcctcgttttcccaatccaatgttgccttttccaaaaccaccctggcccaactggccccccatcctgaacccatggaaatcccaggctccactggcagaggagcagcagagaagaagagaagaaaagaagcagccagacatcagagagaagcagcttgacttcagtgggatggctggatggtaggactttg

SEQ ID NO: 2924 - DNA, 462 bp, Homo sapiens
  MAP TO AC011440.4; EXPRESSED IN PLACENTA, SIGNAL = 1.5; EXPRESSED IN HBL100, SIGNAL = 1.6; EXPRESSED IN HELA, SIGNAL = 1.9; EXPRESSED IN HEART, SIGNAL = 1.6; EXPRESSED IN FETAL LIVER, SIGNAL = 1.8; EXPRESSED IN BT474, SIGNAL = 1.5; EXPRESSED IN ADULT LIVER, SIGNAL =   2; EXPRESSED IN BRAIN, SIGNAL = 1.7; EXPRESSED IN LUNG, SIGNAL = 2.2; EXPRESSED IN BONE MARROW, SIGNAL = 1.7
tgacagcatgtaatttgggcaatgcctgattgaggccaagtaaggtatctaccatattgaatatttggttttcttgaactcacccaagaaagctgaatattctgtgtggaaacaggttacacccaaaaaatatacttgagggtgctgtgataaatgatggtaacttttctgtttgtacctcatttacaattttcacaggtacaatggtgggagaccatacccgtttggagttccacaacattgaaacgggaatcatgactgagaaacgctacatctccgttgtcccctccagctttattggccatctgcagagcctcatgtttaatggccttctctacattgacttgtgcaaaaatggtgacattgattattgtgagctgaaggctcgttttggactgaggaacatcatcgctgaccctgtcacctttaagaccaagagcagctacctgagccttgccactc

SEQ ID NO: 2925 - DNA, 1946 bp, Homo sapiens
  MAP TO AC006337.2; EXPRESSED IN PLACENTA, SIGNAL =  20; EXPRESSED IN BRAIN, SIGNAL =  14; EXPRESSED IN HELA, SIGNAL =  15; EXPRESSED IN HBL100, SIGNAL =  13; EXPRESSED IN HEART, SIGNAL =  12; EXPRESSED IN BT474, SIGNAL =  12; EXPRESSED IN ADULT LIVER, SIGNAL =  12; EXPRESSED IN FETAL LIVER, SIGNAL =  10; EXPRESSED IN LUNG, SIGNAL =  14; EXPRESSED IN BONE MARROW, SIGNAL =  13
gacttgtggaatgtctttgactgaaatcctgttagcgatatggacaataaggtccaggctgaggtggtctcagatggagatgaggaacttgttgggaactggagcaaaggtgactcttgttatgttttagcaaagagattggtagcattttgcccctgccctagagatttgtggaattttgaacttgaaagagatgatttagggtatctggtggaagaaatttctaagcagcaaagcattcaagaggtgacttgggtactgttaaaggcactcagtgttataagggaagcagagcataaaagttcagagaatttgcagcctgacaatgggatagaaaagaaaaatccattttctgaggagaaattcaagctgcctgcagaaatttgcataagtaacgaggagcccaatgttaatccccaagacaatggagaaaatgtctccagggcatgtcagaggtcttcaggcagcccttcccatcgcaggcctggatgcctaggagaaaatggttttttaggcctggcccagggtccccgtgctgtgtgcagcctagggatttggtgtactgcatctctaccactccagccatggctgaaaggggacaatgtagagcttgagccatggcttcagagggtgcaagcccccagctttggcagcttccacgtggtgggacgctcatggagaacctctgctagggcagtgcagaagggaaatgtggggtcggagcctccacacagagttcctactggggcactgcctagtggagctttgagaagagggccaccatcctccagaccccagaatggtagatccaacaatagcttgcactacgtgcctggaaaagccacagacactcaacgccagcctgtgaaagcagctgggagggtggctgtaccctgcaaagccataggggtggagctgcccaagaccatgggaacccacctcttgcatttgcatgacctggatgtgagacctggagtcaaaggagataattttggagcattaagatttactgcccctctggatttcagacttgcataggccctgtaacccctttgttttggccaatttctcccatttggaatggctatatttatccaatacctgtatccccattgtatctaggaagtaactagcttgcttttgattttagaggctcataggtggaagggacttacttgccttgtctcatataagactttggactgtggacctttgggttaatgctgaaatgagttaagactttgggggactgttggaaggcaggattgattttgaaatgtgaggacatgagatttggaggggccatgagtgaaatgatatggtttggctctgtgtccccacccaaatctcatcttgaattgtattcccataattcccacatgttgtgggaggcacccagtgggagataatttgaatcatgggggcagttgcccccataccgttctcatgatagtgaataagcctcacaagatctgatggttttatcaggggtttccgctttagcatcgtcctcattttatcttgctgctgccatgtaagaagtgcctttcacctcctgccatgattctgaggcctccccagtcatatggaaatgtaagtccaattaaacctctttttcttcccagtcttgggtatgtttttatcagcagtatgaaaacggactaatacactgacagagtcaggcacaccccgtcccaccctacaaaggaaaatgagacatccagatcatcacagtgagcatcccataaccccatgccccagaaaagagaattagactggtcccacattactttatctgtagtcacatgtttagtcccatttcctgattgccttttcccacaatatcctcatttacctagctagttccttctgtcctctgacacctaagtcatcagcatcatcctctgtcttcttttcttgcacaaactgaccatgtcttgggagct

SEQ ID NO: 2926 - DNA, 1951 bp, Homo sapiens
  MAP TO AL022333.1; EXPRESSED IN HEART, SIGNAL = 4.4; EXPRESSED IN FETAL LIVER, SIGNAL = 3.5; EXPRESSED IN LUNG, SIGNAL =   2; EXPRESSED IN BRAIN, SIGNAL = 4.4; EXPRESSED IN HBL100, SIGNAL = 3.3; EXPRESSED IN HELA, SIGNAL = 3.3; EXPRESSED IN PLACENTA, SIGNAL =   3; EXPRESSED IN BT474, SIGNAL = 3.2; EXPRESSED IN BONE MARROW, SIGNAL = 3.4; EXPRESSED IN ADULT LIVER, SIGNAL = 1.9
gtgttgtggatgcctgagtggtgtgtgggaggctaaggtggggagcctgggaggctctggctgagaagccagggtgcgttgtaagctgccctgcatcctgtgggctgggcacctcccacctaggtcccacctggagtggaatctttgaggcaggttggtgtcctttccccaattttacagaaatagatgctggggttcagggaggccctgtgagtcatccaggccacacggttttatagagtctggcaccaagatctgttcttcctccatctcacgagacccccaggcacatgtaactgctcagtcagtaaacgctcgcccagcacttactgtgagcaggcacgattctaggtgcccagcacccagcagcaggcagagcagacaagagcaacttctcctggagccaatgtgctgctgggacacagaggaggaggaggatgacaaggagaagggggatgggagaaggaagaggaggaggagaagaagaaagaagggaggaggaggaagaagagagaagcagaggagggaaaggaggaagaggaagagggaaaggaggaagaggaagaagggaaggaggaaggggaaagaagaggaggagggggaggagaaagaggagaaagaaggagaggaagagagggaggagaaagggagaaagaggaggaggagggaggaagaggaacaagaagggaggaggagaaagaggaagaagaggaagaaaagagggaggagagggaagaagaggaggaggagaaagaaggggaggaagagaaggaggagaaggggagaaagaggaggaggagggaggaagaaggaaggaggaagaggaggagggggaaaaagaggaggagggaggaggaagaggaggaaagggaggaagaggaggaggaggaagaggaggagggaggaggtagaggaggagggaggaggaagaggaaggaggaggagtaagagaaagaaggaggagaaagagaaggaggcggaaggaagaggaaggaggaggaagaggaggaggcagagaagaaaattaagtactgcacctgcacgtgttgccatgtgctaagaagagattagaacaggataacggtcaggagagatgtgaagtgctgagaggccacgggagatggggtggccagggaaagccctacaaggaagtggcatttgggaagatgcccaaattagaaggagtgggcacaagagtaactggatcaatggcatcacaggcagaggggacagcaggtgccaaggccctgaggcagaagtgagcttggtgcactggatggacgccaggaagccaccgtggctggagcagagaggagagagtcggtccccagccctgggaaaggggaggctgtgatggcactggcctgtgcagtcagggtcctgtgtggccaggtgtgtgggaggaacagctcctcactggccttgcaggcatctgaggctcagcaggatgcctgctttggatgagcagggccattttgccaagccctgagcagaagcgtgtgggcagccagctgggatggagactgagggagctgtggggcagccaggtgcccgtgtggcccagctgtggtctgctagaaaggagtgcaaagctggggggatcctctctcactgggggtgcagtctaggccctagaaaccctgaggcaccagcctgaagacagaaaatgggccagaaccactcagtgaggttgtccagaactgagaccactttccctgcagagcatgtggggaccgaacaggcgatctcagagggagcctggtcctcatagaggtggggaaaatgggcaccggatcacaccacggcacagagggtggagcagcccaacctagcctgggatcctgcttccatggaccagccgtgtgaccctgagcaagtcccttcccacctctgtgcttccacgatctcatctacggaagggcgaggaaatctcggactcttggatttgttg

SEQ ID NO: 2927 - DNA, 1958 bp, Homo sapiens
  MAP TO AC005529.7; EXPRESSED IN HELA, SIGNAL = 1.3; EXPRESSED IN HBL100, SIGNAL = 0.94; EXPRESSED IN HEART, SIGNAL = 1.3; EXPRESSED IN ADULT LIVER, SIGNAL = 1.1; EXPRESSED IN FETAL LIVER, SIGNAL = 1.3; EXPRESSED IN BRAIN, SIGNAL = 5.6
tctcataatgcccaccattcacattcctgttccaccaaaacccatatcattcgatgtcagtgaccttcaggatagtctaggaagaacccaaatagtgaatttgccctgagtttatactaatgtgttccgtgatccatcctgcagaaaactcctggaaggtgaagagtgtcggattggctttggcccaattcctttctcgcttccagaaggactccccaaaattccctctgtgtccactcacataaaggtgaaaagcgaagagaagatcaaagtggtggagaagtctgagaaagaaactgtgattgtggaggaacagacagaggagacccaagtgactgaagaagtgactgaagaagaggagaaagaggccaaagaggaggagggcaaggaggaagaagggggtgaagaagaggaggcagaagggggagaagaagaaacaaagtctcccccagcagaagaggctgcatccccagagaaggaagccaagtcaccagtaaaggaagaggcaaagtcaccggctgaggccaagtccccagagaaggaggaagcaaaatccccagccgaagtcaagtcccctgagaaggccaagtctccagcaaaggaagaggcaaagtcaccgcctgaggccaagtccccagagaaggaggaagcaaaatctccagctgaggtcaagtcccccgagaaggccaagtccccagcaaaggaagaggcaaagtcaccggctgaggccaagtctccagagaaggccaagtccccagtgaaggaagaagcaaagtcaccggctgaggccaagtccccagtgaaggaagaagcaaaatctccagctgaggtcaagtccccggaaaaggccaagtctccaacgaaggaggaagcaaagtcccctgagaaggccaagtccccagagaaggaagaggccaagtcccctgagaaggccaagtccccagtgaaggcagaagcaaagtcccctgagaaggccaagtccccagtgaaggcagaagcaaagtcccctgagaaggccaagtccccagtgaaggaagaagcaaagtcccctgagaaggccaagtccccagtgaaggaagaagcaaagtcccctgagaaggccaagtccccagtgaaggaagaagcaaagacccccgagaaggccaagtccccagtgaaggaagaagccaagtccccagagaaggccaagtccccagagaaggccaagactcttgatgtgaagtctccagaagccaagactccagcgaaggaggaagcaaggtcccctgcagacaaattccctgaaaaggccaaaagccctgtcaaggaggaggtcaagtccccagagaaggcgaaatctcccctgaaggcggatgccaaggcccctgagaaggagatcccaaaaaaggaagaggtgaagtccccagtgaaggaggaggagaagccccaggaggtgaaagtcaaagagcccccaaagaaggcagaggaagagaaagcccctgccacaccaaaaacagaggagaagaaggacagcaagaaagaggaggcacccaagaaggaggctccaaagcccaaggtggaggagaagaaggaacctgctgtcgaaaagcccaaagaatccaaagttgaagccaagaaggaagaggctgaagataagaaaaaagtccccaccccagagaaggaggctcctgccaaggtggaggtgaaggaagacgctaaacccaaagaaaagacagaggtggccaagaaggaaccagatgatgccaaggccaaggaacccagcaaaccagcagagaagaaggaggcagcaccggagaaaaaagacaccaaggaggagaaggccaagaagcctgaggagaaacccaagacagaggccaaagccaaggaagatgacaagaccctctcaaaagagcctagcaagcctaaggcagaaaaggctgaaaaatcctccagcacagaccaaaaagacagcaagcctc

SEQ ID NO: 2928 - DNA, 493 bp, Homo sapiens; identical to SEQ ID NO: 362
  MAP TO AP000129.1; EXPRESSED IN HEART, SIGNAL = 0.79; EXPRESSED IN PLACENTA, SIGNAL = 0.89; EXPRESSED IN BT474, SIGNAL = 2.1; EXPRESSED IN BONE MARROW, SIGNAL =   1; EXPRESSED IN FETAL LIVER, SIGNAL = 0.93; EXPRESSED IN LUNG, SIGNAL = 0.69; EXPRESSED IN HELA, SIGNAL = 0.82; EXPRESSED IN ADULT LIVER, SIGNAL = 0.86; EXPRESSED IN HBL100, SIGNAL = 1.7

SEQ ID NO: 2929 - DNA, 427 bp, Homo sapiens
  MAP TO AC009892.2; EXPRESSED IN FETAL LIVER, SIGNAL = 9.3; EXPRESSED IN ADULT LIVER, SIGNAL =  12; EXPRESSED IN BT474, SIGNAL = 8.6; EXPRESSED IN BRAIN, SIGNAL = 7.6; EXPRESSED IN BONE MARROW, SIGNAL = 7.6; EXPRESSED IN LUNG, SIGNAL =  11; EXPRESSED IN PLACENTA, SIGNAL = 9.6; EXPRESSED IN HELA, SIGNAL =  10; EXPRESSED IN HBL100, SIGNAL = 8.4; EXPRESSED IN HEART, SIGNAL = 7.9
caagggagggagagacagagagagacaggggatgggcggggaggggagactcagagaaaacagagacagagagactaagggtcccagggagaggcctggggaggtctcagctcagaacaaggtggggcagcccctcacccatccttcttctctctaggacagttctatgacagaccctctctctcggtgcagccggtccccacagtagccccaggaaagaacgtgaccctgctgtgtcagtcacgggggcagttccacactttccttctgaccaaggagggggcaggccatcccccactgcatctgagatcagagcaccaagctcagcagaaccaggctgaattccgcatgggtcctgtgacctcagcccacgtggggacctacagatgctacagctcactcagctccaacccctacctgctgtctc

SEQ ID NO: 2930 - DNA, 449 bp, Homo sapiens
  MAP TO AC011356.1; EXPRESSED IN BT474, SIGNAL = 0.97; EXPRESSED IN HEART, SIGNAL = 0.86; EXPRESSED IN BRAIN, SIGNAL = 0.93
tagctgctggcttctccaagtgcaacctgtgcccggaagcatgcctggagcctggccagcctccggaagcaagaagagaagtaaaacctgctcaccctactccctcggaccctgggcttgggagatgggataactagtgccagcccaggatgttagttaggactaacctgagctccagaatcagataaaccaaggctcccttccccatgctactactgcctaactgtgtggccttgggcaacttacttagtctttctatgcctcctttttttcatctgtaaaatggggataatgatatcaacctcacaggcttgatttggagactcagtgtacaacacttccaaagcatctagctcagagccttgtacataggaaccactccataaatggcccttcttgtcaccatcatcatggacacccccctggccagagttcattaattcaacatg

SEQ ID NO: 2931 - DNA, 422 bp, Homo sapiens
  MAP TO AC012111.1; EXPRESSED IN ADULT LIVER, SIGNAL = 1.3; EXPRESSED IN BONE MARROW, SIGNAL = 1.9; EXPRESSED IN BRAIN, SIGNAL = 1.6; EXPRESSED IN LUNG, SIGNAL = 1.2; EXPRESSED IN PLACENTA, SIGNAL = 1.2; EXPRESSED IN HELA, SIGNAL = 1.3; EXPRESSED IN HBL100, SIGNAL = 1.6; EXPRESSED IN HEART, SIGNAL = 2.5; EXPRESSED IN BT474, SIGNAL = 1.6; EXPRESSED IN FETAL LIVER, SIGNAL = 1.5
ctgatgcaacctgtttggtgttataggcagatgctaagttacaggctttgtggtggatactgggcaacagatgtggtaagaaggggagcagcccaagatgaaatttcctccaaaacaccagaggttcctgtctcaagcagagaaatcataatactgcaacacatactagtttgcaaagggcaagtcgctatggccaaaaatgattgattcagaggaagaggaagggaaggaagaagaaagagaggaagaggaggggaaggacatggaggagggaaaagaaaaggagaaggagggagagggagaggagaaggaggaagaggatgaagaggaagaagaaaagaaggaggggaggaggagttttaactgaatactgtatttttgccttaatgtaggaaagatgaaggggagaaggaggtaactgc

SEQ ID NO: 2932 - DNA, 461 bp, Homo sapiens
  MAP TO Z95325.2; EXPRESSED IN ADULT LIVER, SIGNAL = 1.4; EXPRESSED IN BRAIN, SIGNAL = 0.77; EXPRESSED IN HEART, SIGNAL = 0.93; EXPRESSED IN PLACENTA, SIGNAL = 1.2; EXPRESSED IN HELA, SIGNAL = 1.6; EXPRESSED IN LUNG, SIGNAL = 1.2; EXPRESSED IN FETAL LIVER, SIGNAL = 1.3; EXPRESSED IN HBL100, SIGNAL = 1.4; EXPRESSED IN BONE MARROW, SIGNAL = 1.4; EXPRESSED IN BT474, SIGNAL = 1.4
cccatcctatattcccttagccttcagcaagcacctcagcaggttgtgttttttttccctggtaacatgacccaaatcttcattcctgaggtatctgggccatttgtaatcctgcctggattgcactgttgtagttctcattgaccttaatgacagggcatggtaataccaagagacacctaatggatctcctgaattccatgcatactcttccttacctccattgtggagtagtagactgatttcatcctgatagtctgggtcaatcaccctagccaacactgtaactgccttcttagcctgttgacttaaaggtaggaggagcccaaagtgtccaggtggcaatattaacttccagttcaatgggattgttgtgtctcctggtggcagcattcctccagctggaactaagacctctaggccaggagaatgtaatgttgtgggaacggaaagcaaaaatt

SEQ ID NO: 2933 - DNA, 405 bp, Homo sapiens
  MAP TO AC011236.1; EXPRESSED IN HEART, SIGNAL =  10
cttctcaaatatcatggcagcaaaagttcagctgttgaagaacttgatgtcactgagcatttaactaacctttcaaaaaacatgattgcagcaagactttgaggtgaaaagtccagattttataaaccattccatttttatgcttttgtcttttgagcatttttgtcatcgctttaccttgatttcctaataaaagatattttaaggaaattcccatctggtctcaactgaagaaagaagtacaggaagttgccctcttccaggctatgaaagtcagggagatccataggcccaaggggtcaggtgtaaagggtagctgggccagcaagggtggagacagtgagatctccctgggtctgcagttgcacagatgggagcagagaaggtaagaatgaggggcagctg

SEQ ID NO: 2934 - DNA, 458 bp, Homo sapiens
  MAP TO AC009301.1; EXPRESSED IN PLACENTA, SIGNAL = 1.1; EXPRESSED IN BT474, SIGNAL = 0.87; EXPRESSED IN LUNG, SIGNAL = 1.2; EXPRESSED IN ADULT LIVER, SIGNAL = 1.3; EXPRESSED IN HEART, SIGNAL = 1.3; EXPRESSED IN BONE MARROW, SIGNAL = 1.2; EXPRESSED IN HBL100, SIGNAL = 0.83; EXPRESSED IN FETAL LIVER, SIGNAL = 0.93; EXPRESSED IN HELA, SIGNAL = 0.96; EXPRESSED IN BRAIN, SIGNAL = 1.4
gcatgattttgatgccgtagatggggtggcctgagggacgtagcaagtaatgaggctggaaagctagagataggcctgttcttgatggtctgggatgctatgctaaggagtttgtactttgtcttagaggcagttaaagtttttagcagctgagtggcagagtcagatttgcaaatcagaaagacaactttggcagccatatgtagaataaaaggagaagagcaggagatagagtggggtcgggtttaggagtccattgtagtactccaggcttgaggggatggagaagaggcaggctgaactcaaagagcagttttggagttagaaccagcaggatttggtctggttgatgggctgggtgaagcttcttcatttagtgctgcggggagggaagacaggtgatgattctgttaacagaaatagggaacttaaggaagggagcatgtttggggagaaga

SEQ ID NO: 2935 - DNA, 490 bp, Homo sapiens
  MAP TO AC007393.3; EXPRESSED IN HEART, SIGNAL = 8.9; EXPRESSED IN HBL100, SIGNAL = 5.9; EXPRESSED IN BRAIN, SIGNAL =  10; EXPRESSED IN BT474, SIGNAL = 5.9; EXPRESSED IN BONE MARROW, SIGNAL =  11; EXPRESSED IN FETAL LIVER, SIGNAL = 6.6; EXPRESSED IN HELA, SIGNAL =  10; EXPRESSED IN ADULT LIVER, SIGNAL =   9; EXPRESSED IN PLACENTA, SIGNAL = 9.1; EXPRESSED IN LUNG, SIGNAL =  10
gcaaatccctgtccagctctgaactggcgccatccttgtaattgatccttgtagcaaagaataattatctcaaaacaattatgtaattctcttcattcttcctttaaaaaccttgtcttcctttacctccctgaagatgcagagtttactacagcatgtgctttcccattgcaatgccaatcctcaaacagatatctttttcttttagagtccctctctctgttatttaagttgagagagtatatatcccaaataaagatataaaaactagtatgcatactaaatagaaaattaccttgatatttccctgagataaacagtctgcatagctttcttcaaatgaggttcaatatttctccacagtttgcgagtatcacgttcacttgctaccccaaagggaagaaaatttcagtaatttatatcttgtaaaaacctttctcaaaataaatattaatgagtaaaattacacagttaccttctcctttaacca

SEQ ID NO: 2936 - DNA, 436 bp, Homo sapiens
  MAP TO AC009961.3; EXPRESSED IN BRAIN, SIGNAL = 3.2; EXPRESSED IN LUNG, SIGNAL = 3.8; EXPRESSED IN HELA, SIGNAL = 3.8; EXPRESSED IN ADULT LIVER, SIGNAL = 4.1; EXPRESSED IN FETAL LIVER, SIGNAL = 3.5; EXPRESSED IN BT474, SIGNAL = 3.5; EXPRESSED IN BONE MARROW, SIGNAL = 3.7; EXPRESSED IN PLACENTA, SIGNAL =   4; EXPRESSED IN HEART, SIGNAL =   3; EXPRESSED IN HBL100, SIGNAL = 3.8
ctgagaagcttcagatgccctattatcgggaacttcagaagctgatggtacattactacgggactgtgaagctgtcaagattcttggagaaacgtaagaattttcagaattcaatgatcttgtattcaaggaatcctgactagatcttcgtgaaaaaaaggtagatgacatgctagaagctatgcgtgacagcaatctcctcgttgtccgcctaccttcattgtcagaagattcttgaaatggtctttgagatgaaacaaccctttctgaattgcttatgattggggcttcatctctacttgaactgtaagaaaatccaggctgcgtattgcttcgggaagattctgattctcttgaagaaaaatttgatcttaaagaatttctggagtccctagaacttagtatggtctgatgttcagaaggcaattggtggttt

SEQ ID NO: 2937 - DNA, 442 bp, Homo sapiens
  MAP TO AL122018.4; EXPRESSED IN PLACENTA, SIGNAL = 4.4; EXPRESSED IN HBL100, SIGNAL = 2.5; EXPRESSED IN ADULT LIVER, SIGNAL = 2.3; EXPRESSED IN BT474, SIGNAL = 2.3; EXPRESSED IN BONE MARROW, SIGNAL = 2.7; EXPRESSED IN BRAIN, SIGNAL = 2.6; EXPRESSED IN HEART, SIGNAL = 2.2; EXPRESSED IN FETAL LIVER, SIGNAL = 2.8; EXPRESSED IN LUNG, SIGNAL = 2.3; EXPRESSED IN HELA, SIGNAL = 1.7
tgaaggcactgacagaatgcccagctttttattgtcaccatcatttgattaatgaccagatgtttaaacatcaaaatacaggaatagcacagtgtcagaatcaaagacagtccttttaattgaatatggttcactctatgaaaaatttgctttagataaattatatacatctatataattatagatgtaatgtatgattatatgtatatgtaattatgttatataataatatgtaattataatatatgtaatctttaacaattttgccacagactcatgaaaactttgtcatagacaacagctgttccgggcagagggaagtcatagacaacagctggccccagggctgtgcttacaaggggcccctggcccatggagcaatcctgggctcccaatggggtgagagggacccttgccagcccctcactccccacctcacact

SEQ ID NO: 2938 - DNA, 486 bp, Homo sapiens
  MAP TO AC007391.2; EXPRESSED IN FETAL LIVER, SIGNAL = 0.83; EXPRESSED IN LUNG, SIGNAL = 1.2; EXPRESSED IN ADULT LIVER, SIGNAL = 0.95; EXPRESSED IN HEART, SIGNAL = 0.99; EXPRESSED IN BONE MARROW, SIGNAL = 0.81; EXPRESSED IN HELA, SIGNAL = 1.2; EXPRESSED IN BRAIN, SIGNAL = 1.2; EXPRESSED IN PLACENTA, SIGNAL = 0.95; EXPRESSED IN BT474, SIGNAL = 0.78; EXPRESSED IN HBL100, SIGNAL = 0.98
agcaagggttcgttgacaaggaaaaactggcctagatctcagtcgggggaactttatggacgccttctgcagcaaagctaaggaaaatgaaaatcgctaaaaatgtaagaacgacgacattaagtagaagggtaaaaaaaaagtttcagaggaataaaataacattttctaggatacaaattaaggcatttaaaagttcttgttccatttgtggctatgtctcataaaagctgtgtcgcaccaagcagcagttcagggtgtaacttatccttcctaatcaaagatgacaccgatagtcttatttcctgtggggatgggtgtgattgaagacacagttacgtccatgccatcaatctgtgtgtggaaaagtcggcaggtcgcgcgcacacacttgtcgcttgaatcgtatgtgtgcctgcagacggcaaggcctatgcctctgactgcgttcacctgaaataaaatacccaaccggcaatacagtag

SEQ ID NO: 2939 - DNA, 378 bp, Homo sapiens
  MAP TO AC012127.1; EXPRESSED IN BONE MARROW, SIGNAL = 1.3; EXPRESSED IN HBL100, SIGNAL = 1.2; EXPRESSED IN HEART, SIGNAL = 2.2; EXPRESSED IN BT474, SIGNAL = 1.3; EXPRESSED IN FETAL LIVER, SIGNAL = 1.2; EXPRESSED IN ADULT LIVER, SIGNAL = 1.4; EXPRESSED IN BRAIN, SIGNAL = 1.1; EXPRESSED IN LUNG, SIGNAL = 1.4; EXPRESSED IN PLACENTA, SIGNAL = 1.2; EXPRESSED IN HELA, SIGNAL = 1.5
attactgggaaaaggggcaggggaccccaatggcctgtctcatagaaggccatccatctctcattccaaggctctccagtccagctctgagagattatggtttgcacttagagaagattacagctgctccttgagaaaacacagtcagcccccttgtcaaaagtaccagtgcctttgaatactgatatggaagaacacttaattaagcacaagcatcctggctgtgggtcttgcattgttatgcagttggataactttgacaagtattccaaagagggtgagggatgcagggatgagaaattcattctgttgttcttttggataaacattgactcctggcctcggaagttgacattcactaatccttgaccgtttggg

SEQ ID NO: 2940 - DNA, 490 bp, Homo sapiens
  MAP TO AC011632.2; EXPRESSED IN BT474, SIGNAL = 1.3; EXPRESSED IN FETAL LIVER, SIGNAL = 1.7; EXPRESSED IN BONE MARROW, SIGNAL = 1.5; EXPRESSED IN LUNG, SIGNAL = 1.4; EXPRESSED IN BRAIN, SIGNAL = 1.3; EXPRESSED IN HBL100, SIGNAL = 1.3; EXPRESSED IN PLACENTA, SIGNAL = 1.4; EXPRESSED IN HELA, SIGNAL = 1.6; EXPRESSED IN ADULT LIVER, SIGNAL = 1.5; EXPRESSED IN HEART, SIGNAL = 1.5
cagagcttcttgcacaccagctgttttttattcttcctgagggtagcttaaaccatgactctaaaccacaaaccacactagtttcttagaataagaattatctccaaaagaataaaattgcaagacccacacatagagtaaaatttgtaggatgttctctgaatttaagtcaattgaataaattaatttgaaaaactttgaggtccctctatgagagaaagagatccaaagaaaacaaacatttttgtctttaaagtctaaacaatgcagtaaaaacaaaacaaatggaaaaaaattccactaaggatataattcagtataatacactgctgtataagattgatgtaataaaagaggtacagaaaaataccatggaggagttgaagaagggagcgataatctctagttggcagatcatgaaaggctccttggaggaggagcatgtgaaatagatgcccaggaagggtcaaggttggctgttacagaaggc

SEQ ID NO: 2941 - DNA, 403 bp, Homo sapiens
  MAP TO AC012132.1; EXPRESSED IN PLACENTA, SIGNAL = 2.5; EXPRESSED IN HELA, SIGNAL =   2; EXPRESSED IN ADULT LIVER, SIGNAL = 2.4; EXPRESSED IN HEART, SIGNAL = 2.5; EXPRESSED IN BT474, SIGNAL = 2.3; EXPRESSED IN FETAL LIVER, SIGNAL = 2.4; EXPRESSED IN BRAIN, SIGNAL =   2; EXPRESSED IN BONE MARROW, SIGNAL = 2.6; EXPRESSED IN LUNG, SIGNAL = 2.3; EXPRESSED IN HBL100, SIGNAL = 2.3
atggacagttgggttgcttccaccgttgggctattgtgaataatgctgctgtgaacatgggaatacaaatatttcttagaaactctcctttcagttcttttgggtatataccaaaaagtagaattgccaaatcatatagtaactctatttttaattttctgagggacaccatactattttctatagtctaccaagcccttccctcattcctttgcccatgacctctgccttcccagccacattaactccacctgctgaaacactctcacctcttagaaacaatttcacttggtactggcattgcatagtcaaaatgctccctccaaattcgaatgtctatcagcctatgattcatcttcatagctcttatgcatccatgtatgtgtcctcggaaacatgcatg

SEQ ID NO: 2942 - DNA, 392 bp, Homo sapiens
  MAP TO AC010877.2; EXPRESSED IN FETAL LIVER, SIGNAL = 1.5; EXPRESSED IN LUNG, SIGNAL = 1.5; EXPRESSED IN BONE MARROW, SIGNAL = 1.3; EXPRESSED IN HELA, SIGNAL = 1.4; EXPRESSED IN HEART, SIGNAL = 1.1; EXPRESSED IN BT474, SIGNAL = 1.6; EXPRESSED IN ADULT LIVER, SIGNAL = 1.5; EXPRESSED IN BRAIN, SIGNAL = 1.3; EXPRESSED IN PLACENTA, SIGNAL = 1.4; EXPRESSED IN HBL100, SIGNAL = 1.5
tcagcaattaacaaaggaggctgagacagagttacaagtgactgagaagcaagtcaataaagctcaaataaatagaatagatccagagaagactctatatttacaaatgttttcaactcggcattcacctactggtgttattgtccaagaacaggacttagtagagtggctttttcttccactttttctttccatttaggaaaatgtcaataattttcctaaaacaaagctgtttcagtttttgaaattaactaattggattctccctaaaataactaaatttaaaccaattgaaggtgctgagaatgttttcacagatgggtctagtaacggtaaagcttcttattttggattaaaaggtaaagttttccagacgccctatactgcagctc

SEQ ID NO: 2943 - DNA, 379 bp, Homo sapiens
  MAP TO AC009973.3; EXPRESSED IN FETAL LIVER, SIGNAL = 1.3; EXPRESSED IN BRAIN, SIGNAL = 1.1; EXPRESSED IN LUNG, SIGNAL = 1.2; EXPRESSED IN HELA, SIGNAL = 1.3; EXPRESSED IN HEART, SIGNAL = 1.1; EXPRESSED IN ADULT LIVER, SIGNAL = 1.9; EXPRESSED IN BT474, SIGNAL = 0.98; EXPRESSED IN BONE MARROW, SIGNAL = 1.1; EXPRESSED IN PLACENTA, SIGNAL = 1.4; EXPRESSED IN HBL100, SIGNAL = 1.4
caatggtctaaacctggctgtgtacaaaataccattactgtgtgcgggtttttttttctttttctttttttcttttttttttttttttttgccagaagtatgatccagttgtcagtaataagatatacagggagacaggctaggcatcctctaggaatacttttgctttctagataaacaacaataggaacacaacagtatcttttcttcttcctgactcaaatgcaatggacacaatgacttcaagccttgacagccattcagtaaccgtgagaaccacttgctgcttagaatggcagagcagaaacacacagagcctggcccttgctggaaccactgtgcaaacgaaccatgtcgtgcaaggaaaaacaaaccccaa

SEQ ID NO: 2944 - DNA, 476 bp, Homo sapiens
  MAP TO AC010136.2; EXPRESSED IN HEART, SIGNAL = 0.95; EXPRESSED IN PLACENTA, SIGNAL = 1.1; EXPRESSED IN HBL100, SIGNAL = 0.98; EXPRESSED IN ADULT LIVER, SIGNAL = 1.1; EXPRESSED IN FETAL LIVER, SIGNAL = 1.5; EXPRESSED IN BONE MARROW, SIGNAL = 1.4; EXPRESSED IN LUNG, SIGNAL = 1.8
gcccagtctgctatgaggacatgggcaacaatacagcaaactggtggatgctgttacggatcctgccccagtcctttggcttcatcgtgccgctgcgatcatgctgttctgctacagattcaccctgcatacgctgtttaaggcccatatggggcagaagcactggaccatgtgggtcatctttgctgttgtcctcattttcctgctctgctggctgccctacaacctggtcctgctggcagacaccctcatgggaacccagatgaccaatgagacctgtgagcgccgcaacgacatcaaccaggccctggatgccactgagattctgggcatccttcacagctacctcaatcccctcatctacgccttcattggccagaagttttgccatggacttctcaagattatagccatacacggcttgatcagcaaggactccctgcccaaagacagcaggccttcctttgttggctctt

SEQ ID NO: 2945 - DNA, 485 bp, Homo sapiens
  MAP TO AC010816.2; EXPRESSED IN BRAIN, SIGNAL = 2.3; EXPRESSED IN LUNG, SIGNAL = 2.7; EXPRESSED IN HELA, SIGNAL = 2.9; EXPRESSED IN ADULT LIVER, SIGNAL = 3.2; EXPRESSED IN FETAL LIVER, SIGNAL = 2.9; EXPRESSED IN BT474, SIGNAL = 2.5; EXPRESSED IN BONE MARROW, SIGNAL = 2.7; EXPRESSED IN PLACENTA, SIGNAL = 2.8; EXPRESSED IN HEART, SIGNAL = 2.8; EXPRESSED IN HBL100, SIGNAL = 2.8
ctgtgcacatgataggcaggacaaagcacttctggttgttctcttcgatgcagatgttgacccagggacagtgggggtccaccctacgaatgcaccccttacaaacactgcagcggcaggctgggtcaggcttgaggctgcagcactgggacacgagtataccacatgcctgggcttcatctgtaaactctggatgaattatttgtggcatttcatttgggcactgctccggtgtctgtcagcatggcctggcagtgggaggccagggccaagaaagtcagcaggttgaacacaattccattgatggtgctgtaagcatagtctccggatggaatcagcatgaaaaagaggaccacaaactccgcatagaggaccagaaaccaggtgatgatggcacaggcgatgccacagccatcgtggataagccacatggttctcataggaccagggtagggaggtcggacaggcatctccagctatgggta

SEQ ID NO: 2946 - DNA, 1959 bp, Homo sapiens
  MAP TO AC002041.1; EXPRESSED IN ADULT LIVER, SIGNAL = 4.5; EXPRESSED IN BT474, SIGNAL = 4.4; EXPRESSED IN BRAIN, SIGNAL = 3.8; EXPRESSED IN BONE MARROW, SIGNAL = 3.9; EXPRESSED IN HBL100, SIGNAL = 4.2; EXPRESSED IN HEART, SIGNAL =   4; EXPRESSED IN PLACENTA, SIGNAL = 4.7; EXPRESSED IN FETAL LIVER, SIGNAL = 4.2; EXPRESSED IN LUNG, SIGNAL = 4.5; EXPRESSED IN HELA, SIGNAL = 4.3
atgaaggtgaggtgacctggtcacgtgacagtgaggtgacctgggggatgtgtgaggtgacctgggggatgtgtaaggttacctgggggtatgtgtgaggtgaacttgggctcatgtgaggtgacccagggtgcatgtgtggtggcttgggtgcgtgtgaggttacccggacatgcatgaggtgacatggggaactcatgaggtgacttgggcatgtatgatgtgacctaaggcatgtgtgaggtgacctgggggacgtgtgaggtgacctgtgggacgtgtgaggtgacctgggggatgtgtgaggtgacctgtgggaatgtgtgaggtgacctgtgggacgtgtgaggtgacctgtgggacgtgtgaggtgacctgggggatgtgtgaggtgacctggggtacgtgtgaggagacctgtgggacatgtgaggtgacgtggcggatgtgtgaggtgacgtggggaatgtgtgaggtgacctggggtatgtgtgaggtgacgtggcgaatgtgtgaggtgacctgggggacgtgtgaggtgacctgtgggacatgtgaggtgacctgggggatgtgtgaggtgacctgggggacgtgtgaggtgacctgggggatgtgtgaggtgacctgtgggacatgtgaggtgacgtggcagatgtgtgaggtgacgtggggaatgtgtgaggtgacctgggggacgtgtgacgtgacgtggggaatgtgtgaggtgacctggggaacgtgtgaggtgacctgggggatgtgtgaggtgacctgggggacgtgtgaggtgacctggggaatgtgtgaggtgacctggggaacgtgtgaggtgacctgggggatgtgtgaggtgacctgtgggacatgtgaggtgacctggggaatgtgtgaggtgatgtgggtgcgtttgaggtgacgtgggggatgtgtgagcttagcaggagtgtgtgtgaggtgacatgaggaatatgtgaggtgacctgcctgatgtgtgaggtgacctgagcacatgtaaggtcacctaaggcgcatctgaggtgacatgggggacgtgtgaggtgacctggggaacgtgtgaggtgacctgtgggacatgtgaagtgacctggggaatgtgtgaggtgacctgtgggacatgtgaggtgacctggggaatgtgtgaggtgatgtgggtgcgtttgaggtgacgtgggggatgtgtgagcttagcaggagtgtgtgtgaggtaacatggggaatatgtgaggtgacctgcctgatgtgtgaagtgacctgagcacatgtgaggtcacctaaggcgcatctgaggtgacatggaggatgtgcgaggtgaccttgggtgagtgtgaggttacctgtgggatgtgtgaggtgaattgggacttgtgtgaggttacctgggaaatgtttgaggtgacctgcgggatgtgtaaggtgacattggggatgtgtgaggtgactcagggcacatgtgaggtgaccttggggatgtgcaaggtcacactgtgtgagtgtgaggtcatgtgggatatttcaaactttgtaaggaaagcctgcaacaatatatggctctagaagcttcacactccaacactgttaatgcgcacatcctcaaggaactctaaatgtttccaggttagcttaaatgccatggagtgacacctgccccaggtacactcatatatgcatcctgggtctccctatcaacccctatcctcaaattttcagttcatgtttgctccatgatatcaactctgatatgctgaggttttttttttttttatctgtagttgttcaggtttgctgtttcactctcattactctgggctcagtcctctcctcaggtgtcccacttcagagcttgctatgtaataggagacatgcaaataggaccctcccttttctgatgaaaagcagcccagccctgaccctgcagccgtgggagagaagccccag

SEQ ID NO: 2947 - DNA, 494 bp, Homo sapiens
  MAP TO AC010826.2; EXPRESSED IN BONE MARROW, SIGNAL = 4.7; EXPRESSED IN LUNG, SIGNAL = 3.1; EXPRESSED IN HELA, SIGNAL = 3.8; EXPRESSED IN HBL100, SIGNAL = 3.5; EXPRESSED IN HEART, SIGNAL = 4.2; EXPRESSED IN BT474, SIGNAL = 2.6; EXPRESSED IN BRAIN, SIGNAL = 3.6; EXPRESSED IN PLACENTA, SIGNAL = 3.4; EXPRESSED IN ADULT LIVER, SIGNAL = 3.8; EXPRESSED IN FETAL LIVER, SIGNAL = 3.2
ctcaagcgctgaaaagagtgcctggcccatcatacattattaactcatttattgaataaatgagttaagtagcttccatctaacaatattttatttcacttggatctcaacatttttttaaaaaaaaactttaagaaatacatgtgtttctttttctcctccagtagttctatttgacaagacgtgttatgattgttcaatctgattctctgccttctggaactcctcagataggcagttgtttttttctctgatgattcagtgacgctctgaccttgtttctagttttatttcttctccttctcctcctcctcctccttcttctcctcctccttcctcttcctcttcctcttgttgtcttcttcttctccttcttcctcctcaccttcctcctcctcttccccttccttttcctcttccccttccccctcctcctcttcttctgcttctgcttctcctcctcctcctccttctccttctcctgctcctccttt

SEQ ID NO: 2948 - DNA, 398 bp, Homo sapiens
  MAP TO AC010857.2; EXPRESSED IN FETAL LIVER, SIGNAL =  12; EXPRESSED IN BRAIN, SIGNAL = 7.2; EXPRESSED IN LUNG, SIGNAL =  12; EXPRESSED IN HELA, SIGNAL =  13; EXPRESSED IN HEART, SIGNAL = 6.4; EXPRESSED IN ADULT LIVER, SIGNAL =  15; EXPRESSED IN BT474, SIGNAL = 8.9; EXPRESSED IN BONE MARROW, SIGNAL = 8.4; EXPRESSED IN PLACENTA, SIGNAL =  13; EXPRESSED IN HBL100, SIGNAL =  12
tcctctctaccagctccctggaaaaggaccactcaagccaaattattccaaacaaacaaaaggcaagctgtaagagtaggagatacacaggttggccaaatggtaaatcacattgcctatagaaaattaaaagtccatggaatattattaaatgtcattcatgatcatactctaggctttctcctcaataataatgaatacctattgttttgtttccttaacaccacaatactcacctccctttttcttggaatgaatggtcacctcccctggcattgtcacatttttcccaggaattttcatattgctgtagagccctaacctgtttttatagccttcataagttgtttcagaggtggggctctgatccaagctgaggcaatcagaggacttccctg

SEQ ID NO: 2949 - DNA, 489 bp, Homo sapiens
  MAP TO AL118512.2; EXPRESSED IN HEART, SIGNAL = 1.2
caacaattttctactttactgtgtgctttccttaaagaatatctaatatgcgcttatttcagcaaggtaaataatgtgaggtcaggcatagaaggataaatgatgagactgacctggggaaaaggtatatatgtttaaaatgatgggttataaataaatgactttcagtacttgaggcctatatctcccatccaggatgctagattacgttagccagtgaatggacatattgagcctctttctacttaccatggacacttaagtcatattttttgtcagtcattcctgctacattcacagcaacacacacataacggcctgtgtcagatacatgaatgttcttcagctgaaggatgtgaccttcatccagtatttctactccctttgccttgatcaaggggtggccatctttcatccaggtcactgttggtggtggaataccctgcacctcacactccaaggagatactcttccctcgggtcacaataa

SEQ ID NO: 2950 - DNA, 495 bp, Homo sapiens
  MAP TO AC011351.1; EXPRESSED IN HEART, SIGNAL = 0.92
catttacccaatttatagagcacttgtactacatacaaatagtttataatcctttgaaaaggtagcatgacagaacaatatgaaagaaaatccagcgccaaactttgcttaatctaagtgttgttatttttctttcctactcaaaacacagtgtggaagagttgaaagtacttgggctttaaagtgaagctgatccgggtgtgagtgtggattctacctctaactagctggatgatctggttactaatgtcagtgttccagtctgcggcagggaaaatcatagtactaaccttacgggttgttagcattattcagtaaaacaatatatggaaaacacctcacataatgctaggaacaccacagtttctcagtaaaatagaagggatcatcattatcattaataatagtggaaacagcagtattattatttctacaactagtagtagcagcagtagtactgttctagaaagaagcatgttacaaatgttgggtaca

SEQ ID NO: 2951 - DNA, 418 bp, Homo sapiens
  MAP TO AC011592.2; EXPRESSED IN BRAIN, SIGNAL = 1.4; EXPRESSED IN HELA, SIGNAL = 1.4; EXPRESSED IN PLACENTA, SIGNAL = 1.4; EXPRESSED IN ADULT LIVER, SIGNAL = 1.5; EXPRESSED IN LUNG, SIGNAL = 1.3; EXPRESSED IN BONE MARROW, SIGNAL = 1.4; EXPRESSED IN HEART, SIGNAL = 1.2; EXPRESSED IN HBL100, SIGNAL = 1.8; EXPRESSED IN FETAL LIVER, SIGNAL = 1.5; EXPRESSED IN BT474, SIGNAL = 1.2
tgttgtgactgcatgatccccaaatttcagtcttctctttggcagatactaagtggatgggcatcttatccaaggatatccaatctacaggtggctctatctaaagagtgacttaccaaacccaacttctctctcagaaatttggccatgtaagaaaagccaactcagagcaggaaagagtagcagtagagatagtcacaaaaatattaatcagagcatggcaattgctggagttatgagaaggaagcacatttaactcttgttactgagtctatgatatagtactcttgtttcctcagagccctggggcctgaaccatactcaggtatgataatctggtcactgtgaggccaggtcaacttcagtttgttttgttttttcttttttgatgcttcctgggttatttggagatcttgcc

SEQ ID NO: 2952 - DNA, 487 bp, Homo sapiens
  MAP TO AC007561.2; EXPRESSED IN LUNG, SIGNAL = 1.2; EXPRESSED IN HELA, SIGNAL = 0.91; EXPRESSED IN PLACENTA, SIGNAL = 0.71; EXPRESSED IN FETAL LIVER, SIGNAL = 0.72; EXPRESSED IN ADULT LIVER, SIGNAL = 0.67; EXPRESSED IN HEART, SIGNAL = 0.84
aagttttctcatcctttccaagtatctatttagtctcctatccttttctaaagaaatatttccaagaaagtagacagccttcctgtaatttctctcaagctatccttagtgaaggggaagaagagaaagtcaccatgggtcatataagaactcataggagctttgaagtctttgttcttcctctttatcatcactaaagcaattaacaggcaaaggccaagctactgaggaatgcctcatgacatcactcaccatgtggaatgccatcccagatgtccagccaatcgtacttgcagtccccctctcccacctgcaaagggtcatgctccaggtcaaagatcaggaactgcaggatgatctccatcttgggtttggccaggatggtaaaggtgcagtccaagttgtgtggatacttctcaggaaacccaggagattcgatggtcccgttggggcttgtgaagttttttgagcaatcttcagagcctgt

SEQ ID NO: 2953 - DNA, 426 bp, Homo sapiens
  MAP TO AC011700.3; EXPRESSED IN PLACENTA, SIGNAL = 0.92; EXPRESSED IN HBL100, SIGNAL = 1.2; EXPRESSED IN FETAL LIVER, SIGNAL = 1.2; EXPRESSED IN ADULT LIVER, SIGNAL = 1.4; EXPRESSED IN BRAIN, SIGNAL = 1.1; EXPRESSED IN BONE MARROW, SIGNAL = 0.97; EXPRESSED IN HEART, SIGNAL = 0.97
ccacagtgtccacaacttgcgacatggcagtgttcagttcctgtttcaaggtctcagccaaatgtttgccttccggttgtaaggagtttggcccatggtctctttctttgttgttgccttctcgcttcggcttgttttcagccatttcctgctctctgatcagggctcgagctcggtcaataaactgtcctgggtctagctcgcacatctcattatctgaccttccgacagagtcctgggccctggcatccaggatctccgagcgcatgctgtcttcagacaggttaccatcttcatcattttccgaatcagtgctgtcatagatttggtagaacttttcctgcagctggcgcagctgtttctgcatgtcctccagctgctgtttcagctgtcggcgctcctctcgcttctgttcttttcgggctg

SEQ ID NO: 2954 - DNA, 1950 bp, Homo sapiens
  MAP TO AC004147.1; EXPRESSED IN LUNG, SIGNAL = 2.8; EXPRESSED IN HELA, SIGNAL = 3.3; EXPRESSED IN PLACENTA, SIGNAL = 2.8; EXPRESSED IN ADULT LIVER, SIGNAL = 2.3; EXPRESSED IN BT474, SIGNAL = 2.4; EXPRESSED IN BONE MARROW, SIGNAL = 2.7; EXPRESSED IN HBL100, SIGNAL = 4.3; EXPRESSED IN HEART, SIGNAL = 2.1; EXPRESSED IN FETAL LIVER, SIGNAL = 2.3; EXPRESSED IN BRAIN, SIGNAL = 2.8
tgacaatgagcaagaaactccttatagaaaagtcaaaacaagagaagatggcgtgtagagataagagcatgcaagaccgcttgagactgggccactttactacgtctgacacggagccaaatttactgagcagtggacagatggttatgcttttcagaatcttatcaagcaacaggaaaggataaattcacagagggaagagatagaaagacaacggaaaatgttagcaaagcggaaacctcctgccatgggtcaggcccctcctgcaaccaatgagcagaaacagtggaaaagcaagaccaatggagctgaaaatgaaacgttaacgttaaaagaataccatgaacaagaagaaatcttcaaactcagattaggtcatcttaaaaaggaggaagcagagatccaggcagagctggagaggctagaaagggttagaaaactacatatcagggaagtaaaaaggatacataatgaagataattcacaatttaaatatcatccaacgctaaatgacagatatttgttgttacatcttttgggtagaggaggtttcagtgaagtttacaaggcatttgatctaacagagcaaagatacgtagctgtgaaaattcaccagttaaataaaaactggagagatgagaaaaaggagaattaccacaagcatgcatgtagggaataccggattcataaagagctggaccatcccagaatagttaagctgtatgattacttttcactggatactgactcgttttgtacagtattagaatactgtgagggaaatgatctggacttctacctgaaacagcacaaattaatgtcagagaaagaggcccggtccattatcatgcagattgtgaatgctttaaagtacttaaatgaaataaaacctcccatcatacactatgacctcaaaccaggtaatattcttttagaaaatggtacagcgtgtggagagataaaaattacagattttggtctttcgaagatcatggatgatgatagctacaattcagtggatggcatggagctaacatcacaaggtgctggtacttattggtatttaccaccagagtgttttgtggttgggaaagaaccaccaaagatctcaaataaagttgatgtgtggtcggtgggtgtgatcttctatcagtgtctttatggaaggaagccttttggccataaccagtctcagcaagacatcctacaagagaatacgattcttaaagctactgaagtgcagttcccgccaaagccggtagtaacacctgaagcaaaggcgttgattcgacgatgcttggcctaccgaaaggaggaccgcattgatgtccagcagctggcctgtgatccctacttgttgcctcacatccgaaagtcagtctctacgagtagccctgctggagctgctattgcatcaacctctggggcgtccaataacagttcttctaattgagactgactccaaggccacaaactgttcaacacacacaaagtggacaaatggcgttcagcagcgggtttggaacatagcgaatccgaatggatctgatgaaacctgtaccaggtgcttctattttcttgcttttttcccatccatagagcatgacagcatcgattctcattgaggagaaaccttgggcagctccggccaggccttgtaggaaaaggccccgcccgaggttccagcgtcaacggccactgtgtgtggctgctctgagtgaggaaaaaattaaaaggaaaaactggttccatgtactgtgaacttgaaaacatgcagactcaggggggtccctgattcagatgaagaatgtggacttgaaaatacagactgggctagtccagtgtctgtatttaaacttgttcttttcttttaataaagtttaggtaacatctcctgaaaagcttgtagcacaaaggctcagctggggatggtgtttgacttcggaggaa

SEQ ID NO: 2955 - DNA, 409 bp, Homo sapiens
  MAP TO AC012134.1; EXPRESSED IN HELA, SIGNAL = 2.4; EXPRESSED IN PLACENTA, SIGNAL = 2.8; EXPRESSED IN HBL100, SIGNAL = 2.8; EXPRESSED IN LUNG, SIGNAL =   3; EXPRESSED IN BRAIN, SIGNAL = 2.9; EXPRESSED IN HEART, SIGNAL = 2.6; EXPRESSED IN BT474, SIGNAL = 2.5; EXPRESSED IN ADULT LIVER, SIGNAL = 2.7; EXPRESSED IN FETAL LIVER, SIGNAL = 2.7; EXPRESSED IN BONE MARROW, SIGNAL = 3.4
tgagatgaatcaggcaaagcacttatcacaaccctgtgcgtagcaagtacgtagtaaatgtcagctgttattatttgtactctcgtcactatcaccattaccaccacgaccactttcactattaacaccagtatcaccaccgccttcaccattattgccaaaattgtcactaccacaatcatcaccatctttgccatcactgcaacatcaccaccatcactcatcatcagcatcactaccaccttcaccatcatcaccaccaccacaactttcatctacattgccaacattaccaccatcaccaccaccttcaccattatcacaaatatcaccaccatcatcatcactaccactaacaccttcaccattaattctggtattgccaccatcatcaccaccaccttcacag

SEQ ID NO: 2956 - DNA, 471 bp, Homo sapiens
  MAP TO AL035469.7; EXPRESSED IN HEART, SIGNAL = 1.3; EXPRESSED IN BT474, SIGNAL = 0.77; EXPRESSED IN BONE MARROW, SIGNAL = 0.91; EXPRESSED IN HBL100, SIGNAL = 0.72; EXPRESSED IN FETAL LIVER, SIGNAL = 0.73; EXPRESSED IN LUNG, SIGNAL = 0.69; EXPRESSED IN HELA, SIGNAL = 0.66; EXPRESSED IN ADULT LIVER, SIGNAL = 0.81; EXPRESSED IN BRAIN, SIGNAL = 2.5; EXPRESSED IN PLACENTA, SIGNAL = 0.99
cggaaaactgggaaaggtcaattaaaacacagaaatgcaaggtttagagaatgtttaaatgaggtagtgctcatttaagaatgtgtaagattgtaacacaaaaatagaaaccaatgaggaggcaccaacaagtaagcacttaaatcataccataaagaatgggaatgagtttttcaaaataaataggaactcttgattcttaggaaggttcgtgtattaattgcttaattttttcagtttattttatttgagattattacattcattttgttctatcttttaaatttattttatctcagtgacatcattgtatgtctgctgtatgacaagcacaaaagcatcattcttacctttatgagagttagtaatgagcacaggagcctttaaaaaatgaacctggtaatttaaagagaacatggttattgataatgagattaaaatgtggtttagtgagagggtgctaggaaagca

SEQ ID NO: 2957 - DNA, 484 bp, Homo sapiens
  MAP TO AC012380.1; EXPRESSED IN BONE MARROW, SIGNAL = 8.1; EXPRESSED IN LUNG, SIGNAL = 8.2; EXPRESSED IN BRAIN, SIGNAL = 8.6; EXPRESSED IN HELA, SIGNAL = 8.4; EXPRESSED IN HEART, SIGNAL = 5.1; EXPRESSED IN PLACENTA, SIGNAL = 9.3; EXPRESSED IN HBL100, SIGNAL = 6.8; EXPRESSED IN ADULT LIVER, SIGNAL = 8.4; EXPRESSED IN BT474, SIGNAL = 6.6; EXPRESSED IN FETAL LIVER, SIGNAL = 7.1
ccatatccagtggtgacaggagactaatcattgcctctgtctgagttatttgaaaatgggtccacactttcatgtgcgtccgtgtgaagagaccaccaaacaggctttgtgtgagcaacaaggctgtttatttcacctgggtgcaggcgggctgagtctgaaaagagagtcagtgaagggagataggggtggggccattttataggatttgggtaggtaaaggaaaaaggggggttgttctctggcaggcaggagtaggggtcacaaggtgctcagtaggggagcttttgagccaggatgagccaggataaggaatttcacaagataatgtcatcagttaaggcaggaaccggccatctctatgtgtatgtgcaggtcacaggggatatgatggcttagcttgggctcagaggcctgacattcctgtcttcttatattaataagaaaaataaaatgaaatagtggtaaagtgttgggatggtga

SEQ ID NO: 2958 - DNA, 459 bp, Homo sapiens
  MAP TO AC009309.1; EXPRESSED IN HEART, SIGNAL =   1; EXPRESSED IN FETAL LIVER, SIGNAL = 1.1; EXPRESSED IN BRAIN, SIGNAL = 1.1; EXPRESSED IN PLACENTA, SIGNAL = 1.2; EXPRESSED IN BT474, SIGNAL = 0.83; EXPRESSED IN BONE MARROW, SIGNAL = 1.1; EXPRESSED IN HBL100, SIGNAL = 1.2; EXPRESSED IN LUNG, SIGNAL = 0.91; EXPRESSED IN HELA, SIGNAL =   1; EXPRESSED IN ADULT LIVER, SIGNAL = 0.98
ctgcctctgatccagaccacgtgctggtgagcagagccggtggcctggcctcgctgcccaactggatcagtttggagttagtcacacctctcaacagggttacctgcccttctctcaggtccaaagagaagataaaatgaaagagtcgagccacctgataaaggggaaaaggagaaaaaagccatgggcaccaaggcaataaaatggagttgaagggagccatgtcctcacctctttcctcccatcactccctcgctcgctcacccatttattcactcacttgcaacagatgctgctggagtgttcacgaagctctgcgtgaagcaccgcagaggaacaaagacgaggatggtacggtccctgctcccatggagctcacagtctagttggggcatcaagacacaaaagtgcatgccaggccacaagtgacaaagatgaccaacatcatgccagagtaca

SEQ ID NO: 2959 - DNA, 435 bp, Homo sapiens
  MAP TO AC007899.2; EXPRESSED IN BONE MARROW, SIGNAL = 1.5; EXPRESSED IN FETAL LIVER, SIGNAL = 1.3; EXPRESSED IN LUNG, SIGNAL = 1.3; EXPRESSED IN HELA, SIGNAL = 1.5; EXPRESSED IN BRAIN, SIGNAL = 1.2; EXPRESSED IN PLACENTA, SIGNAL = 0.94; EXPRESSED IN BT474, SIGNAL = 1.4; EXPRESSED IN HBL100, SIGNAL =   1; EXPRESSED IN ADULT LIVER, SIGNAL = 1.1; EXPRESSED IN HEART, SIGNAL = 0.93
ttggacaaaatctattatccttacatcagaattaaatatcaaattataatagggtctgttaacaccatagtaagaacactatgttttatgataacatagtacaactgttatttgaccaccctgttcaacactaaacacagcagcgttcctataaagaccaaagcccacgtgacagcattcccaagtctaggatctccgtcatacctttcctttggcatgaggaatgcccaaaggacactgatgtactccacctaacaaagcagccattgcaaaactatatccactgacagcttctggtgaggtcttcaagttgttgagccgttctgcacacctgtctagaaatggtgtcagctggaaaggtaatgccacagccacacagcgcaaacaccatgcagcagcaagtcgggcagccatgcttggatgaagcagcactga

SEQ ID NO: 2960 - DNA, 347 bp, Homo sapiens
  MAP TO AC011743.2; EXPRESSED IN BT474, SIGNAL = 1.8; EXPRESSED IN FETAL LIVER, SIGNAL = 1.7; EXPRESSED IN LUNG, SIGNAL = 1.8; EXPRESSED IN HELA, SIGNAL = 2.1; EXPRESSED IN HBL100, SIGNAL = 1.7; EXPRESSED IN HEART, SIGNAL = 1.8; EXPRESSED IN ADULT LIVER, SIGNAL = 2.2; EXPRESSED IN BRAIN, SIGNAL =   2; EXPRESSED IN BONE MARROW, SIGNAL = 1.7; EXPRESSED IN PLACENTA, SIGNAL = 2.4
catcagagactcagtggagccaccttgtctgtttggggtaggatggaaattcgattgcctgtactcagaatgtttaaaattcatttttccagacagtgaatccctgaacacagaggcactttaaagtttcaaaataagactactttgatgacaaatgttcaattagtgtgtggacctggctttctgtgtagaaatggaaaggctgctgttgtctcaagtggctcagaacctgctattaacagggaataacagcgctgtggtcacggctgctctcggggaggtttgcttgcattccaaagtgcacataagacacctgctcaccaaagacacaccaaagaacttcgtgc

SEQ ID NO: 2961 - DNA, 447 bp, Homo sapiens
  MAP TO AC011036.2; EXPRESSED IN BT474, SIGNAL = 5.7; EXPRESSED IN FETAL LIVER, SIGNAL = 5.8; EXPRESSED IN BRAIN, SIGNAL = 5.8; EXPRESSED IN LUNG, SIGNAL = 6.8; EXPRESSED IN HBL100, SIGNAL = 5.7; EXPRESSED IN HELA, SIGNAL = 6.6; EXPRESSED IN HEART, SIGNAL = 5.1; EXPRESSED IN ADULT LIVER, SIGNAL = 8.1; EXPRESSED IN BONE MARROW, SIGNAL = 5.2; EXPRESSED IN PLACENTA, SIGNAL = 6.1
cacttagcacagtctctggcacatagtaagagggagttcaattaatattagttttagctcttttctcagttttctttctctcttctcttgatcattcattggttcaataatttggttaatattcatcatgtttctactattcattagacaataaggatacagattaaaaaacacagatcctgcaattaaggtgctcaggaatgaacttggttatatctggaagttaaggagttttctgtatgttgattaggttttcctcctttcattcagaaaaaaaagtgaagaagtctgactgtggagaatggcagtggagtgtgtgtgtgcccaccagtggagactgtgggctgggcacacgggagggcactcggactggagctgagtgcaagcaaaccatgaagacccagagatgtaagatcccctgcaactggaagaagcaatttggcggta

SEQ ID NO: 2962 - DNA, 481 bp, Homo sapiens
  MAP TO AF182108.1; EXPRESSED IN FETAL LIVER, SIGNAL = 1.1; EXPRESSED IN ADULT LIVER, SIGNAL = 1.1; EXPRESSED IN HELA, SIGNAL = 0.92; EXPRESSED IN HEART, SIGNAL = 1.1; EXPRESSED IN BRAIN, SIGNAL =   1; EXPRESSED IN BONE MARROW, SIGNAL = 1.1
tccaaaccactagtcctcgctgttactgttagtggcatccacattttcacagataccaggttctatgatcgccttctgatgggtcaggcatatcattgcctcctccagttctggagccctattttctgccagtttctcctgctcattattacctcgttcaggtcattaattccctcacagacatggtttgtaggaatcctgaattatatctttatgcccagtgtctcaccttcctactcattcttcctatcaattcagatttattctcttaaagcacacttagattatttcatcttgtttgtttttttttaaacttttttttaatagaagcattccagctggtcaatcataaaggtatgatagaatatcaccactttggaattcctaataaaataattggtctggtcattgatgatcagcctaaaatcattaaaaagcttaatgggagcttgataataaaagattgaggctgacaacaccc

SEQ ID NO: 2963 - DNA, 477 bp, Homo sapiens
  MAP TO AL035249.6; EXPRESSED IN BONE MARROW, SIGNAL = 0.8; EXPRESSED IN LUNG, SIGNAL = 0.65; EXPRESSED IN ADULT LIVER, SIGNAL = 0.7; EXPRESSED IN BT474, SIGNAL = 1.7; EXPRESSED IN HBL100, SIGNAL = 0.93; EXPRESSED IN FETAL LIVER, SIGNAL = 0.66; EXPRESSED IN HELA, SIGNAL = 0.77; EXPRESSED IN PLACENTA, SIGNAL = 0.77; EXPRESSED IN HEART, SIGNAL = 0.84
tgcttggggatccttgatagtgttttttgatgaaaacttttggaagaacattctaatcagaggttgttgcctttctctaactcaaaagtgttgctgcgaagttgtaggcgattttaagctgcattccatctgaggatcatatgccataattttgtgctttaatgtcagtgcagtttgaaacacttcagcaaattttagtaatgtccacatggctggttctggtttagttttttcttcatcttcctcttcctctgtggaggacatgaaagttcttccagttcctcatttgctaacacttctcaaaggccttcagtatgtccttctatttcatcaagcatatcagcaaatccttctccatcaacttgtcttgttgcatggatgattttcctaattcatctatcaatttcaggcaagcctttaaaatcattcacaacttccactccatcagtccttccagcaggcatttggtttgtggtt

SEQ ID NO: 2964 - DNA, 1967 bp, Homo sapiens
  MAP TO AC004049.1; EXPRESSED IN HELA, SIGNAL = 1.8; EXPRESSED IN ADULT LIVER, SIGNAL = 1.3; EXPRESSED IN BT474, SIGNAL = 1.8; EXPRESSED IN BRAIN, SIGNAL = 1.5; EXPRESSED IN BONE MARROW, SIGNAL = 1.5; EXPRESSED IN HEART, SIGNAL = 1.3; EXPRESSED IN HBL100, SIGNAL =   2; EXPRESSED IN PLACENTA, SIGNAL = 1.8; EXPRESSED IN FETAL LIVER, SIGNAL = 1.9; EXPRESSED IN LUNG, SIGNAL = 1.5
tgagatgctgggtttcacacacattttaaggtttttagatgcaaggaacacaggcttgtttaaggaaagttaaataggatacacatgatacaagaagtggtctcacagttccgagtccagtggggcggtgggagcgatgacagtctgagatggtaggagcagttgtgtgaagatggagtctcccggaggaaatgacaattacctgacaatcacagggccgtcacacctcttcctgtcaggggccgagacattccatacaccaagcttaggtgatgaagaatttgaaatcccacctatctctttggattctgatccctcattggctgtctcagatgtggttgaccactttgatgacctggcagacccttcctcttcacaggatggcagtgcttcagcccagtatggggtccagacattggacatgctctgtgggcatgacccatggcttgatggagcaaggtgggggctcctcagtggaggcttgatcatggacttaaaccactctataggaactcagtatagtgccaacccacctgttacaattgatgtactaatgatagacatgacatctgacttgatggggcatagccagttgaccaccactgatcagtcagaactgagtttccaactgggtttgagcttacggggtggcaccatcctgccacctgcccagtcacctgaagatcgtatttcaaccaccccttcacctactagttcacttcacgaggttggtgttgaggatttctggaggcaaatttccagccagaagacagtggtggtggaagcagggaaaaagcagaagttcccaaagaagagaaaaaagaaagatcctaatgaacctcagaaaccagtttcagcatatgctttattctttcctgatacacgggctgccatcaagggacagaatcctaatgccacttttggtgaggtttcaaaaattgtggcctccatgtgggatagtcttggagaggagcaaaaacagatatataagaggaaaactgaggctgccaagaaagagtatctgaagacactggctgcttacgaagacaaccaggagtgtcaggccactgtggaaacagcggaattggatccagcaccaccatcacaaactccttctccaccttctatggctactgttgacccagcgtctccagcaccagcttcaacagagccccctgtcctgtccccatccattgttgttaactccaccctttcatcctatgtggcaaaccaggcatcttcaggagctgggggtcagcccaatatcaccaagttgattattaccaaacaaacgttgccctcttccattactatgtctcagggagggatggttactgctatcctagccacagtggtgacctcctgggggctccaactagacccaaccagtacagccactatccagcccagtcaacaagcccagattgtcactcggtcagtgttgcaggcagcagcagcagctgctactgttgcttctatgcaactgcctccaccccgactacagccccctccattataacagatgccacagcccctgactcagcagcaagttaccattctgcagcagcctcctccactccaggccatgcaacagcctccacctcagaaagtttgaatcaatttacagcaacagctacctcctctgcagatcaagagtgtgcctccactcactttgaaaatgcagactaccttagtcccaccaactgtggaaagtagtcctgagcggcctatgaacaatagtcctgaggcccatacagtggaggcaacttctcctgagaccatctgtgagatgatcacagatgtagttcctgaggttgagtcttcttctcagatggatgttgaattggtgagtgggtctcctgtggcactgtcaccccagcctcgatgtgtgatgtctggttgtgagaatcctcccattgtgagtaaggactgggacaatgaatgctgcagcaatgagtgtgtggtga

SEQ ID NO: 2965 - DNA, 1978 bp, Homo sapiens
  MAP TO AC004125.1; EXPRESSED IN PLACENTA, SIGNAL = 2.4; EXPRESSED IN ADULT LIVER, SIGNAL = 2.3; EXPRESSED IN BRAIN, SIGNAL = 3.8; EXPRESSED IN LUNG, SIGNAL = 1.8; EXPRESSED IN BONE MARROW, SIGNAL =   2; EXPRESSED IN HEART, SIGNAL = 1.6; EXPRESSED IN HELA, SIGNAL = 2.2; EXPRESSED IN HBL100, SIGNAL = 2.1; EXPRESSED IN BT474, SIGNAL =   2; EXPRESSED IN FETAL LIVER, SIGNAL = 2.5
tgagatgaattgcttctaagggaaaaataagtgcattctgagttcttccgtacttgctgtaggagtagggtgtattcttcagctgaatacacattgcctggaactgagcagcagaattcttcatttcctaagtgacagaccatgcaagaagaactaggtggttggatttcccagctataatccattctcctctctccccattacctccacattttctataaatattttaagatggaaagtgacagttctctccgaggtgtataaaggacgtgtttttcttttccccttctcttagggttaagcaacatcattggcatcatagtttatatatcagccaacgccggagaccccgggcagcgtgactccaaaaaaagttactcctatggttggtccttttatttcggagccttctctttcatcatcgcagaaattgtaggagtggttgccgtgcacatctatattgaaaaacatcagcagttacgagccaaatcccactcggagttcctgaagaaatctacttttgcccgcctcccaccctacaggtatcgattccggaggcggtcaagttctcgctccaccgagcccagatcccgagacctgtcccccatcagcaaaggcttccacaccatcccttccactgacatctcgatgttcaccctctcccgggacccctcaaagatcaccatggggaccctcctcaactccgaccgggaccacgcttttctacagttccacaattccacacccaaagagttcaaagagtcactgcataataatccggccaacaggcgcaccacgcccgtctgaactgacctctgacctctgccccacgcccagcacagccttgggggaagtgtacagagatgtctctgaggttgcatggcatggtccttgtgatggtattactttttacaaagaatgaaaccaaatggactcagccctctcccacattttcccctcaccctccaagtcctaacccctccatcctctctaacttttcaagccaatcccttaatgtcattcctctctctgtgtatctgtgccagatgttttcctttcttccttctttactggaaggacctccacattcttccctccttggaagaggactttactaaaagtcacaggtggtggccaggggggatttccgaatctccatcaggcgcgctcatagttgtccccattgtctacccacacaaatcctcaggaaaccaaccaccgcccaggtggccctgagggaggcattcacctttatgtgttagaaaaacatgaccagaaatcaaagatgtcagagccccgaagcagctaatgtaataagcactcatgttattaaaggttttgccttgtcgtaaccaaccgagccgggggtgttttgtttcttgtgggtgtttcctacacaaactcactcccctgcctccaaactggctcatgtccatcttggaagctgaactttgctcatccacacttgagccactaggaaggatctccctgcacctttggaagctagtaaggcattcccacaaatgtccaaatcaatgcatccttctacttgaattcctggaggctacctgggggtgggtgagtgaatgctggttttcaagatctaactttggcatgcaatagctctagaaccttgggcaagtcacctaagcctcaagcctcagtctcctcatctgtaaaatggaacatgataatagcactctcctccacagagttatgaggtttaaataaaactgtgtgtaaaatgattagcacattgtaaacaattgatatatatttttcaatgtttcaggtggattttaggcagagtaagcattatgttgatctgcttttgctgtgacaacaaaatatcaaaatgggccaggagaggcggcatgagcttgtagtcccagctcatggaactacagacttggaggctgaagcgggaggatcacttgagcccaggagttaaagagttcaagtctagctgagaccccag

SEQ ID NO: 2966 - DNA, 475 bp, Homo sapiens
  MAP TO AC012130.1; EXPRESSED IN HBL100, SIGNAL =   4; EXPRESSED IN PLACENTA, SIGNAL = 5.8; EXPRESSED IN HELA, SIGNAL = 4.2; EXPRESSED IN HEART, SIGNAL = 3.7; EXPRESSED IN ADULT LIVER, SIGNAL = 4.6; EXPRESSED IN BT474, SIGNAL = 3.1; EXPRESSED IN FETAL LIVER, SIGNAL = 4.3; EXPRESSED IN BONE MARROW, SIGNAL =   4; EXPRESSED IN LUNG, SIGNAL = 4.4; EXPRESSED IN BRAIN, SIGNAL = 3.4
atgttctcagctgtccccacccctccaccccagcaactttcccatgcagagcagttaatctgctatttaagatgcagacctagctttcttttcacagcctgctcagccacattttgcagttttgattaggaaatagcactgtgtgtgcaagaattgggttgggttacaccatttaataaagctatcatgactgatgtgagcactactcacaaaaaggaacaggagaaacacagctgtactctctgtggcatgatatcacgcagcttgcacttgggtaaggacctttctgatgtcaccgggtgagggattaagtcataattatgtagatctaaattaccttccagcaaacccactggcggttcttcattaacatcacagcaggctttaattccagcagaagactgatcacccttcagctgcccgacatccagcctgaagaatatgtttggaattaagcagggatcttggttgaaaa

SEQ ID NO: 2967 - DNA, 383 bp, Homo sapiens
  MAP TO AC012441.1; EXPRESSED IN BT474, SIGNAL = 1.1; EXPRESSED IN BONE MARROW, SIGNAL = 1.2; EXPRESSED IN PLACENTA, SIGNAL = 1.1; EXPRESSED IN HBL100, SIGNAL = 1.1; EXPRESSED IN HELA, SIGNAL = 1.3; EXPRESSED IN ADULT LIVER, SIGNAL = 1.2; EXPRESSED IN FETAL LIVER, SIGNAL = 1.9; EXPRESSED IN BRAIN, SIGNAL = 1.3; EXPRESSED IN LUNG, SIGNAL = 1.3; EXPRESSED IN HEART, SIGNAL = 1.4
cacaggtttgtaccaggaccaggtgggtcacaccgatgaggaagtcatgggctggacagggtgggttggggactgtggggagaatgaatggtgactcccatcccactggaagagctttgttagaaggctggacctgcctgtgacctctgcctccccacttctaaatagaggtcattgtgttttgccctttgttttgctctcctagcagttcttggatgttgtgagggcgagaccacgattcctccatcatgcaggtgtggctgcctctctcacaccatcactttccaagctgaccttggtgctggcgacaacatgggactggattctggtctcctgactgttggaccagtgagtggttttgggggagcattagtgtctgggga

SEQ ID NO: 2968 - DNA, 461 bp, Homo sapiens
  MAP TO AC007744.1; EXPRESSED IN PLACENTA, SIGNAL = 0.89; EXPRESSED IN HBL100, SIGNAL = 1.1; EXPRESSED IN BRAIN, SIGNAL = 1.4; EXPRESSED IN HEART, SIGNAL = 0.92; EXPRESSED IN HELA, SIGNAL =   1; EXPRESSED IN BT474, SIGNAL =   1; EXPRESSED IN BONE MARROW, SIGNAL = 0.96; EXPRESSED IN FETAL LIVER, SIGNAL = 0.84; EXPRESSED IN LUNG, SIGNAL = 0.84; EXPRESSED IN ADULT LIVER, SIGNAL = 0.74
agttcgttaaaatgggcctcttatccagaaatttggatctggctcatggcacacaaacatgtactttgaataagcaccctgggtaattctgatctgagagtctagaaccacagtttggaaaagtctgacaaagtggaacctgaatccttatggcttcagtggcttcatttatcatggtttaggcagccattctggaaaagagactcttttttgtttgtgtgtttgtttgtttgttttggatgcagattatggagaacatagaactgagactatcctgagaaggccatgtacctacaaactgtttcctgactctcagcatgagcacacgagtgtggctcagttggtaatgtcatgggcacaggttggaggaatgctattctaccatgttgtttatttcctgctgctgttgaatcttcctgagggggtagatatggaaaagtggctcagactagaattccaga

SEQ ID NO: 2969 - DNA, 422 bp, Homo sapiens
  MAP TO AF017104.1; EXPRESSED IN BONE MARROW, SIGNAL = 1.5; EXPRESSED IN HELA, SIGNAL = 1.3; EXPRESSED IN PLACENTA, SIGNAL = 1.6; EXPRESSED IN HBL100, SIGNAL = 1.6; EXPRESSED IN BRAIN, SIGNAL = 1.4; EXPRESSED IN LUNG, SIGNAL = 1.6; EXPRESSED IN HEART, SIGNAL = 1.1; EXPRESSED IN BT474, SIGNAL = 1.4; EXPRESSED IN ADULT LIVER, SIGNAL = 1.7; EXPRESSED IN FETAL LIVER, SIGNAL = 1.6
ggaaagatccctctgctgtggcattaagtttggggaggggaattgacttgttccaacagaaacagaaacaacaggaaatagcttaactttggtccacttgtctgttagctgaacgacagtcatactgcctataatcggttcagaaacccaacaattatattttaaaatatattcatgtgtaatttcattctaaaactggcatagctgttctgccctcattctctgccttttcagcttcagaatgtgctgtcagcacggtctctaatcctcagcatcttcgtgatcttccctggcagcctcagcatctgcttggctaggctctgtcttctcttgggtcatgatttctggggtcatgtggacgaagcctgcttctggaagttcactttgtacttccactggcatctgattttcccgttccacat

SEQ ID NO: 2970 - DNA, 465 bp, Homo sapiens
  MAP TO AP000192.1; EXPRESSED IN PLACENTA, SIGNAL = 0.62; EXPRESSED IN BT474, SIGNAL = 0.68; EXPRESSED IN BONE MARROW, SIGNAL = 0.91; EXPRESSED IN HBL100, SIGNAL = 0.71; EXPRESSED IN HEART, SIGNAL = 0.92; EXPRESSED IN FETAL LIVER, SIGNAL = 0.77; EXPRESSED IN LUNG, SIGNAL = 0.91; EXPRESSED IN HELA, SIGNAL = 0.76; EXPRESSED IN ADULT LIVER, SIGNAL = 0.85; EXPRESSED IN BRAIN, SIGNAL = 0.9
aattcattggttttagtttattcacagagttgtgcgacagtcactattagctaattttagaatgttttcatcacttcagaaagaaaccccttttgatgtctaaagtacaaatcctcacactgaggctgaaaattacctgctaaagtggcagagtgaaagatattttatgtttatataaaacttggccagtatttacaggctattccccatagtttggtaaacagttatgttttctgttgttgtctctaggggtaagagtgctaattattttgttttcgtgttggtgggagtggtggttttggaaaggttcttttatggtcacagttgttctcaggccatgctgttggtttgcagggcactagctgacatgaataatgatggaagaatggatcaagtggagttttccatagctatgaaacttatcaaactgaagctacaaggatatcagctaccctctgcacttcc

SEQ ID NO: 2971 - DNA, 371 bp, Homo sapiens
  MAP TO AC005519.2; EXPRESSED IN BONE MARROW, SIGNAL = 0.86; EXPRESSED IN HELA, SIGNAL = 0.97; EXPRESSED IN BRAIN, SIGNAL = 0.85; EXPRESSED IN HEART, SIGNAL = 0.81; EXPRESSED IN PLACENTA, SIGNAL = 0.87; EXPRESSED IN BT474, SIGNAL = 0.68; EXPRESSED IN HBL100, SIGNAL = 0.8; EXPRESSED IN FETAL LIVER, SIGNAL = 0.73; EXPRESSED IN LUNG, SIGNAL = 0.82; EXPRESSED IN ADULT LIVER, SIGNAL = 0.72
tcaaatagcaataataaggttgcctaatttagcaaacaaaaatacaggacacacatttggacaggacaggatttgggacatacttacactaaaaattttatcattgttattctgaaatttaaattatctggatttaaatttatctgtattttatctggaagatcccaggaaatggccccacaagtgcccacgctgccaaccagtccttctttaccctccccattattcttttcaggctcttgccattcctgccctgccattctggaaacttggacaccagaaacagctttgtctaagcctcaactctgtgatccctactgtgccagacactaagaaggtggctcaaaataactgcttcctttccactcctg

SEQ ID NO: 2972 - DNA, 490 bp, Homo sapiens
  MAP TO AL035594.7; EXPRESSED IN LUNG, SIGNAL = 0.97; EXPRESSED IN BRAIN, SIGNAL = 1.1; EXPRESSED IN HEART, SIGNAL = 0.92; EXPRESSED IN PLACENTA, SIGNAL = 0.71; EXPRESSED IN BONE MARROW, SIGNAL = 0.88; EXPRESSED IN HBL100, SIGNAL = 0.82; EXPRESSED IN FETAL LIVER, SIGNAL = 0.89; EXPRESSED IN ADULT LIVER, SIGNAL =  23; EXPRESSED IN BT474, SIGNAL = 0.91; EXPRESSED IN HELA, SIGNAL = 0.92
tcaaaaggaattgaaatgtctcctcatttttcactcctactgaggaacacttacatgaaattatgaaggtagaaagaggtaaaaagtaaaacaatggttctaatagacaaatgcgctccaaaactagaaattgaaaaaacaaactcattgactgtcttttaaaaataaactctgagaaaatgtacaaagctgtctatattacttcactctcacatcttctcaaattctataaaatggtgcaaaccaggcccaaaatcgttttgtttcttaatttgtcctctcctttgctactcatggatcttccaatgccaatggcgctgtccggaatcaggccctcattccctgatgactgtactgagaacagaagcctcttcctcttccagcagtctccaccgtggtctagtaccaacttttccataaattctatttacctccactcctcatggtgaaccttccacttcagtaagatccttctccttcggttcctatc

SEQ ID NO: 2973 - DNA, 422 bp, Homo sapiens
  MAP TO AC012448.1; EXPRESSED IN BT474, SIGNAL = 1.2; EXPRESSED IN LUNG, SIGNAL = 1.2; EXPRESSED IN HEART, SIGNAL =   1; EXPRESSED IN FETAL LIVER, SIGNAL = 1.4; EXPRESSED IN HELA, SIGNAL = 1.5
ggatcaagcctgggatgatagaaatctgtgaaaagttggaaaactgttcacacaatctaataaatgaaaatggattaaatgcatgcctggcatttcctgctggaagttctcacaataattgtgctgcccattatactcccattgctggtgacacaacagtattacagtaagataacatctgtaaaatagattttggaatcggtataagtggtaggaatattgactactgactgtggtcttactgtcacttttaatcccaattatgatacatgattaaaagctgtaaaagatgctgctactactggaatgaagtgtgctggaattgatgttcatctgtgtgatgttggtgagtccatccaaaaatttatggagtcctatgaagttgaaatagatgggaagacacaacaggtgaaaccaatcca

SEQ ID NO: 2974 - DNA, 469 bp, Homo sapiens
  MAP TO AP000053.1; EXPRESSED IN PLACENTA, SIGNAL = 0.91; EXPRESSED IN BT474, SIGNAL = 0.74; EXPRESSED IN BONE MARROW, SIGNAL = 0.73; EXPRESSED IN FETAL LIVER, SIGNAL = 0.83; EXPRESSED IN HELA, SIGNAL = 0.81; EXPRESSED IN ADULT LIVER, SIGNAL = 0.87; EXPRESSED IN BRAIN, SIGNAL = 0.97; EXPRESSED IN HBL100, SIGNAL = 0.9; EXPRESSED IN LUNG, SIGNAL = 0.89; EXPRESSED IN HEART, SIGNAL = 0.98
ccaagtaaacccaaagctgctcccctccaagaagtctggggccaccctagggaaggcctcctggccttgactctcagggggtctctggggttgcggtttggggcccgctgcttccgccctttgcccccaggtgggcctggcagggctgcagcacagctctgttgctgatagacagggtggagcacttggcgaccttgccctgcagccctgtcattttgagttcagaggtcagatttgagtaataaacatcttctaaggacttgtcattctttctgaggatgttgctggccagccggaagacgaaaatcaccgcgtagatgccgatgatggtgagtatataccaggcagcgctggttccgtctggcaccttcagagccctggtggagttggtgtcattcctcccctctgtgtggtcacccagcaggagccccaggagggtgctggcctgggtctggttggaggcttcatg

SEQ ID NO: 2975 - DNA, 359 bp, Homo sapiens
  MAP TO AF020802.1; EXPRESSED IN BONE MARROW, SIGNAL = 3.1; EXPRESSED IN PLACENTA, SIGNAL = 2.8; EXPRESSED IN HBL100, SIGNAL = 3.4; EXPRESSED IN BT474, SIGNAL =   3; EXPRESSED IN LUNG, SIGNAL = 3.2; EXPRESSED IN BRAIN, SIGNAL = 2.9; EXPRESSED IN HEART, SIGNAL = 2.6; EXPRESSED IN HELA, SIGNAL = 3.4; EXPRESSED IN ADULT LIVER, SIGNAL = 3.9; EXPRESSED IN FETAL LIVER, SIGNAL = 3.3
aaaggcgttctcctctctcccctgccccatgctgtctgcctgcctgggtgactgctggttagttgcaacatcgggctctgctttgcacccctttgcacattgggctctgcttgctgaaatgatttcaaggctggtccaccctatccccaccccagtgggtccttcatgttctaggttgggcccttttgcatctcttccatcctattgccgttacccagccattatctatacatttcctatgcccaaatctcacacttggttgtgttcaatcttcctactatatgctttctctgtcctagttttgctggtctgtctcctcatgtgcggcctctgcttactggtgaggtaatgcgaggtgt

SEQ ID NO: 2976 - DNA, 1934 bp, Homo sapiens
  MAP TO AC009962.2; EXPRESSED IN BONE MARROW, SIGNAL = 3.8; EXPRESSED IN LUNG, SIGNAL = 5.3; EXPRESSED IN PLACENTA, SIGNAL = 6.1; EXPRESSED IN HELA, SIGNAL = 3.8; EXPRESSED IN FETAL LIVER, SIGNAL =   3; EXPRESSED IN ADULT LIVER, SIGNAL = 3.1; EXPRESSED IN BT474, SIGNAL = 4.7; EXPRESSED IN BRAIN, SIGNAL = 3.9; EXPRESSED IN HEART, SIGNAL = 1.9; EXPRESSED IN HBL100, SIGNAL = 3.7
gttgccattatgctttgtgcttatttctgattttttaaaaatacaaattctagtgcttagagtaaaaatcttgctccttcccacccagtgaatgtagagaaggtttaagtgttagatgaggaaaaaatagggttttataatctttgtgatctaagtgtagtttttggaattctaaacaataatatgcatttaatatatgtgtatgtatatatataaatataaacatatcattaatattgtttcttttggtaggccgttttcgtcaaattgaagtgcttactactgtggccaatgcgttttcttctttatattctcaagtctccgggacgcccctgcagagaattggaagtatgtcctcagtgacctctaacaaggagacagacccacctccacctttaactcgaagtaacactgcaaatcgtttaatgaaaacactctcaaaactgaatttatgtgttgataaaacagagaaaggagaaagtagtagtccttctccatcagctgaaaaaggaaagattctaaatgtttcagtgattgaagaaagtggcaataaaaacgatcaaaagtctcaaaaaattatgaagaagaaagagtcatcttctatgttggctacagttaaagaagaagtctctggtagttcagcagctgttacggagaatgctgatagtgatagaatttctgatgaagcaaatagtaattttaaccaaggaactgaaaatgaacaaagtaaagaaactcaaagtcatgagagtaaactgggtgaggaatctggtattgtagaatccaaattagatagtgatttcaacatatccagccacagtgagctggaaaatagcagtgagctgaaaagtgtccatatatccacacctgaaaaagagccttgtgcaccactgacaataccatccataagaaatataatgacacagcagaaggactccttcgaaatggaagaggtaggtaaaaaattactgagactggtttcaagttgcagactaggaaaaaaagtaccaaaaatgcttataaaatgagaggtagctaatagatttatactagaaaaatttattctaattttgactttccaggtttatgtttcacaaaccaagaattggtctcaggataatgtgatgtcgaggtaatgggacagttcagtaactcctccagatctttatccactagttgatatttgaaccttaaccctcttttctctctcaagggtaagattttgatgctcaagaaagccctgagagagtatatttaaattcaaagcaatattgcataatagttagaaacacaggctttgaaatcaaacagggctttgagttttgtctgccactgaatgactgtatgcctttgggcaagcttttcttaacatatctcagtggtaaggatatgtgaaggcggctttggggatagttcttgttatatgactggaaagaacatgaagatattacgtacctgcatggggaggatagggaccctagaattagcaggtttgaaaggccactgaatagggtttctgcaagcccaaaagaccaatgtttggttacttgttatttgtgtccagtaatatacctgatagttaacataaatttttaattggaaaagataaaagatacttattttgaatgaggttcagctaaaactgcttctgaatagtaggagctgaatagcttggggcaggaaaactgattttaccaagcatctaccctgtgctgggcactgttcttggctcttgaagtacttcattgcagtctgtgaggcacatggtagtggtctcattttatacatgaggaaactgaggcatatgtatgctaatgaagagttgtggctataaattatataatgcgcaatttgtcttttgtaatttattacattagatgcgttttagtaatagttcacagtagttttaacatcacacaccattattttaggga

SEQ ID NO: 2977 - DNA, 468 bp, Homo sapiens
  MAP TO AP000210.1; EXPRESSED IN FETAL LIVER, SIGNAL = 0.7; EXPRESSED IN HEART, SIGNAL = 0.98; EXPRESSED IN PLACENTA, SIGNAL = 0.64; EXPRESSED IN BONE MARROW, SIGNAL = 0.67; EXPRESSED IN LUNG, SIGNAL = 0.63; EXPRESSED IN HELA, SIGNAL = 0.62
aagccaaaccatatcatgctcatataacaaatatgccttgagcacctaacatatggcaggtactgtgcaaagcactaagatacaagagacagcagaaaagaacagggaagaaacagaaagagaggcaggagggtgtctggaatttttttctttcaggggagtactagagatgagagaagagtaataagcccattcagagagatgctgagttaaagagaaagctgatgagcagaagaaactagagaaaactaattcaagaaatgatcaaatctagccatgcgtctacataaatatacttccttttcccccatcgtttaaatcaaaatccctcttacctggtcgttccctcttcctctccccactcctcccatatcctcaaagctgccatcacctacaacagctccctctggaagcagcagcatcctctcttctcactcaagcacagccccaaccaaggtcaccagaagc

SEQ ID NO: 2978 - DNA, 463 bp, Homo sapiens
  MAP TO AP000116.1; EXPRESSED IN ADULT LIVER, SIGNAL = 0.68; EXPRESSED IN PLACENTA, SIGNAL = 0.71; EXPRESSED IN BONE MARROW, SIGNAL = 0.77; EXPRESSED IN HBL100, SIGNAL = 0.76; EXPRESSED IN FETAL LIVER, SIGNAL = 0.91; EXPRESSED IN LUNG, SIGNAL = 0.67; EXPRESSED IN HELA, SIGNAL =   1; EXPRESSED IN BT474, SIGNAL = 0.63; EXPRESSED IN HEART, SIGNAL = 0.94
ttcattggttttagtttattcacagagttgtgcgacagtcactattagctaattttagaatgttttcatcacttcagaaagaaaccccttttgatgtctaaagtacaaatcctcacactgaggctgaaaattacctgctaaagtggcagagtgaaagatattttatgtttatataaaacttggccagtatttacaggctattccccatagtttggtaaacagttatgttttctgttgttgtctctaggggtaagagtgctaattattttgttttcgtgttggtgggagtggtggttttggaaaggttcttttatggtcacagttgttctcaggccatgctgttggtttgcagggcactagctgacatgaataatgatggaagaatggatcaagtggagttttccatagctatgaaacttatcaaactgaagctacaaggatatcagctaccctctgcacttcc

SEQ ID NO: 2979 - DNA, 471 bp, Homo sapiens
  MAP TO AC004985.2; EXPRESSED IN LUNG, SIGNAL = 1.2; EXPRESSED IN ADULT LIVER, SIGNAL = 1.2; EXPRESSED IN HEART, SIGNAL = 0.8; EXPRESSED IN BONE MARROW, SIGNAL = 1.5; EXPRESSED IN FETAL LIVER, SIGNAL = 1.2; EXPRESSED IN HELA, SIGNAL = 1.6; EXPRESSED IN BRAIN, SIGNAL = 1.4; EXPRESSED IN PLACENTA, SIGNAL = 1.4; EXPRESSED IN BT474, SIGNAL = 1.7; EXPRESSED IN HBL100, SIGNAL = 1.8
ggagtgttatggggtcatggagaagaccttcaattatcaattataggttttaaatttacctggcttttaaaggaatagggtacactgttttctctttactacttctctctctctctctggcattgtctctctttctctttgactccctctttgtctgtgtctcttcctgtctctctctgcctttctttctctctctctgactccctctttgcctgtctcttcctctctctctgcctctctttgccctctctctccaccccccccccacctttcctctctgctgttctttccctgcctctgccagccacttacactgctgttctctcctctccttccccttcccctggggagggaccggcaggagcggagctactctttcttcccctgaaaagaggatgcccaagatggacattaactcgacacaagtgtacaactgaggttctaagaattggtcaatatggtctgccactc

SEQ ID NO: 2980 - DNA, 461 bp, Homo sapiens
  MAP TO AC005075.2; EXPRESSED IN PLACENTA, SIGNAL = 0.89; EXPRESSED IN FETAL LIVER, SIGNAL = 0.9; EXPRESSED IN ADULT LIVER, SIGNAL = 1.1; EXPRESSED IN BT474, SIGNAL = 0.95; EXPRESSED IN HEART, SIGNAL = 0.86; EXPRESSED IN BRAIN, SIGNAL = 1.1; EXPRESSED IN HELA, SIGNAL = 1.6; EXPRESSED IN LUNG, SIGNAL =   1; EXPRESSED IN HBL100, SIGNAL = 0.8; EXPRESSED IN BONE MARROW, SIGNAL = 1.1
accttgctgagcagtatcccgtcttcgaaagctgtctgtaaaacaacacagtaaaatttatggtttttctttaaatggtttttctaaaatcataaaagttagttattttggcattgaattcacattgcagtaacatttaaattgtgcaaccaattaacataaacaaaagaccaaagcaaagaagccaactatatgaatagtaaaagatttaatatgcaacaaagtaacaggcagaagttggccagctgtgttttttgtttttttgtttttttagatctggagaaaataccttacccaaagtcagtaaaagctgtgcaacttccatggccattacttcattgtgataaaagcaccgaatttctagcttcttaataacaaagatactgcttaagaaacagataaagagtccccaatataacaaatgggctgtaatcagtttctctaccatttcagctctgccc

SEQ ID NO: 2981 - DNA, 404 bp, Homo sapiens
  MAP TO AC012441.1; EXPRESSED IN HEART, SIGNAL =   1; EXPRESSED IN FETAL LIVER, SIGNAL = 1.4; EXPRESSED IN BRAIN, SIGNAL = 1.8; EXPRESSED IN HBL100, SIGNAL = 1.2; EXPRESSED IN HELA, SIGNAL = 2.5; EXPRESSED IN PLACENTA, SIGNAL = 1.9; EXPRESSED IN ADULT LIVER, SIGNAL = 1.2; EXPRESSED IN BT474, SIGNAL = 1.7; EXPRESSED IN LUNG, SIGNAL = 1.3; EXPRESSED IN BONE MARROW, SIGNAL = 1.5
tggtggaacctggtaaaagcccacctctcaccatggaggaggagccctggggccctcaggggagtccctgctggacagtgagacagagaatgaccacgatgatgctttcctctccgtcatgtctcctgacacccagttgcctctacgattcagatgatgtcaggcccagtccctcagtgccctgtgcaaggaacaggactcatcttctgagaaggatggacgcagccccaacaaatgggacaaggaccacatctggtggcccatgagtggcggtcacgatcttcagcaagcggcaccaggccctggcagggcgcaccagggtcacccctaccaggataactggaccatcagccagatcctgagcgagcggtggtacaccctggggcccaatgagatgcagaagt

SEQ ID NO: 2982 - DNA, 485 bp, Homo sapiens
  MAP TO AC007655.1; EXPRESSED IN ADULT LIVER, SIGNAL = 0.72; EXPRESSED IN BT474, SIGNAL = 0.83; EXPRESSED IN BONE MARROW, SIGNAL = 0.8; EXPRESSED IN LUNG, SIGNAL = 0.73; EXPRESSED IN HELA, SIGNAL = 0.67; EXPRESSED IN PLACENTA, SIGNAL = 1.1; EXPRESSED IN HBL100, SIGNAL = 0.67; EXPRESSED IN FETAL LIVER, SIGNAL = 0.66; EXPRESSED IN HEART, SIGNAL = 1.1
gggtgtgtcttttacagaaacgtagaaatttgtagaggaggatgagaaattaatattagttctatgaacaaaatagcctttgctgtggtttgggttctattctgtttttgatgactaagaatcataactaataatggcctcttcaaaatacatttcttttaagagcctgattgatggttatcacagctttcctcattcattcgttagttatcaagtgacgaagtccttttaagttcattcctaaaatttccatctctgcttagaatttgataacattgaacttaaaatcagacattttgagaggcatgtagaaattgtgttttgtgacctgtgctttccagaaatggctatgttaagatacaaagttgtaattagaatcacacagacagaaatggtgaatcttcttgaggaaaccttgagaaacttgaatattttgcaacttagaaaattggaaaatgagaaaatggaggaaccagagggtcata

SEQ ID NO: 2983 - DNA, 483 bp, Homo sapiens
  MAP TO AL049737.4; EXPRESSED IN ADULT LIVER, SIGNAL = 0.86; EXPRESSED IN PLACENTA, SIGNAL = 0.93; EXPRESSED IN BT474, SIGNAL = 0.7; EXPRESSED IN BONE MARROW, SIGNAL = 0.8; EXPRESSED IN HBL100, SIGNAL = 0.67; EXPRESSED IN FETAL LIVER, SIGNAL = 0.75; EXPRESSED IN LUNG, SIGNAL = 0.79; EXPRESSED IN HELA, SIGNAL = 0.69; EXPRESSED IN HEART, SIGNAL = 0.93
ttccgtgattcctaaccctggctgtgcgtttcaatcactgggtggatttttaaaaactgcccaggccgcacctgagaccaattatattgaatcactggggcgggcttggatattcctactttaaagctccctgtggacagacaatggacagacacaccagcaggaggccattccagtcctcaggtaggacaggtgcagaagtgacaggaaagctgcagggagtccaaaaacatggggcaaataggaagtgataacaaatcagagcctaggatagcttggataacgagttgagggaggatgggtcaggcacgactcctcagcctgagtaacagacatgatttggattctgtttgctaattgatttagttacatccattatgaaaatggagagctctcagcaagaagctcacctggaactacagtaaacagcactgcttgctctgggccctcctttctgctcggagcgggacttgcctgtaatta

SEQ ID NO: 2984 - DNA, 483 bp, Homo sapiens
  MAP TO AP000056.1; EXPRESSED IN HEART, SIGNAL = 1.1; EXPRESSED IN PLACENTA, SIGNAL = 0.68; EXPRESSED IN BONE MARROW, SIGNAL = 0.64; EXPRESSED IN HELA, SIGNAL = 0.72; EXPRESSED IN ADULT LIVER, SIGNAL = 0.78; EXPRESSED IN BRAIN, SIGNAL = 0.71; EXPRESSED IN LUNG, SIGNAL = 0.85
tgatgtttctgccagtccacgtctccccacaggctttccataagtatttttgaataaataaatcacttctagaaggagcaatattgtgtagacagcagtgtgattttccagggaggagtgagccctttattcagatattctacatccacctgctgccttcccagcacccattgcttgctggccacatctcagcgaggaagggaagcaaactccatcacagctggtgaaaagtgacatgcacttgcaaacctctctttgtgatttcttgcccttctgttttagttcatgaaaagaacctgctgaaggccctgaggaagctggataattacttaaatagccctctgcctgatgaaatagatgcctacagcaccgaggatgtcactgtttctggaaggaagtttctggatggggacgagctgacgctggctgactgcaacctcttacccaagctccatattattaaggttcatcttccctcccgac

SEQ ID NO: 2985 - DNA, 499 bp, Homo sapiens
  MAP TO AF011889.1; EXPRESSED IN HEART, SIGNAL = 2.5; EXPRESSED IN ADULT LIVER, SIGNAL = 3.8; EXPRESSED IN FETAL LIVER, SIGNAL = 3.9; EXPRESSED IN LUNG, SIGNAL = 3.4; EXPRESSED IN BRAIN, SIGNAL = 5.5; EXPRESSED IN HELA, SIGNAL = 5.6; EXPRESSED IN HBL100, SIGNAL = 4.2; EXPRESSED IN PLACENTA, SIGNAL = 6.5; EXPRESSED IN BT474, SIGNAL = 3.5; EXPRESSED IN BONE MARROW, SIGNAL = 3.1
ccctccattcctccttcttctcccttagcctgtgttcttaagaacttaaaacctcttcaactcacacctgacctaaaacctaaatgccttactttcttctgcaatgctgcttgaccccaatacaaactcgacagtagttccaaatagccagaatacggcactttcaatgtttccaccctacaagatctaaataattcttgtcgtaaaatgggcaaatggtctgaggtgcctgacgtccaggcattcttttacacatgggtcccttcctagtctctgtgcccaatgcaactcatcccaaatcttccttctttccctcccacctgtcccctcagtcccaacaccaagcgtcactgagtctttctaatcttccttttctatagacccatctgacctctcccctcctcgccaggccaagctaggtcccaattcttcctcagcctctgctcctccaccctataatccttttatcacctcccctcctcacacccggtccagttta

SEQ ID NO: 2986 - DNA, 401 bp, Homo sapiens
  MAP TO AP000200.1; EXPRESSED IN HELA, SIGNAL =   1; EXPRESSED IN BT474, SIGNAL = 0.76; EXPRESSED IN ADULT LIVER, SIGNAL = 0.88; EXPRESSED IN HEART, SIGNAL = 0.95; EXPRESSED IN PLACENTA, SIGNAL = 0.85; EXPRESSED IN FETAL LIVER, SIGNAL = 0.85; EXPRESSED IN LUNG, SIGNAL = 0.97; EXPRESSED IN BRAIN, SIGNAL = 0.91; EXPRESSED IN BONE MARROW, SIGNAL =   1; EXPRESSED IN HBL100, SIGNAL = 0.93
atgttggaaagaaggggagggtgtagcaaaatgctgaataataacactaataataataaggaggaaaacactactagttcatgagttgcacaagatgccaaagttaaaaaaaaaaaaaagtacttaggagcttatttttatcatcacactggatcatgggtgatctggggttttgccagagttgaggatttgcatattgacagttcctgacttttacgtattgtactttctcttaaccttcactttcatgcactctgtattgatccccctaaatctgcttttatgtgacagatagggactctcctgcctctactgctcagtgataaagtggcattgtgcctgcccaccaacaggttctaccaacagttctaccaacagcgccacctcgatcaaaacaccaa

SEQ ID NO: 2987 - DNA, 461 bp, Homo sapiens
  MAP TO AP000126.1; EXPRESSED IN BT474, SIGNAL = 0.65; EXPRESSED IN ADULT LIVER, SIGNAL = 0.81; EXPRESSED IN BRAIN, SIGNAL = 1.5; EXPRESSED IN HEART, SIGNAL = 0.91; EXPRESSED IN BONE MARROW, SIGNAL = 0.78; EXPRESSED IN HELA, SIGNAL = 1.2; EXPRESSED IN PLACENTA, SIGNAL = 0.72; EXPRESSED IN LUNG, SIGNAL = 0.93; EXPRESSED IN FETAL LIVER, SIGNAL = 0.76; EXPRESSED IN HBL100, SIGNAL = 4.2
ctcatgacaagtgggaggtcaaatttccgaaaatgtcccagagaacatcagccaggggaggcagcttgaggaagcgtctgctttttcattttcctcccctgggactcgaggtaagttggaaagcagtgtctctgaggttgatgagcaaatgaggactgaaggagtggatacggggggaacctggagatgtggggctcagccttcaagggagagaagatgctacacctcggggatttcagccaatcagtagagagcaaatggcgagtatctcctgtagccgaaagccccacagccgttgtagccatagccgaagccatagcccactggagagtaggtgctgccatagccacagccaacgctatatcccagcgggtagccatagctgccccagtagcatcctgggaagacagccccggggaagttgtcgcagagcatggtgtcgggagtggagggcttaggta

SEQ ID NO: 2988 - DNA, 471 bp, Homo sapiens
  MAP TO AL078476.2; EXPRESSED IN HEART, SIGNAL = 1.2; EXPRESSED IN HBL100, SIGNAL = 0.8; EXPRESSED IN FETAL LIVER, SIGNAL = 0.65; EXPRESSED IN BRAIN, SIGNAL = 0.97; EXPRESSED IN PLACENTA, SIGNAL = 0.96; EXPRESSED IN BT474, SIGNAL = 0.81; EXPRESSED IN BONE MARROW, SIGNAL = 1.1; EXPRESSED IN HELA, SIGNAL = 0.91; EXPRESSED IN ADULT LIVER, SIGNAL = 0.86; EXPRESSED IN LUNG, SIGNAL = 0.96
aaaaatagacaaaaacagacgttatcctcatgaaattttagaacactgaggacaaagaatttcctaaaatcttaagagcttccaagaaaacacaggtcacatagaaaaaaccgagttcttcatatactagaaactaaaagacagtggatcaattgactaaaaatgataaatgaaaatgtatttccaacctggaaaagatgagtcaggtaggaaggtaaaataaagacattttcagaagtatataatgctcaaaacttaccttccacacattctctgtcagggagctatggaagatacgttccacccaaattgagggaagaaataaagagaaattcatgaaattgcagaaaacacatgtaacacaggagagaacagaagatgatctccaggatgatgaagaggaaatccccaagttaatcatatgtaatggtttgtggccaaggatagcactggatctagcacaaaggccac

SEQ ID NO: 2989 - DNA, 376 bp, Homo sapiens
  MAP TO AJ229043.1; EXPRESSED IN HBL100, SIGNAL = 1.7; EXPRESSED IN HELA, SIGNAL = 2.1; EXPRESSED IN BT474, SIGNAL = 1.6; EXPRESSED IN FETAL LIVER, SIGNAL =   2; EXPRESSED IN LUNG, SIGNAL = 1.8; EXPRESSED IN BONE MARROW, SIGNAL = 2.1; EXPRESSED IN PLACENTA, SIGNAL =   2; EXPRESSED IN HEART, SIGNAL = 1.7; EXPRESSED IN ADULT LIVER, SIGNAL = 2.4; EXPRESSED IN BRAIN, SIGNAL =   2
tgttgcaatgaacatctctgaacataatctttgggtgcatttctgattactgccttaggataagttcctagaaatagacatctgtttcaaaggctacaaggatttttaagagttttggtacggacacattgccctttctggaaaggctgtgccaacttatattccaccccacagtgcatgacggtggctattttgcctccactcttatcatcactggacattatctccactttgttttattattttttttcattgtaacttctctccaatttggggatgagggtctttaataaactcaactttgcaataaccttcacctctcgtaataacttctcagagttgctgttattctggtagccatttcttcctgtctgca

SEQ ID NO: 2990 - DNA, 455 bp, Homo sapiens
  MAP TO AL035610.2; EXPRESSED IN PLACENTA, SIGNAL = 0.61; EXPRESSED IN BT474, SIGNAL = 0.67; EXPRESSED IN BONE MARROW, SIGNAL = 0.74; EXPRESSED IN LUNG, SIGNAL = 0.7; EXPRESSED IN HELA, SIGNAL = 0.66; EXPRESSED IN ADULT LIVER, SIGNAL = 0.81; EXPRESSED IN FETAL LIVER, SIGNAL = 0.73; EXPRESSED IN HEART, SIGNAL = 0.89
caccaattctatcacattagggcctcaccctaatcttaattaccacctaaagacctatttccaaatacagtccctatgggggttagggctttaacatataaatttgatgggggtgggggtaagtgacaacatttagtctatagtggagtgaaagggtctactccattagagtttaaattctggctccttaatgtttgtattatctaccattttctcagacatcagaactctttactacatcctcatcattgtctgcagtaaagggatgtggagcaccatgggatggcccagaagaatttagatcctacctgaaagcagtgtgtgccactttaacccactacataagtctggctagaacccagacttgtggccacacaagaaattcagttgagaaattcagtttagacatggaaccaagtagagaagagaaaataggcattgatgtataccggcag

SEQ ID NO: 2991 - DNA, 465 bp, Homo sapiens
  MAP TO AL049563.4; EXPRESSED IN FETAL LIVER, SIGNAL = 0.59; EXPRESSED IN ADULT LIVER, SIGNAL = 0.93; EXPRESSED IN HEART, SIGNAL = 0.98; EXPRESSED IN BONE MARROW, SIGNAL = 0.71; EXPRESSED IN LUNG, SIGNAL = 0.76; EXPRESSED IN HELA, SIGNAL = 0.65; EXPRESSED IN PLACENTA, SIGNAL = 0.71
cctgagttttccactgaggcaagaaaattgattctgaaatttagaaatattttcaataagtagctagaaaatcttattcactcgaataacttagatgatgaagagtctatagactaagagtccaacctgaattgcattggaaagaaataattcagtctaacaactaggaaagctaatgtaaattaattgaggcagacgaactctttcattgagcttctaatgaactctatgccgatgttgccccaacctgaaaccaaagtaagcacgcttgtaaagcaaagctactcacggcaataagctgataggagttgttcatcatagcaatcagcatgttcagcagcactaccagggagatgacattgtatgttccaaacatggtagctcctacaaactcggtgaattcgtgtctggctttcacattggtgacatatagatttaaaaggccaaatacagaccagaagagtg

SEQ ID NO: 2992 - DNA, 464 bp, Homo sapiens
  MAP TO AF024533.1; EXPRESSED IN FETAL LIVER, SIGNAL = 1.4; EXPRESSED IN LUNG, SIGNAL =   1; EXPRESSED IN BONE MARROW, SIGNAL = 1.3; EXPRESSED IN HELA, SIGNAL = 1.2; EXPRESSED IN HEART, SIGNAL =   1; EXPRESSED IN PLACENTA, SIGNAL = 1.3; EXPRESSED IN BT474, SIGNAL = 1.1; EXPRESSED IN ADULT LIVER, SIGNAL = 1.3; EXPRESSED IN BRAIN, SIGNAL = 1.2; EXPRESSED IN HBL100, SIGNAL = 1.2
aacagccttaactcatgccgggccacccttgagctctggacgtggcagaagcaaagagaactttacctgatgtgatgcacaaatgtttcatcacgcacacagacacacgcacgcatgcacacacacatgtgcaactctgtgacgggctcgcacgctggcgccacccaacgccagtctctcacctctttgtctgccttggatgctacggagggccaggatgttctgctcatcggagaggaactgtttcatcttgtgaaatggctccttgccacgaacagtcagtttattccatggcttgggccgggccagaatctcgctcacggacccttgagacagtcccaacacataatgtccgaaaatacgttgtccgatattgtgcttaatcagctgctctttgacctgccgggcgatttctgcagtgtccatctcctcgccctcggagacgctcccagcactttctgact

SEQ ID NO: 2993 - DNA, 485 bp, Homo sapiens
  MAP TO AL021395.14; EXPRESSED IN BT474, SIGNAL = 6.6; EXPRESSED IN ADULT LIVER, SIGNAL = 7.9; EXPRESSED IN FETAL LIVER, SIGNAL = 7.3; EXPRESSED IN BRAIN, SIGNAL = 6.3; EXPRESSED IN LUNG, SIGNAL = 6.6; EXPRESSED IN BONE MARROW, SIGNAL = 7.4; EXPRESSED IN PLACENTA, SIGNAL =   8; EXPRESSED IN HEART, SIGNAL = 5.4; EXPRESSED IN HELA, SIGNAL = 8.4; EXPRESSED IN HBL100, SIGNAL = 6.9
acctgtcagaggtcacccagcaagtccaggagaacaacctcactgtcctcccgccttctgcagtgatgggaaggaaacttggcattggctcagatcccttctcatagattctggctctttctgctgctgaaatcagaaagatgaatatgtggtaaattttgccaggaagggttggaaataatgcagtctcctttgtctgtgtcttgggtttctgaggttgaggtcctgatgatgccctgactcctgacttctgctgccttctagacccttccaattctgccccagcatcccccccacccatttctaatacaggccctcacttgcagatactcctgtctgttttctgtcacctgaaatagcttgagcctctcagtggctgttagtaccacctggttgggaatgggtatgctaatatttgagactgggggtgcttagataaggtgtcaagtcctgatatcctaagttgatgtagggttgatgccagg

SEQ ID NO: 2994 - DNA, 434 bp, Homo sapiens
  MAP TO AC012665.1; EXPRESSED IN HBL100, SIGNAL = 2.2; EXPRESSED IN ADULT LIVER, SIGNAL =   2; EXPRESSED IN FETAL LIVER, SIGNAL =   2; EXPRESSED IN LUNG, SIGNAL = 1.7; EXPRESSED IN HEART, SIGNAL = 1.7; EXPRESSED IN HELA, SIGNAL = 2.1; EXPRESSED IN PLACENTA, SIGNAL =   2; EXPRESSED IN BT474, SIGNAL =   2; EXPRESSED IN BRAIN, SIGNAL = 2.1; EXPRESSED IN BONE MARROW, SIGNAL = 1.8
tgaagattgggacagggaaggctgaagttaagtgctgtatgcagtgacccagattcctatctgcttcctgcctgaagccttgtgctccaaaggccagagagtgttgggtttgaactctgtatgctcacacagttggaggtggtggtggaggcttgcacaaaaggcagagatgagagcctgtggctcaggggaggcacggctcttgtgcaagggggaagcctttcatacctgcttccagcagcagtgcctagtagcagagtgagcagcaagatcctgggctcaggggcatcctggaagtgcgggaaggattcaaagaaggagtggacggcagagctgaccaggagctcacacagcttccagtcaaactggttcatcccacgggccaggaatccaaggcacgaagctgttgaattcctggcaatctgaatttccgt

SEQ ID NO: 2995 - DNA, 492 bp, Homo sapiens; identical to SEQ ID NO: 323
  MAP TO AP000231.1; EXPRESSED IN HELA, SIGNAL = 0.8; EXPRESSED IN ADULT LIVER, SIGNAL = 0.78; EXPRESSED IN HEART, SIGNAL = 0.87; EXPRESSED IN PLACENTA, SIGNAL = 0.73; EXPRESSED IN BT474, SIGNAL = 0.61; EXPRESSED IN FETAL LIVER, SIGNAL = 0.64; EXPRESSED IN LUNG, SIGNAL = 0.92; EXPRESSED IN BRAIN, SIGNAL = 0.88; EXPRESSED IN BONE MARROW, SIGNAL = 0.66

SEQ ID NO: 2996 - DNA, 474 bp, Homo sapiens
  MAP TO AL050305.9; EXPRESSED IN HEART, SIGNAL = 0.93; EXPRESSED IN FETAL LIVER, SIGNAL = 0.99; EXPRESSED IN LUNG, SIGNAL = 0.99; EXPRESSED IN PLACENTA, SIGNAL = 0.92; EXPRESSED IN BT474, SIGNAL = 1.9; EXPRESSED IN BONE MARROW, SIGNAL = 1.6; EXPRESSED IN HBL100, SIGNAL = 1.3; EXPRESSED IN HELA, SIGNAL = 0.96; EXPRESSED IN ADULT LIVER, SIGNAL = 0.9; EXPRESSED IN BRAIN, SIGNAL = 1.2
tagggactggagtgagcctgcagcgtaccacagcacccctacggaaaactggccagattgttacgtgagtgcccattcccatatctcctcaccatgcaggtcctccaggccttggcctccagcaaccccctgccagagctattaagccaggagcagctctgcaacttcctggacacagcccccaggggcaactgaaagcctctctgccactgcctctacagtggaactgcccttgctactctcagactaatgaaggagcaaagaccctaagtgccttaaacaaatctccagcaagatgcaggcaacagagaggaggtcagtctgtctcccataggtcccagatactccccactgctcataatgagacagaaaagcctcagcttgggcccacagcacagacacttcatcctgggctgattgtacagattgctgacctacatctctctggggtggagcctccagcagataagcaaa

SEQ ID NO: 2997 - DNA, 454 bp, Homo sapiens
  MAP TO AL049836.2; EXPRESSED IN PLACENTA, SIGNAL = 0.81; EXPRESSED IN HBL100, SIGNAL = 0.83; EXPRESSED IN FETAL LIVER, SIGNAL = 0.78; EXPRESSED IN BRAIN, SIGNAL = 0.82; EXPRESSED IN BT474, SIGNAL = 0.89; EXPRESSED IN BONE MARROW, SIGNAL = 0.95; EXPRESSED IN HELA, SIGNAL = 0.81; EXPRESSED IN ADULT LIVER, SIGNAL = 0.67; EXPRESSED IN LUNG, SIGNAL = 0.83; EXPRESSED IN HEART, SIGNAL = 0.8
gacccgtaagaggaaggagggcggcgagggaggcgcggaggaagggcctggctgggaaagcccctcttggagaacccctgagggagctgcaaggtgagcaccccaacctctgccttcagccctgccaggtagtggggccagaacaatcgccggcccaggcagaagtgagggggcgaggacggtgcctgcgtctagtgctgccacgactccctcttcccctctgtccactaccggggtgacagcgaggtcatggaaggcagatgtggggagccaagaatcccaacagcatcgggtccccttgaggatgacagggaccaacttttctttgccatttccagtcttcagttggccttggacagagcccaagatctcatgaggaaggagcagagaggccttttggtgttgctgcaaacatcatggggcccagaaaaagacgtcactgagatcctgggac

SEQ ID NO: 2998 - DNA, 480 bp, Homo sapiens
  MAP TO AP000086.1; EXPRESSED IN PLACENTA, SIGNAL = 0.97; EXPRESSED IN BT474, SIGNAL = 0.87; EXPRESSED IN BONE MARROW, SIGNAL = 0.8; EXPRESSED IN FETAL LIVER, SIGNAL = 0.79; EXPRESSED IN LUNG, SIGNAL = 0.83; EXPRESSED IN HELA, SIGNAL = 1.2; EXPRESSED IN ADULT LIVER, SIGNAL = 0.64; EXPRESSED IN BRAIN, SIGNAL = 1.2; EXPRESSED IN HEART, SIGNAL = 0.85; EXPRESSED IN HBL100, SIGNAL = 0.85
ggtcacagggtaacaatggcccatggttaagcattcagtctctactaagggccaatagcaggccaaaagctgtttctcaaaaggaaattagttatctgcgaaggatgacagagctttgcttaaaatcctaagggccttccctttgattcacctttaagggtctgaaaaggctccaaagagcatctctatctgcctctgacacttcaagtaccattgaatctgctggatcatagggtctacatggcagagaagcttgcatggagcctggacctgctgcagagccttttctcattctaggccccactcagaaccagcagctttctggggtggtgggggtgggtcctgaggagaatcagcatcgtcttacctggcaacagcctcggtggggatggtgggggggcattctagtttgctctggaagtgtagatttaatgccctcagaaggggatataaagaaatgcatttagagggcagtgaaca

SEQ ID NO: 2999 - DNA, 496 bp, Homo sapiens
  MAP TO AC008074.1; EXPRESSED IN BT474, SIGNAL = 0.88; EXPRESSED IN LUNG, SIGNAL = 0.6; EXPRESSED IN PLACENTA, SIGNAL = 0.91; EXPRESSED IN FETAL LIVER, SIGNAL = 0.62; EXPRESSED IN HEART, SIGNAL = 0.89; EXPRESSED IN BONE MARROW, SIGNAL = 0.76; EXPRESSED IN ADULT LIVER, SIGNAL = 4.8
atgatccaaacacctccctgcaggccctacctccaacactggggatcacatttcaacagagatttagagggaatacctatccaaactatatcactacctattccagtgttggcaggagctggtttttgttggaagacatatttgtgtcaaccatgtaaaaagcttattcatattcccactgccttttgataccacaccatggccaattacggatgaaatgccagtttctttcctcctaggtttttgtggagagactgagaaaatcacttcctggagaaatgaaggctgaaagccctggcaaaaaaggagatggttctctagagacaggcaggaaaaaagtttcaggaggagacatgtcaggtgctgatgcgagaagcaaaggtaccaatgttgatggcaccttcttccagatcgtaaagggcttctccttgggttcaagctttctgcaaatggcagcagctgggcaggctgctaagcatagaggagagttgccctc

SEQ ID NO: 3000 - DNA, 439 bp, Homo sapiens
  MAP TO AF064861.1; EXPRESSED IN BONE MARROW, SIGNAL =   2; EXPRESSED IN HEART, SIGNAL = 1.9; EXPRESSED IN ADULT LIVER, SIGNAL = 2.7; EXPRESSED IN BRAIN, SIGNAL = 2.6; EXPRESSED IN LUNG, SIGNAL =   2; EXPRESSED IN HELA, SIGNAL = 2.2; EXPRESSED IN HBL100, SIGNAL = 2.2; EXPRESSED IN PLACENTA, SIGNAL = 2.2; EXPRESSED IN BT474, SIGNAL = 2.3; EXPRESSED IN FETAL LIVER, SIGNAL = 1.9
cattcaatgaagttatgagtgagctacaaaatggaaaattaagaactcacattgataaaacctcaaacaacatctcagaataaattcaagctttttagcttaacatctatatctttatcaactttttaatgcagaaggacccattaaacacttatgtaataaaattcaatgttctatgctaaatgcagagaattttatagtccacagcatgatttatagttacattatcacctttcttccacaatgcttacattacttcacaattataataattattaggctattaatacaaagcagaacacttcttcaaattaaggtaccttttgctgtacgtagcaaagactgccttcctgcaccaagtaaagaagtgactcttgaaatactgggtggaatttctttatccaacataggaccgatgcgctggcagatttgcaaaaga

SEQ ID NO: 3001 - DNA, 449 bp, Homo sapiens
  MAP TO AL049767.9; EXPRESSED IN BONE MARROW, SIGNAL = 0.88; EXPRESSED IN ADULT LIVER, SIGNAL = 0.74; EXPRESSED IN BRAIN, SIGNAL = 0.71; EXPRESSED IN PLACENTA, SIGNAL = 0.68; EXPRESSED IN BT474, SIGNAL = 0.65; EXPRESSED IN LUNG, SIGNAL = 0.66; EXPRESSED IN HELA, SIGNAL = 0.65; EXPRESSED IN FETAL LIVER, SIGNAL = 0.72; EXPRESSED IN HEART, SIGNAL = 0.82
tggatccatgttggagtttgtcttggtgcgcaggacagagtgaggtttgtactttacttgaatgttcctctctcacttcaaccacattttggtaatgccctttattttgatgagaatttttagtctcacgttgttgtttgttagctactagctcttcagtttggagaacataactgctttgggatccgccttgttttctacctttttgtgcaccagagacggaagtttgttctttacttagtccatgaacccacagcctttcttctgtgtttgaatattgactggatattccctttccagatgggctattcccctgatcttgagaaggattttgtgtcccacgatgagctttgcctcctttatggtgtataactaccctgtgaaaatgaccttttgatttatcatggtctctgccttcttgtttattatggagcagttgttgacttcca

SEQ ID NO: 3002 - DNA, 479 bp, Homo sapiens
  MAP TO AC009237.1; EXPRESSED IN BONE MARROW, SIGNAL = 0.89; EXPRESSED IN HBL100, SIGNAL = 0.69; EXPRESSED IN ADULT LIVER, SIGNAL = 0.86; EXPRESSED IN BRAIN, SIGNAL = 0.7; EXPRESSED IN PLACENTA, SIGNAL = 0.99; EXPRESSED IN BT474, SIGNAL = 0.87; EXPRESSED IN FETAL LIVER, SIGNAL = 0.77; EXPRESSED IN LUNG, SIGNAL = 0.8; EXPRESSED IN HELA, SIGNAL = 0.72; EXPRESSED IN HEART, SIGNAL = 0.78
tttagttgttttctaattgtatttccgatttgatttaaacatttaaacctaaagggcttttttgcaggtgtttgggaattgatgaattacataaattttgaaggaaggtcttgcttaactcatcatcctgtttgtaaaggatggaaaataaaagaaggaatgaggaggatgaagttgtgggctctgtgaggtggaagtaggcctgggtatataacctacaaaattcatatccctacagggcgatgtggttttacgggcacagatgatcaggaatgagtataggaagctgcatccggttctccataaggaagaaaaacaacatttagagagactgaacaaggaataccaagagatttttcagcaactccagagaagttgggtcaaaatggatcaaaagagtaaacacttgaaagaaatgtatcaggaactaatggaaatgtgtcataaaccagaggtggagctgctccaggtaagaatgg

SEQ ID NO: 3003 - DNA, 388 bp, Homo sapiens
  MAP TO AC007370.7; EXPRESSED IN HEART, SIGNAL = 0.96; EXPRESSED IN BT474, SIGNAL = 0.63; EXPRESSED IN BRAIN, SIGNAL = 0.96; EXPRESSED IN PLACENTA, SIGNAL = 0.84; EXPRESSED IN BONE MARROW, SIGNAL = 0.76; EXPRESSED IN FETAL LIVER, SIGNAL = 1.5; EXPRESSED IN LUNG, SIGNAL = 0.8; EXPRESSED IN HELA, SIGNAL = 0.96; EXPRESSED IN ADULT LIVER, SIGNAL =   1
aaaaagcattgagccagaggtagtgtcaaacattacgtcttagacaaaaactaaaacgaaaacagctattccaataagaagagaaatgaaggtagaaggatgcatgagacttggtaaatttgtcagtggtaagaagagcaaagtgaagtatttcatatctaatgatctgttgtctctgtgaaataagggagggaggaagaatcacttgctaggagtgagaaggcaggtggtctggaagatgactctagaaaagaggtcaagttgttagttcacctgtactgcaataatggtgatgaaaatgatgatgatgatgatgatgatgacgacgatgatgatgacagtaagggcaatgaatactaatggctgtagctagtatatttgttatgca

SEQ ID NO: 3004 - DNA, 473 bp, Homo sapiens
  MAP TO AC008039.1; EXPRESSED IN PLACENTA, SIGNAL =   1; EXPRESSED IN FETAL LIVER, SIGNAL =   1; EXPRESSED IN HEART, SIGNAL = 0.95; EXPRESSED IN HBL100, SIGNAL = 0.96; EXPRESSED IN BT474, SIGNAL = 0.97; EXPRESSED IN BONE MARROW, SIGNAL = 0.91; EXPRESSED IN LUNG, SIGNAL = 0.89; EXPRESSED IN HELA, SIGNAL = 0.86; EXPRESSED IN ADULT LIVER, SIGNAL = 0.92; EXPRESSED IN BRAIN, SIGNAL = 0.84
gccttaccttctccacagcctgtgctcctccccctggcagctctgtaggaccatgggttcccatgttcttgtcatctcagtgtggctgatgttcccaccacagggatctaaaggagcccctgtagcttcaaagttagagcccctctctgggtgtctgctgtagctttcctctgcagagtaatggcagcaggggaggaaggaaatgggaacctattggccttacagcaaggggatgccctaacctgaccacctcccagtgcaggtccaagaagaagaggttgcagccagtggctcccaggtagtcagagaagtaatgatgagttttggggctgggctcatgctgagcaaccaacagagaatagatgcaacgagccccaaaggtaatgagcccagaatgctgctaactggagtgctccgcctgggatcactggagaaaggagctccggcagttctgtgctgagggaaactgaagc

SEQ ID NO: 3005 - DNA, 476 bp, Homo sapiens
  MAP TO AF067844.1; EXPRESSED IN BONE MARROW, SIGNAL = 1.9; EXPRESSED IN ADULT LIVER, SIGNAL = 1.7; EXPRESSED IN FETAL LIVER, SIGNAL = 2.7; EXPRESSED IN BRAIN, SIGNAL = 1.2; EXPRESSED IN LUNG, SIGNAL = 2.1; EXPRESSED IN HEART, SIGNAL = 1.8; EXPRESSED IN HELA, SIGNAL = 2.3; EXPRESSED IN HBL100, SIGNAL =   3; EXPRESSED IN PLACENTA, SIGNAL =   2; EXPRESSED IN BT474, SIGNAL =   2
gggagaaaatgcaaacatgccagagggcttcataagaccatacataccctttaatgactccattaagtgttatcaacaaatgttagtaataataaatatagttattatcattattgttcttattacagcctcattttatgttattactgattttttaatggggtcagtgagaaaataagacttcattctcaaaatattcaaatgtctagtcagatcctggcagcagctgcagcggctctccttgccatctccttttcacttctggaaacatgggctcccatgtggctgtctttgatgatgtcatcaaggtgttcagtgacatgaaagtgtgcaagtcttcaacactagaaaaggtgaagaagcgcaagaagttgctgctcttctgcctgagtgagtacaagaagtacatcatccttgcggaggccaagaagatcctggtaagtaatgtggaccaaaccattgatgatccctatgcc

SEQ ID NO: 3006 - DNA, 374 bp, Homo sapiens
  MAP TO AL022162.1; EXPRESSED IN HBL100, SIGNAL = 4.1; EXPRESSED IN FETAL LIVER, SIGNAL =   4; EXPRESSED IN BT474, SIGNAL = 3.9; EXPRESSED IN LUNG, SIGNAL = 4.2; EXPRESSED IN PLACENTA, SIGNAL = 3.5; EXPRESSED IN HEART, SIGNAL = 4.8; EXPRESSED IN HELA, SIGNAL = 4.7; EXPRESSED IN ADULT LIVER, SIGNAL = 4.2; EXPRESSED IN BRAIN, SIGNAL = 4.6; EXPRESSED IN BONE MARROW, SIGNAL = 4.4
cattcggtgttcacacaagcacatgcatggagcccacgtatgcccatgacctgtagaggcatcctctcaagtcagtggggcacacccacaaaattgttcagactcagaatcttggagcagaagcaattttagagctgcccccattaaaaaagtcgtctttgatgaacgccagtcagccactcctctacacacactttggcgtttgctcgttctcacacctcctgcagaacaggaaagaggagatgacctcgggaactttcttaaaatggcctgtgcctagacttgacgcaagcctgaagaagtccctgcagttccaggactcagccagcagggggcagcctctcatgacacactgggtttcccccaaagaataa

SEQ ID NO: 3007 - DNA, 454 bp, Homo sapiens
  MAP TO AF068862.1; EXPRESSED IN BT474, SIGNAL = 2.2; EXPRESSED IN FETAL LIVER, SIGNAL = 2.8; EXPRESSED IN LUNG, SIGNAL = 2.5; EXPRESSED IN BONE MARROW, SIGNAL =   2; EXPRESSED IN PLACENTA, SIGNAL = 2.3; EXPRESSED IN HEART, SIGNAL = 2.8; EXPRESSED IN ADULT LIVER, SIGNAL = 3.2; EXPRESSED IN BRAIN, SIGNAL = 1.7; EXPRESSED IN HELA, SIGNAL =   3; EXPRESSED IN HBL100, SIGNAL = 2.3
tgcttataacaattttgtgaggtaactaagatagatatcctcattttacatagaagaaactaagattaaaagggttatattttccagtgatctattttttttttaagaataatttggtgaaattcttttttacttacaaagcctaaggttttaagctgcatggcagcatgccattttatacacattttttcttgagtaggaaaggaattgattgaaaaacccgacacaacctaattgttttcttaatttctaagggtgcctttagccgtctggacccaactggaacatttgagaaagaaatgattggcagaattccctgtggtcgcctggggactgtagaagaactcgcaaatcttgctgctttcctttgtagtgattatgcttcttggattaatggagcagtaagcgttgtttatttctcttcacttttttttcaggagtgtgtttggggcag

SEQ ID NO: 3008 - DNA, 485 bp, Homo sapiens
  MAP TO AC008277.1; EXPRESSED IN BONE MARROW, SIGNAL =   1; EXPRESSED IN HBL100, SIGNAL = 0.71; EXPRESSED IN ADULT LIVER, SIGNAL = 0.74; EXPRESSED IN BRAIN, SIGNAL = 1.1; EXPRESSED IN PLACENTA, SIGNAL = 1.1; EXPRESSED IN BT474, SIGNAL = 1.1; EXPRESSED IN LUNG, SIGNAL = 1.1; EXPRESSED IN HELA, SIGNAL = 0.74; EXPRESSED IN FETAL LIVER, SIGNAL = 0.93; EXPRESSED IN HEART, SIGNAL = 0.95
tggagcagcagctataaaaggtaatatagatggaaatacaagtctctgtccaccaaagaaagaaagaacagcttatgtctgatgtcagaaagagtagcaaaagaatatcaagggctaggaggaagtgtgtatcagtgaaggggcattatgagtgcaaaaggaatgagaattaaggttttacatgtttaccaaacattgattatgggaacacaaaatatattgaagaagtaacagagttttaaaatatatagtttcttatttaacaatttgtatcggattatgagttctaaccttcaccactctccatgccttctacaaaaatccccccacattggggaagaatccagtaccggcgtctgtaacgatcttggccaaacatcactgaacgcaatgagtgagacgcatcaaagagcttccttctgtactgactctgttgctgttaaaaaaatggtacatataattaggtttgggatgttaaatgcttt

SEQ ID NO: 3009 - DNA, 492 bp, Homo sapiens
  MAP TO AF134726.1; EXPRESSED IN HBL100, SIGNAL = 6.1; EXPRESSED IN FETAL LIVER, SIGNAL =  20; EXPRESSED IN LUNG, SIGNAL =  87; EXPRESSED IN BONE MARROW, SIGNAL =  15; EXPRESSED IN PLACENTA, SIGNAL = 4.9; EXPRESSED IN HEART, SIGNAL = 7.9; EXPRESSED IN HELA, SIGNAL =  11; EXPRESSED IN BT474, SIGNAL =   7; EXPRESSED IN ADULT LIVER, SIGNAL = 3.8; EXPRESSED IN BRAIN, SIGNAL = 3.7
gaagaaatagtcgtaagatggcagtataaattcatctctgcatgtagaaaccggaaaaaaagcaagttcagtacttcaccaaaaaatttcaacattgcaaacacaggaaattgagaactgacaaacagaaatactaggaaatgcaaagtcttgaagctccaaaacaaaaacagcaatcttggaaaggcccctaatctacctcctcaatggtggggcctgacccagaccctcccttgggaccctgagccccgaagcccccaggcccgggaccaccggcaccctggtacagtccgctgatgatggggttacacacctgctccagctccttcctcttgtgctcaaactcgtccttctcggccaaggtgttggcgtccagccacgagatgacctcttgacacttgtccagcaccttcttcttgtcggcctcgctgatcttgcccttgagcccctcatcctccacggcgctcttcatgttgaaggcgtaggactcca

SEQ ID NO: 3010 - DNA, 409 bp, Homo sapiens
  MAP TO AF070717.1; EXPRESSED IN BRAIN, SIGNAL = 1.4; EXPRESSED IN HBL100, SIGNAL = 2.4; EXPRESSED IN ADULT LIVER, SIGNAL = 2.1; EXPRESSED IN FETAL LIVER, SIGNAL = 2.2; EXPRESSED IN BONE MARROW, SIGNAL = 2.1; EXPRESSED IN LUNG, SIGNAL = 1.9; EXPRESSED IN PLACENTA, SIGNAL = 1.9; EXPRESSED IN HEART, SIGNAL =   2; EXPRESSED IN HELA, SIGNAL = 2.3; EXPRESSED IN BT474, SIGNAL = 1.9
tttgaccttgcgaataagggatttaaagagccatagatacatgctcttgagatcagcatcatctccttggttcccattctggctctgacttggtccatcaattacaatcattggctttctttgccactcccgaggcttgacatactccatagtttgaacccctggatcccgaccttacccctgtgtccaagttagaatctcgtgaactacctgctcattttctcagacttacctgacatttcttgcttgcttgaatctcttcactgtcttattcttcaggtgtttctgagagtgggctgtcgttcgccaccctgtgatgaagctccccaatggtgactgcttgaggggagagtggaattccctgtcagatcctgcagcagggtctgtacccttgttggagttggaggat

SEQ ID NO: 3011 - DNA, 444 bp, Homo sapiens
  MAP TO AL022237.1; EXPRESSED IN HELA, SIGNAL = 7.2; EXPRESSED IN HEART, SIGNAL = 5.1; EXPRESSED IN PLACENTA, SIGNAL = 7.3; EXPRESSED IN HBL100, SIGNAL = 6.5; EXPRESSED IN FETAL LIVER, SIGNAL = 7.1; EXPRESSED IN ADULT LIVER, SIGNAL = 7.9; EXPRESSED IN BT474, SIGNAL = 6.3; EXPRESSED IN BRAIN, SIGNAL = 5.9; EXPRESSED IN BONE MARROW, SIGNAL = 6.1; EXPRESSED IN LUNG, SIGNAL = 6.9
ttctagcttccccacacaccagccctgtggcatcattcttcccaacgtccaaacgtttttccaagggggagaaatggactgggtcatgtaaagaaatactcatttttagggctttttatgtggccttcaaagcacgttgcaaacaaatccctttcactcctcagaggaggagccattaggaaggtagggggcgacaggcacagcctacagcctctcctcaggaggacagagggggtcatcgcatttgagccccctgcagtcatctcgggggctcctgagggtccaggtccacatgttcgagggtctgcagcacatccacggcgctgtaggacttccaggcctgcatgttacagctcttcaggatggctcccagctgcctgccagggcctacttcgaaagtttgggggaaccccctgccctttttcctttcgtatatggcatgca

SEQ ID NO: 3012 - DNA, 470 bp, Homo sapiens
  MAP TO Z98051.6; EXPRESSED IN PLACENTA, SIGNAL = 1.1; EXPRESSED IN HBL100, SIGNAL =   1; EXPRESSED IN FETAL LIVER, SIGNAL = 0.97; EXPRESSED IN LUNG, SIGNAL = 1.3; EXPRESSED IN HELA, SIGNAL =   1; EXPRESSED IN BRAIN, SIGNAL = 0.9; EXPRESSED IN BT474, SIGNAL = 1.2; EXPRESSED IN BONE MARROW, SIGNAL = 1.3; EXPRESSED IN ADULT LIVER, SIGNAL = 0.73; EXPRESSED IN HEART, SIGNAL = 0.8
cggccatgtaatagaccatcagtaattcttattgttaaatttgtcttccttgacctagtcaatgtacatcacaagccctgagtcagaactcatatgatggtagtgtgatgtcatgtaaagagtcggggctttggtgccagacaggcttcctgagtgtgtagctttgagccctttaacgacaggcctcagttcacttaatgggaatagaattgtgagactgtacctagagtgctccatcctgggcctaaaacatgggacaagttcgaaaaatggcagctgctattattactcttcctcatttgaaggctgacctggcaaccaaagtggaaaagatgagacagagcatccttgaaggagtcaacatgaatcatccaccgccttctgctctacttccgtcacctacttttgtgcctcccatggtgccctctctctaccctgtttcactttattcccgagctatgggctccatg

SEQ ID NO: 3013 - DNA, 468 bp, Homo sapiens
  MAP TO AF139813.1; EXPRESSED IN ADULT LIVER, SIGNAL = 5.5; EXPRESSED IN FETAL LIVER, SIGNAL = 4.7; EXPRESSED IN BRAIN, SIGNAL =   3; EXPRESSED IN LUNG, SIGNAL = 5.3; EXPRESSED IN BONE MARROW, SIGNAL = 4.1; EXPRESSED IN PLACENTA, SIGNAL = 4.3; EXPRESSED IN HEART, SIGNAL = 3.4; EXPRESSED IN HELA, SIGNAL = 5.7; EXPRESSED IN HBL100, SIGNAL = 3.8; EXPRESSED IN BT474, SIGNAL = 5.4
aagggaccttggatgatgcctaggccagtgcccctctcatccaggtgagtaaaatgattgtccaaatcacagggagagcatggattcctgagggaagaggctgtgggtgggaaccaggtccaccctgtccccaagacttgcatcttggcgccaatggccatggtcacggcacaaccagctgaagaacccccagaaacagtccctttgttctgtgtggcctcctgagccttggcaaggatctcactcattcccagaaaggacggccacttgcaggaagactattattaaggccagggctgaggccggccatggagaggtccgagccagggaggcctcacaggagcctttcatgagtctccagtggacggaggtgctggaggagccagcactgcagacgttgctctcgaggtggccagtctcggggcctgcagtggcccacagaacaggcccctgagtcctgctctaagc

SEQ ID NO: 3014 - DNA, 414 bp, Homo sapiens
  MAP TO AF091512.1; EXPRESSED IN BT474, SIGNAL = 2.8; EXPRESSED IN HEART, SIGNAL =   2; EXPRESSED IN ADULT LIVER, SIGNAL = 2.4; EXPRESSED IN BRAIN, SIGNAL = 1.6; EXPRESSED IN LUNG, SIGNAL = 2.8; EXPRESSED IN BONE MARROW, SIGNAL = 2.5; EXPRESSED IN PLACENTA, SIGNAL = 1.9; EXPRESSED IN HELA, SIGNAL = 3.1; EXPRESSED IN HBL100, SIGNAL =   2; EXPRESSED IN FETAL LIVER, SIGNAL = 2.8
tccacatccttcctcctcagtcctgccattttgctctttccccaggagtacacatccagatgccagcccagctaccacaggggatccctctgggagactgaaagtacaggttctggggcccaggttgaagccgaccaaccctgagcctcaggccaggggaatggcagcccccttggaggcccaggaccaggcccctggggagggagaagggcttctgattgtgaaagtggaagattcctcctgggaacaggaatctgcccagcatgaggatggcagggattccgaagcctgccgccagcgcttccggcaattctgctacggggatgtgcatgggcctcatgaggccttcagccagctctgggagctctgctgccgctggctgcggcccgagctgcgtaccaaggagcagatcct

SEQ ID NO: 3015 - DNA, 456 bp, Homo sapiens
  MAP TO AC008176.1; EXPRESSED IN HBL100, SIGNAL = 0.79; EXPRESSED IN FETAL LIVER, SIGNAL = 1.1; EXPRESSED IN BRAIN, SIGNAL = 0.94; EXPRESSED IN PLACENTA, SIGNAL = 0.91; EXPRESSED IN BT474, SIGNAL = 0.87; EXPRESSED IN BONE MARROW, SIGNAL = 1.1; EXPRESSED IN LUNG, SIGNAL = 0.84; EXPRESSED IN HELA, SIGNAL = 0.91; EXPRESSED IN ADULT LIVER, SIGNAL = 1.4; EXPRESSED IN HEART, SIGNAL = 0.93
ccctgctaaagcagagaggaatacatttgagaaaaacagaaatatcagcatcagcccttaaaatcactgacacagtaaaggattccaaaagcataagccttaacttctattctactatgacagggacctctaccatcaattagaaattagtgaagactaaattcttactttggaaatgttataagattgcctgcatcattttcatccttcaagtcaagagtcattttctcacttaagtgccccttgggcctgctgaaggttgactggtttgatctatgcccccacaaaggaatggggcttttgaggttcctgagaacaagttgaccaggatccaattttttttcctcacagatgtcagttctggaagcaagtctgcatttctctgcaaatcctttcttaagcacctcttcccctatatccacactgccatactcagcctgagcaataactgttcca

SEQ ID NO: 3016 - DNA, 383 bp, Homo sapiens
  MAP TO AC004890.2; EXPRESSED IN HEART, SIGNAL =   1; EXPRESSED IN FETAL LIVER, SIGNAL = 0.82; EXPRESSED IN PLACENTA, SIGNAL = 0.78; EXPRESSED IN BT474, SIGNAL = 0.77; EXPRESSED IN BONE MARROW, SIGNAL = 0.91; EXPRESSED IN HBL100, SIGNAL =   1; EXPRESSED IN LUNG, SIGNAL = 0.91; EXPRESSED IN ADULT LIVER, SIGNAL = 0.99; EXPRESSED IN BRAIN, SIGNAL = 1.5; EXPRESSED IN HELA, SIGNAL =   1
gagccgtcagccattctcgcggccgcgggagcgttcgtcaccagcaatctgagcggtggcgcgggcggcatttaagtgtgcggaggcgcattcccgccgcgctgcgtgacgcctgggctcccggcaccggactcgggacacgcgggaggccctcccgaaatagctgccgaatgaatggtgcggacccggaggctggagtggcctcgcgtgcgtggcggttcattcgcgggtgtttgccaaggcctgcgggggccggcagcggccagttgccagggcgaccgaggcgaccgggccgcgcctgcacgcagccccgtagaatgagaaggggacggtcaggccgcggggaaagcactgatcgcatttgccacccaagaggtctttgg

SEQ ID NO: 3017 - DNA, 370 bp, Homo sapiens
  MAP TO AF196779.1; EXPRESSED IN HBL100, SIGNAL =   2; EXPRESSED IN HELA, SIGNAL = 2.6; EXPRESSED IN FETAL LIVER, SIGNAL = 2.4; EXPRESSED IN BT474, SIGNAL = 1.9; EXPRESSED IN LUNG, SIGNAL = 2.4; EXPRESSED IN PLACENTA, SIGNAL = 2.2; EXPRESSED IN HEART, SIGNAL = 1.7; EXPRESSED IN ADULT LIVER, SIGNAL = 3.1; EXPRESSED IN BRAIN, SIGNAL =   2; EXPRESSED IN BONE MARROW, SIGNAL = 1.7
tgactgtcacagcgaacctctgtgggcctcttcctttgatctaggctgtgtagttgtgtgagagtgggaaggttctcaggtgtgggcctgtctgggattctgcataggctgtatgtctccgtgactctatgactctgtgtcccggatgcctggtgtggattaatagcagcagcaactatatgtgtggctgttatggtggctgtttgcatgtgggcctgtctgggatttggtgtggtctgtgagcatggctgtgtccctggggttccgtgtccccatggtccctacatgcaagtggctgtggggactcaccagcatgggccctttgttattctctcggtacttgttctgcaggaagatgtaggtggccaga

SEQ ID NO: 3018 - DNA, 496 bp, Homo sapiens
  MAP TO AL035420.14; EXPRESSED IN BONE MARROW, SIGNAL = 1.3; EXPRESSED IN HBL100, SIGNAL = 1.1; EXPRESSED IN FETAL LIVER, SIGNAL = 1.1; EXPRESSED IN ADULT LIVER, SIGNAL = 0.88; EXPRESSED IN BRAIN, SIGNAL = 1.4; EXPRESSED IN PLACENTA, SIGNAL = 1.1; EXPRESSED IN BT474, SIGNAL = 1.3; EXPRESSED IN LUNG, SIGNAL = 1.3; EXPRESSED IN HELA, SIGNAL = 1.3; EXPRESSED IN HEART, SIGNAL = 1.3
tactgatccctgcctggtgtcgtgtgctcagctgttcctgggccttgctcacggagtaggggagggcaaaggatagagcgtgtgtgcacctggccaggtggagagtggccacattttatcccgatgctatggttgtggggggagaagtgtctccatgtcatttgtcatgtttccctgcctcctgtcatgtttctcagataagttcctgggtctcttgcccaactgacgcaaacagcctataggttgagtgtccagaggagggggcgatgcagagggccggcctttgtgccaaatggggacaggaggcctggtgagtcctgctgtacaccattcctggtggtggagccgctcagctgtgagcgcccatcctttctctgggcagtggccatgtggcctaggctagcaggccctggaagagcctttctgtgtccttcctggttcttggtgtctaccgcctcacccacacccctgaagctctgggctttgctactcagct

SEQ ID NO: 3019 - DNA, 388 bp, Homo sapiens
  MAP TO AL022314.1; EXPRESSED IN PLACENTA, SIGNAL = 3.8; EXPRESSED IN HEART, SIGNAL = 0.99
ggaaatggatggaccaagtgtgcaggactgggtgggggccatccgggtggagaagtccagctgcaactggacactgagtgtcctcagcagtggactgaggaccctcaacagggtccttctgaggctcggcgcagagcaggcagctgcctgcctcccaccctggccatctgtctacaccaagtgagttgggtcctgaccctggagttcttggagggacaagtaggcatcagtgttcaggggcaggcgagcattaagggccctgaactccccctgcccaggaggcctggaccaggggaaactgactccctccctggggccagcgtcagggacctcctccccagcctctcgcagcaccagctcagggggtggctgaaaatccaccaggtct

SEQ ID NO: 3020 - DNA, 1968 bp, Homo sapiens
  MAP TO AC006539.1; EXPRESSED IN ADULT LIVER, SIGNAL = 1.1; EXPRESSED IN LUNG, SIGNAL = 2.2; EXPRESSED IN BRAIN, SIGNAL = 2.2; EXPRESSED IN HBL100, SIGNAL = 1.3; EXPRESSED IN HELA, SIGNAL = 1.3; EXPRESSED IN PLACENTA, SIGNAL = 3.4; EXPRESSED IN BT474, SIGNAL = 2.4; EXPRESSED IN FETAL LIVER, SIGNAL = 1.7; EXPRESSED IN BONE MARROW, SIGNAL = 1.8; EXPRESSED IN HEART, SIGNAL = 1.9
gggtttctctccagtatgaattctcttatgttcagtaaggattgaggaccagttaaaagctttgccacattcttcacatttgtagggtttctctccagtgtgaattctcttgtgtttagtaaggtatgagaacctcttaaagactttgtcacatttttcacatttgtagggtttctctccgctatgaattaccttatgttcagtaagaattgatgatgagttaaaagctttgccacattcttcacatttatagggtttctctcccgtatgggttctctcatgtatagtaagtagtgagcagtggttaaaggctttcccacattctttacatttgtagggtttctttccagtgtgaattgtcttatgtttggtgagatgtgagtgccggttaaacgctctgccacagtcttcacatgtatagggtttttctcctgtatgaattttcttatgtctaacaaagggtgaacaccagtgaaaggcttttccacattcttcacatttgtagggtttctcaccagtatggattctcttatgtttagtaagactcgagcaccagttaaaagctttgccacattcttcacatttgtatggtttctctccagtgtgaattctcttatgtttagtaaggtatgagaaccacttaaaggttttgccacattcctcacatatgcagagtttctcttcagtgtgaattatcttatgataagaaaggcctgagtgagatttaaagactttgccacattgcatacatttgaaaagtttctctgtagtatgtcttatgttttctctatttagatttgatgatttactaaagactttcacacatttattatatgggaaaattttgctaggtagagttgacaaacattggttaagtccattataaatttctttttgatccttacactcacccacattttccccatccttccttaagtgtaaatcctcaagtccacagcttccatatcttctcagtatcactttttggaatgaatcttgcatgcactgttctggcaaaaggtcttcagtgtaatgagaagacatagctgaaatatgaaattaacaaaatatcccacttgttattttcagactcagatacatatactttacaaatctaatacagaaaattaagaaaaggacaggatgacttactagatgcagctgggaaacactcactccaaggagagaaaacaaaatgttgagtaaaacatcatactttaaacagatcttttgagaaaaagcttaattcagaggtaatgcagaaactgtggttgaagaggaagatgggaagcttgctcaaagtcactgggcaccaggactggctcgtagatccagaccagtcttatggaagggatatgtgaagaaaccccagggcaacacagtctagccatggacctctgagattctcactttggttccttctccttgaaaggcatttcccagctaaatctagtctgagctcctgattatagactctcatatgatccctatacatctgtgaactggcagggggagccacctggagaataggcagaggcacagcttaaactcttgtggaaatctgcagttttcactgtgctgtgcagctgtagctgaccataggtgcccatcctccgaggctctgcatcttgcactgaggggatccatctgctgctgtctgccaggctgagagagagcaaggttgtagctatcatgggactgaggtgaatctgatccatgcaccactttgcctgctggcaccgtccaagatgacctacctggctggtcctgcagaagggtgcccacagcatggcatccacttatatcacagatggtgcttgaccccaaagggccagaggacaaatccatgggcccagtgccaactgcccaggtcttcagcacactgcctgataatatcaagctgatatatgtggtctgagcttaagtggggtagaagcccacactgtcagcacacagagaagtcatggg

SEQ ID NO: 3021 - DNA, 491 bp, Homo sapiens
  MAP TO AC007095.2; EXPRESSED IN FETAL LIVER, SIGNAL = 1.7; EXPRESSED IN LUNG, SIGNAL = 1.6; EXPRESSED IN HELA, SIGNAL = 1.8; EXPRESSED IN HEART, SIGNAL = 1.4; EXPRESSED IN PLACENTA, SIGNAL = 2.6; EXPRESSED IN BT474, SIGNAL = 1.6; EXPRESSED IN BRAIN, SIGNAL = 2.7; EXPRESSED IN BONE MARROW, SIGNAL =   2; EXPRESSED IN HBL100, SIGNAL =   2; EXPRESSED IN ADULT LIVER, SIGNAL = 1.4
tgacgacagaatagaatgggcctgtgaggctggaaggagatattttccttggtttaagaactatttgctttgtgtgggaagagattgataggtggaagtttcagcgggggagtaggtgggagtgaccgatgggaaggagaaaaactgcccgtgagggacagaagttggagaactagctgcttgtctagccgccttatcagcataagcgttgcttagagcaatgggatctgacgccttttgatggcctttgcagtgaatgactccagcttcctttggaagtaaagcagccttgagcagagtttttatttaagaggcattaatgatggaggacccttgtgtagtgaggaaatctctttcagcctgtataacagcatggtggtgcagaatatgaaaggcatatttagagtcagtataaatattgacatgtagtccttttgcaagagtgagggcttgagttaaggcagctagtttggcttgctgagaggtagtgg

SEQ ID NO: 3022 - DNA, 468 bp, Homo sapiens
  MAP TO AL049797.8; EXPRESSED IN PLACENTA, SIGNAL = 0.95; EXPRESSED IN LUNG, SIGNAL = 0.9; EXPRESSED IN HEART, SIGNAL = 0.93; EXPRESSED IN BT474, SIGNAL = 0.81; EXPRESSED IN BONE MARROW, SIGNAL = 0.94; EXPRESSED IN HBL100, SIGNAL = 0.72; EXPRESSED IN FETAL LIVER, SIGNAL = 0.91; EXPRESSED IN HELA, SIGNAL = 0.87; EXPRESSED IN BRAIN, SIGNAL = 0.75
gataggtggtgaggctggagaaggttgagatatgagggcttttgctgggataacactgaagggaaggatttggaatcccaatgaatttcagggaagaatgaaagagatacaaacaccatttaagatgacttcttgtataataatgaaaagaaaggtttaaatttaacataatgcctttttgaatatatgtagttgtatcatgtaggatgccaaaaggtttgaatttagtaactgatctaatactgggcttgattttttctatcacagaactgtaactcccaagaacagggtattttccgcagtaatgtgaaaaacctggttaatggtttcatggtgttaatatgccacctagtggatcaacttgcacattctaacttggggttttcagagttggaagtgttcattttcctttatcagaatggcttgctcactaggaacaccagctgaggtccaattacgataaatcca

SEQ ID NO: 3023 - DNA, 399 bp, Homo sapiens
  MAP TO AL132719.1; EXPRESSED IN BONE MARROW, SIGNAL = 2.5; EXPRESSED IN BRAIN, SIGNAL = 1.6; EXPRESSED IN PLACENTA, SIGNAL =   1; EXPRESSED IN HBL100, SIGNAL = 1.2; EXPRESSED IN HEART, SIGNAL = 1.4; EXPRESSED IN ADULT LIVER, SIGNAL = 1.1; EXPRESSED IN FETAL LIVER, SIGNAL = 0.99; EXPRESSED IN BT474, SIGNAL = 1.7
acgcatctctaggggaaatgaagaccctcaatacaacgttagatttgttgcagagaactatagcatgatggccgggaatagccttttatggtttggaaagtgaggcacagagagacacggctatgccctggaccagtcagtgagtcaggatctctaaggatagcctataccaacaaaatacatcaggcatcacctttaggagtatattttttcaactcaattgttcattcaaacagaaacacacacacacacacacacacacactctctctctctctctctctctctcaggcagagcaatcaaatcgcaatggatctcaaacacctggcctggtccctccactgtcattgttcttgatgtcacaatcctgtcacactctgctccagtcttcctgcagac

SEQ ID NO: 3024 - DNA, 390 bp, Homo sapiens
  MAP TO AL022323.7; EXPRESSED IN BONE MARROW, SIGNAL =  13; EXPRESSED IN HBL100, SIGNAL =  14; EXPRESSED IN FETAL LIVER, SIGNAL =  19; EXPRESSED IN BT474, SIGNAL =  13; EXPRESSED IN LUNG, SIGNAL =  16; EXPRESSED IN PLACENTA, SIGNAL =  16; EXPRESSED IN HEART, SIGNAL =  11; EXPRESSED IN HELA, SIGNAL =  16; EXPRESSED IN ADULT LIVER, SIGNAL =  20; EXPRESSED IN BRAIN, SIGNAL =  12
tgctttgtaaaatgtgtgtatgtgtatgtatgtgtatatatacgtgtgtatatatgtgtgtatgtgtatgtatgtgtatatatgtatgtgtgtgtatatgtgtgtgtgtgtgtatgtgtgtgtatatatatgcatgtgtatgtgtgtgcatgtgtatatacatatttttaattccagtctatgatttgcttatatcattcttaatggtgtcttctaatgaacagaaattttctttaagatcaatctattccatgttttcctctagaaactttgtgaaaaattttcactgaaagctttttatgtaggggatgaaatgtttacagtggcattttggaaagttgatgcctgccccaatgtggaccaggccaagggggaggctgatagagtcct

SEQ ID NO: 3025 - DNA, 471 bp, Homo sapiens
  MAP TO AL034406.1; EXPRESSED IN HBL100, SIGNAL = 0.74; EXPRESSED IN FETAL LIVER, SIGNAL = 1.3; EXPRESSED IN LUNG, SIGNAL = 0.85; EXPRESSED IN BRAIN, SIGNAL = 0.9; EXPRESSED IN PLACENTA, SIGNAL = 0.89; EXPRESSED IN BT474, SIGNAL = 0.74; EXPRESSED IN BONE MARROW, SIGNAL = 0.94; EXPRESSED IN HELA, SIGNAL =   1; EXPRESSED IN ADULT LIVER, SIGNAL = 0.78; EXPRESSED IN HEART, SIGNAL = 1.4
cacaagtttgtgtgactttagccaatattcttaactactgtgctacataacctcccatgtacctctacttatgtacctctactttccacgtacctcccatgtacccttatatgtatttaagatttaaccatttaatatcagaaggggaggtaaagagggaaagtgagtccttctttacctccccttctgatattaaattgttaaactttattgaagaaaaatagactaagccctgccagccaaaggtttctagtaggtcttggatagtattttgttcaacacacccagttttgtgaggacagtatacatactattggttagcaggtggttctgctgcagtggattgagggttggagcacccccaatgcctggctggccagctagggctgcatgagcaattccatgttggggtccaggtgcagcaaatggagactgcatcttatctttatcccaggaggattcacttccacc

SEQ ID NO: 3026 - DNA, 402 bp, Homo sapiens
  MAP TO AL022344.1; EXPRESSED IN LUNG, SIGNAL = 1.4; EXPRESSED IN BRAIN, SIGNAL = 1.3; EXPRESSED IN HBL100, SIGNAL = 1.4; EXPRESSED IN HEART, SIGNAL = 1.5; EXPRESSED IN ADULT LIVER, SIGNAL = 1.5; EXPRESSED IN FETAL LIVER, SIGNAL = 1.6; EXPRESSED IN PLACENTA, SIGNAL = 1.5; EXPRESSED IN HELA, SIGNAL = 1.5; EXPRESSED IN BT474, SIGNAL = 1.8; EXPRESSED IN BONE MARROW, SIGNAL = 1.5
gaccaaacaagggaagatggccttgctggaggttttaaaagtaagccacctatgtgtaggcctgcaaaggtgttactgaatcccctcttctctgacctcttgtcttgtagctagggggccactgttccagtgtggcacaatgcccttctttagtgttatgggttaagcccttggactgtggatcatatttaaccccctagtcaatggtagatgcttctgacttcttgtcagctgaagctggcttttgggttctgtcttccaggggtaggagattttgccgtgagtgacatcagtttcctcccagacccttgcgctcttcctgaacaacaaaagaagcgctgtttaaatgagaaggagaagctggtttatgcgcctctttctggagttgggggtgtgctgtat

SEQ ID NO: 3027 - DNA, 427 bp, Homo sapiens
  MAP TO AL030999.2; EXPRESSED IN BT474, SIGNAL = 1.9; EXPRESSED IN BONE MARROW, SIGNAL = 1.5; EXPRESSED IN LUNG, SIGNAL = 1.5; EXPRESSED IN HEART, SIGNAL = 1.4; EXPRESSED IN ADULT LIVER, SIGNAL = 1.8; EXPRESSED IN FETAL LIVER, SIGNAL = 1.5; EXPRESSED IN BRAIN, SIGNAL = 1.6; EXPRESSED IN PLACENTA, SIGNAL = 1.6; EXPRESSED IN HELA, SIGNAL = 1.8; EXPRESSED IN HBL100, SIGNAL = 1.3
attcttggatgtgtccctggttagcatctttgaattcctgtaacagctattccaaatttttacttctcacctcaaccctccaatcttatatcatacctctaactcactaatttaagtttccttctaatttattgagaaaactgagtccatgcagtatgaacaaaccaaacctcttggatttatagcaacaacttttctatatctcttgctcacttctacattttctccttcagtttcagaacaggtggccctttttctttacaaagtagccactaattttattccacattggaccatcaattatctctttctttggcacactcaactttgccctcttgactggtttattcctcagagatacaagtatattgccataaaacatctttctccaaagcgtagttaagagtctcttcatctgccagccatt

SEQ ID NO: 3028 - DNA, 373 bp, Homo sapiens
  MAP TO AC007110.3; EXPRESSED IN LUNG, SIGNAL = 1.4; EXPRESSED IN BONE MARROW, SIGNAL = 1.5; EXPRESSED IN HELA, SIGNAL = 1.3; EXPRESSED IN HEART, SIGNAL = 1.2; EXPRESSED IN PLACENTA, SIGNAL = 1.3; EXPRESSED IN BT474, SIGNAL = 1.3; EXPRESSED IN ADULT LIVER, SIGNAL = 1.5; EXPRESSED IN BRAIN, SIGNAL = 1.4; EXPRESSED IN HBL100, SIGNAL = 1.4; EXPRESSED IN FETAL LIVER, SIGNAL = 1.3
tcacttccacactccttcccctctctctgaatccagaatcttgagatttaaaaggtctagtaaaatttccccccattcggtccactcttggctagaaaaatgcataggattttattcagtggggacatagagggaagtcagaatattgaaaatatggggaaattaggtatatgctctccctcccatactcaaaaatcaaatatttttcatcatgaatgggaaaaataatcctatggatagaagtctaacctatcctttgtatagaaacatctttccacgggagcgttatgtaagaattggctgtaatgagattatcagtatccaactagctgaatcagtccctctcacaaagacagttttaggaggtgagcca

SEQ ID NO: 3029 - DNA, 403 bp, Homo sapiens
  MAP TO AL031005.1; EXPRESSED IN HBL100, SIGNAL = 1.1; EXPRESSED IN HELA, SIGNAL = 1.2; EXPRESSED IN HEART, SIGNAL = 1.1; EXPRESSED IN BT474, SIGNAL = 1.2; EXPRESSED IN BONE MARROW, SIGNAL = 0.98; EXPRESSED IN PLACENTA, SIGNAL = 1.2; EXPRESSED IN ADULT LIVER, SIGNAL = 1.2; EXPRESSED IN FETAL LIVER, SIGNAL = 1.2; EXPRESSED IN LUNG, SIGNAL = 2.1
aaaccaggatgtgggttcagctgtgcccaggagttgacatcattcttggggcccacggaaacccatcagcacccaaagtttcacctgtatgcagtgcccatctacgcaaggccagcagcctgcaaagatctcaccagtggggcctctggaaataacccaggctcagaaactagaagaccgccgtcccacccagggcaagcccctctcccaccccaggtcctgctaaactcaaaacaggaagaggtcgtgcccgccccctcgaccgctgcaggttcaagctagctcacctggatcacgttgctgttggagttcttggaatcggcactgacatagacagagaagaagggtgaggtgcggtagtgggcggtgaccacctgcagggtgtcctggaagttgtccttgg

SEQ ID NO: 3030 - DNA, 498 bp, Homo sapiens
  MAP TO AL022401.1; EXPRESSED IN LUNG, SIGNAL =   3; EXPRESSED IN BRAIN, SIGNAL = 2.7; EXPRESSED IN HELA, SIGNAL = 2.8; EXPRESSED IN HBL100, SIGNAL = 2.6; EXPRESSED IN HEART, SIGNAL = 2.4; EXPRESSED IN BONE MARROW, SIGNAL = 2.5; EXPRESSED IN PLACENTA, SIGNAL = 2.8; EXPRESSED IN BT474, SIGNAL = 2.8; EXPRESSED IN ADULT LIVER, SIGNAL = 2.7; EXPRESSED IN FETAL LIVER, SIGNAL = 2.9
gaggcaaaagggagacaaggtgtcaaacacagaggaactagcatagaagaagtaaaagaattagtagtaataataattattatatttatacttaatatttgtattaaatgttactgacattctattttatgccaaggcactaaggatccagagttgactaaaagtatttgtcatcctggaggaatcactgtcaggtaaaggagaaaagcatgtaaacaaatgacagtgtagtgtggcgtatgtactaatatatccaaagtctagaaataacagaaaggagaaatgagcccaatctaggagtcagagaaccttacggagaggggtataacagaagagtagcaattctccatctaaatcaaagacagtagaattgaaacattctggatgtgaagaataacattggtaccagtccaggatgtaaaagataaatatcatggtgtattgtttcatacaaataaacaggtattagtaaatcaagaagtctgagagatggaggct

SEQ ID NO: 3031 - DNA, 488 bp, Homo sapiens
  MAP TO AC007114.7; EXPRESSED IN LUNG, SIGNAL = 1.1; EXPRESSED IN BONE MARROW, SIGNAL =   1; EXPRESSED IN HBL100, SIGNAL =   1; EXPRESSED IN HEART, SIGNAL = 0.94
gcccaataaccaggaaaatgtctaagttttgtggtagagacaggtggtgttcttttctttaatcatacctaagggcccccaaacccaggtaggctcaggcttctgaggggtcacagccacgtgcagctccccaccctttgaataatcaaggtcggggtagacggatgtaatgggaaatggccttccacctggcatttcaacatcacccaccgcaagactgacatgtccaaggccagttcccttccagttgaacccataaaactgcctctaggtgcctctcagagtcaattcctacccatggtatctacgatgagatccagctgtccattatacaccgtcacgttgatccctgcctccagcaactcgtccacaatgctaatgactggcttcatgaagtcctcctccatgttcacaaagacgttggtagcctggcctgcacatggggaaggagaaagagggagtagcttggaatctgccaaaacaggagg

SEQ ID NO: 3032 - DNA, 462 bp, Homo sapiens
  MAP TO AC007320.2; EXPRESSED IN BONE MARROW, SIGNAL = 0.78; EXPRESSED IN HBL100, SIGNAL = 1.3; EXPRESSED IN LUNG, SIGNAL = 0.97; EXPRESSED IN ADULT LIVER, SIGNAL = 0.94; EXPRESSED IN BRAIN, SIGNAL = 1.3; EXPRESSED IN PLACENTA, SIGNAL =   1; EXPRESSED IN BT474, SIGNAL = 0.92; EXPRESSED IN HELA, SIGNAL = 1.8; EXPRESSED IN HEART, SIGNAL = 1.2; EXPRESSED IN FETAL LIVER, SIGNAL = 1.3
tgagatccattcattaaaatgtgacagagtttagaaggaaacactcacacaatggattcccatgagggcagattttcatgaactgggaaatgtttagtgtggaattcattgagccaaactcaggaaaccctagaccgatgagaaaaatggaagtcagaaacaaagaggaaagtgtggaggccacatcccacacagcgtcattccgttgcactcccgtttgactctgggtatgaaagccatcaaatcaggagttagccaggatggacccaatttgcacaccaaatgtttttggcgtgttggagtactcccacctcaacatcgggccattgtatggactgcttgtgcaattaaaggaatgtgcgaatggtgttggaagcaccttctgtgtcatctgtctttctcagtgttgcaggtgaagttgtaggacccaatccatctctcaccagattgtatcctcacccc

SEQ ID NO: 3033 - DNA, 412 bp, Homo sapiens
  MAP TO AL031055.1; EXPRESSED IN BONE MARROW, SIGNAL = 1.5; EXPRESSED IN LUNG, SIGNAL = 1.2; EXPRESSED IN BRAIN, SIGNAL = 1.3; EXPRESSED IN HELA, SIGNAL = 1.4; EXPRESSED IN HBL100, SIGNAL = 1.1; EXPRESSED IN HEART, SIGNAL = 1.3; EXPRESSED IN ADULT LIVER, SIGNAL = 1.6; EXPRESSED IN PLACENTA, SIGNAL = 1.1; EXPRESSED IN BT474, SIGNAL = 1.4; EXPRESSED IN FETAL LIVER, SIGNAL = 1.6
actgtcatttgcgatttcccactcttttgtttcacattaccagtaattgacattttttttcttcccttcaagtggagttaatggattgacatcttcttgttagcaccttggatctttattgaggactccttcctggggctggcatcacccccaagtgcccttgggaggcctggggtggtccgtgtggtttgcccacatttctcttggcggcccttggcagcaggcggtgggagggaggttgagggaaggagggggtgtgtcccccacccccaagtccacaggccacacggctctgaacctttggaatggcatctctcacgctgaacatacgatgacccaggaaagggcagccttgaagggttgcctgcaggaggccagccttgtgcagatgcgaaactgggcaaagagagga

SEQ ID NO: 3034 - DNA, 420 bp, Homo sapiens
  MAP TO AC007158.5; EXPRESSED IN HEART, SIGNAL =   1
aggtgatgtgtcctcaagggaaggctttaatcaatttttccattggtactagagagctgaatctataaactgctgagtaaaaaggagtgatgagctgtcttaacacagtctccacctgtttaaaggtgcacttactcttgctgaggaaaaccagaagaagcttcagctcctgaacaatagctacagccaaggatactatcatcatttcttccttttcttggcctttattcttccttgtcagatctcatacaactcaaccaaaaggaagaagaataagaagaaggaagaggaagaggaggaggaggagaaggagaccatttttctattaacttaatcagatcagaaaatggacttacctacttgggtgaaggaagccaaagggaagcagtgtgttgacgatgctgggaaaagcactaagca

SEQ ID NO: 3035 - DNA, 432 bp, Homo sapiens
  MAP TO AL022313.1; EXPRESSED IN PLACENTA, SIGNAL = 8.1; EXPRESSED IN HBL100, SIGNAL =  54; EXPRESSED IN HEART, SIGNAL = 6.1; EXPRESSED IN ADULT LIVER, SIGNAL =  11; EXPRESSED IN LUNG, SIGNAL = 8.2; EXPRESSED IN BRAIN, SIGNAL = 7.5; EXPRESSED IN HELA, SIGNAL =  11; EXPRESSED IN BT474, SIGNAL = 7.2; EXPRESSED IN FETAL LIVER, SIGNAL = 9.1; EXPRESSED IN BONE MARROW, SIGNAL = 7.6
cagctccattgcagacaaactgggctggggaaggcagctcccacctggcagaggatgcccttctgccccctgacaggagggaggagaccaccgcatccccgactttcagccctcacgtgccatctggtggctttgctgcagacactgccatgatctgagtggtctttggcaatcacgcattggcgggagtgtgaggttgcggggaaagagggactgaccatgggcctaggtggggaggcctggccactgtgcccacagcttaggaagggacagtcagagctcctctttgttgctatcgacggactgagccagaggccctggagccaggggggaacctagtggctcttggtcgccaagctgctggctgctgtcctccaggcgcctgcctgtgggggcatagtcccgcaggagcctgctctccactctgtgctg

SEQ ID NO: 3036 - DNA, 383 bp, Homo sapiens
  MAP TO AC007097.2; EXPRESSED IN PLACENTA, SIGNAL =   2; EXPRESSED IN ADULT LIVER, SIGNAL = 2.4; EXPRESSED IN FETAL LIVER, SIGNAL = 2.2; EXPRESSED IN BONE MARROW, SIGNAL = 2.2; EXPRESSED IN LUNG, SIGNAL = 2.1; EXPRESSED IN BRAIN, SIGNAL = 2.1; EXPRESSED IN HEART, SIGNAL = 1.8; EXPRESSED IN HELA, SIGNAL = 1.9; EXPRESSED IN HBL100, SIGNAL = 2.4; EXPRESSED IN BT474, SIGNAL = 2.2
tgcgtgtgtgtgtgtacgtgtgtgtgtgtgtgtgtatcctcttaatgctaggaaggaattacaaaagattttctaccacaattaatgtaatgggactttctgttgggctactctttaggagtcttggagtagaaatggttcttgattactcatattccatggccataacagtaaggggaaaactgccttatttcggcctcttcactaacactccagtgcacgtggtcttcctgcctctcaacgttggtgtgtccttggcagtctccactatgggccttcctaagaaatctctccaagtgattctgtccggtcttgtcaccaaattttacttcctcttcctttttcacttctatggtaaaatgacaactctccatcatgtgcgt

SEQ ID NO: 3037 - DNA, 429 bp, Homo sapiens
  MAP TO AJ229043.1; EXPRESSED IN BT474, SIGNAL =  11; EXPRESSED IN HBL100, SIGNAL =  13; EXPRESSED IN HELA, SIGNAL =  11; EXPRESSED IN HEART, SIGNAL =  11; EXPRESSED IN FETAL LIVER, SIGNAL =  13; EXPRESSED IN BRAIN, SIGNAL =  11; EXPRESSED IN LUNG, SIGNAL =  14; EXPRESSED IN BONE MARROW, SIGNAL =  13; EXPRESSED IN PLACENTA, SIGNAL =  13; EXPRESSED IN ADULT LIVER, SIGNAL =  16
actccacaacgccacttctcgtgcctacagtaaggaaatgagggataatctaaggccacccggtgaggtttggtcgtcactatttatttattctatttgtggcaggttgattccaaaattaaccccaactcttcagccctccttgtacacacaccctttgtaatgtgagtttgaatctcttccagttaagagacaaagtctatttcccaccctttgaatcagggctggccttatgacttgctttggccaataggatgtagttgatatagcaatgtgccagttccaagctttaagacctgcagaggctgtacacatttctgcttactttctctgtcacttccatgtgaacgtgactgtgctagcatcctggaggatgagagaccacatggaggttagtccaggtgtcccagctgaggctgtcctaggcta

SEQ ID NO: 3038 - DNA, 393 bp, Homo sapiens
  MAP TO AL022324.1; EXPRESSED IN PLACENTA, SIGNAL = 3.2; EXPRESSED IN HBL100, SIGNAL = 3.2; EXPRESSED IN LUNG, SIGNAL = 7.6; EXPRESSED IN BRAIN, SIGNAL = 2.8; EXPRESSED IN BONE MARROW, SIGNAL =  13; EXPRESSED IN HELA, SIGNAL = 3.5; EXPRESSED IN HEART, SIGNAL = 2.8; EXPRESSED IN BT474, SIGNAL = 3.2; EXPRESSED IN ADULT LIVER, SIGNAL = 4.5; EXPRESSED IN FETAL LIVER, SIGNAL = 3.4
actgaggctgcagaggaaagggctgggccaggacacctgggaaaggtgacttgggaaggggtcctaggaaggcacagggctgtctgctctccagagggctccagtggaaaggagggaatgaggagggaaggagaggccctgggtggaccagacggccacaccatgaaccctcccagagactttagacagagagaggcgctccacaacaccccacactccctctgccatctctcaccccctcctctgtccacacaggtcagcccaaggccaccccctcggtcactctgttcctgccgtcctctgaggagctccaagccaacaaggccacactggtgtgtctcatgaatgacttctatctgggaatcttgacggtgacctggaaggcagatggta

SEQ ID NO: 3039 - DNA, 433 bp, Homo sapiens
  MAP TO AL021395.14; EXPRESSED IN BONE MARROW, SIGNAL = 1.4; EXPRESSED IN BRAIN, SIGNAL = 1.2; EXPRESSED IN HEART, SIGNAL = 2.7; EXPRESSED IN FETAL LIVER, SIGNAL = 1.2; EXPRESSED IN ADULT LIVER, SIGNAL = 1.2; EXPRESSED IN LUNG, SIGNAL = 1.4; EXPRESSED IN PLACENTA, SIGNAL = 1.3; EXPRESSED IN HBL100, SIGNAL = 1.2; EXPRESSED IN BT474, SIGNAL = 1.1
acgtattcccaaggtcctcccgcaggccggcccccttattgagagaccccctggctctcctgtccaagggccttgcaggaggaatccctcctctgaacctctctatggcccagctccctgcatttcagggcacttcagcacattgtcaggctgtttgcgtttggattgcaaagcagtcaaatatgttttcaagggagaggagggagaaaaaaaattccgccccaccccaccagatccttcttgggaagcatccacaggcatggctcggtctccagattggagccggagctgagaaacagccggatgacggatgctggcgagaaaccaccggttctcaggccccgcctgatgcagttcctccagcaaagattctttggcatcgtggactatctgtctgcttctctggacgtctgcagcgtcttctcactccctc

SEQ ID NO: 3040 - DNA, 352 bp, Homo sapiens; identical to SEQ ID NO: 17
  MAP TO AC007103.4; EXPRESSED IN PLACENTA, SIGNAL = 1.6; EXPRESSED IN LUNG, SIGNAL = 2.1; EXPRESSED IN HBL100, SIGNAL = 1.7; EXPRESSED IN FETAL LIVER, SIGNAL = 1.8; EXPRESSED IN HELA, SIGNAL = 1.6; EXPRESSED IN BRAIN, SIGNAL = 2.1; EXPRESSED IN BT474, SIGNAL = 1.2; EXPRESSED IN BONE MARROW, SIGNAL = 1.6; EXPRESSED IN ADULT LIVER, SIGNAL = 1.8; EXPRESSED IN HEART, SIGNAL =   2

SEQ ID NO: 3041 - DNA, 422 bp, Homo sapiens
  MAP TO AL008632.1; EXPRESSED IN BT474, SIGNAL = 3.4; EXPRESSED IN BRAIN, SIGNAL = 4.3; EXPRESSED IN HELA, SIGNAL = 3.9; EXPRESSED IN HEART, SIGNAL =   4; EXPRESSED IN FETAL LIVER, SIGNAL = 3.4; EXPRESSED IN LUNG, SIGNAL = 3.7; EXPRESSED IN BONE MARROW, SIGNAL = 4.2; EXPRESSED IN PLACENTA, SIGNAL = 6.4; EXPRESSED IN HBL100, SIGNAL = 3.6; EXPRESSED IN ADULT LIVER, SIGNAL =   4
ccttttagccactgctggagcagctgggacacagtgcaccaagtcctgaggctacacacagcaggggaaccctggacctggcccaggaaaccatttttccctcctaggcctctgggccttttatgagaggggctgccatgaagtctcttacatgccctggaaaagtttttcacattgtcttggttattagcatttggctccttgttacttatgcaaatttttgcatcaggcttgcatttctccccagaaaatggatttttctttgttactgcatcatcaggctgcaaattttccaaacttttattctctgttacctcttgaaagcttttctgcttagaaatttcttctgccagatactctaaatcctctttcaagttcaaagcttcacagatttctagggcaggggcaaaatgtcatcagtc

SEQ ID NO: 3042 - DNA, 424 bp, Homo sapiens
  MAP TO AC007101.1; EXPRESSED IN BT474, SIGNAL = 5.9; EXPRESSED IN LUNG, SIGNAL =   4; EXPRESSED IN HEART, SIGNAL = 3.1; EXPRESSED IN FETAL LIVER, SIGNAL = 3.6; EXPRESSED IN ADULT LIVER, SIGNAL = 3.6; EXPRESSED IN BRAIN, SIGNAL = 3.5; EXPRESSED IN BONE MARROW, SIGNAL = 3.4; EXPRESSED IN PLACENTA, SIGNAL = 5.8; EXPRESSED IN HELA, SIGNAL = 4.5; EXPRESSED IN HBL100, SIGNAL =   4
atgtccaagaaaccaggcagggtatggatcttggaagagttgagaatgagacaacttgaagatatggatctgggatccatagaggcaagaatgtcacctggggactgagactgagatagggaaaaatcaaaggtgggcaggtctatgcaagtggaatgcttagggctgggttggacccacctctgctcctcgccctccagcaggcgcctgtaggtggcgatctcgatatccaggcctagcttggagttcatcacctcctggtactccctgatcaggcaggccatgtcttgcttggccttctgcagggcgccctccagctcggccagcttgcagcgggcatcactgagggccgcctcaccctgctgctcagactgggccaccgcagcttccagcttggagttctgggaggtagggggaatatgga

SEQ ID NO: 3043 - DNA, 406 bp, Homo sapiens
  MAP TO AL022395.2; EXPRESSED IN LUNG, SIGNAL = 1.6; EXPRESSED IN HBL100, SIGNAL = 1.6; EXPRESSED IN HEART, SIGNAL = 1.9; EXPRESSED IN BT474, SIGNAL = 1.5; EXPRESSED IN BRAIN, SIGNAL = 1.5; EXPRESSED IN BONE MARROW, SIGNAL = 1.8; EXPRESSED IN PLACENTA, SIGNAL = 1.9; EXPRESSED IN HELA, SIGNAL = 1.7; EXPRESSED IN ADULT LIVER, SIGNAL =   2; EXPRESSED IN FETAL LIVER, SIGNAL = 1.7
aaaaaggactgtttggggacttataaaaataaattaataaggtctgtggcatttggttttttaaagttttttatatcttgggaacaatacttatattggattctatttattttgatgactttgtttcacactgtgacatattgggcatgggtctataaccttaagggaccagtagatctcattctaaactgtattatagggaagtttctttttttggcagatgggagattctttggtcagagagacctacgaaggtgaatgcttcccaagctcgccagtttaaaccttgtattaagcagataaatttccccacaaatcttatacgactggaagtaaatagttctcttctggaatattacactgaattagatgcagttgtgctacatggtgtgaaggacaagccagt

SEQ ID NO: 3044 - DNA, 464 bp, Homo sapiens
  MAP TO AL032818.2; EXPRESSED IN HBL100, SIGNAL = 4.5; EXPRESSED IN PLACENTA, SIGNAL = 3.5; EXPRESSED IN HELA, SIGNAL = 3.9; EXPRESSED IN HEART, SIGNAL = 4.5; EXPRESSED IN ADULT LIVER, SIGNAL = 2.5; EXPRESSED IN BT474, SIGNAL = 4.4; EXPRESSED IN FETAL LIVER, SIGNAL = 3.3; EXPRESSED IN LUNG, SIGNAL = 4.4; EXPRESSED IN BONE MARROW, SIGNAL = 4.1; EXPRESSED IN BRAIN, SIGNAL = 3.3
ccctctgcaaacctcagaaccacctatagcttctgcccgggccctgcaagctgcccaagggggctttttagcagctagatcagagcatatccagtcccctaagaagccctcgctggtccccatcccatggcctttcacacacaacacaaaccagagtcctcacaacggccccgacctccacgagactggtcctgcctctcccctgggacctcctgacctctttctcctcctcctcctctccaggacactgctcgagtcacacttcctggctgttcctctcatgagcccaccctgctgccctccctgtcaggatgctcccatcctgatgtctgctccacctgctctcacctgcttccagcccttcctcagatgctaggtcctggtcaccacctcagggaagccaaactggaccagcttcctggtgccctcaccccttctggcacccttgacccactcacctgtcc

SEQ ID NO: 3045 - DNA, 420 bp, Homo sapiens
  MAP TO AL021406.1; EXPRESSED IN ADULT LIVER, SIGNAL = 7.9; EXPRESSED IN BT474, SIGNAL = 5.3; EXPRESSED IN HBL100, SIGNAL =   6; EXPRESSED IN HELA, SIGNAL =   7; EXPRESSED IN HEART, SIGNAL = 5.7; EXPRESSED IN FETAL LIVER, SIGNAL =   7; EXPRESSED IN BRAIN, SIGNAL = 7.1; EXPRESSED IN LUNG, SIGNAL = 7.6; EXPRESSED IN BONE MARROW, SIGNAL = 7.2; EXPRESSED IN PLACENTA, SIGNAL = 7.1
caagatgagatttgggtggggacacagccaaacctatcacttgtcaagctctttctatatttaatcagcaagacaagtctctttttgtcttttgggaaaataaatttagattgatagttggattatttaaacatttatcacacacacacaaaatattaaaataaataatataattactttcttccactttaaaatattttaaatttactttaagtaatttaaaaggcaaaaatgcaaactttgaacaactgacttattaggacgttggtacctattataaataagtttctcaaatctagcaaagtatgtaatattcactaatttactttgcacatacctttttatcgttgttatcattatccttgttatccttagcatcaccaacagcaaacacatatatgctgttttatccttgccaga

SEQ ID NO: 3046 - DNA, 497 bp, Homo sapiens
  MAP TO AP000188.1; EXPRESSED IN PLACENTA, SIGNAL = 0.93; EXPRESSED IN LUNG, SIGNAL =   1; EXPRESSED IN HELA, SIGNAL = 1.2; EXPRESSED IN HEART, SIGNAL = 0.89; EXPRESSED IN BT474, SIGNAL = 0.94; EXPRESSED IN HBL100, SIGNAL = 1.3; EXPRESSED IN FETAL LIVER, SIGNAL = 0.9; EXPRESSED IN BRAIN, SIGNAL = 1.4; EXPRESSED IN BONE MARROW, SIGNAL = 1.6; EXPRESSED IN ADULT LIVER, SIGNAL = 1.5
tgtcctttcccgtgttcttccccgcctaccccgatggcacagtgtacctttcttaggtactcttcaaagactcaccacagaaggtactaagatatgagtgacctcactaatgatgcttttaaacattataaggcaattagtatgttcttaggcgactttttaatatgcatgccagaagataggttttctcagtaatggatgtaagaaactaaagctattacaactagaaaaggaatttttattattttaaataattgatttctactctttccctttttttaaattagtatttctctgaacagccattgaagaatcttctgctttcaacttctgaggaacaaatcgaaaaatgtttcataattgaaaatataagcacaattgctacagtagaagaaactaatcaaactgatgaagatcataaaaaatacagttcccaaactagccaagattcaggaaattattctaatgaagatgaaagcgaaagtaaaacaagtgaa

SEQ ID NO: 3047 - DNA, 1967 bp, Homo sapiens
  MAP TO AL023279.1; EXPRESSED IN BRAIN, SIGNAL = 1.7; EXPRESSED IN BONE MARROW, SIGNAL = 1.7; EXPRESSED IN LUNG, SIGNAL = 1.5; EXPRESSED IN PLACENTA, SIGNAL = 1.8; EXPRESSED IN HELA, SIGNAL = 1.9; EXPRESSED IN HBL100, SIGNAL = 1.4; EXPRESSED IN HEART, SIGNAL = 1.9; EXPRESSED IN ADULT LIVER, SIGNAL = 1.5; EXPRESSED IN BT474, SIGNAL = 1.4; EXPRESSED IN FETAL LIVER, SIGNAL = 1.7
tcaggggaactctggaaaagactcaataaagtggaggaggaggaggagctcacaggaatctggagaggagactgggcaaaaccctcaaaagtactctgagttctctcaggggaactctggaaaatactcaataaagtggaggagaaggagcggctcacaggaatctggagtggagactggggaaaaccctcaaaagtactctgagttctctcaggggaactctggaaaagactcagtaaagtggaggacgaggaggagctcacaggaatctggagaggagactgtgcaaaaccctcagaagttctctgacttctctcaggggaactctggaaaatactcaataaagtggaggagaaggagcggctcacaggaatctggagtggagactggggaaaaccctcaaaaggactttgagtactctcaggggaactctggaaaatactcactaaagtggaggaggaggcggcgctcacaggaatctggagaacagactggggaaaaccctcaaaaggactttgaatactctcaggggaactctggaaaatactcaataaagcagaggagaagaaggaactcgcaggattctgcagaggagactggacatcctcaccctcaggagggctctgagaaatctctagaggagacagggagtccttcccctcaggagaactctgagaattctggagaggagactgggtgtcgtcgccctcaggagaactctggggaatctggagaggagactgggagtccttcccctcaggaggtctctggagaggatccgaggagtcctccccctcagaacgactctgaggactctggagaggatacagggtgtcgtcgctctcaggagaactctggggaatctggagaggagactgggagtcctccccctcaggataactctgaggactctcagaggaactctggagaagactcggcatcccagcagtaggcatatccttgtcccctggagaacgcagaagcagagaggaggatgaggatgagaaagaaaaacaggaggaggacgaggggaataaaaagtggaaagaggaagagaaaatggaggaagcttcctcctcttcctcatctgggggatcctctgcatctaccaactccagtatgaaaattgccttctggaagccttgctcaaagctggggcgtggaaggtttagaaagagaggcatgatgaatattgttcaggagcagcaggtaaacgtgtgaacacgaataggtatgatgggatcccacaggactgagggagagagggacagtgccagtggcctcagctgagaaactcacccatgatggctctgacaaaggccggcttacagctcttcttctcttaaggtggtgctctagggcctcacaggtcgcctgtcttcctagggggtttgtcttctgggaacctgtagaaggacgcgagaaagcacctcggggcacagctggcaggcagagcctgaggcaccaggaatgacagtgggtggctacaggccgggtgctgccaggtctgccctgtttctgggggtagggcccttggtacacagtcaggtcgtgcactcaccttgactcctggcactgcctgggcctcctctgctgtggtgcttttaggatgtatgtgtccctcacacccaggtcttcaactcctgctttctggagcacctgcaagaggaagggagggagcccctccagctaagacggcagctggggctggccagactcccagagtcccacaattctgaggttcgtgaccccctcagaattcaattagcattgtcacattttctcagacagggccaggcccccaccactctgctggcctgaggaaaaacctcaggaaaactccacatcactgagagcagtgggaggtagtgaggtggcagccacctcccagcactctaccacgggggcggtccctgtggcctcacgtctgttctgacgcacatgtgacccctcagtcctcactcttg

SEQ ID NO: 3048 - DNA, 448 bp, Homo sapiens
  MAP TO AC007097.2; EXPRESSED IN BT474, SIGNAL = 1.1; EXPRESSED IN BONE MARROW, SIGNAL =   1; EXPRESSED IN LUNG, SIGNAL = 1.3; EXPRESSED IN HBL100, SIGNAL = 1.1; EXPRESSED IN ADULT LIVER, SIGNAL = 2.2; EXPRESSED IN FETAL LIVER, SIGNAL = 1.2; EXPRESSED IN PLACENTA, SIGNAL = 1.5; EXPRESSED IN HEART, SIGNAL = 1.1; EXPRESSED IN HELA, SIGNAL = 1.2
attctacccaacaaccgctgaatatatattctattcatcagagcatggaactttctccaagacagaccgtatgataggacacaaaacaagtcttaataaatttaagaaaattgaaattataccaagtactctccctgaccacagtggaataaaactagaaatcaactccaaaaagaaccttcaaaaccagacaaatacatggaaattaaataacctgctcctgagtgatcattgggtcaacaatgaaatcaagatggaaattttaaaattcttcaaaccaaatgataatagtgacacaacctatcaaaacctctgggagacagcaaaggcggtgctaagaggaaagttcatagccctaaatgcttacatcaaaaagtctgaaagagcacaaatagacaatctaaggtcacacctcaaggaactagagaaacaagaacaaaccaaaccc

SEQ ID NO: 3049 - DNA, 404 bp, Homo sapiens
  MAP TO AL033377.2; EXPRESSED IN BT474, SIGNAL = 2.3; EXPRESSED IN BONE MARROW, SIGNAL = 2.9; EXPRESSED IN HBL100, SIGNAL = 2.6; EXPRESSED IN PLACENTA, SIGNAL = 2.3; EXPRESSED IN HELA, SIGNAL =   3; EXPRESSED IN FETAL LIVER, SIGNAL = 2.8; EXPRESSED IN ADULT LIVER, SIGNAL = 2.7; EXPRESSED IN BRAIN, SIGNAL = 2.2; EXPRESSED IN LUNG, SIGNAL = 2.7; EXPRESSED IN HEART, SIGNAL = 2.6
tgccgagtgctttcatactgtatcacttattgtcgtgcatttatatgattatcttatactttatgaatttttgttttacagtaatttgtagccattcattcattgactttccaacctgcttattccatccagttcagggtagcgggtggctggagccatctgggcagctcggggcagcaggcagaaactagccctggccaggactccatcccatggcagggcacactcacacacacccacacccactcacactgggaccatgtagacaggccagtgaatccaaggtacacagctttgggatgtgggaagacactggaggacctggagaaaccccatgaagacaaggggagaacatgcagaccctacgcagacaggggacctggccaggcattgagtcgtctcct

SEQ ID NO: 3050 - DNA, 414 bp, Homo sapiens
  MAP TO AL035462.17; EXPRESSED IN BT474, SIGNAL = 2.1; EXPRESSED IN LUNG, SIGNAL = 2.4; EXPRESSED IN BRAIN, SIGNAL = 2.1; EXPRESSED IN BONE MARROW, SIGNAL = 2.2; EXPRESSED IN HBL100, SIGNAL = 2.6; EXPRESSED IN HEART, SIGNAL = 1.9; EXPRESSED IN ADULT LIVER, SIGNAL = 2.4; EXPRESSED IN FETAL LIVER, SIGNAL =   2; EXPRESSED IN PLACENTA, SIGNAL = 2.1; EXPRESSED IN HELA, SIGNAL = 2.2
ggcaagcaagaggaacagagagaaagagcaagagagagagagagagaccagcagagtgagaaaccaaccccgagcactcagagagaggcggggacaaatggagaatgcaagagggagagaaggaggaggaaggggaggacagagagaggcccaggagagggaggacatcctttggaagaaaggagcggcgcaaagggggaaagcagaggggctgtctcgccgccctggcactcactgcggatctcggccgtggcgtacttggggatcatggagtcggtggtgagctcgggatgcaggatgcagccatgcgtgtaggcatccatgggcagtgcgtccagcagctcccggtactgcagcacccgtgcgtgctgcaggctgcccacctcgggcatcagggccaccacgtgctctgtg

SEQ ID NO: 3051 - DNA, 490 bp, Homo sapiens
  MAP TO AL031076.1; EXPRESSED IN LUNG, SIGNAL = 3.3; EXPRESSED IN HBL100, SIGNAL = 2.9; EXPRESSED IN HEART, SIGNAL = 2.4; EXPRESSED IN BT474, SIGNAL = 2.5; EXPRESSED IN BRAIN, SIGNAL = 2.7; EXPRESSED IN BONE MARROW, SIGNAL = 2.7; EXPRESSED IN PLACENTA, SIGNAL = 2.9; EXPRESSED IN HELA, SIGNAL =   3; EXPRESSED IN ADULT LIVER, SIGNAL = 3.2; EXPRESSED IN FETAL LIVER, SIGNAL = 3.7
aaagtccagggaaagcaatgaaaaagactctgctcaatgagagattttcattgagtattatttttttagacaagaacattggagagaatgttttgaaaaacacatttaactttggttatggggaagatataacaggatactaaaaagtccatatgggaaaggtgggccttcattaatgtctctttaattagccttcattaatttccccttaattagcctttgttaattttgtcattagtaaatctgcccatccatttattcactcattcacctgctgccttccgagggccaggcttctgcaggctgtggacagccaccccagggctgtggccgggtgtgttgtgggtctccagcttctcccagacctcacgactctggaagctgaggtgagccctgaagaggcaacagcagaagcccacagcagaggagacggcagcttgggccaggacggtggccctgggcacggaggagggatggacatagggagctt

SEQ ID NO: 3052 - DNA, 443 bp, Homo sapiens
  MAP TO AL035553.13; EXPRESSED IN PLACENTA, SIGNAL = 6.2; EXPRESSED IN LUNG, SIGNAL = 5.6; EXPRESSED IN BRAIN, SIGNAL = 5.2; EXPRESSED IN HELA, SIGNAL = 4.6; EXPRESSED IN HBL100, SIGNAL =   5; EXPRESSED IN ADULT LIVER, SIGNAL = 4.7; EXPRESSED IN HEART, SIGNAL = 4.4; EXPRESSED IN BT474, SIGNAL = 6.6; EXPRESSED IN FETAL LIVER, SIGNAL = 4.6; EXPRESSED IN BONE MARROW, SIGNAL = 5.5
agggtaagcaaggtgtggcgggaggggcatatgtttctggtcacatacaccctgtcttcacttatttcaacaaagataaggtgaaagcatgcaggaggaacctggtgattcctctagaaaatccctagccttgttaaggtgctcgctctggtgtatacctcacttatgtcgggaaagaagccaggtcttcaattaataagattccctggtctcgtttgtctacctgttaatgcaggatccatgccttccagtatgtcatctatggaactgcctctttcttcttcctttatggggccctcctgctggctgagggcttctacaccaccggcgcagtcaggcagatctttggcgactacaagaccaccatctgcggcaagggcctgagcgcaacggtaacagggggccagaaggggaggggttccagaggccaacatcaagctcat

SEQ ID NO: 3053 - DNA, 417 bp, Homo sapiens
  MAP TO AL022722.1; EXPRESSED IN BONE MARROW, SIGNAL =   1; EXPRESSED IN LUNG, SIGNAL = 1.1; EXPRESSED IN HELA, SIGNAL =   1; EXPRESSED IN PLACENTA, SIGNAL = 1.1; EXPRESSED IN BT474, SIGNAL = 1.1; EXPRESSED IN HBL100, SIGNAL = 1.1; EXPRESSED IN HEART, SIGNAL =   1
tgtggatttccttagagtactgtccatttatctctggggacaagtttacttcacatggaggtagccattgggactgtctgtcttctcaggcaattttaacttaggcaattgtcagaatacaaattcaggatttccccctgcataatttaaattgtggtcctaaggagagaattcatatttatcaaagaatactactttttcagatatgtgactcttaactgaggtttaaaccatgcaaaaactttaacggccctattagaaataaacatcaaatatgattaccattattacgatgatattagcagatatcgaactctacctaattggaaatactttgtaactcactcatgtagtataccacttattcattaaaacttgattaatatacaaattataagttagggctgagtggcaaag

SEQ ID NO: 3054 - DNA, 414 bp, Homo sapiens
  MAP TO AC007100.2; EXPRESSED IN HEART, SIGNAL = 1.7; EXPRESSED IN LUNG, SIGNAL = 2.2; EXPRESSED IN BRAIN, SIGNAL = 1.3; EXPRESSED IN BONE MARROW, SIGNAL = 1.5; EXPRESSED IN PLACENTA, SIGNAL = 1.7; EXPRESSED IN HELA, SIGNAL =   2; EXPRESSED IN HBL100, SIGNAL = 1.7; EXPRESSED IN BT474, SIGNAL =   2; EXPRESSED IN ADULT LIVER, SIGNAL =   2; EXPRESSED IN FETAL LIVER, SIGNAL = 1.9
tgaactaatgtggcccaaggcaggcacagatatagttataggtatgtatcagattggcatatattttgtataggtttagaacactgctaacaacctgactttttatcttcaaagatgataccaaaaaccatcaataaactaatgagggcctttttctctctctctttctctctttggaatagatttgatggtgaataatggaacaacaatttaatgagcctaccttctgctagacaatgtgcaagattaaactctctgatttattgaagaaagccacccacattctcaccttgtgattagtggcatttatgtataaagtgactacctgggattcagtcttctgtctggatccaggaaagaattgttctctctggagcaaagggtgctctaatctgctgtctgcttcttctagca

SEQ ID NO: 3055 - DNA, 436 bp, Homo sapiens
  MAP TO AL022165.1; EXPRESSED IN BONE MARROW, SIGNAL = 1.1; EXPRESSED IN BRAIN, SIGNAL = 1.7; EXPRESSED IN PLACENTA, SIGNAL = 1.3; EXPRESSED IN HBL100, SIGNAL = 1.7; EXPRESSED IN HELA, SIGNAL = 1.3; EXPRESSED IN HEART, SIGNAL = 1.1; EXPRESSED IN BT474, SIGNAL = 1.5
gagccctccaggtagtagcctgactacagaagaacacaggactggctcctgggggcaaacaggctctcttgcttctcctcattggccatgccttagcatggttcctccctatctcctactcaagcaggtcctcagtacacaaagccctggtaaaaacccaagtccctacctctcaactcttttggataaggggagttttccctgggcttggactgaaaatctgtgccctccccggagatgctatcttgtctagattgtgtgaagacagtgggtgcaggagaaaaatggctgaaatgaaaaatgggagccactggtactcatctgtagctacaacttcagatgcctacagatgtggtcagtgtgacatgtgtagtggggaggggcagaggaagggacgggcagggaaggtgttcccggcgaaagtagtctgtccgct

SEQ ID NO: 3056 - DNA, 476 bp, Homo sapiens
  MAP TO AL031906.1; EXPRESSED IN BONE MARROW, SIGNAL = 3.1; EXPRESSED IN PLACENTA, SIGNAL = 3.5; EXPRESSED IN HBL100, SIGNAL =   3; EXPRESSED IN ADULT LIVER, SIGNAL = 4.3; EXPRESSED IN BRAIN, SIGNAL =   3; EXPRESSED IN LUNG, SIGNAL = 3.2; EXPRESSED IN HEART, SIGNAL = 2.6; EXPRESSED IN HELA, SIGNAL = 3.2; EXPRESSED IN BT474, SIGNAL = 3.2; EXPRESSED IN FETAL LIVER, SIGNAL = 3.3
ctccatttaggccctcttccaaggtttcagggctgaatttaaatcaaggtacatatgtcatggactatggcatggaaaataccaatagaccatgagagctgaaaaatacttctcttttctacacagaaacataaatgatatcattaaaagtgttctaatccatacctcatgcagacttggccaatataaatattatgtaggggacggggctccacaaaagaaatgtcaactaaaaataaatgacccttgagttcctttctaaccctgggattccattaatctaacatttcctttcatagcacacagataacatttctccttcaagagaagattcatttagtacctatgccattgcaaggagttaatatgactgattcgattgacccgaacaaaggcaaatgctgtaggatgacctggaagaccatgatcattgaagcatggtgccttaaaaagattgccaaggaagtgtgactggt

SEQ ID NO: 3057 - DNA, 395 bp, Homo sapiens
  MAP TO AC007124.1; EXPRESSED IN HELA, SIGNAL = 5.7; EXPRESSED IN ADULT LIVER, SIGNAL = 4.9; EXPRESSED IN BT474, SIGNAL = 4.5; EXPRESSED IN LUNG, SIGNAL = 5.9; EXPRESSED IN BRAIN, SIGNAL = 3.5; EXPRESSED IN BONE MARROW, SIGNAL = 4.3; EXPRESSED IN PLACENTA, SIGNAL = 6.1; EXPRESSED IN HEART, SIGNAL = 3.7; EXPRESSED IN HBL100, SIGNAL = 4.6; EXPRESSED IN FETAL LIVER, SIGNAL = 5.2
gccttctgcagacacaaatcaaaagcttgcaagatagcacagctttttttttttttttttttttttttgtctcttgatagaattaggacaaagatctgtacatggaatagacctgaggctgggcaaggtcttcctccgcctatctcaccatctttgtctttgctctgtgccctacccaaacccaccttcttttagttcttcaaatactccatacctgcatcaaccagaagttttttgttgcttcccatgtcgtcttgaccacctagaatgcttgtcacctggttgcctcctgcttctcctgcagttattatctggtaatgtctggagatgtttttgtttttcacattagggggtaaggcactactcaaatcttgtgggtagaggccaggtgtctt

SEQ ID NO: 3058 - DNA, 489 bp, Homo sapiens
  MAP TO AL032818.2; EXPRESSED IN BT474, SIGNAL =   4; EXPRESSED IN BRAIN, SIGNAL = 4.7; EXPRESSED IN BONE MARROW, SIGNAL = 4.6; EXPRESSED IN HEART, SIGNAL = 3.6; EXPRESSED IN PLACENTA, SIGNAL = 4.2; EXPRESSED IN ADULT LIVER, SIGNAL = 6.2; EXPRESSED IN FETAL LIVER, SIGNAL = 3.9; EXPRESSED IN LUNG, SIGNAL = 4.2; EXPRESSED IN HELA, SIGNAL = 4.8; EXPRESSED IN HBL100, SIGNAL = 4.2
ttgatatgcccctatcaggctcctcataccttgacctctgtctacccctctactccctccaaggtcaaagcccaacttgccaggttggcaaatgctcgcaggcaccagtgaccccagcgttcttctctaggttcttggtttccccctgaaacttggcctggaggtttcccactagcttagcagccctttgatgcatttaacttaattttgttattgttttatccaaaattcttgcttgttttcagagggaaagggggtctgccattactgcacagagaatctgggacagttattataaccatagaaatttattttccatgtgctgtcccatcttcttgatgagacagatgtttaacagctggagaactggacccatctttgtccccatcttgcctagcaacagaaggtggtcactaatcagggattttcgagcccgttgcttaaggccgtcgttgacccaaaggatagtgagtccctgctcctcttcct

SEQ ID NO: 3059 - DNA, 430 bp, Homo sapiens
  MAP TO AL078624.22; EXPRESSED IN BONE MARROW, SIGNAL = 6.1; EXPRESSED IN HBL100, SIGNAL = 6.1; EXPRESSED IN PLACENTA, SIGNAL = 5.1; EXPRESSED IN LUNG, SIGNAL = 6.2; EXPRESSED IN HELA, SIGNAL = 6.4; EXPRESSED IN ADULT LIVER, SIGNAL = 7.3; EXPRESSED IN HEART, SIGNAL = 5.1; EXPRESSED IN BT474, SIGNAL = 5.8; EXPRESSED IN FETAL LIVER, SIGNAL = 5.8; EXPRESSED IN BRAIN, SIGNAL = 5.8
ctgcaccttcagttctgcactagagtcattctccaaatatttctgtgctatctcagctagatcagagcctccctataagcagaggttgagtcatctatttcttttttatccacttgtggcaccaagctcagactttgctctgcactacttactcacccagtgcttactgactgatttattgacccagaaccatggcgagaatgcagtcaagctattaccgtgaacttcacaatgcaggcacgtgagctaaggtgacaggggttgaacccagattgctcgctggggcttttgttcttgctctgactctactaccagctcaggtatcagaacacgctaccctattcccaggggcccctgtttggttcagaccgcacagtccctgctttgcagggcttcagggaccacaccaaggaaggccactgtgaacatc

SEQ ID NO: 3060 - DNA, 435 bp, Homo sapiens
  MAP TO AL031119.1; EXPRESSED IN PLACENTA, SIGNAL = 1.7; EXPRESSED IN BT474, SIGNAL = 1.8; EXPRESSED IN FETAL LIVER, SIGNAL = 1.9; EXPRESSED IN BONE MARROW, SIGNAL = 1.8; EXPRESSED IN LUNG, SIGNAL = 1.9; EXPRESSED IN HELA, SIGNAL = 2.3; EXPRESSED IN HEART, SIGNAL = 1.4; EXPRESSED IN HBL100, SIGNAL = 2.5; EXPRESSED IN ADULT LIVER, SIGNAL = 1.9; EXPRESSED IN BRAIN, SIGNAL = 1.5
tgtcacaggttcagtttgcacacgtttctactgaaagaacttcttccattactagacgctctgaaatagtgtcactgagatgcctcattaatttacttccttgcataaaccacaagtcacataaagaacaatagttgggtttacacccagtgtgtattaccaagtgatctttgaactggtcccagctgttaaacacactgttgcagacatggcatttatagagcttctttcttccttttttgcctctattccagtttggcatgcagtgaggtgacatttgagggtgctatttctagcaaatctttcatgacaatttggacattcaaaaggtttttcacctgtatgttttctaagatgttctttaaaatgtccagaacagtcaaactgcttctcacagtactgacatacataaactttcttcccagttctttgctt

SEQ ID NO: 3061 - DNA, 476 bp, Homo sapiens
  MAP TO AL031133.1; EXPRESSED IN PLACENTA, SIGNAL = 2.9; EXPRESSED IN HEART, SIGNAL = 2.6; EXPRESSED IN BT474, SIGNAL = 3.5; EXPRESSED IN BRAIN, SIGNAL = 2.6; EXPRESSED IN BONE MARROW, SIGNAL = 3.2; EXPRESSED IN LUNG, SIGNAL = 4.7; EXPRESSED IN HELA, SIGNAL = 3.9; EXPRESSED IN HBL100, SIGNAL = 7.5; EXPRESSED IN ADULT LIVER, SIGNAL = 2.4; EXPRESSED IN FETAL LIVER, SIGNAL =   3
agacctgaatgaacatgccactaatggataaagggggtattttcacagaatcagtattttttcccatcctgtctccacttgatgtcaatcaaaacataccattggctgtttggtttgaagaaaaaagcaatatgcttgtgtacacataccagttacttcatgtataataaaagaatgtggaagggggaaacaaaagaatagagaaaactatactgtagtagtcagaatgtggtggaaccaaattgcagttttctaattgagaatgcagtaatcttggtctttaaagaacagcgttctggagtaaagaagcaggttcccttttcagtagacacctcccgtaggctgttgaaacacatcaattgtatcttcatcttccatttccaactgtgcaggtttgtctgttccactgattggttgcccaccaaatcggaatctgatctgcttcactgacaatccccgtggttcacaataggctt

SEQ ID NO: 3062 - DNA, 447 bp, Homo sapiens
  MAP TO AL035669.28; EXPRESSED IN HBL100, SIGNAL =   1; EXPRESSED IN HEART, SIGNAL = 1.2; EXPRESSED IN BT474, SIGNAL = 1.1; EXPRESSED IN BRAIN, SIGNAL = 1.2; EXPRESSED IN BONE MARROW, SIGNAL =   1
catgccttaaaaggggacagagtggccgccgaggggacggagcctgccgtgtcccgtgtgcagcggcggaccaccaggcagagcgccaaggggagtgtccggagatccagcatgggaagagccccctgccacttccagcaaggagcacacaggtgcatccgttctttctgccccacactttctagggacagcaggccgagcccatggtgtgcgccgtcagcatgggctctgcagcctccgacccatgtgcggcctgcccggaccctcgctcctccgtgtgcggctcgcctggaccctcgctcctttgggccgtcactctccctactttgtagacctggaatgccatccctgccccagctccactgcccatgggtggccatccagcagccacggtggagtacacgctgcactgtggtgcccaggggccctctatcacggcaggactcc

SEQ ID NO: 3063 - DNA, 428 bp, Homo sapiens
  MAP TO AL079338.13; EXPRESSED IN BONE MARROW, SIGNAL = 6.6; EXPRESSED IN PLACENTA, SIGNAL = 7.3; EXPRESSED IN HEART, SIGNAL = 6.2; EXPRESSED IN LUNG, SIGNAL = 7.2; EXPRESSED IN BRAIN, SIGNAL = 6.7; EXPRESSED IN HELA, SIGNAL = 6.9; EXPRESSED IN HBL100, SIGNAL = 6.9; EXPRESSED IN ADULT LIVER, SIGNAL = 8.7; EXPRESSED IN BT474, SIGNAL = 6.9; EXPRESSED IN FETAL LIVER, SIGNAL = 7.6
gaaggaaggaaaggagggagggaatgttagttccaaacctttacaaattttgtctggaggtgtcattagctgattgatctattttaatagcttactcttagaaaagtttccatgttggctgcctcattgttttaatgaagagcctcatgtgcatcttttagtgcagataaaaaggtgtgcagtgaatagtctccacctagcaggagtcatagctgccgcttcctacagatgtctcctttgcaccaggcctttacacgctcacacacctcacacacataaccatgaacgtcataccgtcgtattcgactttatctccatttttgcagatgaagaaatcaaggctgtgggagatcaaagtcacttccctgaagtcacacagttcgtggcagagctgagacttaaacacaggtccagatcatgccaaatcc

SEQ ID NO: 3064 - DNA, 417 bp, Homo sapiens
  MAP TO AC007198.6; EXPRESSED IN HEART, SIGNAL = 1.8; EXPRESSED IN PLACENTA, SIGNAL =   1; EXPRESSED IN HBL100, SIGNAL = 0.92; EXPRESSED IN ADULT LIVER, SIGNAL = 1.1; EXPRESSED IN BT474, SIGNAL = 0.94; EXPRESSED IN FETAL LIVER, SIGNAL =   1; EXPRESSED IN BONE MARROW, SIGNAL = 0.98; EXPRESSED IN BRAIN, SIGNAL = 1.6
gaggagtccctgaaaggaggctggttcttccatattatcctccatacgggactctgctgcccatcgtgggtcctgaggaccccgagtgcaggagggagtgtgggtggcctcatccccagagtggcatggctctcacatgttggcacttctttcctttacacagggggcctccccggagttccagcagtgaccctgactttgtggtggtagacggcgtgcccgtcatgctcccgtcctatgacgaagctgtgagtggtggcttgagtgccttaggccccgggtacatggcctctgtgggccagggctgccccttacccgtggacgaccagagccccccagcataccccggctcaggggacacggacacaggcccaggggagtcagaaacctgtgacagcgtctcaggctcttctgagc

SEQ ID NO: 3065 - DNA, 409 bp, Homo sapiens
  MAP TO AL031228.1; EXPRESSED IN BT474, SIGNAL = 6.3; EXPRESSED IN HEART, SIGNAL = 6.8; EXPRESSED IN FETAL LIVER, SIGNAL =  10; EXPRESSED IN ADULT LIVER, SIGNAL =  11; EXPRESSED IN LUNG, SIGNAL =   9; EXPRESSED IN BONE MARROW, SIGNAL = 7.1; EXPRESSED IN BRAIN, SIGNAL = 7.4; EXPRESSED IN HELA, SIGNAL =  12; EXPRESSED IN PLACENTA, SIGNAL =  10; EXPRESSED IN HBL100, SIGNAL = 7.8
ggaagtggtaggaaggacccgggaaaggggtgggtgaggaagggtgggagtggcattctgataccaccaggggctgtggggctgggcagaggctgtccagggacagccagaatgcatctgattttgggagcttttgggaattgtggtctgaggttctctggtatgggcgggctggtgtctccttcctgggggtctgaccatctgctttctcagggctcccctggggaacgaggtgcagcaggatcagggggacccattggtccgccagggcgcccaggcccgcagggtccccctggagcagcaggagagaaaggtgtcccagtgagtgtgggggtattggggaggggtactggggaggggtctgtgagcctagggttgatgggctatgacaagtttcctgtggggtgtt

SEQ ID NO: 3066 - DNA, 460 bp, Homo sapiens
  MAP TO AC007284.2; EXPRESSED IN BRAIN, SIGNAL = 4.6; EXPRESSED IN HELA, SIGNAL = 4.9; EXPRESSED IN PLACENTA, SIGNAL = 4.6; EXPRESSED IN ADULT LIVER, SIGNAL = 5.7; EXPRESSED IN LUNG, SIGNAL = 4.6; EXPRESSED IN BONE MARROW, SIGNAL = 3.9; EXPRESSED IN HEART, SIGNAL = 3.7; EXPRESSED IN HBL100, SIGNAL = 4.4; EXPRESSED IN FETAL LIVER, SIGNAL =   4; EXPRESSED IN BT474, SIGNAL = 4.2
tccaaattagaattttatctgatggataaaatttgttttattttattctcttattttattcacagcactcttatttattcttattcacaacattgctgaaggtaaaactcaacagctattgtttgttgcctgacttagctatagatcaaaaatacctgttttgcaataagaaaagaaaaaattgtcaaaacaactggatgggaaaacaatagaaaaaattcacattttttccttttgaagatatggtcgtggacgtagtcctctttaaggataagaaatttaaaactacagaaatgctaactgatagacgtgttaaattcagacgtactggcttctgtttcatggaacctatgtttatttcttctgctgtcccacatttaattgataacaacatcactacaagtataagaaaaggaagcagagtgaggtttacggatgagcacttgggagggatttcaga

SEQ ID NO: 3067 - DNA, 371 bp, Homo sapiens
  MAP TO AC007156.2; EXPRESSED IN BT474, SIGNAL = 1.6; EXPRESSED IN FETAL LIVER, SIGNAL = 1.9; EXPRESSED IN BONE MARROW, SIGNAL = 1.7; EXPRESSED IN BRAIN, SIGNAL = 1.2; EXPRESSED IN LUNG, SIGNAL = 2.8; EXPRESSED IN PLACENTA, SIGNAL = 1.7; EXPRESSED IN HEART, SIGNAL = 1.9; EXPRESSED IN HELA, SIGNAL = 1.8; EXPRESSED IN HBL100, SIGNAL = 1.4; EXPRESSED IN ADULT LIVER, SIGNAL = 2.2
agcactgcagcttctcttcctgctgcctccacatctacttttcatccctgttgaggatctgccctcccctccctcaatcctacaaagccagcctcagaggtgatgcagaaaacatggcctcaaggaagagcctggaccaggcggcagggtcccaggttctagccttggctctgcccaaagtccactatgtgatcttgggcaaatcgtatatataaaaaccctgcttgaaggacactacgagcccccagaacaaggaggatttacctgtccagaagaagagggaagccaacaatgaggaaccctgggcttggaggccattgttcgccatgggacagaatcccaaaaccagggcagtggctgaggagcaaaat

SEQ ID NO: 3068 - DNA, 1958 bp, Homo sapiens
  MAP TO AL034380.22; EXPRESSED IN BRAIN, SIGNAL = 3.2; EXPRESSED IN LUNG, SIGNAL = 3.3; EXPRESSED IN HELA, SIGNAL = 4.8; EXPRESSED IN PLACENTA, SIGNAL = 4.7; EXPRESSED IN HEART, SIGNAL = 2.8; EXPRESSED IN ADULT LIVER, SIGNAL = 1.6; EXPRESSED IN BT474, SIGNAL = 4.3; EXPRESSED IN BONE MARROW, SIGNAL = 4.2; EXPRESSED IN HBL100, SIGNAL = 3.5; EXPRESSED IN FETAL LIVER, SIGNAL = 3.6
tttcaaagagggtggggtagggtcctgaggggagtaaggtgaggacaaggaacagaaaggcgtgaggtgatggagggaggggaggtggaaggaggagagagaaacaggagagactttttcccaagggagaagctggacagcacagggtaaactggattctgaggtggttttgcataaataaagggcaacagtcagtttctaagttctccacacacgcacacacacacgggggggggaggtgtcccacggctgtcatgactggccaatcaaaaacagtacatcacaaatgacttgtgaaaccaatgagttcatcaacggtgataccgagatgtccaacagccgtgattcgtacagagtaaactctgagtggttctcgtccaccttggccaaggcaagcagcgcgcgggcagcccgccgcatcatgtccacactagttggctcaaagggtgggttctgcatgtggaggaggctggcctggctctgctggaactgtgtggcggcaaggctgtcctctaggaagcccaggaggttgccgatactgcccttctgcactgcaatggcacgagctgccaggctgtccccctgagccaggttggccagcagtaccacagccatctcccggcacaccgggttctttcggtcactgaggaagcgcaccatagtgctatacaacttctccaggcggctgaaggggggtgtggccagaatcaggtccacattgttgtcctggatgctgagtttgctgagggtttccaagaccagtctctgcggggaaaggacggcattggggcccagggtggaaaaggggtcctgggcttcagctgaagggcaaactgcccagtgtaggagtccgtccaggacaggcaggcaaatgctctcggggtatggagataggtccaactgccccgagatgttggcgagtgtaaccaaggtgttttcccggagcatctccaagcagtcccaccaccactccactttgttgcagctcaccccttggtcctgttcctcctccttttcataagttagtggtgcctgcttccgttctgggtgcttgtggtgcagcaggatcagcttgcccaggatgagcagcagccctgggtgtttggacatctcaaagtcattgcctggcacaaatgacaggcttcgaatggtattggacacacagacgcagcgcttggcaagagaatcctgccagtccagaagggtacacagtggggtctcatccttactgtggggttcgtcctctaggatcttgatgttccggtggctctgtgctgggctaatgccaaatggaaacttgctgctctccttgatggcctctgaactcttagctccatcctcggtcaaggtgctagaccgagtagacaacatgtcatccatagtggctgtgatccgtttttctggaggtccatcaggtgggggcccctcctggtctgttgtccctggtgtaccctctgctgttgtcacatgcttccgaggggctggtgggcagggtgcgtgaggccgggaaggcagcagctctgtcttgctctcgaagtgggtctggatatgctcagtggtgtcccccccaccaatccgccagtgcagcaggccactgtcaaactcctgcacacgcccaagcttatctgagcagtccaccacaaatggatcattcttctgtacgatctttactggaagcttgtcaaacttactgatcagcttctcctcactattctctgaagctggcttgtccttgcctgaaaaggctatctcctcatcattttcaactacttcctcttcttcttcctcttctagtttaggacctagaagttcttcttcttcttccccaccctccatgggagctggactagacaccttgctgaacctcccaggatccagtagcgttctctgtcctgggtcacccacctcatactcctttaaaatgccaaagatctcaatcaggcatcgtcggaaatatt

SEQ ID NO: 3069 - DNA, 1955 bp, Homo sapiens
  MAP TO AC010183.6; EXPRESSED IN BRAIN, SIGNAL = 7.8; EXPRESSED IN LUNG, SIGNAL = 5.4; EXPRESSED IN HELA, SIGNAL =  10; EXPRESSED IN PLACENTA, SIGNAL =  10; EXPRESSED IN ADULT LIVER, SIGNAL = 4.5; EXPRESSED IN FETAL LIVER, SIGNAL = 5.3; EXPRESSED IN BT474, SIGNAL =   5; EXPRESSED IN BONE MARROW, SIGNAL = 4.7; EXPRESSED IN HEART, SIGNAL =   4; EXPRESSED IN HBL100, SIGNAL = 5.9
tgctcccacactagctctgactcatcccaacccttttcattacacacacgaagtgcagggctgtgcagtcggaattcctacacaaggactgggaccgcgccctgtagcctttttgtccaaacaacttgaccttacgttttaggctctccatcatgtctccatgtggtggccgccactgccctaatacttttagaggccctcaaaatcacaaactatgctcaactcactctctacagttctcgtaacttccaaaatctattttcttccccacacctgacacacatactttctgctccccagctccttaagctgtactcactctttgttgaatttcccagttaccattgttcctggcccggacttcaatctggcctcccacattattcctgataccacacctgacccccatgactgttatctctctgatacacctggcattcactccatttcccatatttccttctttgctattcctcaccctgatcacacctggtttattgatggcagttccaccacgcctaatcgccacacaccagcaaaggcaggctatgctatagtaccttccacatctatcattgaggctgctgctctgccgccctccgctacctctcggcaagccaaactcattgccttaactcgaaccctcactcttgcaaaggaattatgtgtcaatatttatactgactctaaatatgccttccatatcctgcaccaccatgctgttatatgggctgaaagaggtttcctcactaagcaagggtggtccaacattaatgcctctttaataaaaactcttctcaaggccactttacttccaaaggaagctggagtcatacactgcaagggccaccaaaaggcatcagatcccatcgctcagggcaacacttatgctgataagatagctaaagaagcagctagcggtccaacttctgtccctcatggccagtttttctcctcatcttgtcactcccacctactctcccactgaaacttccacctatcaatctcttcccacacaaggcaaatggttcttggaccaaggaaaatatctgcttccagcctcatgggcccattctattctatcgtcattttataacctcttccatgtaggttacaagctgctagcccacctcttagaggctctcatttcctttccatcgtggaaatatatccttaaggaaatcacttctcagtgttccatctgctattctactactcctcagggattgttcaggccccctccccttccctacacatcaaacttggggatttgcccccacctaggactggcaaattgacttcactcacatgcctcgagtcaggaaactaaaatacctcttggtctgggtagactggatgggtagaggcctttcccacagggtctgagaaggccatcgtggtcatttattcccctctgtcagacataattcctcagtttggccttcccacctctatacaatcctataatggaccagcctttagtcaaatcacccaagcagtttctcaggctcttggtattcagtggaaccttcataccccttactgtcctcatcttcaggaaaggtagaacggactaatggtcttttaaagacacatctcaccaagctcagcctccaacttaaaaaggactggacagtacttttacttcttgcccgtctcaaaattagagcctgtcctcaagatgctacagggtacagtccctgtactttctagacagatttggtgagaactccccagatgtttcacaccaacaagctaccacacttctccacatctacttatagcacctttctccttatgttaattccacgctccccatatttggacccctaaccacacaaacaactatccctgttgccactcctttatgcatctcccgacaacagcctactggaatccctttaggcaacctcccactgtccaaatgttcctttactatctccagaacccagcca

SEQ ID NO: 3070 - DNA, 392 bp, Homo sapiens
  MAP TO AL031864.1; EXPRESSED IN BT474, SIGNAL = 2.6; EXPRESSED IN BONE MARROW, SIGNAL = 1.9; EXPRESSED IN HBL100, SIGNAL = 5.9; EXPRESSED IN PLACENTA, SIGNAL = 1.3; EXPRESSED IN HELA, SIGNAL = 4.2; EXPRESSED IN FETAL LIVER, SIGNAL = 3.1; EXPRESSED IN BRAIN, SIGNAL = 2.5; EXPRESSED IN LUNG, SIGNAL = 3.3; EXPRESSED IN HEART, SIGNAL = 3.4
caggcctagaaatagctgccataggatattatcttttagcactgaaaagggaggcagtttgggtttttctttcactggagatctttgaggcatgttgttttaaaaaaaagtcaagatggcagaagtggagcagaaaaagcagcaaagcagaagaagcagaccttctgcaagttcacctcctgtggcgtgcaccccgacccactgctggacttgtcatgcgagcagcgaatgaagctgcaccgtggcctgtggcagaagcagcactcgctgctgaagcgcctgcgcaagggcaagaagtgggcactgcctatgcagaagctggaggtggtgaacgcgcacctgcaggatatgatcatcctgcccgagatgggagacaagacggtgggtagcat

SEQ ID NO: 3071 - DNA, 417 bp, Homo sapiens
  MAP TO AL049176.3; EXPRESSED IN PLACENTA, SIGNAL =  13; EXPRESSED IN HELA, SIGNAL =  13; EXPRESSED IN HEART, SIGNAL =  10; EXPRESSED IN ADULT LIVER, SIGNAL =  17; EXPRESSED IN BT474, SIGNAL =  11; EXPRESSED IN LUNG, SIGNAL =  13; EXPRESSED IN BRAIN, SIGNAL =  10; EXPRESSED IN BONE MARROW, SIGNAL =  11; EXPRESSED IN HBL100, SIGNAL =  11; EXPRESSED IN FETAL LIVER, SIGNAL =  13
taaggctggggtgactatggccatgacaacaatgaaatttgctgcatcaatggactctttcacaaaagatttctttgtgagtgtaatgctgttttgtagcattttacccacagtagaacttcttccaaaattggagtcaattctctcaagccctgctgctgctttatcaattaagtttatataatattctaaatccacattccagcaatattcacagcatcttcaccaggagtagactccgtctcaagaaaccacactctgctcatccataagaagcaactcgtcattcattcagttttatgagattatagcaattcaaacatatcttcaggctccatttctaattcaggttctcttgctattttcaccacatctgtggtgacttcctccactgaagccttgaacccctcaaagtca

SEQ ID NO: 3072 - DNA, 468 bp, Homo sapiens
  MAP TO AC007321.1; EXPRESSED IN PLACENTA, SIGNAL = 1.1; EXPRESSED IN BT474, SIGNAL = 0.95; EXPRESSED IN LUNG, SIGNAL = 1.1; EXPRESSED IN BRAIN, SIGNAL = 1.2; EXPRESSED IN HELA, SIGNAL = 1.1; EXPRESSED IN HEART, SIGNAL = 0.95; EXPRESSED IN ADULT LIVER, SIGNAL = 1.7; EXPRESSED IN FETAL LIVER, SIGNAL = 1.2; EXPRESSED IN BONE MARROW, SIGNAL = 0.99
acaaggctagccagcacaaggtgatattttggttgatccaaacttttctggcaaaatagcaattgcttttgtaatagatgacacaaactcatcttcatactgtgtgtaaccttgggaagacctgctaatttgagaatataccctcctgtctctgtttggatggtgttctggatatcatcatttgctttgccatgggtgttgtttgggttcctgcttaaagagctactgttcttcacagaaacttccaactcacccagactgagatttgtactgagactacgatccacatgttcaatatctgatatctgatgggaaataggctttactgaattatccatttgggctgtaattaatttcagtgatgagcgggagatgttgttagttgtgctcagtaactttttgatagtagcgggagtaggagtaaatcttgtactaattagtgaatattctgttgatggtggctgaaaa

SEQ ID NO: 3073 - DNA, 456 bp, Homo sapiens
  MAP TO AL109956.13; EXPRESSED IN BT474, SIGNAL = 4.5; EXPRESSED IN HELA, SIGNAL = 5.1; EXPRESSED IN HBL100, SIGNAL =   5; EXPRESSED IN ADULT LIVER, SIGNAL = 6.4; EXPRESSED IN FETAL LIVER, SIGNAL = 4.3; EXPRESSED IN BRAIN, SIGNAL =   4; EXPRESSED IN LUNG, SIGNAL = 5.8; EXPRESSED IN BONE MARROW, SIGNAL = 5.4; EXPRESSED IN PLACENTA, SIGNAL = 7.5; EXPRESSED IN HEART, SIGNAL = 3.7
gctggttgcccatttttatggttatttcttgatgatatgctaaacaaggggtggattatttacgcctcccctttttagaccatgtagggtaacttcctgacgttgccatggtatttgtaaactgtcatggcactggtgggagtgtagcagtgaggatgaccagaggtcactctcattgcaattttagttttggtgggtttgggctggctcctttactgcaacctgttttattaacaaggtgtttatgacctgcattttgtgctgacctatctcatcctgtgacttagaatgccttaaccatctgggaatgcagcccagtaagtttcagcctcatttccagctcctgtttaagatggagttgctctggttcacacgcctctgatactagaatgcctaggacccggttctcaacagagaagcacggtggcctgagagtcaatgaaacaatggccacag

SEQ ID NO: 3074 - DNA, 414 bp, Homo sapiens
  MAP TO AL031447.4; EXPRESSED IN HEART, SIGNAL = 4.2; EXPRESSED IN PLACENTA, SIGNAL = 3.9; EXPRESSED IN BT474, SIGNAL = 3.2; EXPRESSED IN ADULT LIVER, SIGNAL = 4.9; EXPRESSED IN BRAIN, SIGNAL = 3.4; EXPRESSED IN LUNG, SIGNAL = 4.2; EXPRESSED IN BONE MARROW, SIGNAL = 2.8; EXPRESSED IN HELA, SIGNAL = 4.3; EXPRESSED IN HBL100, SIGNAL = 3.2; EXPRESSED IN FETAL LIVER, SIGNAL = 4.4
aggtgtatgtatggctggggggcggtgtccagaggaggctgctggattcttccagcattgcactcaggacctttgtttggtagaggcttggcagcagtcatctcgctggacagtggtcagcgtgtgctttgccttagccacaacatgtggcctgggcttttggggagagggtgtgcgtctggggtgaagcccagtgatgttaattcctcccaaggcagaggcccttgcggaagttcgggagggtgcaggtgggtgactcacctgagtgggctgatcttctgcctgtcatgcgtcctggcaggtgggtccgatggctcccggctctatgactgcgtgtggaggtacaactcaagcgtgaatgagtgggcggaggtggcgcccatgctgaaggcccgcgagtaccacagctcctct

SEQ ID NO: 3075 - DNA, 479 bp, Homo sapiens
  MAP TO AL031983.1; EXPRESSED IN BRAIN, SIGNAL = 1.2; EXPRESSED IN HELA, SIGNAL = 1.5; EXPRESSED IN HEART, SIGNAL = 1.6; EXPRESSED IN LUNG, SIGNAL = 1.4; EXPRESSED IN BONE MARROW, SIGNAL = 1.6; EXPRESSED IN PLACENTA, SIGNAL = 1.3; EXPRESSED IN HBL100, SIGNAL = 1.4; EXPRESSED IN BT474, SIGNAL = 1.3; EXPRESSED IN ADULT LIVER, SIGNAL = 1.4; EXPRESSED IN FETAL LIVER, SIGNAL = 1.5
aaggagtgcccactgcatagaagagaccaaagaacttgcccctctcttgggcatagggatttttgggctggaggtagacagcaatgactgagctgtagaagagggtgaccacagtgagatgggaggagcaggtcccaaaagctttcctctgcccttttgcagttagtccttagcactgcccaggcaatggctccataagagacaaggatgaggctgaggcacagccaagatgaagacactggcaacagccatctggatctcattgtaggaggtgtcttcacaggagagtcgaattagagctgggacctcacagacaaaatcatccacctgctgatgggggcagaaaggcaggcgcagggtggatggtgtctggaccactgactctaccagcccaatgacccaggccacagatgccagctgccagcacaggcagaggtggacgatggtggcatggcgcaggggcttgaagatagccatgt

SEQ ID NO: 3076 - DNA, 388 bp, Homo sapiens
  MAP TO AL033523.12; EXPRESSED IN BT474, SIGNAL = 2.3; EXPRESSED IN ADULT LIVER, SIGNAL = 2.5; EXPRESSED IN FETAL LIVER, SIGNAL = 2.4; EXPRESSED IN LUNG, SIGNAL = 2.5; EXPRESSED IN BONE MARROW, SIGNAL =   2; EXPRESSED IN BRAIN, SIGNAL = 2.3; EXPRESSED IN HEART, SIGNAL = 2.3; EXPRESSED IN PLACENTA, SIGNAL = 2.4; EXPRESSED IN HBL100, SIGNAL = 2.2; EXPRESSED IN HELA, SIGNAL = 2.3
tcgtttatttccttgctgggcaagtggggccgagcccgagatgacttctccttatcactgctgctgcagctcccttcagacgtcatttaggcggctgataatgagggcttcgtttgctgctgggaggagagaaggaagagtttgacagacaaaggcccaggagagacaaggagttcaggcagggaaatggaggctggggtttgagtgcataccccaatcaattccagacacgatgtttgatctccacacaggaaagaggtatgagctggtgggaaaggcgcgcagtgtcatgtccaggcccaactggcagtttgggacactaagtggtggtgaggggccctgccctcagcctgtgcacacttcctcgccccatccacactcatccatt

SEQ ID NO: 3077 - DNA, 458 bp, Homo sapiens
  MAP TO AC007324.38; EXPRESSED IN BONE MARROW, SIGNAL = 2.7; EXPRESSED IN LUNG, SIGNAL = 2.3; EXPRESSED IN BRAIN, SIGNAL = 6.2; EXPRESSED IN HELA, SIGNAL = 5.5; EXPRESSED IN HEART, SIGNAL = 2.1; EXPRESSED IN PLACENTA, SIGNAL = 2.9; EXPRESSED IN HBL100, SIGNAL = 7.6; EXPRESSED IN BT474, SIGNAL = 3.7; EXPRESSED IN FETAL LIVER, SIGNAL = 2.8
caggttttggggttgaagtgggaggcattttgttctgcatagagtcttgatcactgtcatgagattccccgagactgtggggaccccaaggagctgacagatgtcacgtggggtgggaggctgcggttgcaccatccccaccttccagctagagacgctgcttccttagctactgtgggccaatgcctctgcagtttcgagatgttctctgtggaggggaactccgcccccactcacccactacagtaggctccagatctatcatgacggcccggggcacatgcttcccattgccagtctcgctgaaaaaggtggtgaaggagtcatcatcgttgatcttgctagcttgagcatcaaaagtgccgtctgcctggatgccgtgttccaggcagaagagctcccagcaggcattgccaatctgaactcccgcttggcccacgtggactgatatgcattcc

SEQ ID NO: 3078 - DNA, 454 bp, Homo sapiens
  MAP TO AL031585.1; EXPRESSED IN PLACENTA, SIGNAL =  11; EXPRESSED IN HBL100, SIGNAL = 8.1; EXPRESSED IN BT474, SIGNAL = 7.8; EXPRESSED IN FETAL LIVER, SIGNAL = 9.4; EXPRESSED IN LUNG, SIGNAL = 9.8; EXPRESSED IN HELA, SIGNAL = 9.1; EXPRESSED IN HEART, SIGNAL =  10; EXPRESSED IN ADULT LIVER, SIGNAL =  16; EXPRESSED IN BRAIN, SIGNAL = 8.3; EXPRESSED IN BONE MARROW, SIGNAL = 8.8
ccttgttttctcttggggtgttttctcatttcaggaggagattaagtacttgagacattgagtaacattattacaagcttcgaagggctgggtagacagggattggagtctcctttagggtccctaaaggggacttaaagaagatattcatttttcagactctagctcagctttgaatcatcaccccatcactggacttgaattgaagtgattccctattgctagtgccaacaagcacttgatggaatcaaacataaatcctctctggagggcaataacattaatttagacctcaaattacttcttacaacagttttgcaaatacaacgttcacaattgtgaattgtgctataataaacatgcagtgatgtcttttttgtggtgtcttttttgatatagtgacttcttttttggggggtagatacccagtagtaggattgctggatcaaatggt

SEQ ID NO: 3079 - DNA, 436 bp, Homo sapiens
  MAP TO AC007981.31; EXPRESSED IN BT474, SIGNAL = 6.5; EXPRESSED IN FETAL LIVER, SIGNAL = 6.9; EXPRESSED IN BRAIN, SIGNAL = 6.3; EXPRESSED IN HELA, SIGNAL = 7.1; EXPRESSED IN PLACENTA, SIGNAL = 7.3; EXPRESSED IN ADULT LIVER, SIGNAL = 6.3; EXPRESSED IN LUNG, SIGNAL = 7.7; EXPRESSED IN BONE MARROW, SIGNAL = 6.8; EXPRESSED IN HEART, SIGNAL = 5.5; EXPRESSED IN HBL100, SIGNAL = 7.5
gaacctgttcgatttctgccctgatgctctgctcaaaggagtctgctctgctcatgctgactgggaaggcagagccctggtccttgctggatcccacctggctgccagggccacaccacgtgagccaggtacaagttttggggaacacagggcagttgggcactgctgtgagccagttccggcttacatctactgcctccgcctgcagccctggaaggctgtgcatggctgggccccgctggccccgggctgtgcggctccactctttaccttcaggtactcctggatggcctcctcaatgtcccggtccacggaatcgtcactgtctgaatctagcaccaatgggccaaagtctgcagtttcctcctcccccacggggtcaaagtcagcaacaagaccacaggcagccaacgcaggcagctccttgtgcatggtg

SEQ ID NO: 3080 - DNA, 462 bp, Homo sapiens
  MAP TO AC007189.6; EXPRESSED IN PLACENTA, SIGNAL = 5.3; EXPRESSED IN HELA, SIGNAL = 5.8; EXPRESSED IN HEART, SIGNAL =   4; EXPRESSED IN ADULT LIVER, SIGNAL = 6.3; EXPRESSED IN BT474, SIGNAL = 4.7; EXPRESSED IN FETAL LIVER, SIGNAL = 5.4; EXPRESSED IN BRAIN, SIGNAL = 3.8; EXPRESSED IN BONE MARROW, SIGNAL =   4; EXPRESSED IN HBL100, SIGNAL = 4.8; EXPRESSED IN LUNG, SIGNAL = 6.2
tctgtgaaggtatacgcccccacgtcctgaacggccccgagcaccccaccccctgtggcgttgctggaccactgcaactgcaccgtggatatgcccatcctgaaagacctgaccaccgtggccttctgtgatgcacagtccacgcaggaaatccaccagaatgttttaaatgaagccgtgggcgccatgacgtaccacaaaatcaccttctccagggaggacctggagaagttcaaggccctaagagtgactgttgcagataggcactggccacgacaatgtggatggacatcaaggctggctgtgagctcgggattgctgtgtgcaacatcccttccgagccgaggaagaaacagccgactccaccatctgccacatcctcaatctgtaccggaggaaccgtggctgtacgaggcgctgcgggaaggcacgtgggtacggagcctggagcagaggtggatc

SEQ ID NO: 3081 - DNA, 408 bp, Homo sapiens
  MAP TO AL032822.1; EXPRESSED IN BT474, SIGNAL = 1.4; EXPRESSED IN FETAL LIVER, SIGNAL = 1.7; EXPRESSED IN BONE MARROW, SIGNAL = 1.6; EXPRESSED IN HBL100, SIGNAL = 1.7; EXPRESSED IN HELA, SIGNAL = 1.9; EXPRESSED IN HEART, SIGNAL = 1.9; EXPRESSED IN ADULT LIVER, SIGNAL = 1.5; EXPRESSED IN BRAIN, SIGNAL = 1.2; EXPRESSED IN LUNG, SIGNAL = 1.8; EXPRESSED IN PLACENTA, SIGNAL = 2.1
tgatttcttgctgccatgtgcgctgacctctggttcttttccaagataacctgtgtttgcagtcctgctccagagttttctattttcactttctcagactcaagtcaaactactggatagtgaaactgctcctcaggtgcattcctgcaggaacttgtcttccaataggaaagcttagtcagagtacagcctctgtccatttacattttaggggccctgatgttcttggcaacacaaaaaatagctcccaagaaaaaacagccaaggttataatccatattttacttgctaaggtgaatattactgttctgctataaagttggtattcttttgcagtggagaagagagcttagataatgaatatgagtttactaaatactacagatcacttctctacccttctgccca

SEQ ID NO: 3082 - DNA, 368 bp, Homo sapiens
  MAP TO AL033538.1; EXPRESSED IN HELA, SIGNAL = 2.2; EXPRESSED IN HEART, SIGNAL = 4.5; EXPRESSED IN PLACENTA, SIGNAL = 2.1; EXPRESSED IN HBL100, SIGNAL = 2.4; EXPRESSED IN BT474, SIGNAL = 1.9; EXPRESSED IN ADULT LIVER, SIGNAL = 1.1; EXPRESSED IN FETAL LIVER, SIGNAL = 2.4; EXPRESSED IN BONE MARROW, SIGNAL =  11; EXPRESSED IN LUNG, SIGNAL = 3.6; EXPRESSED IN BRAIN, SIGNAL = 1.6
cgacagtgtttcccttaggccaaattaaatcacatactggtgtaaggcctatggtaaaatattattctgttccacttttcatactgtctgacctagtcccttagcaataggactgcggctaaacaaaggcagttgttcaaataattatatgccccatgtgaagaggctaatcgttttagtcttgaagtgtcagtgattcacagtcttggacttttggctttgatgtgcattctcactgaaaatgtggagaagggtctggcttggcagctgacagcggcagctctggagccggctagcggtgttatatcgccctcttgtggcctctggagcagtgcgtgggtgcttgcagccagaagcaggagaatgat

SEQ ID NO: 3083 - DNA, 416 bp, Homo sapiens
  MAP TO AL031622.1; EXPRESSED IN PLACENTA, SIGNAL = 2.5; EXPRESSED IN BT474, SIGNAL = 2.3; EXPRESSED IN ADULT LIVER, SIGNAL = 2.8; EXPRESSED IN FETAL LIVER, SIGNAL = 2.5; EXPRESSED IN BRAIN, SIGNAL = 2.2; EXPRESSED IN LUNG, SIGNAL = 2.8; EXPRESSED IN BONE MARROW, SIGNAL = 4.1; EXPRESSED IN HEART, SIGNAL = 2.2; EXPRESSED IN HELA, SIGNAL =   6; EXPRESSED IN HBL100, SIGNAL = 2.5
agaatgtccggaaacagagccatgtttatatggtaactttgaaatacctttttatcttgctaatgactttccggtatttttgagattataagaacagattgtcaaaggatggggttactagtaatttccaaaagtagtaaacctactttaaattattatttcctaccctcaaactgttacttacattctttgaaacttttcaacctttttttcagacttttgagtctcatagaaaaaaaataacataaccagaattatatgttaaaggaagatcttatcattatctaatgtctcaatgagaactaaagtaacatctctaagatgaaatcattttgatcacttttttgaatcttaggggctgcagttatgggtcctcctggccctcctggatttcctggagaaaggggtcagaaagg

SEQ ID NO: 3084 - DNA, 389 bp, Homo sapiens
  MAP TO AC008015.5; EXPRESSED IN PLACENTA, SIGNAL = 3.9; EXPRESSED IN HBL100, SIGNAL = 5.1; EXPRESSED IN BT474, SIGNAL = 4.4; EXPRESSED IN LUNG, SIGNAL =   5; EXPRESSED IN BRAIN, SIGNAL = 4.4; EXPRESSED IN HEART, SIGNAL = 3.7; EXPRESSED IN HELA, SIGNAL =   5; EXPRESSED IN ADULT LIVER, SIGNAL = 9.9; EXPRESSED IN FETAL LIVER, SIGNAL = 4.5; EXPRESSED IN BONE MARROW, SIGNAL = 4.2
tgtttgcattcacaggatggggagatcgacctgaaactcctcaccaaagtgctcgcgccggagcacgaagtccgggaggtacagtggtggcagcaattccccggtctctcagctctggcattcccataaccagccgactcccgggctggcctgtgcctccctgaggcctggatgggagggagaagtcagctacagttgagggaaaaggcctttctttgtcttacccagcgaaacccttcttggcaggatgatgtcggctgggactgggaccatctgttcactgaggtgtcctcagaggtcctcactgagtgggacccactgcagacggagaaggaggaccctgcggggcaggccaggcacacctgagcccgtcacccatgctctagaca

SEQ ID NO: 3085 - DNA, 446 bp, Homo sapiens
  MAP TO AL035467.21; EXPRESSED IN PLACENTA, SIGNAL = 1.6; EXPRESSED IN HEART, SIGNAL = 1.3; EXPRESSED IN ADULT LIVER, SIGNAL = 1.1; EXPRESSED IN LUNG, SIGNAL =   1; EXPRESSED IN BRAIN, SIGNAL = 1.8; EXPRESSED IN BONE MARROW, SIGNAL = 1.3; EXPRESSED IN HELA, SIGNAL = 1.9; EXPRESSED IN HBL100, SIGNAL = 2.5; EXPRESSED IN BT474, SIGNAL = 2.1; EXPRESSED IN FETAL LIVER, SIGNAL = 1.3
ctgctcagaagtcccctttgtttttaattcctctaggccctatcatcacctctaagcatttattattcattattgaggtgggtaatttacatgtttcttcagttttctagatttggggcaacttgagtacagcaattttgtcttataaaataaatgcatgtgtgtttatagcccatcccatttttacaaaggctttaaggagaacagtcttacttgtgtctcttgtttttttatatcctaagagaaatactcatttttttttctcatgtaacttaggctatagtgttaagtcagattacagtgaaacaaatttctcacagggagaatttttttttatatatatatagtttataaaggttcgcaaaggtattctactaaggtggcatgttgttgaggtcaagcccttggagaaagaaatgtttgtgtctcagcatgtaggttggcag

SEQ ID NO: 3086 - DNA, 359 bp, Homo sapiens
  MAP TO AL031662.24; EXPRESSED IN BT474, SIGNAL = 1.9; EXPRESSED IN ADULT LIVER, SIGNAL = 1.9; EXPRESSED IN FETAL LIVER, SIGNAL = 1.9; EXPRESSED IN LUNG, SIGNAL = 1.6; EXPRESSED IN BONE MARROW, SIGNAL = 1.8; EXPRESSED IN BRAIN, SIGNAL = 1.5; EXPRESSED IN HEART, SIGNAL = 1.6; EXPRESSED IN PLACENTA, SIGNAL = 1.7; EXPRESSED IN HBL100, SIGNAL = 1.5; EXPRESSED IN HELA, SIGNAL = 1.7
tgcaataatcggaaaccaccaaatattaacaaagtaatttctactttgcagacattatttagaattaagaattgttttcaatatgtatctcaatatgagatgtcttatattcagcctttagggcagcttgaatcagacagattgttcagacacctcactttggtggaatggtggttaaaaagcagggaaagaaggtgataataggcattgactgagtagaggaaaattggggcgatatggagagcctgtgacttatgggtatttttattcttatagataaatcctgtttcaatgcattctttaactttgaggatatgcaagagatcacccagcactttgctgtctgtcatgtggatgcc

SEQ ID NO: 3087 - DNA, 435 bp, Homo sapiens
  MAP TO AL034372.15; EXPRESSED IN PLACENTA, SIGNAL = 5.3; EXPRESSED IN HBL100, SIGNAL = 4.1; EXPRESSED IN BT474, SIGNAL = 4.4; EXPRESSED IN FETAL LIVER, SIGNAL = 4.3; EXPRESSED IN LUNG, SIGNAL = 5.2; EXPRESSED IN HEART, SIGNAL = 3.6; EXPRESSED IN HELA, SIGNAL = 4.7; EXPRESSED IN ADULT LIVER, SIGNAL = 5.1; EXPRESSED IN BRAIN, SIGNAL = 4.3; EXPRESSED IN BONE MARROW, SIGNAL = 4.4
ggggatgagggacaaaagactacacattgggtacagtgtacactgctcagatgatgggtgtatccaaacctcagaaatcaccactaaagaacttatccatgtaaccaaaaaccacttgtacccacccccaaaactactgagattaaaaagcaacaataatacatacaatttcatggttaaaaaataaaaataaagccatccccagtgattgtgtcttcctcctcgctgttgttgagactgatggtgttggtttactcatcctccctgatgctcacgcagcctccatttgtgcctgtgcttttctagaatggccaacatgcagggactggtggaaagactggaacgagctgtcagccgcctggagtcgctgtctgcagagtcccacaggccccctgggaactgcggggaagtcaatggtgtcattgcaggtagggt

SEQ ID NO: 3088 - DNA, 484 bp, Homo sapiens
  MAP TO AC007353.1; EXPRESSED IN FETAL LIVER, SIGNAL = 7.8; EXPRESSED IN BRAIN, SIGNAL =   7; EXPRESSED IN HBL100, SIGNAL = 6.9; EXPRESSED IN HELA, SIGNAL = 7.8; EXPRESSED IN PLACENTA, SIGNAL = 7.7; EXPRESSED IN ADULT LIVER, SIGNAL = 8.4; EXPRESSED IN BT474, SIGNAL = 6.5; EXPRESSED IN LUNG, SIGNAL = 8.9; EXPRESSED IN BONE MARROW, SIGNAL =   7; EXPRESSED IN HEART, SIGNAL = 6.2
cgaggcttacataaaacactgcataattataagagtcttgcttaagataataacaatttatcttctatgtataaaaagactcatcaattttacctttttcaacacacactttatgtcacactttaaagtacattgtcctagaaccttcctccataaacttttcaacattctctcttgaagcttctgtatgggctcagagtaaagctgcaaatgaccacaacactcccttatgttagaggcaaaactttagtcctcagcttgctgactaacctactaggctcctgagtgggctgcctgtgaccataattataaatttcaggccagcctcttctgtctttcagggtctcgtcagccaacctggatttcatgttcttcagaaaatctctggcctttcttagatgaaactttagtatttcctcatgcctttgatgccttatttggtccaagagctcatcaagttgggcctcctggacctgagatctgc

SEQ ID NO: 3089 - DNA, 1897 bp, Homo sapiens
  MAP TO AC011451.2; EXPRESSED IN PLACENTA, SIGNAL = 1.4; EXPRESSED IN HEART, SIGNAL = 1.4; EXPRESSED IN BT474, SIGNAL = 1.8; EXPRESSED IN LUNG, SIGNAL = 1.3; EXPRESSED IN BRAIN, SIGNAL = 1.2; EXPRESSED IN HELA, SIGNAL = 1.5; EXPRESSED IN HBL100, SIGNAL = 1.7; EXPRESSED IN ADULT LIVER, SIGNAL = 0.96; EXPRESSED IN FETAL LIVER, SIGNAL = 1.4; EXPRESSED IN BONE MARROW, SIGNAL = 1.3
aagcctagatcaaagattgtggtttgagaaagaattttcatgagttaattttttccacaaatgagaccgggattttgaatgtttgacacatacttcagttgtaaacaattatcagaaaaatcccgtgagtcaataactcagtgacagtattggctgtcgtagagccctctgtgaaaactttcagcttaaacttgacagaagggcagaaaacatatacattcactgaaattggtagaaatttattactaataatgtgtcttttatttttaaaagaaatcatatggtagagaacatctatgaatgttatgaagaaaatcaagatggacagactttcagccaagttccaaatcttgattcactcaagagaaatactgaagtaaaatcctgtgaatgccatgagtgtggaaaggccttcgtggatcattcatcccttaagagtcacatcaggtctcatactggaagcaaaccctatcagtgcaaggaatgtgggaaggccttccattttcttgcttgtttcaagaagcatatgaaaacccccactgaagagaagccctatgaatgtaaggaatgtaccaaagccttcagctgttcctcattctttagggcacatatgaagattcacatcggaaagacaaactatgaatgtaaagaatgtgggaaaggttttagttgttcctcatcgctcacagaacacaaaagaattcacagtggagataagccttatgaatgtaaggaatgtgggaaggccttcagttgttcctcctcactctccaaacacaaaagaattcacagtggagataagccatatgaatgtaaggaatgtgggaaggcctttagctcttcctctcaccttataatacatataagaattcacactggagagaagccttatgaatgtaaagagtgtgggaaggccttcagcgagtcctcaaaactcactgtacatgggaggacacatactggagagaaaccctataaatgtaaggaatgtgggaaagcctacaattgtccctcctccttaagtatccatatgagaaaacacactggagaaaaaccgtatgaatgtctggaatgtggaaaggccttctaccttcccacttcccttaatacacatgtgaaaaatcaaagtcgagagaaaccctatgaatgtaaggaatgtgggaaggcctttagttgtccctcgtcctttagagcacatgtgagagatcacactggaaagatacagtatgaatgtaaggagtgtgggaagacctttagtcgttcctcatccctcaccgaacacctaagaactcacagcggagagaagccgtatgaatgtaaagaatgtgggaaagcctttattagttcctcccaccttacagtacatatcagaactcacactggagagaaaccctatgaatgtaagaaatgtgggaaagcctttatttatccctcagcccttaggatccacatgagaacgcacactggggaaaaaccctatgaatgtaaggaatgtgggaaagcatttcgtcattcttcataccttactgtacatgcaagaatgcacactggagagaaaccctttgaatgtctggaatgtggaaaagctttcagttgtccctcatcctttcgaaggcatgtgagaagccacactggagagaaaccctatgaatgtaaggaatgtgggaaagcctttgtttgtcctgcctactttcgaaggcatgtgaaaactcacactagagaaaacatataaatgtaaggaatatgggaatgtctgcaaagcttcagatcctaggcaacatgtgagatctcatactgtggagacaccctatgaatgtaagaaagtaggaaattgttgctcatcgttttgaagatttgaggacactttagagaaaccctgtgtatgtaagtcatgtgc

SEQ ID NO: 3090 - DNA, 470 bp, Homo sapiens
  MAP TO AC007114.7; EXPRESSED IN LUNG, SIGNAL =   4; EXPRESSED IN PLACENTA, SIGNAL = 4.3; EXPRESSED IN HELA, SIGNAL =   4; EXPRESSED IN ADULT LIVER, SIGNAL = 4.6; EXPRESSED IN BT474, SIGNAL = 3.8; EXPRESSED IN BRAIN, SIGNAL = 3.8; EXPRESSED IN BONE MARROW, SIGNAL = 2.9; EXPRESSED IN HEART, SIGNAL = 3.7; EXPRESSED IN HBL100, SIGNAL = 3.7; EXPRESSED IN FETAL LIVER, SIGNAL = 4.7
gccccagaatatgcaagaaccacccccaagggagacacacaggcctgcgagtttgagaagtacaagaataagatgctcctggaggcagctggaggaattccatgttgcaggaagctctctgagccttggcaaagtgtagcgtgtcctttccctgcggcctttggctgacccagggctccttctggtttactgtccctctcccagccccctccctccctgaggtctaatggccctggccccagggagctttgggcttaccacagaaccagcctgggggactccgcccctacctttggcacctcgatctcccagatgatgaggtcgaccttcttagggttggagcctgcctgggcattttggaagctctcagtcttcttgagactgcaacagctatccacggaatccatgctgttcctgtcagaacctgcaggggaagaagcagcaggcacgcacacacacagaccccactc

SEQ ID NO: 3091 - DNA, 399 bp, Homo sapiens
  MAP TO AL121965.5; EXPRESSED IN FETAL LIVER, SIGNAL = 2.1; EXPRESSED IN ADULT LIVER, SIGNAL =   1; EXPRESSED IN LUNG, SIGNAL = 2.6; EXPRESSED IN BT474, SIGNAL = 3.2; EXPRESSED IN BRAIN, SIGNAL = 1.9; EXPRESSED IN BONE MARROW, SIGNAL = 1.2; EXPRESSED IN PLACENTA, SIGNAL = 2.1; EXPRESSED IN HEART, SIGNAL = 2.3; EXPRESSED IN HELA, SIGNAL = 1.7; EXPRESSED IN HBL100, SIGNAL = 2.2
cttggaaataaggcttcccctctgagagtaagcaagtagcatccacatataaaggataggattattcttatgtagaaataataagataattaggattatatgagaaaagatattgccccacaattcaaggatgcagcttgacttgcacttcttttcagactgagtttgaataatagatttattgacaaatttaaaagcacattgggtataaccaccaatctcctcctataattttttagaatgcagctagaattgtccgtgctctttttgaaattgctctgaggaaacgttggcctaccatgacctacaggctcctgaatcttagtaaagtcattgacaagaggctttggggttgggctagccctttgagacaattttcaatcctaccaccacacatcc

SEQ ID NO: 3092 - DNA, 399 bp, Homo sapiens
  MAP TO AL035554.1; EXPRESSED IN BT474, SIGNAL = 2.8; EXPRESSED IN FETAL LIVER, SIGNAL = 2.4; EXPRESSED IN BRAIN, SIGNAL = 2.8; EXPRESSED IN BONE MARROW, SIGNAL = 2.9; EXPRESSED IN HBL100, SIGNAL = 2.5; EXPRESSED IN PLACENTA, SIGNAL = 2.6; EXPRESSED IN HEART, SIGNAL = 2.3; EXPRESSED IN LUNG, SIGNAL = 2.5; EXPRESSED IN HELA, SIGNAL = 2.3; EXPRESSED IN ADULT LIVER, SIGNAL = 2.4
tgggagaaatggaagactgctatttttaaaagaaactattttatatataatgtttaacctgaggaaataaccatcatttatttactaatttccctactgctggatgtttttcctttctcccacaaatggagatttgacacttgtgttaaaggtcttccaatcctttgggaaataacacttgacccaggtgctgtgaaacaatctttttacagcaaataaacacagcacttacctgctcctttagcatgcacaactctctcaggaattctctctcggtcaaaatgagccatttcatcagtgaaaaccacatcctgaacaagaaggggcccacggggccctactgtaataacattaagtttgtctcctactgggttaccagctccagtggtcaggacatca

SEQ ID NO: 3093 - DNA, 432 bp, Homo sapiens
  MAP TO AL034425.6; EXPRESSED IN BT474, SIGNAL = 2.6; EXPRESSED IN BONE MARROW, SIGNAL = 3.2; EXPRESSED IN BRAIN, SIGNAL = 2.9; EXPRESSED IN HBL100, SIGNAL = 3.6; EXPRESSED IN HEART, SIGNAL = 2.8; EXPRESSED IN ADULT LIVER, SIGNAL = 3.8; EXPRESSED IN FETAL LIVER, SIGNAL = 3.3; EXPRESSED IN LUNG, SIGNAL = 3.1; EXPRESSED IN HELA, SIGNAL = 3.3; EXPRESSED IN PLACENTA, SIGNAL =   3
atgcacttgtctcaccatgcgcttgactctgggcatgatttacagtgcctcaggcagtcacaagttgaggactggagagggaggatgcagaggtcaaaagcagcttgctgtctatattgcctaccctgtggggatgccaggtgcagaggccaacgagcagcttactatctacactacctaccctgtgagggtgccaggggcagagaccaatgagtggcttagtgtctatactacctgccatgtcagggtgccaggtgcagaggccaatgagcagattgctgtccacactacctaccctgtggggatgctgggtgcagaggccaatgagtggcttggtgtctacactacctaccatgtgggaatgccaggtggggaggccaatgagcagcttgttgttcacactgcctaccatgtaggggtgctaggtgcaga

SEQ ID NO: 3094 - DNA, 417 bp, Homo sapiens
  MAP TO AL078634.20; EXPRESSED IN HELA, SIGNAL = 3.1; EXPRESSED IN HEART, SIGNAL = 5.6; EXPRESSED IN ADULT LIVER, SIGNAL = 4.3; EXPRESSED IN BT474, SIGNAL = 5.7; EXPRESSED IN BRAIN, SIGNAL = 4.8; EXPRESSED IN BONE MARROW, SIGNAL = 3.2; EXPRESSED IN HBL100, SIGNAL = 2.9; EXPRESSED IN PLACENTA, SIGNAL = 3.7; EXPRESSED IN FETAL LIVER, SIGNAL = 4.1; EXPRESSED IN LUNG, SIGNAL =   3
gctcaaatatagaattttccctccttgtgtaaatattttgcaacaacaaaatttaaaaatcacaacaatcctcacaaattaaaagattagagggatcgttctttattattcagttctgtaacataacccaactcaccaattctatttgttggcgtgttacaagtaaaagaacatgaaacaaaatcatttccatttcaagaacttgtaacacacacacacacacacacacacacacacacacacactaacctggtgaaatacttcattcacgaagttgacataacctcgtgttgacaagagaatccgctgtaccatttcatacaccattcggtgctcttcttcaatgctacagaggctggagttgctgagtcttcggtccgacaaggtgctgctgttagaatggcttttgtcctgctc

SEQ ID NO: 3095 - DNA, 406 bp, Homo sapiens
  MAP TO AL049553.15; EXPRESSED IN PLACENTA, SIGNAL =  13; EXPRESSED IN HEART, SIGNAL =  11; EXPRESSED IN FETAL LIVER, SIGNAL =  12; EXPRESSED IN BT474, SIGNAL = 9.4; EXPRESSED IN BONE MARROW, SIGNAL = 9.6; EXPRESSED IN BRAIN, SIGNAL =  10; EXPRESSED IN HBL100, SIGNAL =  13; EXPRESSED IN ADULT LIVER, SIGNAL =  17; EXPRESSED IN LUNG, SIGNAL =  14; EXPRESSED IN HELA, SIGNAL =  14
ctcttccttcctctcctccccatcccttttctccctccctccttccttactcctttccctcctcccactcccttgcaaaggcccatctggaggccaaggagcagacaggatgacctttaaatcttcctgcccatccacattacccaaaaaggcctcagaggtcagtccttggagggatgctactgggggccagaatcaccacatcccaggatgtgcaaggcagaaatgtccttggagatcatcccagtaggaaggaggaagctggcccaggaagggaggccaggctcggggctggctggcacagagctgaggccacccaacctccagactcccatccatgagctggccactgcccatgtgaggatgaggagggaggagcatctccaggtcctcagatcctcttccc

SEQ ID NO: 3096 - DNA, 430 bp, Homo sapiens
  MAP TO AL035662.23; EXPRESSED IN HELA, SIGNAL = 3.2; EXPRESSED IN HEART, SIGNAL = 3.6; EXPRESSED IN ADULT LIVER, SIGNAL = 4.3; EXPRESSED IN BT474, SIGNAL = 3.7; EXPRESSED IN LUNG, SIGNAL = 2.9; EXPRESSED IN BRAIN, SIGNAL = 4.4; EXPRESSED IN BONE MARROW, SIGNAL = 3.3; EXPRESSED IN PLACENTA, SIGNAL = 5.7; EXPRESSED IN HBL100, SIGNAL = 3.9; EXPRESSED IN FETAL LIVER, SIGNAL = 3.3
ggttccgtaccacacggaggcgcccgtcggccgcggcttcagcctggaggagctcagggtggccggcattcacaagaaggtggcccagatcgttggcattgctgtggatccgaggaggcggaacaagtccattgctgtccctgcaggccaacgtgcagcggctgaaggagtacctctccaaactcatcttcttcctcaggaagccctcggacccccaagaagggagacagttctgctgaagaactgaaactggccactcagctgacaggaccggtcatgcccacccggaatgtctataagaaggagaaagctcgaatcgtcactgaggaggagaagaatgtcaaagcctttgctagtctctgcatggcccgtgccaacgcccggcttttcggcatacgggcaaaaagagccaaggaagctgcagaacaga

SEQ ID NO: 3097 - DNA, 418 bp, Homo sapiens
  MAP TO AC007248.1; EXPRESSED IN BONE MARROW, SIGNAL =   4; EXPRESSED IN HEART, SIGNAL = 4.1; EXPRESSED IN BT474, SIGNAL = 3.7; EXPRESSED IN FETAL LIVER, SIGNAL = 4.5; EXPRESSED IN ADULT LIVER, SIGNAL =   5; EXPRESSED IN LUNG, SIGNAL = 4.2; EXPRESSED IN BRAIN, SIGNAL = 3.8; EXPRESSED IN PLACENTA, SIGNAL = 3.9; EXPRESSED IN HELA, SIGNAL = 4.5; EXPRESSED IN HBL100, SIGNAL = 3.9
attccaggattggggatgacttctttgtgctttttgcattttcaagttttttttcaagtatttatgagcagagaaatctttaaaaatgtaataccactaagtctttctccagctgtgcctgttcaaggctcccacacccttctccctctcctcgttcttgagttcttcaccccaacctccaccttctagtcccctcttcattcttgacttcatgttttgagaaattgaagtctttgtggggctctgaacacttctcatgattttatgcttcttcttcgtgtgagacaaggtcttcggccacatccacctccaccccatccaccgtttccagccgacattcctttatgtggggatcacattctccagaaagttctctctgacctcccatgccccatttcccttgcccttcctacaccat

SEQ ID NO: 3098 - DNA, 417 bp, Homo sapiens
  MAP TO AL034561.4; EXPRESSED IN HELA, SIGNAL = 1.8; EXPRESSED IN HEART, SIGNAL = 1.5; EXPRESSED IN FETAL LIVER, SIGNAL = 1.6; EXPRESSED IN BT474, SIGNAL = 1.3; EXPRESSED IN BONE MARROW, SIGNAL = 1.1; EXPRESSED IN LUNG, SIGNAL = 1.6; EXPRESSED IN BRAIN, SIGNAL = 1.2; EXPRESSED IN PLACENTA, SIGNAL = 1.3; EXPRESSED IN HBL100, SIGNAL = 1.7; EXPRESSED IN ADULT LIVER, SIGNAL = 1.9
ctcctggcccataagtttccctgaaagagttctcaccatcattgcatatacacccactgccttgaccactgaggaccctcaatcagattcaacctccaaaagatcctgcttgaggcacactataattcaactgtgaaaagtcaaagacaaagagaattctaaaagctggaagagaaaaaacatcaagtcacatataagggaatgctcattagaatattagagatttctcagaagaaaactttcagggctagaaaaaaataaaatgatatactcaaagtgctgaaagaaaaaagaactcagcagagaatactgtatctggaaaagctactcttcagaaacaaaagagagataaagaccttccaagataagcaaaaacagagggaattcatcatcactaggcaggtcttggaagaaatg

SEQ ID NO: 3099 - DNA, 403 bp, Homo sapiens
  MAP TO AL078645.18; EXPRESSED IN HEART, SIGNAL = 2.2; EXPRESSED IN ADULT LIVER, SIGNAL = 1.9; EXPRESSED IN BRAIN, SIGNAL = 1.8; EXPRESSED IN LUNG, SIGNAL = 1.4; EXPRESSED IN BONE MARROW, SIGNAL =   3; EXPRESSED IN PLACENTA, SIGNAL = 1.8; EXPRESSED IN HELA, SIGNAL = 1.7; EXPRESSED IN HBL100, SIGNAL = 2.6; EXPRESSED IN BT474, SIGNAL = 2.4; EXPRESSED IN FETAL LIVER, SIGNAL = 1.5
ggacacctgtcctcaacgtcaaacagtgatggaaagccacagaattcagagcatttgctgtaccacaggtacaaaaacaactgtcactttaccacttgcctttcacacacattggctctgtcttatctagattacttagaagatactagggaggccaagtcaggaagactgattgaacccaggagtttgagaccagcctgggcaacataatgagaccccatttcttaaaaaaaaaaaaaaaggaagaagagaaaaaaagaaagaagaaagaagaagaagaagaagaagaagaagaagaagaagaagaagaagaagaagaagaagaagaagaagacgacgacgacaatactaacagcccaactccagatgcttatcaagtcaatccagatgtaccgtgccctag

SEQ ID NO: 3100 - DNA, 347 bp, Homo sapiens
  MAP TO AC008417.2; EXPRESSED IN BONE MARROW, SIGNAL = 2.8; EXPRESSED IN HELA, SIGNAL = 2.5; EXPRESSED IN PLACENTA, SIGNAL = 2.8; EXPRESSED IN BT474, SIGNAL = 3.5; EXPRESSED IN BRAIN, SIGNAL = 3.6; EXPRESSED IN HEART, SIGNAL =   6; EXPRESSED IN HBL100, SIGNAL = 3.2; EXPRESSED IN ADULT LIVER, SIGNAL = 2.6; EXPRESSED IN FETAL LIVER, SIGNAL = 2.7; EXPRESSED IN LUNG, SIGNAL = 2.9
cctctttaatcctcaaggagtgttaggaacgggacaactttagatatggaactatagcatataataattttcttcctaatggattatattttacacaagaattatatattctaagaagcactgtgatgtaggacaaagaagctaaggatttctgtttatagtctcatttaataataaaggttcaatttcaaatacggaatcataaatattttctccttaccttaactttaaacttggactgagaattcatataatcaaaaagctgctgataattcttaaactgtaaatcccattccgtgtattcacagtagcggaaatcatctcctagtggagccaggagaactttg

SEQ ID NO: 3101 - DNA, 470 bp, Homo sapiens
  MAP TO AL049596.11; EXPRESSED IN BRAIN, SIGNAL = 1.4; EXPRESSED IN HELA, SIGNAL = 2.1; EXPRESSED IN HBL100, SIGNAL = 0.91; EXPRESSED IN HEART, SIGNAL = 2.6; EXPRESSED IN FETAL LIVER, SIGNAL = 1.2; EXPRESSED IN BT474, SIGNAL = 1.1
tgggtgtgtgatttacccagcttggtttcggtagaaagacatctcagctgaacttaaaatatctttagagaaaactggctccgatccttaaggccccagttccagaaatggtctgcacagtgacaaactggccacttttcaagactttgctgttttcacccagggttggttctacagatgccttgcaaaattcagccagtcccccaactggcagggattccttgtccacattttttgcagcaatctgggcctctgccttgagcacgctaggcagcatgtacggcttcccattatcatcccaactcccagattcatctttttgctattgatgtccctcttaaaggcttcagtgactcccaggatgggatctggaggtcccatttccacatgggtccaccaggagctggctctggcagaggctgcagcagcaaggcctgggtggaaggctgcggtaatcccggagaggagtg

SEQ ID NO: 3102 - DNA, 372 bp, Homo sapiens
  MAP TO AL035685.17; EXPRESSED IN BT474, SIGNAL = 3.3; EXPRESSED IN FETAL LIVER, SIGNAL = 3.5; EXPRESSED IN BONE MARROW, SIGNAL = 4.3; EXPRESSED IN HEART, SIGNAL = 3.4; EXPRESSED IN BRAIN, SIGNAL = 3.7; EXPRESSED IN LUNG, SIGNAL = 2.8; EXPRESSED IN PLACENTA, SIGNAL = 3.6; EXPRESSED IN HELA, SIGNAL =   3; EXPRESSED IN HBL100, SIGNAL = 3.4; EXPRESSED IN ADULT LIVER, SIGNAL = 3.4
gtaggtttgtggaggccaaccccagccctgatgccagccagcactctagtttcttcatcgagagccccaagagttccatgaaaactaacaaccctttgaagctccgagcacttaaagtcaacttcatggagggtgaccccagtccactcctccccgttctagggatgtaccatgaccctctcaggaaccgggggagtgctgcggctgctgtcgctggactggagtgtgccacgcttttggacaaggctgtgctgagcccagagtcctccatctacaccacagcaagtgctaagacacccccccggtctcctgagaaacacacagcaatagcgttcaactttgaggcgggtgtccaccagtacattgacgcag

SEQ ID NO: 3103 - DNA, 397 bp, Homo sapiens
  MAP TO AC008496.2; EXPRESSED IN ADULT LIVER, SIGNAL = 1.3; EXPRESSED IN FETAL LIVER, SIGNAL = 1.1; EXPRESSED IN LUNG, SIGNAL = 1.1; EXPRESSED IN BRAIN, SIGNAL = 1.3; EXPRESSED IN HBL100, SIGNAL = 1.4; EXPRESSED IN HELA, SIGNAL = 1.1; EXPRESSED IN PLACENTA, SIGNAL = 1.2; EXPRESSED IN BT474, SIGNAL = 1.4; EXPRESSED IN BONE MARROW, SIGNAL = 1.2; EXPRESSED IN HEART, SIGNAL = 0.99
atagccaggaagccagtagctaaattgagatggaatgctaattattcaaacaaacattaaataatattaaatgttcaaataatccaaaataaggtatgaaatagaaaacagaagaacaaaaattagaggtgaaaacaggatacaagatatatctttaaatatattctgtatttattcagataggttaaaagtaaaaagatggagaaaaatgtaccatactggagtggctatgttattatcaaagcagatttcagagataaagagggacatttcataataataaagggttcaatttgccaagaagacataatcttaaatgcatattcacctaacaacaatatttcaaaatatatgaagcaaaaactagaagaactgaaaggagaaacagacaaatcca

SEQ ID NO: 3104 - DNA, 428 bp, Homo sapiens
  MAP TO AC007199.1; EXPRESSED IN PLACENTA, SIGNAL = 1.9; EXPRESSED IN BT474, SIGNAL = 1.2; EXPRESSED IN LUNG, SIGNAL = 1.1; EXPRESSED IN BRAIN, SIGNAL = 1.8; EXPRESSED IN HEART, SIGNAL = 1.1; EXPRESSED IN HELA, SIGNAL = 1.3; EXPRESSED IN HBL100, SIGNAL = 1.2; EXPRESSED IN FETAL LIVER, SIGNAL =   1
gcttggcaatcacttcaatgtttattttaccttatgattttatccatttaatgagagaacgaccctcactaattcagacaatgcagaaaggatgacctgtatcagaaaaatgtaagttataaagaaaaaaatgtaaactttacctcttcatactctcaagcaccttatgacaggctgctgctcatataaatttgatattcacaaactatctcaaattacacatttcctcccacccaggttttccaatgaacttaccttccaacatggtcttaatagtcacagattgtttggcaatttccacatcaacttcaaatatctctccatcagaactctgcaacttaattgaaggcatctaaaaaaaaaggacattaaatataaaatttaagagagagagttctacatgacatttcatcaactacagtccatca

SEQ ID NO: 3105 - DNA, 388 bp, Homo sapiens
  MAP TO AL022313.1; EXPRESSED IN ADULT LIVER, SIGNAL = 1.4; EXPRESSED IN BT474, SIGNAL = 1.4; EXPRESSED IN LUNG, SIGNAL = 1.3; EXPRESSED IN BONE MARROW, SIGNAL = 1.8; EXPRESSED IN BRAIN, SIGNAL = 1.4; EXPRESSED IN HBL100, SIGNAL = 2.2; EXPRESSED IN FETAL LIVER, SIGNAL = 1.4; EXPRESSED IN PLACENTA, SIGNAL = 1.1; EXPRESSED IN HEART, SIGNAL = 1.2; EXPRESSED IN HELA, SIGNAL = 2.3
aaatggcggtaacaatggtccctgctgttggggttgcggtggagactcagtgagaggattcatgtagcacacactcagtaagtgccagctgtcactgccagcctatttcaccaccgtgaacacagagcctcagaatggaaaagcagcctgcccaaggtcgcacaacttgcaggtggcacaggcaggatctgaatccagatcagattcttcccgccctacttctatcaccgtggaagggcctgggggggcctgcagccaggaggtggctggaaagggaggttccttggaacaaccagtggcccaggcttcctgcagagccggggaccccagccctggccagggtaagggtcacgcctgcagctggtgttccaggcatcggagaggaact

SEQ ID NO: 3106 - DNA, 412 bp, Homo sapiens
  MAP TO AC007025.2; EXPRESSED IN PLACENTA, SIGNAL = 3.7; EXPRESSED IN ADULT LIVER, SIGNAL =   5; EXPRESSED IN BT474, SIGNAL = 3.7; EXPRESSED IN FETAL LIVER, SIGNAL = 4.2; EXPRESSED IN BRAIN, SIGNAL = 3.6; EXPRESSED IN BONE MARROW, SIGNAL = 4.3; EXPRESSED IN LUNG, SIGNAL =   4; EXPRESSED IN HBL100, SIGNAL =   4; EXPRESSED IN HELA, SIGNAL = 3.7; EXPRESSED IN HEART, SIGNAL = 3.3
tgcaactactcagctctgccattgtagcttgaagtcagccacagacaacatatgaatgagtgagtggggctgggttccaatgaaattttatgaacactgaaatttgaatttcctacaattttcccatatcatgacatattatttatctttttgtattttttcaatcgtataaaaacaaatacatcattcttagcttgtaggccatacaaaaacagtctgttgttgccaaccaccctgctatggtataagatgccgatcgataactgttgtagaggctggaggggaggtagagtgtgacaggataggctttgtagaaaggattacagttgagctaggacttgaagaaggaaggcttttcctggacagacaagtaggagaaagtgaaagacaaagatgtaagccagcaacagca

SEQ ID NO: 3107 - DNA, 414 bp, Homo sapiens
  MAP TO AC007161.1; EXPRESSED IN BONE MARROW, SIGNAL = 6.3; EXPRESSED IN PLACENTA, SIGNAL =   7; EXPRESSED IN HELA, SIGNAL =  15; EXPRESSED IN FETAL LIVER, SIGNAL = 5.7; EXPRESSED IN ADULT LIVER, SIGNAL = 2.6; EXPRESSED IN BT474, SIGNAL = 7.6; EXPRESSED IN BRAIN, SIGNAL = 2.3; EXPRESSED IN LUNG, SIGNAL = 9.5; EXPRESSED IN HEART, SIGNAL = 3.8; EXPRESSED IN HBL100, SIGNAL =  18
aaatatttcttaccaactgcctctgaaaaattttcataaatactatttttaaatgaatactgatgtgagacagttccattgtacagcacagggcttggtacatcatagatgtttagtaaacgcttgttgatatgatgaaagtttggcaacatccaaagcatcgtaatcaggaggcagttgaatatatgccttctctccatcaggccgaatcaggtgttgaccttggccacatcgatgtcacagagcttcttcacagcctgtttgatctggtgcttgttggctttaacatccacagtgaacacaagcgtgctgttgtcttctgtcttcttcatggccgactcagtggtcagcggaaatttgatagtgtagtggttaagcttgtttctcctgggggcgctcttccgaggatatctg

SEQ ID NO: 3108 - DNA, 474 bp, Homo sapiens
  MAP TO AC007228.1; EXPRESSED IN ADULT LIVER, SIGNAL =   4; EXPRESSED IN BT474, SIGNAL =   3; EXPRESSED IN BRAIN, SIGNAL = 3.2; EXPRESSED IN HEART, SIGNAL = 2.6; EXPRESSED IN HELA, SIGNAL =   3; EXPRESSED IN HBL100, SIGNAL =   3; EXPRESSED IN PLACENTA, SIGNAL =   3; EXPRESSED IN FETAL LIVER, SIGNAL = 3.2; EXPRESSED IN LUNG, SIGNAL = 3.2; EXPRESSED IN BONE MARROW, SIGNAL = 3.1
gccgtcttctctctgtgtcctcacgtggtcttttccctgtgcctgcacaccgtggtatctcttcctgttttaataaggacaccagacagattgggttagggccccacccatatgacctcatttaaccctaattacctctttgtaggccctgtctctaaatacagtcacattcaaaagtactggggattaggagtttaatgtaggagttttgtcaggggacacatttctttctataacaaacccccagtcatgtgggggcatgagcactggttgagcaagaacatggttatatcatttcagggcttggtgacatttggggatgtggctgtagatttctcccaagaggagtgggagtggctgaaccccattcagaggaacttgtacaggaaggtgatgttggagaactacaggaacctggcatcgctgggtaagggctcccaccccttttcccacccctcaccctacccacgtcct

SEQ ID NO: 3109 - DNA, 455 bp, Homo sapiens
  MAP TO AP000557.2; EXPRESSED IN PLACENTA, SIGNAL = 1.5; EXPRESSED IN HBL100, SIGNAL = 1.6; EXPRESSED IN BT474, SIGNAL = 1.8; EXPRESSED IN FETAL LIVER, SIGNAL = 1.4; EXPRESSED IN LUNG, SIGNAL = 1.5; EXPRESSED IN BONE MARROW, SIGNAL = 1.7; EXPRESSED IN BRAIN, SIGNAL = 1.5; EXPRESSED IN HEART, SIGNAL = 1.9
tgcagtccagagccatagtgttgaaggtggtaagcaggggtcagaacttggaggttcacattttatttaaagctgtttagtgagcacttgtgagtcactgacactttgtaaacatcagctcgtttactctgtgtggcaatcaggctgaggtggacagcatctcctgaggaagtaaggtgcagatgggccagcagtttgcaatggaagagctcgagggcttggggacaggctggaggaagggtgtgaggcggaggggaggtaaggagagcatcagggtttctacgcctacacggaagagtgggagaagagcaggactcacccagggagccgtgggggtgccgcgttgaagaggaatggctgcgaggccagaggggacagtgtccaggagcgcaagggtcacttggctgagtgtggcaagtgggcaagtcagggacagctgacccccaataatgcta

SEQ ID NO: 3110 - DNA, 457 bp, Homo sapiens
  MAP TO AL035457.11; EXPRESSED IN HEART, SIGNAL = 0.85; EXPRESSED IN BRAIN, SIGNAL = 1.1; EXPRESSED IN BONE MARROW, SIGNAL =   1; EXPRESSED IN BT474, SIGNAL = 4.6; EXPRESSED IN FETAL LIVER, SIGNAL = 0.93; EXPRESSED IN ADULT LIVER, SIGNAL = 0.95
atctgcacctgcatcaacacctttttcagcacctgcttcaacatctgcatcaacatctgcaccaacaccaatacctgcatcagcatcagcgcctgcatcagcattactaccagcatcagcatctgcacctgcaccaacacctttttcagcacctgcatcaacacctgcttcagcatcggtacctgcatcagcatcaacacctgctttaacatcagcagctgcgtcagattagtatctgcatcaacacctgcttcagcatttgcaccagcatctgcatcatatctgcctcagcatcagcaccagcacctgcatcagcatctgcatcattatctgcatcagcacctgcctcagcatcagcacctgcatcagcacgtgcatcaccatctgcatcatgatctgcatcaccatcgtcattggtattggcatcggcatcatctgtgagtgagtgagccttcgg

SEQ ID NO: 3111 - DNA, 450 bp, Homo sapiens
  MAP TO AL096776.12; EXPRESSED IN ADULT LIVER, SIGNAL =  21; EXPRESSED IN BRAIN, SIGNAL =  27; EXPRESSED IN BONE MARROW, SIGNAL =  22; EXPRESSED IN HBL100, SIGNAL =  28; EXPRESSED IN FETAL LIVER, SIGNAL =  48; EXPRESSED IN BT474, SIGNAL =  51; EXPRESSED IN LUNG, SIGNAL =  53; EXPRESSED IN PLACENTA, SIGNAL =  21; EXPRESSED IN HEART, SIGNAL =  20; EXPRESSED IN HELA, SIGNAL =  54
tattccccagttcccaagagttatccctttcttttttttttggttaccaaatttctttatttgaaggaatggtacaaatcaacgaacttaagtggatgttttggtacaacttatagaaaaggtaaaggaaaccccaacatgcatgcactgccttgaagaactttgccaaatactttcttcaccaatctcatgaggagagggaacatgctgagaaactgatgaagctgcagaaccaacgaggtggccgaatcttccttcaggatatcaagaaaccagactgtgatgactgggagagcgggctgaatgcgatggagtgtgcattacatttggaaaaaagtgtgaatcagtcactactggaactgcacaaactggccactgacaaaaatgacccccatttgtgtgacttcattgagacacattacctgaataagcaggtgaaagccatcaaag

SEQ ID NO: 3112 - DNA, 449 bp, Homo sapiens
  MAP TO AL034419.13; EXPRESSED IN BONE MARROW, SIGNAL = 2.5; EXPRESSED IN LUNG, SIGNAL = 2.9; EXPRESSED IN BRAIN, SIGNAL = 2.5; EXPRESSED IN HELA, SIGNAL = 2.9; EXPRESSED IN HEART, SIGNAL = 2.6; EXPRESSED IN PLACENTA, SIGNAL = 2.5; EXPRESSED IN HBL100, SIGNAL = 3.1; EXPRESSED IN BT474, SIGNAL = 2.8; EXPRESSED IN ADULT LIVER, SIGNAL = 3.1; EXPRESSED IN FETAL LIVER, SIGNAL = 3.2
ccctgggtaaaggtgaacagaaaagagagggagaaaccaccaatatatgactttagcattatgaatcagggtgtaattatagatacgaagaccataaaagagataaggtaatactatatacaactccatggtaataaccgtatagagctcaatgtaataatcatcttaggaagatggtataacctcaatacagaagtatgagatctcagtgtagtagattactcaggagaactcagtgtaatagtcatcttataaagatagtggaacctcaatacagaagtatgataaagctatcttataaaaagccaccaccggatcagagaggggacgggctaagggagaggggatgtggctgaggaaggagggaagggggtgagtgctggtggcagccccaagaccagaggcagcaatgaggttgtcatttgttaagtttccctgcagaagtgagg

SEQ ID NO: 3113 - DNA, 448 bp, Homo sapiens
  MAP TO AL035705.16; EXPRESSED IN PLACENTA, SIGNAL = 4.8; EXPRESSED IN HELA, SIGNAL =   4; EXPRESSED IN HEART, SIGNAL = 4.6; EXPRESSED IN FETAL LIVER, SIGNAL = 4.5; EXPRESSED IN ADULT LIVER, SIGNAL = 4.2; EXPRESSED IN BT474, SIGNAL = 4.3; EXPRESSED IN BONE MARROW, SIGNAL = 5.4; EXPRESSED IN BRAIN, SIGNAL = 5.5; EXPRESSED IN HBL100, SIGNAL = 4.7; EXPRESSED IN LUNG, SIGNAL = 4.4
agcctgtgtcctgcctgtagagtttcagactcagaacattcaggtagtttcagcttaagccacttcaataatttcttattatccctttttaattggacttcagggacacaacagggccactgattggcctgtttttcacaaggagcagtgaatttactgagtttttctcttcttttttgttttcaaatattcctccttaaaaaaaaatctcacctataacttctatttattgagcactttccatagataaagagttgtaccttatgtcctctctctcattttacaactcccagctacaaccacccatgaagtacagtaagtgctttgtgcgctctctgaccatggagagtcaggtgaagtcatccagggtgatgcaactggatcagcagcaccagggcttgacctggtcagcctggatccagagcacagcctctcaactatcacccca

SEQ ID NO: 3114 - DNA, 424 bp, Homo sapiens
  MAP TO AC007833.1; EXPRESSED IN HELA, SIGNAL =   1; EXPRESSED IN HEART, SIGNAL = 0.84; EXPRESSED IN ADULT LIVER, SIGNAL = 1.4
ttaggcatttcaaaccctgcgtattgatacatttctatataatggtagttgtgatagaacagtgtcatataaaaatatagttttctctcattcagagtcattgaaataaattttttcaaataggttggtaaagcgatttaatgcttttgactgctgctaacccagctgaatgttgatacatgctattggtttacatctttcttccaatgtttgcctaggaaaaaaatgttattcaactcgagcaatgactaggtttttcgaggacattcttataactacacatactcacttgagctcttcagcaagattctcagtaaaagtccatcatgatgcagtagggtttccagaagcaagttccagttacaacgtggctgggataagagcagtttcaactgaccctcggctttcagtcctccagctgatg

SEQ ID NO: 3115 - DNA, 450 bp, Homo sapiens
  MAP TO AC007256.1; EXPRESSED IN HELA, SIGNAL = 1.3; EXPRESSED IN FETAL LIVER, SIGNAL = 2.1; EXPRESSED IN LUNG, SIGNAL = 1.7; EXPRESSED IN BRAIN, SIGNAL = 1.3; EXPRESSED IN PLACENTA, SIGNAL = 1.1; EXPRESSED IN HEART, SIGNAL = 1.8; EXPRESSED IN HBL100, SIGNAL = 1.1; EXPRESSED IN BT474, SIGNAL = 1.2; EXPRESSED IN ADULT LIVER, SIGNAL = 1.1; EXPRESSED IN BONE MARROW, SIGNAL = 1.3
cctttgacatcttgtcatcttccactgaaaactttaatttgcagcttttaccaaattattaacaccaaataaatagttttattgctgtcattattgttattacacatataattttagcttgtgttttaagatttgtgggaaatgtaaaacatgcctttccccttcctttgttttgcatattcaggatcacaaactctgtatcactggcagcagcttgctcaaccaaacttgggaaccatccttgatccacgaccaggtgtcattactaaaggctttacccagttgcccggggatgctatttatcacatctcagatttagaagaggatgaagaggagggtattacttttcaggttcagcaacctcttgaagtggaagagaaactttcaacatccaagccagtaacagggatcttcctgccacccattacttcagcaggtggaccagttaca

SEQ ID NO: 3116 - DNA, 436 bp, Homo sapiens
  MAP TO AL080274.13; EXPRESSED IN HELA, SIGNAL = 2.3; EXPRESSED IN HEART, SIGNAL = 1.8; EXPRESSED IN FETAL LIVER, SIGNAL = 2.2; EXPRESSED IN ADULT LIVER, SIGNAL = 2.2; EXPRESSED IN BT474, SIGNAL = 2.1; EXPRESSED IN BONE MARROW, SIGNAL =   3; EXPRESSED IN LUNG, SIGNAL = 2.2; EXPRESSED IN BRAIN, SIGNAL = 2.8; EXPRESSED IN PLACENTA, SIGNAL = 2.7; EXPRESSED IN HBL100, SIGNAL = 2.7
tgccttgttgctgtatctgctgtgcccacatgtggtgaaaagcagaagagtaagagagccctcccttcaacccagcatccttttataaggatgctcattccattcatcagggcagacccctcatgacttaatcacctcataaaggcatacaccacctctcaatagtgctgcattagcaattatgtttcaaaataaatttgagagggaataccatcattcaaacaagtggttggtatgaaaaagaatacctacaaatttggtgtcagatatgttgtaaatagtagataaactgtttttgctgttgctgtttgtttttgttattcacctggctaggacaacattctcaaagattttgaatttgaggggatttgtagtgaatatgcaaggatggaggaaggcacttgtatatccaggtgtggaggtcagagagatgacg

SEQ ID NO: 3117 - DNA, 469 bp, Homo sapiens
  MAP TO AC005682.2; EXPRESSED IN HEART, SIGNAL = 0.9; EXPRESSED IN FETAL LIVER, SIGNAL = 0.98
tgggatgttcggtaggtaggtgtattaaatgcactttcaacttaccatattttgaactcacagtggggttatcagaacataaatccattataagctaaggagcatctatgcttggagagtaggaatcccagggcattgggaggcgttgtgcacttccctggcttgttttgctgctgttagtggggagccttttcccccagtcccatgcttttctgtagaggagcttctcccagacaatgccccgggccttttactcattctttcctcattcctttccagagaaggaaggaatttcaatacaattctgtgccaacatgaatgctgaaatcatgcaaactgtggtggtcctgttggcttccatcctctgcctgtcacctgttttcaaggtggacaggtgcagactattatttcctctgtgggactaggggaaatgggtgtggtgaactgcacccagccatttttgtgtttt

SEQ ID NO: 3118 - DNA, 385 bp, Homo sapiens
  MAP TO AL049539.19; EXPRESSED IN HEART, SIGNAL = 1.1; EXPRESSED IN FETAL LIVER, SIGNAL = 1.1; EXPRESSED IN ADULT LIVER, SIGNAL = 1.3; EXPRESSED IN BRAIN, SIGNAL = 1.4; EXPRESSED IN LUNG, SIGNAL =   1; EXPRESSED IN BONE MARROW, SIGNAL = 1.2; EXPRESSED IN HELA, SIGNAL = 1.1; EXPRESSED IN PLACENTA, SIGNAL = 1.1; EXPRESSED IN HBL100, SIGNAL = 1.1; EXPRESSED IN BT474, SIGNAL =   1
gatgctgaggtgccttcttcactgggagtccagatcagggctggggtcagcctcaagagattctggccaggagccctgtggtgggggcagggagtgtgcttctgctgcacaagtcgcctctccttctgtggagcccagaaggtcccctcccccttgcgcagcccccatcccgggcatcagggcctcgtgggggcctcatggtgccatgtctacaggtgccctttcccaccatggtggctctgctgtgcatgtggttcgggatctccctgcccctcgtctacttgggctactacttcggcttccgaaagcagccatatgacaaccctgtgcgcaccaaccagattccccggcagatccccgagcagcggtggtacatgaaccgatt

SEQ ID NO: 3119 - DNA, 446 bp, Homo sapiens
  MAP TO D87675.1; EXPRESSED IN FETAL LIVER, SIGNAL =   1; EXPRESSED IN HEART, SIGNAL = 1.7; EXPRESSED IN PLACENTA, SIGNAL = 1.9; EXPRESSED IN BT474, SIGNAL = 1.7; EXPRESSED IN BRAIN, SIGNAL = 3.4; EXPRESSED IN LUNG, SIGNAL = 3.7; EXPRESSED IN HELA, SIGNAL = 1.2; EXPRESSED IN HBL100, SIGNAL = 1.6
agccacatgttgtacatccttctataaactatgattatcattcttagtaggaaaatatgtgatttctttttttttttttttttttaaagtaagcatcaaatatttgaccaaccagttgggcagagaatatactgaaactttttatataacctcatccaaatgtcccctgcatttaagaaatgaaattcttctaattgcgtttataaattgtaaattatattgcatttagaaattaaaattctttttcttaatttgttttcaaggtgttctttgcagaagatgtgggttcaaacaaaggtgcaatcattggactcatggtgggcggtgttgtcatagcgacagtgatcgtcatcaccttggtgatgctgaagaagaaacagtacacatccattcatcatggtgtggtggaggtaggtaaacttgactgcatgtttccaagtgggaat

SEQ ID NO: 3120 - DNA, 437 bp, Homo sapiens
  MAP TO AC007272.2; EXPRESSED IN BONE MARROW, SIGNAL = 2.5; EXPRESSED IN LUNG, SIGNAL =   8; EXPRESSED IN BRAIN, SIGNAL =   2; EXPRESSED IN PLACENTA, SIGNAL = 2.1; EXPRESSED IN HBL100, SIGNAL = 1.9; EXPRESSED IN HELA, SIGNAL = 3.3; EXPRESSED IN HEART, SIGNAL = 3.5; EXPRESSED IN BT474, SIGNAL = 2.6; EXPRESSED IN FETAL LIVER, SIGNAL = 2.5; EXPRESSED IN ADULT LIVER, SIGNAL =   2
gggctcacaggaatgaagtgacatcatctggcagttggataagtgggcagagacagtaaagtggctgcacttcttattatcctcgtttctgccattcagtagagtctgagacacttcactccctcccacccacccagcctcaggaagagttgatgaattacctatagtccgaaacaaggtgagggttcctgagcaggtgggtctccacagcttttctgtccatcttcaagatacgtttgagcaggtcaaatcgcctcactctgtagagcagttcagccaagtccccgacagacagcttacctctttcccgtaaaatatccagaaggtccctgacattaggtggaaccacatctatagcaacatcccggcacaaaaagagcagcatctccttctcatctgtatcaagtgcttcttcaacctgatggatgacttcagca

SEQ ID NO: 3121 - DNA, 470 bp, Homo sapiens
  MAP TO AL049749.1; EXPRESSED IN BT474, SIGNAL = 5.8; EXPRESSED IN BONE MARROW, SIGNAL = 4.2; EXPRESSED IN HEART, SIGNAL = 5.8; EXPRESSED IN ADULT LIVER, SIGNAL = 3.2; EXPRESSED IN FETAL LIVER, SIGNAL = 4.7; EXPRESSED IN BRAIN, SIGNAL = 5.7; EXPRESSED IN LUNG, SIGNAL = 5.2; EXPRESSED IN HELA, SIGNAL = 5.3; EXPRESSED IN PLACENTA, SIGNAL = 3.9; EXPRESSED IN HBL100, SIGNAL = 4.4
tggtggtggtaatggtgatgatggtgatgatggtggtagtgatgatggtgatggcggtggtaattatagccatgatgcaggtggcagtgatcatgaaggtggtggtgatggtggtgatggtggtggtgttgatgatggtgatggtggtggtgatgatggtggtggtagtggtggtgacagtgatggtggtggtagtgatggtggtggtaatggtggtgacggtgatggtggtggtagtgatggtggtgatggtggtggtaattatagccatgatgcaggtggcagtgatcctgaaggtggcggtgatggtggtgataatgatggtggtggtagtgatgctgatggtggtggtagtaattatagccatggtgcaggtggtggtgatcatgaaggtggtggtgatggtgatgataatgattgtgatgcaggtggtgatgatgaaggtggtggcagcagagatggtgcttgtg

SEQ ID NO: 3122 - DNA, 424 bp, Homo sapiens
  MAP TO AL033532.15; EXPRESSED IN BONE MARROW, SIGNAL = 1.7; EXPRESSED IN BRAIN, SIGNAL = 1.5; EXPRESSED IN HBL100, SIGNAL = 1.6; EXPRESSED IN BT474, SIGNAL = 1.7; EXPRESSED IN FETAL LIVER, SIGNAL =   2; EXPRESSED IN LUNG, SIGNAL = 1.5; EXPRESSED IN PLACENTA, SIGNAL = 1.8; EXPRESSED IN HEART, SIGNAL = 1.8; EXPRESSED IN HELA, SIGNAL = 1.8; EXPRESSED IN ADULT LIVER, SIGNAL = 2.3
tgaattcttggcagctctccaaattggcctcggggcttgtgaggactgtgggattcttctgttttaagcactgtaggtgtttatggtggcagtgggggtggtggggatcttctgcttactttttccctgcaatgggaagcctctcctcactctggggagatctaatccaggttgggaagatgggactgcagaggccagctgcctctatgctgccctattcgacttccaatcagccagctgcctctacactgccctattcgacttccaatcagccagctgcgtctacactgccctattcgacttccaatcagccagctgcctctacactgccctattcgtcttccaatcagccagctgcgtctacactgccctattcgacttccaatcagccagctgcctctacactgccctattcgacttccaa

SEQ ID NO: 3123 - DNA, 394 bp, Homo sapiens
  MAP TO AC007030.2; EXPRESSED IN BONE MARROW, SIGNAL =  21; EXPRESSED IN PLACENTA, SIGNAL =  26; EXPRESSED IN ADULT LIVER, SIGNAL = 3.7; EXPRESSED IN BT474, SIGNAL =  22; EXPRESSED IN LUNG, SIGNAL =  22; EXPRESSED IN BRAIN, SIGNAL = 8.6; EXPRESSED IN HEART, SIGNAL = 9.4; EXPRESSED IN HELA, SIGNAL =  37; EXPRESSED IN HBL100, SIGNAL =  33; EXPRESSED IN FETAL LIVER, SIGNAL =  18
tgagggcatcatcatttctggccatttctacagatacaagttgaagtacctggtcttcctccgcaagcagatgaacaccaacccttcccgaggcccctaccacttccgggcctctagccgcaccttccggctgacctcgaggcatgttgccccacaagacaaagcaaggccgggccgccctggagcgcctcaaggtgtttgacggcatcccaccgccctatgacatgaaaaagcggatggtggttcctgctgccctcaaggtcatgcatctgaagcctacaagaaactttgcctacgtggggcgcctggctcacgaggtttgctgtaagtacctggcagtggcatctaccctgaaggagaagaggaaggagaaagccaagatccactatcggaa

SEQ ID NO: 3124 - DNA, 432 bp, Homo sapiens
  MAP TO AC007044.1; EXPRESSED IN BT474, SIGNAL = 6.9; EXPRESSED IN FETAL LIVER, SIGNAL = 6.8; EXPRESSED IN BONE MARROW, SIGNAL = 6.6; EXPRESSED IN LUNG, SIGNAL =   7; EXPRESSED IN BRAIN, SIGNAL = 6.2; EXPRESSED IN HELA, SIGNAL = 6.5; EXPRESSED IN HBL100, SIGNAL = 7.4; EXPRESSED IN HEART, SIGNAL = 5.4; EXPRESSED IN PLACENTA, SIGNAL = 6.1; EXPRESSED IN ADULT LIVER, SIGNAL = 7.7
tttgacgctctgtcatcctgacccccatccttgtgagttctctatcattctcacaacaggaacagaaatgtctagcgtctagactgtagccaggaagccggggtcctagcatggagccactgcatgagcttgggtggccttcccacatgctgttcatttcctcacctgagaacagggaaggggacagctgtgctggcattctggcccggacatgcagggatcctgtgactggagccatctgggcgtttccagcagtcacgtgctctgctgttgtttgttctgaagatgcaggagccgtagaggagaataactcacagagaagggcagtgggaatattccaggccagggtcttggaaaccaccttagtcaccttcttcagcatcccctggtcagaggattcagcagctcccaagcagtgagtgttccctcctc

SEQ ID NO: 3125 - DNA, 431 bp, Homo sapiens
  MAP TO AC007057.3; EXPRESSED IN ADULT LIVER, SIGNAL = 1.6; EXPRESSED IN BT474, SIGNAL = 1.4; EXPRESSED IN BRAIN, SIGNAL = 1.5; EXPRESSED IN HEART, SIGNAL = 2.1; EXPRESSED IN HELA, SIGNAL = 1.4; EXPRESSED IN HBL100, SIGNAL = 1.4; EXPRESSED IN PLACENTA, SIGNAL = 1.7; EXPRESSED IN FETAL LIVER, SIGNAL = 1.5; EXPRESSED IN LUNG, SIGNAL = 3.1; EXPRESSED IN BONE MARROW, SIGNAL = 1.5
tgcatcttggcctaacttcccatttcacagatgaggatcctgaggctcaggaggagaagcatcttttgcaagactacacagaaagtggtggaaaccaggaccttgaaccacaccctccactcttctctctgcctacctgtcccccagccccactcttacctgcttgcatacagcatgttcctaggagagacagcacaaggccactgttacagatggcgtccccactccccactccctcttacccgcatgtaaaattctctgccctcattcccagatttgatctggaaaatgtaataggccccagggtagcgggtcgtggcttgcatttggaagatgtcagcgggaacggagcgtcctgacaccacgtccatgtcccggtacaagatggtaaagggctggtctctgcagccagggttctcagcaggacacat

SEQ ID NO: 3126 - DNA, 432 bp, Homo sapiens
  MAP TO AC007335.2; EXPRESSED IN ADULT LIVER, SIGNAL = 1.7; EXPRESSED IN HBL100, SIGNAL = 2.5; EXPRESSED IN HELA, SIGNAL = 1.9; EXPRESSED IN HEART, SIGNAL = 2.2; EXPRESSED IN FETAL LIVER, SIGNAL = 1.5; EXPRESSED IN BT474, SIGNAL = 3.1; EXPRESSED IN BRAIN, SIGNAL = 3.3; EXPRESSED IN LUNG, SIGNAL = 1.5; EXPRESSED IN BONE MARROW, SIGNAL = 3.4; EXPRESSED IN PLACENTA, SIGNAL = 1.7
tagattgcttgagtgccctgaagtggccaaacctgtaggtttcagtacaaagagaagccctcatcaagcaactgtcatggcactttttcatcctggcttctaaaaatggaagggagggcattttccagagaaaggttgtgtccgcctataaaccacagaggtaattaaatgccaaccccgaagtcctccaggcgcttgcatcgtggtggggtaagcaaggggcttcatgtgaactgtgggaagtggccagtcccttaccgaacataacaatgtcccccttcaggaaggcaccaccgaacacaaagcggacttcatcagcgtggtcggctttgacaaaagctggcttcgtgtcttcaaagcactgaggccggtgccgaaactcatagaagtagacaggtgcaccagcatctgacaaaaggtcagggaaggtca

SEQ ID NO: 3127 - DNA, 382 bp, Homo sapiens
  MAP TO AL132642.1; EXPRESSED IN PLACENTA, SIGNAL = 2.8; EXPRESSED IN HBL100, SIGNAL = 3.3; EXPRESSED IN HELA, SIGNAL = 1.4; EXPRESSED IN FETAL LIVER, SIGNAL = 2.6; EXPRESSED IN LUNG, SIGNAL = 2.5; EXPRESSED IN HEART, SIGNAL = 1.9; EXPRESSED IN BT474, SIGNAL = 3.1; EXPRESSED IN BRAIN, SIGNAL = 0.95; EXPRESSED IN BONE MARROW, SIGNAL = 1.8
cagccaggagagtacttggggcttgtcctggctcttcccactgggccaccttggtgtttcccagaagaaggtgctggacagccagcagccatcacccaggcattgtgggtatctggggcccgcaggagccatgtgcctgaggattctccttgcccaggaacaggggacatgcagggtgaggctcctcaccaaaccccgaccaactctactttatgacttgctccaacagtgttctctgaccattttacagaaggaaagactgaggctcagagagcttctgcgttattcaaggacacacagctgctacgtggcagagctggtgcagagtcgaggtgtgctggcatctaaagatgatgtttccactgtaagtgctgcccctagg

SEQ ID NO: 3128 - DNA, 393 bp, Homo sapiens
  MAP TO AL096862.15; EXPRESSED IN BT474, SIGNAL = 5.6; EXPRESSED IN BRAIN, SIGNAL =   6; EXPRESSED IN BONE MARROW, SIGNAL = 6.1; EXPRESSED IN LUNG, SIGNAL =   5; EXPRESSED IN HELA, SIGNAL = 6.7; EXPRESSED IN HEART, SIGNAL = 5.4; EXPRESSED IN PLACENTA, SIGNAL =   7; EXPRESSED IN HBL100, SIGNAL = 6.1; EXPRESSED IN FETAL LIVER, SIGNAL = 7.2; EXPRESSED IN ADULT LIVER, SIGNAL = 8.3
agagagctggtgaaaggtgctgctgttaaagataaattcccctgattccagtggggaatccaggatcttgagtaagtaacagaggccaaattgaggcacctgtcagaaccaaggtgaaatggttaccattccagttgctaggcagcacacccacagttctaagtaaatactctgacctacagagaactttgaatggtagctaatttgtcaggagagagaaagagcacactggtgaatataagacccttgacccacttgaaatcagatcatatcactcaattctttcctcttcctctgccttctcctcctccccctttctcttcttcttcctcctcttcctcctcctctttcgcttcttcctcctcccccttctctctctcctcctcctcctcc

SEQ ID NO: 3129 - DNA, 407 bp, Homo sapiens
  MAP TO AL109755.14; EXPRESSED IN PLACENTA, SIGNAL = 1.2; EXPRESSED IN ADULT LIVER, SIGNAL = 1.4; EXPRESSED IN BT474, SIGNAL = 1.1; EXPRESSED IN BONE MARROW, SIGNAL = 1.2; EXPRESSED IN HBL100, SIGNAL = 1.4; EXPRESSED IN HEART, SIGNAL =   1; EXPRESSED IN FETAL LIVER, SIGNAL = 1.1; EXPRESSED IN BRAIN, SIGNAL = 1.3; EXPRESSED IN LUNG, SIGNAL = 1.1; EXPRESSED IN HELA, SIGNAL = 1.1
agacatgctgggcttaatggtgcctaatgggcattcgggccagcaaggagacgtgaagcgtggagtggctcaggagctcttctagtctagggaagcggatgcctttctgaacctaacttatacaggcgattttataagttactctgagctttccatgggtggcctcatatcctgtcagtgactcacgtgttcaaccttgatcaccaatgttttcctcctagagtggtttggtcaagtgggctagccctgggggtaaggaggaatttgttttctttatggcaggctgcagctagactgagactcccttaggtcatctactctgcactgtagcccggatggaagcagccttgtgggggcatggaattctcagagctccaaagacagaagcagccttctgcctcaaaatc

SEQ ID NO: 3130 - DNA, 373 bp, Homo sapiens
  MAP TO AC008015.5; EXPRESSED IN PLACENTA, SIGNAL = 3.1; EXPRESSED IN HEART, SIGNAL = 4.7; EXPRESSED IN FETAL LIVER, SIGNAL = 3.9; EXPRESSED IN ADULT LIVER, SIGNAL = 5.6; EXPRESSED IN HBL100, SIGNAL = 5.6; EXPRESSED IN HELA, SIGNAL = 5.6; EXPRESSED IN BT474, SIGNAL = 5.6; EXPRESSED IN BRAIN, SIGNAL = 5.4; EXPRESSED IN LUNG, SIGNAL = 3.7; EXPRESSED IN BONE MARROW, SIGNAL = 6.2
ctgtgtcttttgctgggctccttgtcactgcactagcctgaggtgcctttgaggaccaggcagataaagtaaatctgtgaaatggggttttatttcagaatggtaccttcaatcatattcttgagatacatacacaaattatttgcatgttcgcatttctataaagaaatatactctgccagttttcctaaaacacgctccccactttgtctttttgcctcctcatatttgatagctgcaagacatactttgccagcctcctcactcctattggaaaaccagcagtgcagatcatgtaattcaggactagttctggacccccagtgtttgggagcaatgcggggtcgggggagctcaggttcatccactgcac

SEQ ID NO: 3131 - DNA, 411 bp, Homo sapiens
  MAP TO L11910.1; EXPRESSED IN BONE MARROW, SIGNAL = 1.2; EXPRESSED IN BRAIN, SIGNAL = 1.2; EXPRESSED IN PLACENTA, SIGNAL = 1.4; EXPRESSED IN HBL100, SIGNAL = 1.5; EXPRESSED IN BT474, SIGNAL = 1.3; EXPRESSED IN LUNG, SIGNAL = 1.6; EXPRESSED IN HEART, SIGNAL = 1.2; EXPRESSED IN HELA, SIGNAL = 1.2; EXPRESSED IN ADULT LIVER, SIGNAL = 0.97
gagtaggcagttgctggaggaagaatgtgagctgcatgggaaaagacaggaggatttacaaagagtgggtgtttaattggggatggaattaggtagttattctgatttttagatttttcatatcttttatttggtccaatgaagcagaaaatttaaatgaagttattacctttgcctgatttttgacacacctcaaactataacttgaggttgctaactatgaaacactggcatttaatgatttaaagtaaagaattctgtaatttgtagacttctgagaagttccagaaaataaatcagatggtatgtaacagcgaccgtgtgctcaaaagaagtgctgaaggaagcaaccctcctaaaccactgaaaaaactacgctttgatattgaaggatcagatgaagcagatgga

SEQ ID NO: 3132 - DNA, 420 bp, Homo sapiens
  MAP TO AC007220.1; EXPRESSED IN HBL100, SIGNAL = 6.7; EXPRESSED IN HEART, SIGNAL = 2.7; EXPRESSED IN PLACENTA, SIGNAL = 2.5; EXPRESSED IN HELA, SIGNAL = 6.5; EXPRESSED IN FETAL LIVER, SIGNAL = 3.8; EXPRESSED IN BT474, SIGNAL = 5.9; EXPRESSED IN ADULT LIVER, SIGNAL =   1; EXPRESSED IN BRAIN, SIGNAL = 2.4; EXPRESSED IN BONE MARROW, SIGNAL = 2.2; EXPRESSED IN LUNG, SIGNAL = 6.2
ggtgttctgtttctgacccgtacgtctccactgctgatcatttcatacctgcttttcctcggttcacttttggctctgcagccaggttactatgtaaaacctggccagcgattattctgccatctgctgctgctacagcggcccgggcatttctctcattaacatactgaatgaaaacaaagcccttaagaacagcgcagcccacaattttgccatacttctaaaagattgcctccacatcagatttcttgaccacaagagtgttgagattcccaacgaacacgcgttcatggagcgaggatctctcttgttggtaacattgctggccgttgtgtttgatgataagatttctcacaaagctgaaaatgtagctgaagatcaaaaaagtctcacaggagcgggcagggagaagagattcaa

SEQ ID NO: 3133 - DNA, 461 bp, Homo sapiens
  MAP TO AC006362.2; EXPRESSED IN HEART, SIGNAL = 1.3
tggtataaagaggaagccttgagatttccagatctgaaaccagatgaccacagaagagcattgattaatatgtgaaggccctaagggagaaatgtttgcattgattctataggaattgcaacacacctcctttcagcatagcatcgtactggttgctgaggcaggcaggcatctctgtgtcctgtctcacatcctctttgtccatcttgtactctgatcattgctgggcaaccagcctcacacagatgtaactagacagcatctctcttcagctgcactgtatatctgtatatctctcccttcagctgcactgtatctcccttcagctgcactgtatctcccttcagctgcactgtatctcccttcagctgcactgtatctcccttcagctgcactgtatatctctccctttctgccccagggtttctgtgaagcatctttgggagacctgttggacttca

SEQ ID NO: 3134 - DNA, 407 bp, Homo sapiens
  MAP TO AC007016.5; EXPRESSED IN BONE MARROW, SIGNAL = 4.5; EXPRESSED IN HELA, SIGNAL = 4.2; EXPRESSED IN FETAL LIVER, SIGNAL = 4.8; EXPRESSED IN LUNG, SIGNAL = 4.5; EXPRESSED IN BRAIN, SIGNAL = 3.6; EXPRESSED IN PLACENTA, SIGNAL = 3.9; EXPRESSED IN HEART, SIGNAL = 3.8; EXPRESSED IN HBL100, SIGNAL = 3.7; EXPRESSED IN BT474, SIGNAL = 3.4; EXPRESSED IN ADULT LIVER, SIGNAL = 4.5
tctttccagggactaggctgtatgacaaatgctttttaggcatttcaacagtctcatttcaacagccctgggagaaatttcctgggctccattctgtagatgaaaaaactgaggcacagagaggtcaggtggcttagtgacctgcctgattacacacttctggttgaaatggggctggggtttgtatccaggtccatctggctatgaagactgtgctcttaaatgaaattccaaaattcctgtttgatatcatgttgcctctaactcaacagagggccaagaagaagaaaaggaaacaagcagcagaagaacatcccggtgatgagattgcagagccgtatcccgaggaggaccttgtgaagcccagccctccagagcccactgatcgggcagtgatagagcaggag

SEQ ID NO: 3135 - DNA, 484 bp, Homo sapiens
  MAP TO AC006230.11; EXPRESSED IN HELA, SIGNAL = 1.3; EXPRESSED IN HEART, SIGNAL = 1.2; EXPRESSED IN PLACENTA, SIGNAL =   1; EXPRESSED IN BT474, SIGNAL =   1; EXPRESSED IN FETAL LIVER, SIGNAL =   1; EXPRESSED IN LUNG, SIGNAL = 0.95; EXPRESSED IN BRAIN, SIGNAL =   1; EXPRESSED IN BONE MARROW, SIGNAL = 1.3; EXPRESSED IN HBL100, SIGNAL = 1.9; EXPRESSED IN ADULT LIVER, SIGNAL = 0.92
gaaaaggagaggaaaaggcggagcccatctcctaagcccaccaaagtgcacattgggagactcaccaggaatgtgacaaaggatcacatcatggagatattttccacctatgggaaaattaaaatgattgacatgcccgtggaaaggatgcatccccatctgtccaaaggctatgcgtgcgtagagtttgagaatccagatgaagctgagaaggcgctgaagcacatggatggaggacaaattgatggccaggagatcactgccaccgtcgtgctggccccctggcctaggccaacccccaggagattcagccctcccaggagaatgttgccaccaccgcctatgtggctcaggtctcccccacggatgaggagaaggtcccgctccccgaggcgcaggtcccccgtgcgccggagatcacggtccccgggccgccgccgccacaggagccgctccagctccaactcctcccaataaacaggcc

SEQ ID NO: 3136 - DNA, 420 bp, Homo sapiens
  MAP TO AC008045.4; EXPRESSED IN BONE MARROW, SIGNAL =   4; EXPRESSED IN BRAIN, SIGNAL = 3.4; EXPRESSED IN HELA, SIGNAL = 3.8; EXPRESSED IN PLACENTA, SIGNAL = 3.5; EXPRESSED IN HBL100, SIGNAL = 3.4; EXPRESSED IN HEART, SIGNAL = 2.8; EXPRESSED IN BT474, SIGNAL = 3.3; EXPRESSED IN FETAL LIVER, SIGNAL = 3.5; EXPRESSED IN LUNG, SIGNAL = 3.3; EXPRESSED IN ADULT LIVER, SIGNAL = 4.4
taaacaggcccagagtcagcttatttggagattttcagcaccgtggacagaggcaccaggttactttttatctgtcactccctgaacagcaggatgaagaactactcagtttgggacagggctctcagccactgtggtgaaaatcaccccctttagcagaaggaaatttacttagaccctttttatttcccctttcccttggaaaaattgcattttcagttgtcaaggcacttaggcttctacaagttatttttcaggtgcctggaggatggaaaagggttgccctggaaattgatatcttcttctgagtttggcttaacaggggaaccaccagtgcccttgcggatggctgaggtgtcttttatgctaggtatggctctcttccagataaccaagtgtagacaggagtaggcccagttg

SEQ ID NO: 3137 - DNA, 392 bp, Homo sapiens
  MAP TO L77570.1; EXPRESSED IN PLACENTA, SIGNAL = 6.9; EXPRESSED IN ADULT LIVER, SIGNAL = 5.9; EXPRESSED IN BT474, SIGNAL = 5.5; EXPRESSED IN FETAL LIVER, SIGNAL = 4.2; EXPRESSED IN BRAIN, SIGNAL = 4.9; EXPRESSED IN LUNG, SIGNAL = 3.5; EXPRESSED IN BONE MARROW, SIGNAL = 5.4; EXPRESSED IN HEART, SIGNAL = 4.7; EXPRESSED IN HELA, SIGNAL = 6.2; EXPRESSED IN HBL100, SIGNAL = 5.8
  unsure 52
  unsure 61
  unsure 79
  unsure 80
  unsure 93
  unsure 94
  unsure 137
  unsure 141
  unsure 147
  unsure 166
agtagcagcagagtccagcctgcccctgctcccaggagcctccagctatctngatgcacantcctacccatggatctcnngggcttccagtgnncgagactggtcttcccaagctgctgtctggccagctgtgctcnaggngtttantgagtggtcagaggccatngtgctcagtagtcatcagactctgactccagcccctcaggtccccaatccaggactcacttgcgctggtccttccaaccaaagctccgctcgggctggtcccattcctgggccaggacaaagcgcagctcctggtcagtgaagaaggtggcgagagagccattcaggcgctggcaggtctgcgcggcatcccagtagttctccccgctcaggtagacccggtagca

SEQ ID NO: 3138 - DNA, 406 bp, Homo sapiens
  MAP TO AL035411.27; EXPRESSED IN HELA, SIGNAL = 1.2; EXPRESSED IN HEART, SIGNAL = 1.1; EXPRESSED IN FETAL LIVER, SIGNAL = 1.2; EXPRESSED IN BT474, SIGNAL = 1.2; EXPRESSED IN BRAIN, SIGNAL = 0.98; EXPRESSED IN LUNG, SIGNAL = 1.1; EXPRESSED IN BONE MARROW, SIGNAL = 1.1; EXPRESSED IN PLACENTA, SIGNAL = 0.93; EXPRESSED IN HBL100, SIGNAL = 1.2; EXPRESSED IN ADULT LIVER, SIGNAL = 1.3
tcattacaagaaatcttaaatcttccctactgtagtgatctctagatttactagcaaaattctaaattctgtataggcctaattaaaatacttcagaatatcacgttttaaaacaacatctataatgtaattctttcttaccattgatccaaaatataatttctaattttcaaatagcgttctggtgttttagcttggcgcccctcaaaaaactcaggaattgcttgtttttcttcttcttgaatgatatttctatctatttctatttcctgttctggtggcttaagctcttcttcctcatggctttcctctaccatttggcaagaatgaaaaagcatttcattatcattcaaatttttctgaatttcacaaggctctggagaaggcaactgcctggcatcaacta

SEQ ID NO: 3139 - DNA, 384 bp, Homo sapiens
  MAP TO AC007353.1; EXPRESSED IN BONE MARROW, SIGNAL = 1.4; EXPRESSED IN BRAIN, SIGNAL = 1.5; EXPRESSED IN HELA, SIGNAL = 1.1; EXPRESSED IN HBL100, SIGNAL = 0.99; EXPRESSED IN HEART, SIGNAL = 1.1; EXPRESSED IN BT474, SIGNAL = 1.5; EXPRESSED IN ADULT LIVER, SIGNAL = 0.99
ttggataggtcaacaattcagtgtctgtctgtctatcacctgagaaaatgatttggagcatactgtttgaatcctgaagttggagtcagtaaatttcatgcagaaatttattttgaccatgacttaacgaagttatgtccttgtagataaaggcagtcaaaatggaacaattgttcatggaaaacagatggttcagctgcaaactaaatgtgacccttatgtccttgagcatagacatgaagtgaaaattggagagactgtgttaccctttcacattcaccctggcagcgatacttgtgatggctgcgagccacggcatggtagagctcacctttgccttgataagaaagatgaattgtttactggtccaacactgagtaagga

SEQ ID NO: 3140 - DNA, 448 bp, Homo sapiens
  MAP TO AL109627.12; EXPRESSED IN BONE MARROW, SIGNAL = 1.1; EXPRESSED IN HBL100, SIGNAL = 1.3; EXPRESSED IN HELA, SIGNAL =   1; EXPRESSED IN PLACENTA, SIGNAL = 1.2; EXPRESSED IN HEART, SIGNAL =   1; EXPRESSED IN BT474, SIGNAL = 1.1; EXPRESSED IN FETAL LIVER, SIGNAL = 1.3; EXPRESSED IN ADULT LIVER, SIGNAL = 1.4
tgccactctggttttcagtgaagagaaaaaatgtaatcaaaagcctttggggatgggcttggtatttgagctgtacctgtcgaattaaggtggctcacaagtggtattggaaagtgctgaagagcagatttcacactgagagtggaaacgaaattacaaagagcttggatgtacatgcctgaattgtttttgagctgctttcagtggaatactgatatttatgttttacctattacagctgttgagtggaatgtcatggccagctcctcggacagtgaagatgacagtttcatggctgtggaccaggaagaaactgtgctggaagggacaatggatcaagatgaggagccccacccagtattggaggctgaggagactagacataataggtccatgtcggagctgccagaagaggttttggagtatatcctgtcctttctctcaccgt

SEQ ID NO: 3141 - DNA, 380 bp, Homo sapiens
  MAP TO AC007738.2; EXPRESSED IN HBL100, SIGNAL = 3.3; EXPRESSED IN HEART, SIGNAL = 2.9; EXPRESSED IN BT474, SIGNAL = 3.3; EXPRESSED IN BRAIN, SIGNAL = 2.8; EXPRESSED IN BONE MARROW, SIGNAL = 2.6; EXPRESSED IN PLACENTA, SIGNAL = 3.1; EXPRESSED IN HELA, SIGNAL = 3.4; EXPRESSED IN ADULT LIVER, SIGNAL =   3; EXPRESSED IN FETAL LIVER, SIGNAL = 3.1; EXPRESSED IN LUNG, SIGNAL =   3
tgagtaaagggcaagcaaggtataaacacaaccaaaatagttttatatgtgtttagtaagttatgcataatattttactgtgaaaaaagtcaatctttatttactaacttctcaggtctgtagaacatttcatctttggtttgagacacatatgtatcaaagtgcatagaaaatgctttaaaatatttaaaaaggaagttaaaataaaacctacactattcatcagtaatcttagtttttcaatgtctttcatctgctggagttctttcagggttagagttacatcacacctggcttcataaaccaatgtttccagagtaaccaaattgtcacagagaaccagcaaaccaggaatattccgctccatcccaagtcgaata

SEQ ID NO: 3142 - DNA, 413 bp, Homo sapiens
  MAP TO AC007249.2; EXPRESSED IN BONE MARROW, SIGNAL = 3.7; EXPRESSED IN PLACENTA, SIGNAL = 3.7; EXPRESSED IN ADULT LIVER, SIGNAL = 4.7; EXPRESSED IN BT474, SIGNAL = 3.5; EXPRESSED IN BRAIN, SIGNAL = 3.3; EXPRESSED IN LUNG, SIGNAL = 4.4; EXPRESSED IN HEART, SIGNAL = 4.5; EXPRESSED IN HELA, SIGNAL =   4; EXPRESSED IN HBL100, SIGNAL = 3.9; EXPRESSED IN FETAL LIVER, SIGNAL = 3.9
tgacaacgggtgacaagaagggcaccctcaccacacacaggcagcaagcccagctggggccaccacaggattggccaatgtcaccaagcagttgatggcggcttgtttatgtccccatccacaaaagactagaaacaccatgccagacggggagaaagatgcatgcgggggaagagacagatgcctctgacagccgggcgtgcagtggggggcagacagcctcacacccatccctggaccccgggcacagtgcagctgggcccaaagcacacactgacttcagcgcagctccaccaccagccagcgcttggccgtggaaaagctcctgggagggtgttcctgccccggaaaacctcgctgctgcatccgttccaccagcaaggtttcctgagtgtctcctgggttcagaaacg

SEQ ID NO: 3143 - DNA, 467 bp, Homo sapiens
  MAP TO AC007321.1; EXPRESSED IN HBL100, SIGNAL = 2.4; EXPRESSED IN HEART, SIGNAL = 2.4; EXPRESSED IN ADULT LIVER, SIGNAL = 2.6; EXPRESSED IN BT474, SIGNAL = 3.8; EXPRESSED IN BRAIN, SIGNAL = 2.2; EXPRESSED IN PLACENTA, SIGNAL = 2.5; EXPRESSED IN HELA, SIGNAL = 2.8; EXPRESSED IN FETAL LIVER, SIGNAL =   2; EXPRESSED IN LUNG, SIGNAL = 2.5; EXPRESSED IN BONE MARROW, SIGNAL = 1.7
ttgatttatgcctctgcctgtaatttctgtctccaaaatgtataatcaagctgtaacccaactaccttgaggacattttctcaggacctgttgagactgtgcctcaggccttgttcactcatttttggctccgaataaatcccttcaaatattttacagagtttgactgttccttgactgttctaaattaattagtgtaaatatctcagagtgttcttgaatgtacttttttccctgaagtttactgtaagatttttatttttctttagacatgggaaagtctctttctcatttgcctttgcattcaagcaaagaagatgcttatgatggagtcacatctgaaaacatgaggaatggactggttaatagtgaagtccataatgaagatggaagaaatggagatgtctctcagtttccatatgtggaatttacaggaagagatagtgtcacctgccctacttgtcagg

SEQ ID NO: 3144 - DNA, 430 bp, Homo sapiens
  MAP TO AC007256.1; EXPRESSED IN PLACENTA, SIGNAL =   2; EXPRESSED IN ADULT LIVER, SIGNAL = 2.6; EXPRESSED IN BT474, SIGNAL =   4; EXPRESSED IN FETAL LIVER, SIGNAL = 2.1; EXPRESSED IN BONE MARROW, SIGNAL = 3.9; EXPRESSED IN LUNG, SIGNAL = 1.8; EXPRESSED IN BRAIN, SIGNAL =   4; EXPRESSED IN HELA, SIGNAL = 3.5; EXPRESSED IN HBL100, SIGNAL =   4; EXPRESSED IN HEART, SIGNAL = 3.5
atgtggtagaaggctgtggggaggacacatgcaggtaccagatagtaaattaactaaatcttgaaaatgtatctccaagcattaccatttgaaaattcatcaggacttccttcaaggctgctgcttctctctgaattaaaaggggaaaccccaaacaatatttgattagaaacaactgtgatatggagcgatttgtcagtttcaattttagagtaggttttgccgattcccggctgtcaggttgtttctacctttgctgaattcttcatagtcgttgattatcttcagcaggctcttgttgatttgggcacagactcttttcaggatgtccaactttccttctcccaggatgaccctcttctccatctctatgaaaatatccagcaggttctaagaggaggagaaataaagttgggaatctggattgagc

SEQ ID NO: 3145 - DNA, 424 bp, Homo sapiens
  MAP TO AC007981.31; EXPRESSED IN BRAIN, SIGNAL = 4.4; EXPRESSED IN BONE MARROW, SIGNAL = 4.3; EXPRESSED IN PLACENTA, SIGNAL = 5.4; EXPRESSED IN ADULT LIVER, SIGNAL =   6; EXPRESSED IN FETAL LIVER, SIGNAL = 4.7; EXPRESSED IN BT474, SIGNAL = 4.3; EXPRESSED IN LUNG, SIGNAL = 7.8; EXPRESSED IN HEART, SIGNAL =   4; EXPRESSED IN HELA, SIGNAL = 4.7; EXPRESSED IN HBL100, SIGNAL = 4.1
gtgggtggatagggaccaggctgggccaggcaaggttgggtgctgtctgacctggctgggcggtagctttggctccaaggtctgctccccggtcagtgggatcctgttcaataatgaatggacgacttcagctctcccagcatcaccaatgagtttggggcacccccctcacctgccaatttcatccagccaggtatggggtggaggtccggggggtgggggactggggtggagaggggcgggtgtcctgggcaggcagctgacgggcatccctgtcttctcccatcggccgcagggaagcagccgctcttgtccatgtgcccgacgatcatggtgggccaggacggccaggtccggatggtggtgggagctgctgggggcacgcagatcaccacagacactgcactggtatgtgtcacccctt

SEQ ID NO: 3146 - DNA, 485 bp, Homo sapiens
  MAP TO AC006992.2; EXPRESSED IN BONE MARROW, SIGNAL = 0.65; EXPRESSED IN FETAL LIVER, SIGNAL = 0.69; EXPRESSED IN ADULT LIVER, SIGNAL = 0.77; EXPRESSED IN BRAIN, SIGNAL = 1.2; EXPRESSED IN HEART, SIGNAL = 0.84; EXPRESSED IN PLACENTA, SIGNAL = 0.72; EXPRESSED IN BT474, SIGNAL = 0.93
caacatggctcattattttcctctctgaataaaatatgaacacatcaattatgtctcagtttctaaatgcatacccttgtcgcactgacctctttctgcttttatatttttcagtatgttcctgacatttgtcagttgggttagttccagacctttctaccctattatcgtattattatagcacttttcaaactttcttctatcacatgagtttgacacaaaggcacactgggagggtgagcctggctgtgctgcccgcaggcactcaccattgcttgtagtccgcgtcgcagttacagtagtacttgggatctgtgcagttgcgttcgatgccgcaggcacatttctggattccaggcccagagcctccccagtagtagtgcttctcgttggctttgccaacccaccaagtgtaagggcttccatctacaagaaaaggcaaaggtatatttagaaacagacctgggttcagtcattagactgcc

SEQ ID NO: 3147 - DNA, 464 bp, Homo sapiens
  MAP TO AL118508.9; EXPRESSED IN HBL100, SIGNAL =   1; EXPRESSED IN PLACENTA, SIGNAL = 0.96; EXPRESSED IN ADULT LIVER, SIGNAL = 1.4; EXPRESSED IN HEART, SIGNAL =   1; EXPRESSED IN BT474, SIGNAL =   1; EXPRESSED IN LUNG, SIGNAL = 1.1
aaagcatgcaaacaaaacccctaactctatcacactctccagtgtaagagatcaacttaggcctggtctggtctcttaaaacctccctttctcatagacttgggagtaccatctagggatggcaggtattcagttatccaaaattccccaagcacctttctttaaaccagggagagaaactaatagtttaaatcacaaataatgtacaagagctacaaagtatgagtgggctttttggatgtggatttgtcagtactgatttgtgggagcctcactgaccagctgcagggcagggagctcacaatccagtaacattcggcagaggtgggggatttccatgcttccggggatttggcataactcctccaaactctggtctctaatcatccaccacatgacccctgggaccctgacatccagtctggacttgattgtcttcagattgttcacctgcagccagttct

SEQ ID NO: 3148 - DNA, 443 bp, Homo sapiens
  MAP TO AL050343.17; EXPRESSED IN HELA, SIGNAL = 3.1; EXPRESSED IN PLACENTA, SIGNAL = 1.8; EXPRESSED IN BT474, SIGNAL = 2.3; EXPRESSED IN BONE MARROW, SIGNAL = 1.2; EXPRESSED IN BRAIN, SIGNAL = 1.8; EXPRESSED IN HBL100, SIGNAL = 2.7; EXPRESSED IN HEART, SIGNAL = 3.3; EXPRESSED IN ADULT LIVER, SIGNAL = 1.4; EXPRESSED IN FETAL LIVER, SIGNAL = 1.9; EXPRESSED IN LUNG, SIGNAL =   2
cccagtacatatggatgccctgcaccgagatgctgaagccctgggacaggcctcggatcccatcagccttgatcttctccaggcagtctgccaggcctttgagctcccactatatgcccaatttcccaacgttggctgccaggcaggttctggcaaattccaggggatagaagaagcacagggagatggccccagccgcccctcaggaagccaggttgcctgcaaaatatctccagaactgtgcatgcttatgcacgcctcccagaaggacctgcttgtacttatccctaaaggcaaagttgagggcttgcatggggaagcagtggatggtgctggccaggtgcccctccagaaggacaagtgccctgctccttggggatgtggaccttgcagcccaccacaccacgcctttgtacggtgtcgccacaatctgcttactggca

SEQ ID NO: 3149 - DNA, 384 bp, Homo sapiens
  MAP TO AP000082.1; EXPRESSED IN FETAL LIVER, SIGNAL = 1.6; EXPRESSED IN BONE MARROW, SIGNAL = 3.1; EXPRESSED IN LUNG, SIGNAL = 3.1; EXPRESSED IN BRAIN, SIGNAL = 2.8; EXPRESSED IN HELA, SIGNAL = 3.3; EXPRESSED IN HEART, SIGNAL = 3.7; EXPRESSED IN PLACENTA, SIGNAL = 3.7; EXPRESSED IN HBL100, SIGNAL = 3.3; EXPRESSED IN BT474, SIGNAL = 2.7; EXPRESSED IN ADULT LIVER, SIGNAL = 2.4
  unsure 360
  unsure 363
agatgggaggatcaatgctgtctgtgttatcaccagcactcccagctttgttttatcagaattctgatttgtttccaccataaaatcatctttcctacatttatttctgcttgacaaccaaaaattttcagttacctttccattctttaaagttcagcgcactcagtagggcacctaggtcctcaaattcgctgtgtgactaaagcctttcagcctctctggcttcctggctcataaggtaaacacacccctcggtgcataatctttcttcttcttctttcttcttctttcttctccttctccttctccttcttcttcttccttctttcctcctcctcctcctcctcctcctccaccacnacntcctcctcctcctccttcttc

SEQ ID NO: 3150 - DNA, 355 bp, Homo sapiens
  MAP TO AC007247.2; EXPRESSED IN BONE MARROW, SIGNAL = 2.2; EXPRESSED IN HELA, SIGNAL = 2.4; EXPRESSED IN FETAL LIVER, SIGNAL = 3.1; EXPRESSED IN BRAIN, SIGNAL =   3; EXPRESSED IN LUNG, SIGNAL =   3; EXPRESSED IN PLACENTA, SIGNAL = 2.4; EXPRESSED IN HEART, SIGNAL = 2.9; EXPRESSED IN HBL100, SIGNAL = 2.1; EXPRESSED IN BT474, SIGNAL = 2.2; EXPRESSED IN ADULT LIVER, SIGNAL = 2.6
ggggtagggttgtgtgtctgtttccagatatattcctgaagctgcagacataccccccgcgactgcttttagcttccctatgttagtgcatctgaagggaaagcaatgtgcttattaaggcccactgttttactgacgtcttctttatgaaggtgaagtttggcaattacccaagagacttcctctccatctccctctgtaccccagctgtcttttctgtgttttagtgtctgctctttctggctgctagttgtcagaagacaagtgatttctttgaaatgcatgaggttagaaaggaagctgatcttcagttggcagtgtttgtccaagatgatggtgcccttgttctgtcatt

SEQ ID NO: 3151 - DNA, 356 bp, Homo sapiens
  MAP TO AC007444.1; EXPRESSED IN LUNG, SIGNAL = 2.8; EXPRESSED IN BONE MARROW, SIGNAL = 4.5; EXPRESSED IN BRAIN, SIGNAL = 4.6; EXPRESSED IN HELA, SIGNAL = 2.5; EXPRESSED IN PLACENTA, SIGNAL = 2.4; EXPRESSED IN HBL100, SIGNAL = 3.4; EXPRESSED IN HEART, SIGNAL = 2.9; EXPRESSED IN BT474, SIGNAL = 3.6; EXPRESSED IN FETAL LIVER, SIGNAL = 2.4; EXPRESSED IN ADULT LIVER, SIGNAL =   3
ctagatggtggtgggcaaaggatggagaactcttgaaattacaaacccactgcctcgccactatcttaaaaactatttttttcctgagtctaaccaaggctctggtctttaaaacagagtttgcaagtgtaaggcatgtaacaatattcaaaacgcggagacacgcaggacagctgtggaagttaggaaaaaagacgcttactcagtgccgctctccaccatctgcgtgaggagagagataccgtccaggtttataaactcctgggcaaacgtgacatcccgggagaggctggccaagtccttcagggcttccagcttggcatccatactcgaggactggattcgttcatggagct

SEQ ID NO: 3152 - DNA, 411 bp, Homo sapiens
  MAP TO AL049593.8; EXPRESSED IN ADULT LIVER, SIGNAL = 1.2; EXPRESSED IN HELA, SIGNAL =   1; EXPRESSED IN HEART, SIGNAL = 1.3; EXPRESSED IN FETAL LIVER, SIGNAL = 1.1; EXPRESSED IN BT474, SIGNAL = 1.2; EXPRESSED IN BRAIN, SIGNAL = 1.3; EXPRESSED IN LUNG, SIGNAL = 1.1; EXPRESSED IN BONE MARROW, SIGNAL = 1.1; EXPRESSED IN PLACENTA, SIGNAL = 1.1; EXPRESSED IN HBL100, SIGNAL =   1
tattctcaccactgccatgcctagggcccccagcctctttgcttttctttctgcccctgcctctttctagagcaccatgaattccattcagtctctgggattggagacactctattgctaagcttgtccttggggtctcaccctctaccccaagtggcttatgaaaatatgtatttccaaacagagaactttctctaggaggaattctggtgaataaccttccctccaccttgttatggcctgtctgttttgtgagtcaaactctgtgtctttgcagatcggaacccagcagccctgatcatggttcatcaacgattgagcaagacctcgctgctctggatgctgaaatgacccaaaagttaatagacttgaaggacaaacaacagcagcagctgcttaatcttcggcaag

SEQ ID NO: 3153 - DNA, 389 bp, Homo sapiens
  MAP TO AL109855.8; EXPRESSED IN BT474, SIGNAL = 3.1; EXPRESSED IN BRAIN, SIGNAL = 2.3; EXPRESSED IN HEART, SIGNAL = 2.4; EXPRESSED IN ADULT LIVER, SIGNAL =   3; EXPRESSED IN FETAL LIVER, SIGNAL = 2.4; EXPRESSED IN LUNG, SIGNAL = 2.4; EXPRESSED IN BONE MARROW, SIGNAL = 2.5; EXPRESSED IN HELA, SIGNAL = 2.7; EXPRESSED IN PLACENTA, SIGNAL = 3.1; EXPRESSED IN HBL100, SIGNAL = 2.4
ggaaggaatccatattctggcaaagctactgtttagtttccggagttgtcacatttaaaacgagatcttttcaagcactagagaagctctttgtaccaggggttaaaataagactgagaggtgcttgttcttgcccttgcccttgccctagtccttgtactgtaggatccctttgttgggtaggttggcaaggttgtggctgtgacagcacagaaggaagagatgtcccccttctcatgagggagagaggggcactcactcttccaatgaccctcttgtttgcaatgaggacagggtctaggggacagcttgtaacccagaggtttgggacattctttactccagtgtcctggatttctacagcaatgccaggcccccattcttttagt

SEQ ID NO: 3154 - DNA, 394 bp, Homo sapiens
  MAP TO AP000556.2; EXPRESSED IN HBL100, SIGNAL = 2.2; EXPRESSED IN HELA, SIGNAL = 1.5; EXPRESSED IN FETAL LIVER, SIGNAL = 1.8; EXPRESSED IN HEART, SIGNAL = 2.3; EXPRESSED IN PLACENTA, SIGNAL = 2.8; EXPRESSED IN ADULT LIVER, SIGNAL =   1; EXPRESSED IN BT474, SIGNAL = 2.1; EXPRESSED IN BRAIN, SIGNAL = 2.2; EXPRESSED IN LUNG, SIGNAL = 3.4; EXPRESSED IN BONE MARROW, SIGNAL = 2.1
gcaggtgatagaggtcccagtgtgggtgtgcaactgtgtgccagagactcttttgccttcatctcaccatggggcagccaaccgggagactagatggataggccagatgcagggtacaagagaagggggatgctgtgacctgttcaggtgtgggggaagcagggagctgggtttcctgaggctgggctatcctctgggtgtatgggggccactctctgctgcacccccaggctgcctccctgaccccacccccaccccaaaggccccagtccttgttccagcagtccccacccactggaagaagctggcccctgcctgtgggggcccaggccagtccctcatcgacattgactttcacagggtccggcggaactctaccctagggcccttcatc

SEQ ID NO: 3155 - DNA, 453 bp, Homo sapiens
  MAP TO AC007335.2; EXPRESSED IN PLACENTA, SIGNAL = 0.95; EXPRESSED IN HELA, SIGNAL = 1.1; EXPRESSED IN HBL100, SIGNAL = 1.1; EXPRESSED IN HEART, SIGNAL = 1.2; EXPRESSED IN ADULT LIVER, SIGNAL = 1.2; EXPRESSED IN BT474, SIGNAL = 0.95; EXPRESSED IN BONE MARROW, SIGNAL = 1.2
aatccccttaccctctctgggccacgtggctgccatctgtgcaaggaggggtttggatttgattaatagcttgcaaattttaaaaattcttcagaaccctctctttagttgaaatctattgaaactcaatatgagtcatgggaaatcactgggtgtttttataggtcaaaattttcaaatatagacaatatcatatgtttagccaagggtttctcagccttagcactattgagcttgtgggccagttaatagtgggaggctgccctgtgggatgtttggtggcattcctggcctccacccagtagatatcagtacctctccactagctgtgactatcgaatatcttcagacattgccaaatgtcccctgggggacaaaagcaccttggttgggaacgactgctttaacctagtaaaacttagaaggtgagattctcctttgaaggtccatgga

SEQ ID NO: 3156 - DNA, 387 bp, Homo sapiens
  MAP TO AC008045.4; EXPRESSED IN FETAL LIVER, SIGNAL = 1.6; EXPRESSED IN ADULT LIVER, SIGNAL = 1.5; EXPRESSED IN BT474, SIGNAL = 1.7; EXPRESSED IN BRAIN, SIGNAL = 1.3; EXPRESSED IN BONE MARROW, SIGNAL = 1.2; EXPRESSED IN LUNG, SIGNAL = 1.5; EXPRESSED IN PLACENTA, SIGNAL = 1.4; EXPRESSED IN HBL100, SIGNAL = 1.5; EXPRESSED IN HELA, SIGNAL = 1.6; EXPRESSED IN HEART, SIGNAL = 1.5
tcacccctgctgctagtttccctggtgtttcgatataggacttgcagaagaattgaagggagtgctgtgttggtatcagcacaagaacggggcagtgcccctgcggtgtgttctctttggtatttgcataggtctgactcttgccagacaagtgctgattgctttcctcttttcttttcctatagctcgagaggagaatgtggccactttccgaggctcagagtatctgtgctacgacctgtctcagaacccgatccagagcagcagtgatgaaatcaccctctcctttaagacctggcagcgtaacggcctcatcctgcacacgggcaagtcggctgactatgtcaacctggctctgaaggatggtgcggtctccttggtcattaa

SEQ ID NO: 3157 - DNA, 444 bp, Homo sapiens
  MAP TO AL031983.1; EXPRESSED IN BT474, SIGNAL = 1.3; EXPRESSED IN BONE MARROW, SIGNAL = 1.7; EXPRESSED IN HEART, SIGNAL = 1.3; EXPRESSED IN FETAL LIVER, SIGNAL = 1.4; EXPRESSED IN LUNG, SIGNAL = 1.2; EXPRESSED IN HELA, SIGNAL = 1.1; EXPRESSED IN BRAIN, SIGNAL = 1.2; EXPRESSED IN PLACENTA, SIGNAL = 1.2; EXPRESSED IN HBL100, SIGNAL = 1.3; EXPRESSED IN ADULT LIVER, SIGNAL = 1.5
acatgagtcatacgggaggcgagtggttggtgggcaaacaggtggttttcatcctgacagtgctggtggccttctgtgggctggtgggcaatggtgtggtctgctggcttttctgcttccaggtcaggagcagcccctacgtgacctatgtccttaacctggccgctgctgatatggtcaacctctcctgtgtaactgtgatcctgttggagaaaatcctcatgctgtatcaccaggtgacattgcaggtggccatgtttctggagcctgtgtcctatttctctgacacagtgagtctctgtctcctggtggccatgaatattgagagctttctgtgtgtcctctgtcccacctggtgctgccaccgcccaaagcacacctctgctgtgatgagcatcctgagctgggccctggccctttctttgcatgtggttagccaggttt

SEQ ID NO: 3158 - DNA, 445 bp, Homo sapiens
  MAP TO AC010175.4; EXPRESSED IN HEART, SIGNAL = 1.9; EXPRESSED IN PLACENTA, SIGNAL = 2.7; EXPRESSED IN FETAL LIVER, SIGNAL = 6.4; EXPRESSED IN ADULT LIVER, SIGNAL = 1.9; EXPRESSED IN BRAIN, SIGNAL = 1.5; EXPRESSED IN LUNG, SIGNAL = 8.2; EXPRESSED IN BONE MARROW, SIGNAL = 1.5; EXPRESSED IN HELA, SIGNAL = 2.7
gcttcaagaatgttcctggcatataacctaacttgcagcaaagaattctgcaagcgctaagaaatagaaaagcaaggtgtggcttagagagccgtgatttaagcacccatagcacatatatcattgtattatctttctgatcatgtcctgctttgcatagcactaattattcacagtgctaacacacaatcccttgaattatccttagtctcaggaacagaatcagtagctgactgatcaaaggaatcttttgttctacccacctttcctgttcaccctcattttccttacccggatgcatttgggaaggtagtttaggaccgtggccttgagtgtgaagacctctccacgaatcacagagtaaggcattgtgagctccacaaagaagggctggaaggctcggagagaggcagtggaagagataccaagtccagcatcttcggac

SEQ ID NO: 3159 - DNA, 392 bp, Homo sapiens
  MAP TO AC010892.2; EXPRESSED IN BT474, SIGNAL = 4.9; EXPRESSED IN LUNG, SIGNAL = 5.9; EXPRESSED IN HEART, SIGNAL = 4.5; EXPRESSED IN ADULT LIVER, SIGNAL = 6.5; EXPRESSED IN FETAL LIVER, SIGNAL = 6.5; EXPRESSED IN BRAIN, SIGNAL = 4.7; EXPRESSED IN BONE MARROW, SIGNAL = 4.6; EXPRESSED IN PLACENTA, SIGNAL = 6.7; EXPRESSED IN HELA, SIGNAL = 5.4; EXPRESSED IN HBL100, SIGNAL = 4.9
gaggggtaagagagatgggcaattcagagtgccatgagctggtgcatctgactgggtggtggacgggattcggtagcacactgagcatccccttcctcacctctttataacccaaagctatgtaacttcccaaacccaaaatgcacctggagagtggtgaggatgggaccttagaaggggtactccaccagcacactccccttctccttctgctgcctgtagaaccagctcgatgagagccagcaagaacggaatgacctgatgcagctgaagctacagctggagggacaggtgacagagctgaggagccgagtgcaggagctcgagagggctctggcaactgccaggcaggagcacacggagctgatggaacagtacaaggtgggagctgg

SEQ ID NO: 3160 - DNA, 374 bp, Homo sapiens
  MAP TO AC007322.2; EXPRESSED IN BONE MARROW, SIGNAL = 8.7; EXPRESSED IN BRAIN, SIGNAL = 7.6; EXPRESSED IN PLACENTA, SIGNAL = 5.6; EXPRESSED IN HBL100, SIGNAL = 5.7; EXPRESSED IN HELA, SIGNAL =   4; EXPRESSED IN HEART, SIGNAL = 4.2; EXPRESSED IN FETAL LIVER, SIGNAL =   7; EXPRESSED IN BT474, SIGNAL = 6.5; EXPRESSED IN ADULT LIVER, SIGNAL = 8.7; EXPRESSED IN LUNG, SIGNAL = 7.6
tcataaggctgaggtggaggtggtcattctgcaccttcccctaaaggcacagtagggggaactgtttctttcatatgtttttggaagttagcatatattccttcccatttcgccccttttttttttaaactagacagtgatggttcactttgctgattatcagactcctgattattaaacttttctatgtcatcctgaaacttctccttcttctcctcagtgtggaagggctccagtgctgttttaattgctgaccacccagagcaagtggagaagggaatattgtggccctcttggtgtgctccttttaagtctggtccgatcttgtcccagtcttttacattcatggttccatattctgggaaccaaggaga

SEQ ID NO: 3161 - DNA, 358 bp, Homo sapiens
  MAP TO D87675.1; EXPRESSED IN HBL100, SIGNAL = 1.7; EXPRESSED IN HELA, SIGNAL = 1.6; EXPRESSED IN HEART, SIGNAL = 1.9; EXPRESSED IN BT474, SIGNAL = 1.5; EXPRESSED IN LUNG, SIGNAL = 4.1; EXPRESSED IN BRAIN, SIGNAL = 3.3; EXPRESSED IN PLACENTA, SIGNAL = 1.8
tttggattttggactttccggattccagatgctcaaccagtaagtatataatgcagatgttctaaaatcggaaaaagtcagagaccttgaaagcacttctggtcccaagcattttggataagggacactccacctgtaccttacagtggaggcttgttagatgcttgtaaatgccagcccctgcctcaagtaacaattgattctttttgtgtgctctcccaggtctaccctgaactgcagatcaccaatgtggtagaagccaaccaaccagtgaccatccagaactggtgcaagcggggccgcaagcagtgcaagacccatccccactttgtgattccctaccgctgcttaggtgagc

SEQ ID NO: 3162 - DNA, 462 bp, Homo sapiens
  MAP TO AP000169.1; EXPRESSED IN ADULT LIVER, SIGNAL = 1.2; EXPRESSED IN HELA, SIGNAL = 1.2; EXPRESSED IN HEART, SIGNAL = 1.2; EXPRESSED IN PLACENTA, SIGNAL = 1.2; EXPRESSED IN BT474, SIGNAL = 1.1; EXPRESSED IN BONE MARROW, SIGNAL = 1.1; EXPRESSED IN FETAL LIVER, SIGNAL = 0.91; EXPRESSED IN LUNG, SIGNAL = 1.2; EXPRESSED IN BRAIN, SIGNAL = 1.2; EXPRESSED IN HBL100, SIGNAL = 0.82
ttgagcccaggaagtcaaagtcaacaagtgagccgtgatggtgtcactgcaatctagcctgggcaacagagtgagaccttgtctgaaaaagaaaagaaaaagctaaggcttgtattccatgtctctttttgttccacttcattcttctagtaattcacttttatcatattatgtttatccgttggcaacaggttggaaatttaaacaaaaaccaggtttccctggtagatagtttgagaagtgctaactaaagacatcacattcctgctgggctttcagggcttggcagtgcacagagggcagcctgctccagctcacactctgtggcaatgtcacctatcctatcccgtgccctcaaatgggggctactgctccactgacacgctggttgggaaggtgagggcgctgcagctgaaacagctgtattacacaggagtacagccataactgaggaagatgctt

SEQ ID NO: 3163 - DNA, 484 bp, Homo sapiens
  MAP TO AC007271.2; EXPRESSED IN ADULT LIVER, SIGNAL =  11; EXPRESSED IN BONE MARROW, SIGNAL = 9.6; EXPRESSED IN PLACENTA, SIGNAL = 9.6; EXPRESSED IN BT474, SIGNAL = 8.2; EXPRESSED IN FETAL LIVER, SIGNAL =  11; EXPRESSED IN BRAIN, SIGNAL = 8.5; EXPRESSED IN LUNG, SIGNAL =  12; EXPRESSED IN HEART, SIGNAL = 7.7; EXPRESSED IN HELA, SIGNAL =  10; EXPRESSED IN HBL100, SIGNAL = 9.1
atccaagatcacgccactgcgctccagtgtgagcaacagaacaagagactgtctcttaaaattaattaattaaaaacatgggaaactcctttaattttaagtaagacaagaaaaaggcattaggagccatacggttgtgaaaagccttgtgtggctttggttcaggagagaatgatgataaatagaattttacttactatattgtgcttcctgtttttcagacattgttgaggtcattaatgaaaacgtaaagaaaagcagaagactgattatcattttagtcagagaaacatcaggcttcagctggctgggtggttcatctgaagagcaaatagccatgtataatgctcttgttcaggatggaattaaagttgtcctgcttgagctggagaaaatccaagactatgagaaaatgccagaatcgattaaattcattaagcagaaacatggggctatccgctggtcaggggactttacacaggga

SEQ ID NO: 3164 - DNA, 480 bp, Homo sapiens
  MAP TO AC010680.3; EXPRESSED IN HEART, SIGNAL = 3.3; EXPRESSED IN ADULT LIVER, SIGNAL = 1.2; EXPRESSED IN FETAL LIVER, SIGNAL = 0.92
tgcactcttgtgtcccactcactagcttatctaaaaatccgttaaaagctagaactatttgaaaaagttaatcgcctggccttaaaaataacagtaatttatctctgctattttacagtggctcctgatcttgacttaaagggtctacctgatttgtgctacttggctaaagaaaacagcaacttccggcttaagatccccataaaaggcaagccagctccatcagtctcctggaagaaaggggaagatcctctagcaactgacactagagtcagtgttgagtcatctgcggttaacacaactcttatagtgtacgattgccaaaaatctgatgctggaaaatacacaatcacacttaagaatgttgctggcaccaaggaaggaactatctccataaaggttgttggcaagcctggcatccccactggaccaatcaaatttgatgaagtcacagcagaagccatgaccttaaagtgggct

SEQ ID NO: 3165 - DNA, 365 bp, Homo sapiens
  MAP TO AL132641.1; EXPRESSED IN HBL100, SIGNAL = 3.9; EXPRESSED IN HELA, SIGNAL = 3.6; EXPRESSED IN FETAL LIVER, SIGNAL = 1.8; EXPRESSED IN BONE MARROW, SIGNAL = 3.8; EXPRESSED IN PLACENTA, SIGNAL = 5.7; EXPRESSED IN HEART, SIGNAL = 3.4; EXPRESSED IN BT474, SIGNAL = 3.9; EXPRESSED IN ADULT LIVER, SIGNAL = 4.7; EXPRESSED IN BRAIN, SIGNAL = 3.3; EXPRESSED IN LUNG, SIGNAL = 3.4
aaatcttgacacctcccagcctcaaatatgacaggttagcgtctctgtctttcaaaggctttcggaagtctcatagcgtctcgttggttctgacagccttgtctatccaccagtgaaggaggaatgtaagactcttattggccaaatctgagtcacctttcacccgtggaattggtgtggaaccgggggccactggtgtcacatgactggagaatgagcccaaaatataaatttgaaccaatattataagaaggtgaagcagatgcagtgaaagaagatgaagcagaaaccaactgttttgcaatagctcagcccatactccagaccaattatgccaaaattcttggggttggggttgcatacag

SEQ ID NO: 3166 - DNA, 400 bp, Homo sapiens
  MAP TO AL109942.4; EXPRESSED IN PLACENTA, SIGNAL = 1.6; EXPRESSED IN HBL100, SIGNAL = 1.7; EXPRESSED IN ADULT LIVER, SIGNAL = 1.6; EXPRESSED IN BT474, SIGNAL =  11; EXPRESSED IN BONE MARROW, SIGNAL = 1.4; EXPRESSED IN BRAIN, SIGNAL = 1.7; EXPRESSED IN HEART, SIGNAL = 1.3; EXPRESSED IN FETAL LIVER, SIGNAL = 1.3; EXPRESSED IN LUNG, SIGNAL = 1.4; EXPRESSED IN HELA, SIGNAL = 1.6
cttgacggattctggctttctgatttattttcccccaagatacttaatcaaggagtaagtcatttaccttctccaagtatccttctcttcttccctggagaatgttgtgaagtctttctcgtgtttccttccgcttctgaaccctttcaaggaccaaggtctgtgctgcaacgatccagaactttgcccgtagaagttgctttctcccctagctgggagggcagagccctgctctcagcagggctcccaggacaaggctgcatgtagtaaacatctgtctgttgtggtttgttccagagctggtgatgctgctggagtggtggtcgggcacggaatgcaccatcttcacggacccgcgcgcctacctcaagtatgggaaggaaaatgccatcgtggttct

SEQ ID NO: 3167 - DNA, 393 bp, Homo sapiens
  MAP TO AC008132.26; EXPRESSED IN HBL100, SIGNAL = 2.4; EXPRESSED IN HEART, SIGNAL = 2.5; EXPRESSED IN BT474, SIGNAL = 2.7; EXPRESSED IN BRAIN, SIGNAL =   2; EXPRESSED IN BONE MARROW, SIGNAL = 1.7; EXPRESSED IN PLACENTA, SIGNAL =   3; EXPRESSED IN HELA, SIGNAL = 2.9; EXPRESSED IN ADULT LIVER, SIGNAL = 3.3; EXPRESSED IN FETAL LIVER, SIGNAL = 2.9; EXPRESSED IN LUNG, SIGNAL = 3.1
ctcctagtgtcccttgccactcaggacacgtggccagccacagtggccactgggaccccacgctcagaatgtgtccccacacgtggtgggaagggtctgtatctcctcatcccattatcagcacagggtcctgaaggcagagggccgctccactgctgctacggcctgcaaggtccttgggctgtgcctgccctgcctgtgtcagggggccgcacccacagacataccacaagacaggctgctgctcgatgacggtccgcttgttttccaggactgccgccaagcccttgcccacggggaagccctggcgggccagctggatgctgggctggaagaggcgagcccagggcagccgcccatgccgctggtgtgccagctcatagcctcggatct

SEQ ID NO: 3168 - DNA, 399 bp, Homo sapiens
  MAP TO AC007423.4; EXPRESSED IN BONE MARROW, SIGNAL =   1; EXPRESSED IN LUNG, SIGNAL = 1.8; EXPRESSED IN HBL100, SIGNAL = 1.4; EXPRESSED IN HEART, SIGNAL = 1.2; EXPRESSED IN ADULT LIVER, SIGNAL = 2.6; EXPRESSED IN BT474, SIGNAL = 1.5; EXPRESSED IN BRAIN, SIGNAL =   1; EXPRESSED IN PLACENTA, SIGNAL = 1.8; EXPRESSED IN HELA, SIGNAL = 1.9; EXPRESSED IN FETAL LIVER, SIGNAL = 1.5
ttgaacccatacacatctcctgagatcatatataatcttcaaatgaagaaaagaatgaggtcataattatgcctaacataatacaactatccttactacatcaggaaaggcaccgatccccaacccaaatattattacataaagttaacaatacttaaatgctgatgtgaagtcaataaattttatgtcatatgataaaggagaaaggaaataaaatgaaggtactttcttatgcggaaatatgtttaccaaaagaaggaggaaatactcatgacaattacagtcctcatttctgcagctggtcatgtggtcataactggtattgatgactaccttcttctaccacccattctgtattccttttgcctccagcaagcaactcagcaggtcgtggatttt

SEQ ID NO: 3169 - DNA, 457 bp, Homo sapiens
  MAP TO AP000264.1; EXPRESSED IN HBL100, SIGNAL = 0.83; EXPRESSED IN HELA, SIGNAL = 1.3; EXPRESSED IN ADULT LIVER, SIGNAL = 0.98; EXPRESSED IN BRAIN, SIGNAL = 1.1; EXPRESSED IN HEART, SIGNAL = 0.97; EXPRESSED IN PLACENTA, SIGNAL = 1.3; EXPRESSED IN FETAL LIVER, SIGNAL = 0.93; EXPRESSED IN LUNG, SIGNAL = 1.1; EXPRESSED IN BONE MARROW, SIGNAL = 1.1; EXPRESSED IN BT474, SIGNAL =   1
tgagaagataaaagaggaggcgacaaatagcatgtccaaatgccaccttctgaatcacttataattctgccaccaaactgaatagaaaatgccagacccaggttacatgggctcctcctttaggaaataggccatttgaaattttttcacaatctctgttcttacatgggctgtggaaaggtcatctgagacatcccaattatcacccttaatggtttccagtctgcactcatctgacctgatatccgtgatatgtgacacctccccacctccttcggcttcctgcatcccttttcagttgcacaaccccctcctgtgtcccagtctcatacgaccaacagatgtcccacttgcacttcatgctggagatgcacaaatgcgcgctcatccccgcccactacaggttgggctccctccgctgacaccttagttgctgtccctgtagcatcatgcactg

SEQ ID NO: 3170 - DNA, 410 bp, Homo sapiens
  MAP TO AC009290.1; EXPRESSED IN BT474, SIGNAL = 0.76; EXPRESSED IN FETAL LIVER, SIGNAL = 0.81; EXPRESSED IN LUNG, SIGNAL = 0.63; EXPRESSED IN ADULT LIVER, SIGNAL = 1.1; EXPRESSED IN HEART, SIGNAL = 0.89; EXPRESSED IN PLACENTA, SIGNAL = 0.8; EXPRESSED IN HELA, SIGNAL = 0.6
  unsure 65
  unsure 119
  unsure 281
ttcctcccacagagttgagcccttaattcacctgactctgaaaacagaaaatgattcagcgtttngtgtctccctaggctacagaacaaagaggtgattttaaatggatgcacgtgtancttccagggggatctattcacactcctcctccaacaatcagtgcagagaataggctgaagtgtccagttcccagtttctccttggaaatctgcacactttttctattaggcttttaaatagcctaatagaaaaaggcagataaacaatcgacctacaggagncctgaattggagtgagagtacttcccacacctctcctccagcttgctccagtggtaaatccaggtctgcaaaatctccctggaaacacttgtgcatgcatcaagcaccacaactttcatgctcccacct

SEQ ID NO: 3171 - DNA, 367 bp, Homo sapiens
  MAP TO AC007993.8; EXPRESSED IN HBL100, SIGNAL = 6.2; EXPRESSED IN HELA, SIGNAL =   7; EXPRESSED IN PLACENTA, SIGNAL = 5.6; EXPRESSED IN HEART, SIGNAL =   6; EXPRESSED IN BT474, SIGNAL = 5.7; EXPRESSED IN FETAL LIVER, SIGNAL = 6.8; EXPRESSED IN ADULT LIVER, SIGNAL = 6.9; EXPRESSED IN LUNG, SIGNAL = 7.3; EXPRESSED IN BONE MARROW, SIGNAL = 8.2; EXPRESSED IN BRAIN, SIGNAL = 7.9
aactgcccctcattaatcccgggactcttctcatatggaaccgtgctagggtagcaagggcagtgtgttctgggcacagggtccaggggagaggaaaaggcagcctctcccagcctcctcctcctcccagaagccttcttcccccgcgcccccagccctcctcctcccatagccctcctccccacctcacttgagcaggcccctcctaccctccaagctgtagttccagcgctcatgccggaactggaactggcactccaggccgaggtgcatggcgtcccacagggtctcagccaggctgggctccctcccgcagagctgcttctgctgccgggacaacttcagcaggtcacactgcttcaggtgg

SEQ ID NO: 3172 - DNA, 436 bp, Homo sapiens
  MAP TO AC007274.1; EXPRESSED IN PLACENTA, SIGNAL = 1.8; EXPRESSED IN HBL100, SIGNAL =   2; EXPRESSED IN HELA, SIGNAL = 2.5; EXPRESSED IN HEART, SIGNAL = 2.1; EXPRESSED IN BT474, SIGNAL = 1.8; EXPRESSED IN FETAL LIVER, SIGNAL = 2.3; EXPRESSED IN ADULT LIVER, SIGNAL = 1.7; EXPRESSED IN BONE MARROW, SIGNAL = 1.9; EXPRESSED IN BRAIN, SIGNAL = 2.1; EXPRESSED IN LUNG, SIGNAL = 2.5
ccatgtgtaggtggcttgtgttagctcaattaggtaggctgccttactgaaaagacagagggctttctggatcccggggcttcctgctttggtgtacctgaaggattgtctcacacgtgggcttggagaatgagtgcaaggtttaattgagtggtagttctcagcagatggatggagagccagaagggagatgaagtgagaaggtggttttcccttggaatgtggcaggtcagcactctcctcccacagccccaaggaactctgtgttcttctgcgatggatgttgtgccgcctcagtccttgtgctcttcattctctggtatcttctcaaggtccagttgctgtgacttcttctgctgatggttccactcgatgtccagctgctgttgactctccctgctagagtctcagagtttcttatagcacaggatggggg

SEQ ID NO: 3173 - DNA, 383 bp, Homo sapiens
  MAP TO AL121590.7; EXPRESSED IN LUNG, SIGNAL = 2.4; EXPRESSED IN HELA, SIGNAL =   2; EXPRESSED IN PLACENTA, SIGNAL = 2.9; EXPRESSED IN ADULT LIVER, SIGNAL = 2.7; EXPRESSED IN BT474, SIGNAL = 2.4; EXPRESSED IN BONE MARROW, SIGNAL = 1.5; EXPRESSED IN HBL100, SIGNAL = 2.1; EXPRESSED IN HEART, SIGNAL =   2; EXPRESSED IN FETAL LIVER, SIGNAL = 2.2; EXPRESSED IN BRAIN, SIGNAL = 1.8
aggctttgactcagcagcagcctcccgttcgtgggaaaccggttgaaggctaggaggaccgggcagcaggcctggctgcctttcctccgccccacccggagtggtgaacattccagtccctgccgcctcctggtggagtgtcaggccacctacaaattttgtgggacccctggccgtgtcttcagatacaaattgggtggttggccacacgtgtgcccagggcagattcggaggcaccttttaatccgtcctctctctcctgcaggggccctggctgggagcgaaggcaccgcttactctcccaagatggaagactgggccggcgtgaaccgcacggccttccccgccacccccgcagtgaatgggctagagaaacctgcctt

SEQ ID NO: 3174 - DNA, 466 bp, Homo sapiens
  MAP TO AC009313.1; EXPRESSED IN HBL100, SIGNAL = 0.69; EXPRESSED IN FETAL LIVER, SIGNAL = 0.72; EXPRESSED IN BRAIN, SIGNAL = 0.94; EXPRESSED IN PLACENTA, SIGNAL = 0.94; EXPRESSED IN BT474, SIGNAL = 0.86; EXPRESSED IN HEART, SIGNAL = 0.89; EXPRESSED IN ADULT LIVER, SIGNAL = 1.2; EXPRESSED IN HELA, SIGNAL = 0.78; EXPRESSED IN LUNG, SIGNAL = 0.63; EXPRESSED IN BONE MARROW, SIGNAL = 1.1
tgggtcctaatcacacttttattctccaatgactttggggaaagtatgacaaatttacatatattttattctgataaggtggaaatactgtggttttttttttgtaagtgctgaacatgagtttaagcccttagttttgtcaaactataaagctgactaaatatgtttaaacactatttttattgaaactgctgtttagatttcttaagaaatcaaataggtttgctgtctctttatcacatcactttgtagctggagaacagtacggatctatgattcgtgagtcctcacatcttctccagacctctcatcatctcaaacatgcagctggcaagtcttctaccctttctgtcttccacctcaggggtaggagctctcttcttcgttctcctggccttaacttcctctttgctgcctggtgagtttttacataaagtcaaactagactttctgcttgtaggcacaa

SEQ ID NO: 3175 - DNA, 420 bp, Homo sapiens
  MAP TO AC010937.2; EXPRESSED IN PLACENTA, SIGNAL = 1.3; EXPRESSED IN HBL100, SIGNAL = 4.1; EXPRESSED IN LUNG, SIGNAL = 1.4; EXPRESSED IN BRAIN, SIGNAL = 1.2; EXPRESSED IN HEART, SIGNAL = 0.98; EXPRESSED IN BT474, SIGNAL = 1.3; EXPRESSED IN ADULT LIVER, SIGNAL = 1.6; EXPRESSED IN FETAL LIVER, SIGNAL = 1.4; EXPRESSED IN BONE MARROW, SIGNAL = 1.3; EXPRESSED IN HELA, SIGNAL = 1.3
gtaagagcgcattcagcaggaaatgaaaaatacctacagaaaaacctgataaggttcaaagtcttagtcccggggtgtttccaaaactggcctacactggataactcttaccttgggtatgcttcagatacccttacagtaaacatcctctttttatttttgctcaagagcatttatactacttgcaacgcagagcccaacataaagactattcctctctaaccaaaacaatccagagacaaggaaaaaataaaagatgacgccacacaaaaggaagagcaaaatagcccagggtggtctttccaatgatgaggaatccaccatgcaggcccaggaccagagactgggagctcagagaaagtgtatggatgacatttctgttcatcctcggtggaagggtgagagtcacgtggtgacgaa

SEQ ID NO: 3176 - DNA, 414 bp, Homo sapiens
  MAP TO AL109798.13; EXPRESSED IN BRAIN, SIGNAL =   2; EXPRESSED IN LUNG, SIGNAL = 1.6; EXPRESSED IN HELA, SIGNAL = 1.8; EXPRESSED IN PLACENTA, SIGNAL = 1.8; EXPRESSED IN HEART, SIGNAL = 1.9; EXPRESSED IN FETAL LIVER, SIGNAL = 1.9; EXPRESSED IN ADULT LIVER, SIGNAL = 2.1; EXPRESSED IN BT474, SIGNAL = 2.4; EXPRESSED IN BONE MARROW, SIGNAL =   2; EXPRESSED IN HBL100, SIGNAL = 2.2
aagcaaaatccacatgagccacaggccttgacctcccctcctgatatcatctcctactagactctcccttgactagcttcactccagctacactgacctcctttcgctatacttagcttagaaaactttagttcactggaatcaaaaattttttaaggattattctgatatttagagaaaaagatgtcacaatttgagatgaaatatttattaattcattaagcaaataattactgactgcctcccatgttttcaggataagacacacaacatagtggtaaacaagacaggcaaggtccttaccctcatggaactttacattttgctggtggagaaaaaatacgagactattatcttgtattttgttatgaaagagggaaaaagaatgatagacagggagggcttctctaaaaa

SEQ ID NO: 3177 - DNA, 364 bp, Homo sapiens
  MAP TO AC008018.18; EXPRESSED IN LUNG, SIGNAL = 2.1; EXPRESSED IN BONE MARROW, SIGNAL = 2.3; EXPRESSED IN BRAIN, SIGNAL = 2.2; EXPRESSED IN PLACENTA, SIGNAL = 2.4; EXPRESSED IN HBL100, SIGNAL = 1.9; EXPRESSED IN HELA, SIGNAL =   2; EXPRESSED IN HEART, SIGNAL =   2; EXPRESSED IN FETAL LIVER, SIGNAL = 1.9; EXPRESSED IN BT474, SIGNAL =   2; EXPRESSED IN ADULT LIVER, SIGNAL = 2.2
cgaagagggggtatctgtaggagtaagatgatgaatagcagtggtaaggggagagcgaggagaagggagggggctctgaggaggctaaagggcaaacttttattcttgaaaatacacaaatatcccaagtcctgggtgtgtggaacgtccttattactgctggggatgttgcttgtctgtgggaattgggaatttcacacctagctctgaatttctaggaagcccgaacaaaagagaaatagaaatagagaaatcacatacttcccaccagagaggagacaccatccataccagaggagactcgtatggggggtggtgaggataaggccgatccatcttccccacctcatactctgcctcctgc

SEQ ID NO: 3178 - DNA, 472 bp, Homo sapiens
  MAP TO AC010149.1; EXPRESSED IN BT474, SIGNAL = 0.95; EXPRESSED IN HBL100, SIGNAL = 1.3; EXPRESSED IN HEART, SIGNAL = 0.91
aacacctgtttccgttccagtttctccagtaccattcactccaactccagaggacaccatggaacaccatttcctcggctggaagtgggaccatctccggcgacctctgcttctcctctccttttctactgtacaggagcacttacagaaacacttgaaaaagttccccactcataggagacctgtcagttagcaaattgtaccctgaagttttggtctaggatatcaaagcataacttattttggggctgctttaccagattgtgacataataaactttacttacttcaaacattttatttgtgatgagatcacgatcacggaggccctcgaggaatggaaatgtcttttttattgcatttgaaatctccaccttatttcttttgaagtgcttgaatacaatgtcatagagcagcctgtcatctacaccctggtcttccgtgaacatcctagggaaaaaggacaccatgtg

SEQ ID NO: 3179 - DNA, 401 bp, Homo sapiens
  MAP TO AC008854.2; EXPRESSED IN BT474, SIGNAL = 4.2; EXPRESSED IN ADULT LIVER, SIGNAL =   4; EXPRESSED IN PLACENTA, SIGNAL = 3.3; EXPRESSED IN HELA, SIGNAL =   4; EXPRESSED IN BRAIN, SIGNAL = 3.9; EXPRESSED IN LUNG, SIGNAL = 4.1; EXPRESSED IN BONE MARROW, SIGNAL = 3.4; EXPRESSED IN HEART, SIGNAL = 3.6; EXPRESSED IN HBL100, SIGNAL = 3.8; EXPRESSED IN FETAL LIVER, SIGNAL = 3.8
cactgaacatggggtagcatctatgaaaagtgaatggctataaacttttaaagtcattgtacaagttcactcaaactactttcaaatgtgaaaagtaaatgtagctttcttatttttctaatcttcacccaccctgacatatcttaatctcttcagtttcaaccatttcttttcagtacaaatggccctttcagcgacatgctgcccctcagatgttcctccccagcctcctcacaaagatggcatccccacataaatcctgtgaggagatgggtgtcagacgtgacatggcctgtggctctcttaccaacgcgttccttgcctcatgtcacactgccacatcagcaactggagtcaatggctgatgattttttgcggcttcctcgtgttcctctctcctg

SEQ ID NO: 3180 - DNA, 429 bp, Homo sapiens
  MAP TO AC007349.1; EXPRESSED IN BT474, SIGNAL = 6.3; EXPRESSED IN FETAL LIVER, SIGNAL = 2.9; EXPRESSED IN ADULT LIVER, SIGNAL = 1.2; EXPRESSED IN LUNG, SIGNAL = 3.1; EXPRESSED IN BONE MARROW, SIGNAL = 3.9; EXPRESSED IN BRAIN, SIGNAL = 3.2; EXPRESSED IN HELA, SIGNAL =  11; EXPRESSED IN PLACENTA, SIGNAL = 4.5; EXPRESSED IN HBL100, SIGNAL =  13; EXPRESSED IN HEART, SIGNAL = 2.4
cttgagccctggtgtgattccgtcctgcatggctgttctcttgagcagtagttgtttatctccgtctgccttctctcccacctgagtgcgttccactactcaatggaagactcaatggacatggacatgagtcccctgagaccccagaacaatcttttccgttgtgaactaaaggctgacaatcactttcaagtggataatgatgaaaatgagcatcagttatcttcaagaacggtcagctcaggggctggtgcaaaggatgaattgcacattgttgaagcagaggcaatgaattacgaaggcagtccaattaaagtcacactggcaactttgaaaatgtctgtacagccaacggtttcccttgggggctttgaaataacaccaccagtagtcttacggttgaagtgtggttcagggccagtgcatatt

SEQ ID NO: 3181 - DNA, 429 bp, Homo sapiens
  MAP TO AC010951.3; EXPRESSED IN BRAIN, SIGNAL = 2.1; EXPRESSED IN HELA, SIGNAL = 2.1; EXPRESSED IN PLACENTA, SIGNAL = 2.2; EXPRESSED IN ADULT LIVER, SIGNAL = 2.7; EXPRESSED IN LUNG, SIGNAL =   2; EXPRESSED IN BONE MARROW, SIGNAL = 1.9; EXPRESSED IN HEART, SIGNAL = 1.7; EXPRESSED IN HBL100, SIGNAL = 1.8; EXPRESSED IN FETAL LIVER, SIGNAL = 2.5; EXPRESSED IN BT474, SIGNAL =   2
gcctgattctccatggctcctttaaactaccgtatgtacacttgaagcttactgcacaaagaggaatttccttcctctcctctttatgcagtgagcttcaaggtgagaacttccagctgcttagttctggactgctcttacattgtaaatctgataatgtcgcacgtttatttaagtgacctcaatagatttccattgaatttatgataaaaacaaaaattaagaaggttacctacaaggctctgaactatctagccctgttctatctccccaactttatcactccccatctctatcacctgtttctccttcattttctgtgcttttgcctcgctgggttcattgtcttcaatagctacttcgatgactttgtacatgttcttctcttcattttagcttatctcatgtctccttcagatctctgctcaa

SEQ ID NO: 3182 - DNA, 455 bp, Homo sapiens
  MAP TO AC008082.12; EXPRESSED IN PLACENTA, SIGNAL = 1.7; EXPRESSED IN HBL100, SIGNAL = 1.6; EXPRESSED IN HEART, SIGNAL = 1.6; EXPRESSED IN LUNG, SIGNAL = 1.7; EXPRESSED IN BRAIN, SIGNAL =   2; EXPRESSED IN HELA, SIGNAL = 1.7; EXPRESSED IN BT474, SIGNAL = 1.4; EXPRESSED IN ADULT LIVER, SIGNAL = 1.9; EXPRESSED IN FETAL LIVER, SIGNAL = 1.7; EXPRESSED IN BONE MARROW, SIGNAL = 1.8
ctatattatgggaacaaagtgctgtaaataaaaaataatcagagcataagctagagtatcacaaatacccaaagataaacaaaaatttctgcatctttggtaaagatgggttacattcagccaacagtccatggtgggttcaattaagtaaaaaaattaaaaattacacctacaagacaaagagacaagattaaagaagggaggaggagtaaagtatttttgaatgtcagaaaaagcttggacaaaggcttagacataggaaagtttgggattttcagaaaacagctagtaactatgttggtcacatagagtatgtgtaacgcagtagctattgatattttcgaaaaagttaagttgagactcaataattctagagtaagaaaagttatacttaatatgttggatgatgaaaaggtattcaagatttttgagccagtaagtggcatgatcagggc

SEQ ID NO: 3183 - DNA, 388 bp, Homo sapiens
  MAP TO L78810.1; EXPRESSED IN LUNG, SIGNAL = 3.2; EXPRESSED IN HBL100, SIGNAL =  10; EXPRESSED IN FETAL LIVER, SIGNAL = 2.3; EXPRESSED IN BONE MARROW, SIGNAL = 1.5; EXPRESSED IN PLACENTA, SIGNAL = 1.9; EXPRESSED IN HEART, SIGNAL = 2.2; EXPRESSED IN HELA, SIGNAL = 7.3; EXPRESSED IN BT474, SIGNAL = 2.7; EXPRESSED IN ADULT LIVER, SIGNAL = 1.1; EXPRESSED IN BRAIN, SIGNAL =   2
cgcttggactgttaggttggtacaatgctcttttaaactgtctcctaagaacacaacgttaaacccacagcaaacttaccctttgcagtgtcatagataccgaagtaggcggctcggtagatgataataccctgcacagacacgttaaagccttggtacaggcccttaatcccatcagatttgtagatcttaaccaggcagtcaccgaggcctcggaattccctttcagctccagctttacccacatcagctgctagacgggtacgggcaaaatcaagagggtacacaaaacacagggatgtggcccctgcggcaccacccgatgccagattccctgcaaagtagcgccaaaactgggttctcttgtccacaccacccaggaagatct

SEQ ID NO: 3184 - DNA, 400 bp, Homo sapiens
  MAP TO AC008929.2; EXPRESSED IN HBL100, SIGNAL =   2; EXPRESSED IN HEART, SIGNAL = 2.5; EXPRESSED IN FETAL LIVER, SIGNAL = 2.6; EXPRESSED IN BONE MARROW, SIGNAL =   2; EXPRESSED IN PLACENTA, SIGNAL = 2.3; EXPRESSED IN HELA, SIGNAL = 2.9; EXPRESSED IN BT474, SIGNAL = 2.9; EXPRESSED IN ADULT LIVER, SIGNAL =   2; EXPRESSED IN BRAIN, SIGNAL = 1.9; EXPRESSED IN LUNG, SIGNAL = 2.3
cagcctgcagaactgtgaaccaactaaacctcttttctttataaattacctagcctcaaacatttctttatagcaatgcaagaatggtctaatataaaaaaattggtaccaaggagtggggcactgctgtaatgatacctgaaaatgtagaggtagctttggaaagaggtaatgaaaagaggttggaagagtttggagggctcagaagaagacaggaagatgagggaaagtttggaatttctcaaagactagttaatgattgtgaacaaaatgctgatggtgataggggcagtgaaggccagattgatgaggtctcagatggaaatgaggaacttcttggaaactggagcaaaggccacccttgttatgctctagcaaaacacttggctgcattctgttc

SEQ ID NO: 3185 - DNA, 415 bp, Homo sapiens
  MAP TO AL118501.4; EXPRESSED IN HELA, SIGNAL = 1.3; EXPRESSED IN PLACENTA, SIGNAL = 1.2; EXPRESSED IN HBL100, SIGNAL = 1.4; EXPRESSED IN ADULT LIVER, SIGNAL = 1.4; EXPRESSED IN HEART, SIGNAL = 1.4; EXPRESSED IN BT474, SIGNAL = 1.7; EXPRESSED IN FETAL LIVER, SIGNAL = 1.3; EXPRESSED IN BONE MARROW, SIGNAL = 1.5; EXPRESSED IN BRAIN, SIGNAL = 1.6; EXPRESSED IN LUNG, SIGNAL = 1.5
gcacaggttagcctggagtcccttggtcccctgcccttgttaataacaattaattgaacactttgaacattccgattctagttaactttgtttaacaaatgtgaacaagaataaaaaataataaatgggcgcagcctaatggagtatgccaggatcttggtgcattgaacttctaggcgctggattttcagaagctgttttgtttttgttttcacaggatgtgtgagactggtgaagggctgtttatctttcagacccgagacggggaggccatctatcagaaagtccactctgctgccttggccatagccgagcagcacgagcgcttgctacagagtgtgaaaaactcgatggtacgtttggaatttcttcctcgtgtcccagtgcctatcactgcagaaagcaattgggtcat

SEQ ID NO: 3186 - DNA, 344 bp, Homo sapiens
  MAP TO AC011112.2; EXPRESSED IN BONE MARROW, SIGNAL = 1.4; EXPRESSED IN HEART, SIGNAL = 1.5; EXPRESSED IN BT474, SIGNAL = 1.9; EXPRESSED IN LUNG, SIGNAL = 1.5; EXPRESSED IN BRAIN, SIGNAL = 1.6; EXPRESSED IN PLACENTA, SIGNAL = 1.5; EXPRESSED IN HELA, SIGNAL = 1.5; EXPRESSED IN HBL100, SIGNAL = 1.4; EXPRESSED IN ADULT LIVER, SIGNAL = 1.7; EXPRESSED IN FETAL LIVER, SIGNAL = 1.6
tgaagtctgcaaagaaaacccataaaaaataaagtgtgagcccaaccacatggggctggcccagtaggacaattcttattgagagcatcctagacaacctgctgagaaaggcagacaggcagtgaccgttactgaatggaccaattaacaagggtccctaaggaggggctttggaatgaacagtattgcagtgcactcacgtttctcaggtttgttgacagtcatgattgtggcagatcctgtctgattataagcgagtacacatggagcagaagacagagctctagatgaatcaagaacagaggcagtagtggcagtaggacactcagtccatgcatcaatgg

SEQ ID NO: 3187 - DNA, 469 bp, Homo sapiens
  MAP TO AC010099.3; EXPRESSED IN BT474, SIGNAL = 2.2; EXPRESSED IN BRAIN, SIGNAL =   2; EXPRESSED IN HELA, SIGNAL = 1.4; EXPRESSED IN HEART, SIGNAL = 1.4; EXPRESSED IN PLACENTA, SIGNAL = 1.4; EXPRESSED IN ADULT LIVER, SIGNAL = 1.3; EXPRESSED IN FETAL LIVER, SIGNAL = 1.7; EXPRESSED IN LUNG, SIGNAL = 1.2; EXPRESSED IN BONE MARROW, SIGNAL = 1.6; EXPRESSED IN HBL100, SIGNAL =   2
gcagaggtttcatttatttcacactagacacatatattttatataatatttacatactcttctacctgaacacttgagtgtttttagttaaaaggccaaagaactacagttattatttagtcttctctttctttaactcatatatccaactcactttcaagtctcatagatccagcaaaatgcatatcaaatctttaaattttgttcttctctactgttacttttttttcttttctaccatgaaaaaatgtggaaaaatgctttgataactttaaggccatacataacacactaattattaccaccactgcttctacctctagcactgccattgccacaaacaccatcagtatcaccatcacaaccattactaccaccgtcaccataaccaccaccaccatcagcacctgtaccataactaccatctccaccatcatcagcaccattatcatcagtatgccaccaccac

SEQ ID NO: 3188 - DNA, 479 bp, Homo sapiens
  MAP TO AC006111.2; EXPRESSED IN BONE MARROW, SIGNAL = 0.98; EXPRESSED IN BRAIN, SIGNAL = 0.85; EXPRESSED IN PLACENTA, SIGNAL = 0.76; EXPRESSED IN BT474, SIGNAL = 0.79; EXPRESSED IN LUNG, SIGNAL = 0.8; EXPRESSED IN HELA, SIGNAL = 0.97; EXPRESSED IN ADULT LIVER, SIGNAL = 1.1; EXPRESSED IN HEART, SIGNAL = 0.82; EXPRESSED IN HBL100, SIGNAL = 0.8; EXPRESSED IN FETAL LIVER, SIGNAL = 0.96
agctgcctccgtaacatttctcggtactgtggattcatactcgccatgttggggttgtgtcctgggttcatgatgttcaaggcctggccctgggggttcaggcctcccatcgcctgctgctgtggaggcacaccgggccgcggcacgccagcctgcatggcattcaggttctgcaggctgggctgctggtgcatgccaggctggggttgcatgccgggctgggactggaggccaggctggggctgcatgccgggctgattggccacgtacttggctgtgcgctgtttgatgaaagctgccattagctgcgggtttgatttgagaatgttcagcacctgctgttgctgctgaggggagctgggcgacttcagggtccgcagcaggtcttgcagagcgctgggtgagatgctcctgggtggctgcacgctgggcatccggggcccagccacggccgcctgggcctgcatggatatcacagg

SEQ ID NO: 3189 - DNA, 397 bp, Homo sapiens
  MAP TO AC008249.14; EXPRESSED IN BONE MARROW, SIGNAL = 1.8; EXPRESSED IN BRAIN, SIGNAL = 2.3; EXPRESSED IN PLACENTA, SIGNAL =   2; EXPRESSED IN FETAL LIVER, SIGNAL = 1.6; EXPRESSED IN LUNG, SIGNAL = 1.7; EXPRESSED IN HEART, SIGNAL = 3.3; EXPRESSED IN HELA, SIGNAL = 1.7; EXPRESSED IN HBL100, SIGNAL = 1.5; EXPRESSED IN ADULT LIVER, SIGNAL = 1.5; EXPRESSED IN BT474, SIGNAL = 1.3
ctgccccatctcttcttctgtctttggagcccatctggcttttgttttaatctctaacacagcagatgacattctctgccagcaagtcctattttcagctctcttgggcaggctacagaagctgagctctgcttccaaatttactgccggttttaaaacaataaaaatctagtagttattatttcccactgacccaggcagggtctgaaacgatgaacttcaaattttctgcaaagatttgagagcccgattggaaagtataggtctatgaaattattacttcagaatggttctgcatggcttgtggatctctgaggagttctggcttgctgaattgggagtcttcttcatcaccaccatcatcaaacagtgcctggggaggtaggtcaagctgtgc

SEQ ID NO: 3190 - DNA, 1968 bp, Homo sapiens
  MAP TO AC004230.1; EXPRESSED IN BT474, SIGNAL =  35; EXPRESSED IN FETAL LIVER, SIGNAL = 4.6; EXPRESSED IN ADULT LIVER, SIGNAL = 6.9; EXPRESSED IN BRAIN, SIGNAL = 3.1; EXPRESSED IN BONE MARROW, SIGNAL = 3.3; EXPRESSED IN LUNG, SIGNAL =  93; EXPRESSED IN PLACENTA, SIGNAL =  29; EXPRESSED IN HELA, SIGNAL = 7.4; EXPRESSED IN HEART, SIGNAL =  26; EXPRESSED IN HBL100, SIGNAL = 2.9
ggggctttgatgttcatctctggcatcttgaatttagggcccttcagtttcgcatctggaccttcaatattcacatctggaacatcaacgtccaccttgggtcctgagacgtcaaggtcagccttgggcaggttcacatccacttctggaccttctcctttgaagccaggcatgctgatcttgggcatttttatcttaggcatcttcaggtgccagtctgggcctcgaacatccacatctggggcattaatatccactttggggcctttaatatccaagtcaggaactttcatgtcaccttccacttttggcagagacacatccatatcacccttcactttgggtcctttcaggttaagatcaatgtcaggcatggagatcttgggggctttgatgttcatctcaggcatcttgaatttgggacctttcaactttccctctgggccttcgatattcacatctggaacatcaatgtccaccttgggtcctgagacatcaaggtcagccttgggcaggttcacatccacatctgggccctctcctttgaagccaggcatgctgaacttgggcattttcaccttgggcatcttcaggtgccagtctgggccttgaacatcaacatctggagcattaatgtccactttggggcccttgatgtcaacttcaggacccttgaggtcaccttccattttgggcagagaaacatccacatcgcccttgactttggggcccttcaggtttaaatcaatgtcaggcatcgatattttgggagccttcaggtgcatctctggtatcttaaatttgggtcccttgaatttaccctctgagccttcgatgttaatgtcaggagtgtcaatgtccactttggggcccttgatgtccacctcagggccttttagatcaccttccactttgggcaaagacacaaccacatcacccttcattttgggtcccttcaagttcaggtcaaagtcaggcatggagatcttgggggctttgatgttcatctcaggcatcttgaacttggggcccttcagctttgcatctggaccttcaatattcacgtctggaacatcaacgtctacattgggaccagaaatgtcaatgtcagctttagggagggtaacatcgacttcagggccttctcctttgaagccaggcatgctgaacttgggcattttcactttgggcatcttcagatgccagtctggaccatgaacatccacatctggggcattgatgtccactttagggcctttgatatcaacctctggccctttcagatccccttcaagtttgggaagagaaatatccacatcacctttcaccttggggcctttcaagtttaagtcaatgtcaggcatggagatcttgggagctttgatattcatgtcaggcatcttgaatttgggacctttcaagcctccctccggaccttccacattgagatctgggccctcaatgttcatacttgggccctctatgttgatgtctccttttggtagatccacagctacatctggcccttctgcttttaagccagacacactgaatttgggcattttcatcttgggcattttcagattccagtctggaccatgaacatccacatcaggtgcattaagattgacttctggtgccttaatatccactttggggcctttaaagtcaccttctaaattgggacctgcaatatctaagtctcctttgactttgggacttttcaaatttagctccacgtcaggcatagaaactttgggagatgaaatactcaggaaaggcattttaaacttggatcctttcacttttccttggacctcgacatcaggagcattaatatcaacttttggacctgttatgtcaatatctggctttttacctttgacatccacttcaggtgtctgaactttagagcccgaaaaattaaatttgggaagcttaaaacgagatttctttgacttgccttcg

SEQ ID NO: 3191 - DNA, 373 bp, Homo sapiens
  MAP TO AC010130.3; EXPRESSED IN HELA, SIGNAL = 1.5; EXPRESSED IN PLACENTA, SIGNAL = 2.1; EXPRESSED IN HBL100, SIGNAL = 1.6; EXPRESSED IN LUNG, SIGNAL = 1.8; EXPRESSED IN BRAIN, SIGNAL = 1.5; EXPRESSED IN HEART, SIGNAL = 1.2; EXPRESSED IN BT474, SIGNAL =   2; EXPRESSED IN ADULT LIVER, SIGNAL = 1.1; EXPRESSED IN FETAL LIVER, SIGNAL = 1.2; EXPRESSED IN BONE MARROW, SIGNAL = 1.5
tgttcccttctgtaccctgctgcttcctctatttaaacacaaaatgacacctttctctcaataatatgtatattagtgagtgatactatatgagaagcactttgcatgtcctggggatacagcggtgaatagacaatatcctcaccttcagggatgtacattctagtggggaaagtagaaaacagaaccattttatggatcacttcagatagtgctgttttgttgcaggtaaaagaaggtgatgtgattgtaaatgagatggaagtagcggacagtcagctgggggtgggtgcagatccacaaaagcccttgagggcagtggtgattgacttgagcctgaaggttgtaaagaggtcagccatgggaagattgt

SEQ ID NO: 3192 - DNA, 462 bp, Homo sapiens
  MAP TO AC011899.2; EXPRESSED IN PLACENTA, SIGNAL = 2.5; EXPRESSED IN ADULT LIVER, SIGNAL =   3; EXPRESSED IN BT474, SIGNAL = 1.8; EXPRESSED IN FETAL LIVER, SIGNAL = 2.1; EXPRESSED IN BRAIN, SIGNAL = 1.6; EXPRESSED IN HBL100, SIGNAL = 1.6; EXPRESSED IN HELA, SIGNAL = 2.2; EXPRESSED IN HEART, SIGNAL =   2; EXPRESSED IN LUNG, SIGNAL = 2.3; EXPRESSED IN BONE MARROW, SIGNAL = 1.3
ctcagagaaccccaagcaagttaagtgcaaagaaaattaacataagcacatttgtagtcaaattgctaaaataccaaagatagaaaatcttaacagctgggaggagagacgttacattcccaggagcaatgatatgcatgaggactgacttcattcttcactagaaacagcagaaaccaggagacaatttgacaactctttaaggttctgcaagggagaaaacaaaagcccagagttctatctccagcaaaaacatgtttcagcataagggtgaaagaaacctgctttcgtgccagcccatcccgagagaatctgccatgttagacctgcactgtacaaaatgctgcggacctcttctgactgatgggaaatcacagcagttggagacccaggtccacaggaaggatgaagaacccaagaaatggcagcagactgagagcttctggaggaagtgagacagcc

SEQ ID NO: 3193 - DNA, 439 bp, Homo sapiens
  MAP TO AC010882.2; EXPRESSED IN BONE MARROW, SIGNAL = 4.9; EXPRESSED IN LUNG, SIGNAL = 5.5; EXPRESSED IN BRAIN, SIGNAL = 5.9; EXPRESSED IN HELA, SIGNAL = 4.9; EXPRESSED IN HEART, SIGNAL = 4.3; EXPRESSED IN PLACENTA, SIGNAL = 5.2; EXPRESSED IN HBL100, SIGNAL = 5.3; EXPRESSED IN ADULT LIVER, SIGNAL = 6.6; EXPRESSED IN BT474, SIGNAL = 5.3; EXPRESSED IN FETAL LIVER, SIGNAL = 4.9
aagccaagctgtaacccaactaccttgggcatgtgtggtcaggacctcttggcactgtgcctcgggccatggtttctagtatttggctcataataaacctctgtaaatatcctgacgaaaggatcacttgagcccaggaggtcgaggctgcagtgagccatgatagtgccactgcactctagcctgggtgacagcctctgagccagcctctgagccaacctctcctacattgagcacaagacaattttcgtcaatatctcaaagatgtgcttagtgtaggagaggttgtctttgtccggctagtggctcttcaggaagctaaaccagacatcgccagtagtgatctcctcactcttttcactggggatgtccttcttacaggttgacttgtgctgtttcagatctttaagggtgatattgttggtcagatcctggagga

SEQ ID NO: 3194 - DNA, 479 bp, Homo sapiens
  MAP TO AP000021.2; EXPRESSED IN BT474, SIGNAL = 2.2; EXPRESSED IN FETAL LIVER, SIGNAL = 2.9; EXPRESSED IN BONE MARROW, SIGNAL = 1.3; EXPRESSED IN PLACENTA, SIGNAL = 2.3; EXPRESSED IN BRAIN, SIGNAL = 1.8; EXPRESSED IN LUNG, SIGNAL =   2; EXPRESSED IN HEART, SIGNAL = 1.7; EXPRESSED IN HELA, SIGNAL = 2.8; EXPRESSED IN HBL100, SIGNAL = 1.8; EXPRESSED IN ADULT LIVER, SIGNAL = 3.2
tcattgccttcatcaaccttctgatcaaggtagccagaagctgctgtatgatcaagtgaaaaaataaaatctcagaattattaatcacttctaatgtgctgggcaccctgataagaaatttatgtatgccagtttaattaattcttgcaactattatcgctattggatttctatcatctccactttacagatgcggaaatggaagctgagggcaggtaataggaatattgcctgaggttccacagccaggaagagaagcagtggagccaggagcccagcctctgttaacttctagcaaaatggctcaaggaaatatcagcacaaacctggttcttggctggcttctccttttcaccggtggacaaactggtggaaaagtggagggtcctgtttaaaagagagtagtttagttaaatcactgagttttatttcctcccaccaaactatgagttgttatggtaagatccctgagtcaatgc

SEQ ID NO: 3195 - DNA, 353 bp, Homo sapiens
  MAP TO AC010149.2; EXPRESSED IN BT474, SIGNAL =   5; EXPRESSED IN FETAL LIVER, SIGNAL = 2.6; EXPRESSED IN BRAIN, SIGNAL =   3; EXPRESSED IN HELA, SIGNAL = 5.8; EXPRESSED IN PLACENTA, SIGNAL = 3.7; EXPRESSED IN ADULT LIVER, SIGNAL = 2.1; EXPRESSED IN LUNG, SIGNAL = 3.5; EXPRESSED IN BONE MARROW, SIGNAL = 3.9; EXPRESSED IN HEART, SIGNAL = 2.4; EXPRESSED IN HBL100, SIGNAL = 4.6
agaaaagaaaaacccgggaggaggcaggaaccagagcacgagcagtagctgggtgggcactgtggctgagatcaccaccatcgaggcagtgaagtgcaagatccaggttctgcagcagcaggcagatgatgcagaggagcgagctgagcacctccagcgagaagttgagggagaaaggcaggcccgggaagaggctgaggctgaggtggcctccttgaaccgtaggatccagctggttgaagaagagctggaccatgctcaggagtacctggccactgccttgcaaaagctggaagaagcggaaaaagctgctgatgagagtgagagaggtatgaaggttgttgaaaatcggg

SEQ ID NO: 3196 - DNA, 396 bp, Homo sapiens
  MAP TO AC007449.1; EXPRESSED IN PLACENTA, SIGNAL = 2.9; EXPRESSED IN HELA, SIGNAL = 3.2; EXPRESSED IN HBL100, SIGNAL = 3.6; EXPRESSED IN HEART, SIGNAL = 3.1; EXPRESSED IN BT474, SIGNAL = 3.9; EXPRESSED IN FETAL LIVER, SIGNAL = 2.7; EXPRESSED IN ADULT LIVER, SIGNAL = 2.7; EXPRESSED IN BONE MARROW, SIGNAL = 4.7; EXPRESSED IN LUNG, SIGNAL =   3; EXPRESSED IN BRAIN, SIGNAL = 4.2
  unsure 41
  unsure 69
  unsure 162
  unsure 371
gaggttgagtctgtgagctgcttgtctcaaaactagattcntgaaaatttgcagccactgctacagtcnttggcttgtagttttacattgaattattggactgaattatttcattttgtcctggcgtgccttatcaactgaaaatattgtcccagagagggnagcacaacaatattttgtaaagaaatcattcctgcagagatgtaaagactggttagtaacctgagtctctgacccactgtagcaaacagacacacaggatgctgagaaggatccaggactcactaagctgcttaactcaaaaggaaatagtaaggtttacactggcgacatgaagctgagtctcctttgggtctggagtagattttggntctgtgcttatgaatcgtctctgca

SEQ ID NO: 3197 - DNA, 420 bp, Homo sapiens
  MAP TO AL121831.8; EXPRESSED IN ADULT LIVER, SIGNAL = 2.9; EXPRESSED IN BT474, SIGNAL =   3; EXPRESSED IN FETAL LIVER, SIGNAL = 3.1; EXPRESSED IN BRAIN, SIGNAL = 2.7; EXPRESSED IN BONE MARROW, SIGNAL = 2.6; EXPRESSED IN HBL100, SIGNAL = 2.7; EXPRESSED IN PLACENTA, SIGNAL = 2.4; EXPRESSED IN LUNG, SIGNAL = 3.4; EXPRESSED IN HEART, SIGNAL = 2.4; EXPRESSED IN HELA, SIGNAL = 2.5
gcctggatcatcacagagtggacaatggttggtgtcctctctctagtgcctgggccatctggagcccctgtgccatgagggccaaaccccttgctccaatgagacccagcaggccccaacctgctcttcctgatgacctggcctgaaatggcaccacctgggctgaggcctgtgaccacacaggtgtggttcaggtggcatctggagccctgctcaggcttcccctctcctcccacccccaggaagtgactgcagccctggagacccggcaccatcacacccagatcacgtccaccttcattgctgtggtgcaagccatcgtccgcatggctggtggctgggcagctgcctcggactccaggaaaggtggggaacctgctggctactgattgctccaggcggacaaggctgacaagcaat

SEQ ID NO: 3198 - DNA, 1979 bp, Homo sapiens
  MAP TO AC004827.1; EXPRESSED IN BT474, SIGNAL = 5.7; EXPRESSED IN FETAL LIVER, SIGNAL = 4.1; EXPRESSED IN BRAIN, SIGNAL = 5.4; EXPRESSED IN BONE MARROW, SIGNAL = 3.6; EXPRESSED IN LUNG, SIGNAL = 7.7; EXPRESSED IN HBL100, SIGNAL = 5.5; EXPRESSED IN HELA, SIGNAL = 5.8; EXPRESSED IN PLACENTA, SIGNAL = 8.4; EXPRESSED IN ADULT LIVER, SIGNAL = 1.9; EXPRESSED IN HEART, SIGNAL = 4.5
tgctggaccacgtgtataatgtcagaaaaggtttaatttaaaataatgagatgaaaattaccttgtagaagaatcgtttgaaatgtttagacttgagcaaacgggtgtacaggtgtgtatcactacgattttcacaaagtgaccatggaagttgtctggttctgaccctcatgggatcacacctctgtttgtcaggcagaggcacagaaggtcaggctggaaaagggctgtggtctttgcagagatagagcaggcagggttagacttccccatagtcagaccctgcctgctcttcattttgcaggtgtcctgggggcatcagaagcctcctcatctcacttttgtgtgcccttctcccccagtgccttaggagagaaattaacccgcacctgcccttcatgttttacaggccagcgcaggacatctcattgccattgtcagccaggaactcgcagcctcacagccctacttcttctctgacctctggggggtccttgcccttgctacaatctccaccatccactagattgtctcctgcccgacaccccttggtcccaaaccagggagaccattcagctcacctgcctaggccgcagcagcatttccttcctaatcaggctcaccagggggatcattaccgtctctcccaacctggcctgagtcagcagcagcagcaacagcagcagcagcaccatcatcaccatcaccaccaacaacagcagcagcagcagccacagcagcagccaggagaagcctattcagctatgcctcgggctcagccatcctctgcttcttatcagccagtgccagcagacccttttgccattgtttccagagcccagcagatggttgagatcctctcagacgagaaccggaacttgaggcaagagttggaaggatgctatgagaaggtggcaagactgcagaaggtgaggcttccgttttgggatattagggtctctaagtctttatttgtgagacttgtttaatatccacattaaagtctccagttgtgaatcccagcattacttgtggcaggtcttcaggatttttatatctgaaggttagatatgagtcaaactttggaaaaagccttctacctgtctacctaggagaagtaacgtcttacatttacacaaggagaaaaaaatttatgcagtttttccagacgctatagccctaaagaaaacgtgattaattcttttagaattccaaaaggcagtgatacttcttgataagaatactggtgatgcctttataggtaaaggatctgacggcaccttaaggctcattgtcttggtcacattttcccaaatatgaatttgaatcttaaatataaaaataaatgtagttcctagaaaaatctcaccagctaaagtttgagcagtcctgccttgttctggaaaaggctcagaatactttttcctagtgggagttctcatagtaactctctttcaacaatccctccaccccaccctttgatttggtccctccctgcagctcaaattcaacatctgctctctttctctgttgtatgtggggggcaggaggggcttaacaccacagctgggtgacaggtgacagccctaggctgaggaaatagaaaaaggagtgtatctccagttcacattcttctctgcccacccccattgggactttacctctggagtaccccaagcgaggaaccttagctcttggcttccaggggctgctggtgaatagggttatgcctttggccgcttctttgcagcttttgtcattgtggagctattgtggtttggtctccctacaatgtgaactgttcagagaggtgagggtgaaggtgggggagggacaggaggatgccttgtattgtccagcaactctgtccttaggaaacaccaggagtgaaaatttcagaggcctgaatgaagctgagtatttgtaaacagacaccaaatctgggggcctcaaggagacaggggcttattatcagcaga

SEQ ID NO: 3199 - DNA, 469 bp, Homo sapiens
  MAP TO AC007281.3; EXPRESSED IN LUNG, SIGNAL = 0.8; EXPRESSED IN HEART, SIGNAL = 1.2; EXPRESSED IN HELA, SIGNAL = 0.77; EXPRESSED IN BONE MARROW, SIGNAL = 1.1; EXPRESSED IN BT474, SIGNAL = 0.66; EXPRESSED IN PLACENTA, SIGNAL =   1; EXPRESSED IN BRAIN, SIGNAL =   1; EXPRESSED IN FETAL LIVER, SIGNAL = 0.71
agtttcccctcacctccatcccaggttctggaagcagaagggatgtaaggtctgagtagagttttgcttgagctggtgggtggacttaaggccatggtggttgagtccactgctatgcctaccaagctttgtgtgctgctcactgactctgttgccatggccctccttgcctacagtccttcatcatgtgtatattttgtggtcactcttgtcatgccacatgagctaatttaaatggaattattggtcctgcattttttggtcacttgaaccctcgacagaactaatatgtattttagaatgaccatggaaaatatgaccgacaccgagaaggaacattttaaggttggtgacgctgattccacagcctgccaggcgcttacccacaactaggccttggcctgtttatctccctttccagcctgcagaaaaacaggctctgtacacagatgtgaagagctgtgcttga

SEQ ID NO: 3200 - DNA, 484 bp, Homo sapiens
  MAP TO AP000184.1; EXPRESSED IN FETAL LIVER, SIGNAL = 0.71; EXPRESSED IN LUNG, SIGNAL =   1; EXPRESSED IN BRAIN, SIGNAL = 0.84; EXPRESSED IN HELA, SIGNAL =   1; EXPRESSED IN ADULT LIVER, SIGNAL =   1; EXPRESSED IN HEART, SIGNAL = 0.98; EXPRESSED IN PLACENTA, SIGNAL =   1; EXPRESSED IN BT474, SIGNAL = 0.72; EXPRESSED IN BONE MARROW, SIGNAL = 0.67
tggctttggttttgtttatgcgatcatttttatgataaagataggaaaggaagagtcccaaagccaaggccattgagaggagatgagtggggatttccactcaaggatggcgagttgaatgcaggggttagcctccagtccctcctgaaaccccactaaagcaacaacaggggaggtattttggaagacatataaacctacggaatgaagagaacagaagcaatgataatagcaataaaatctgaaagtttggaaagcaaatgtaagtttggtaactgtgatggtgaatattaggtgtcaacttgatgggattgagggtggctggtaaggtattgtttctggatgtgtctgtgagggtattgccagaggaaattgacattgaagttggtgggctgggagaggaaaacccaccctttatgtgggtgggcaccatccaatcagctgccagcaaggctagagcagagcagacgcagaaggagaaggt

SEQ ID NO: 3201 - DNA, 420 bp, Homo sapiens
  MAP TO AC011995.2; EXPRESSED IN BONE MARROW, SIGNAL = 3.1; EXPRESSED IN ADULT LIVER, SIGNAL = 5.2; EXPRESSED IN BT474, SIGNAL = 3.1; EXPRESSED IN BRAIN, SIGNAL = 2.9; EXPRESSED IN LUNG, SIGNAL = 4.3; EXPRESSED IN PLACENTA, SIGNAL = 3.9; EXPRESSED IN HEART, SIGNAL =   3; EXPRESSED IN HELA, SIGNAL = 3.6; EXPRESSED IN HBL100, SIGNAL = 3.2; EXPRESSED IN FETAL LIVER, SIGNAL =   4
cctcggacaactccagctactgcaatctgacaaagtattcactgaaaggataatggtagctaattattacctggaggcctcaagcatatgtgccctctgaacctaaaataagtgttgaaaaagaaaaataaagactcagaagcaacaaaacccagaatgatactgccaatcatgcccgggcctggttgagtagaattcctgacacacccagctggacaccagactggctgtgcctctagagctccactttgctgctcccaccacccacagcaggaagggtccctctccctcacccttcatcctgctctgaggtacagagcaatgcctctgactgaggggacccttgttctaccttcactgtcatgcttagtctctggggtgtgaggcagggtcctacgagggggctcatgtctgtcagaa

SEQ ID NO: 3202 - DNA, 483 bp, Homo sapiens
  MAP TO AL031121.5; EXPRESSED IN BONE MARROW, SIGNAL = 0.68; EXPRESSED IN ADULT LIVER, SIGNAL = 1.1; EXPRESSED IN BRAIN, SIGNAL = 0.8; EXPRESSED IN HEART, SIGNAL = 1.1; EXPRESSED IN PLACENTA, SIGNAL = 2.2; EXPRESSED IN HELA, SIGNAL = 0.74; EXPRESSED IN FETAL LIVER, SIGNAL = 0.79; EXPRESSED IN LUNG, SIGNAL = 1.2
caatctgggacttggtatttttgtacagttgccactgcttttaaaactccgcaagatcgtgtaaaaatcttgcatgtttgtgtctcctaataagcattcagagaaaatgcctagactgtgtaggacttttcgggaaattgcagagaagtaactggcctctttgtgtgtttgcatgcaccagtgaactccggagacggcattgactacagccagcagaagagggagaacattggggacttgatccaggagacactggaggccttcgagcgctacggaggagaaaatgcctttatcaacattaagtacgtggtcccaacctacgagtcttgcttgctaaactaacagtggcagcagctgggacttgaaacctcccgttggtgttgggatcatctgtctctgttgcttttagcatctcattccttgtgacttccacagctttcttttctacagctgctaaaatagtggcttatgggccattggact

SEQ ID NO: 3203 - DNA, 386 bp, Homo sapiens
  MAP TO AC010888.2; EXPRESSED IN BT474, SIGNAL = 2.4; EXPRESSED IN BRAIN, SIGNAL = 2.3; EXPRESSED IN HELA, SIGNAL = 2.4; EXPRESSED IN HEART, SIGNAL = 2.2; EXPRESSED IN PLACENTA, SIGNAL = 2.3; EXPRESSED IN ADULT LIVER, SIGNAL = 3.1; EXPRESSED IN FETAL LIVER, SIGNAL = 2.4; EXPRESSED IN LUNG, SIGNAL = 2.5; EXPRESSED IN BONE MARROW, SIGNAL = 2.5; EXPRESSED IN HBL100, SIGNAL = 2.8
gcagtaggtcttaacagtgggctgaaaattttcagtaaaccttgctgtaaacagatgtactgttatccagcttcattgttgcatttctagaatagaggcagagtagatgtagcaaaattcttcagtgctctgggattttcagaatggtaaatgagcactggctctaacttaaagtcaccaccttcatcagctcctgacaggggagttacccaggcttttgaagctttgaagtcaggcattgacttttcttctctagctatgaaagtcctagatggcatcttcttccaatagaaatctgtgtcatctacactgaaaatctgttgtttagtgtagctaccttcatcaataatcttagccagatcttctggaaaacttgctgcagcttc

SEQ ID NO: 3204 - DNA, 404 bp, Homo sapiens
  MAP TO AC008833.2; EXPRESSED IN BRAIN, SIGNAL = 9.3; EXPRESSED IN PLACENTA, SIGNAL =  15; EXPRESSED IN HBL100, SIGNAL =  15; EXPRESSED IN HELA, SIGNAL =  18; EXPRESSED IN HEART, SIGNAL =  13; EXPRESSED IN BT474, SIGNAL =  13; EXPRESSED IN FETAL LIVER, SIGNAL =  16; EXPRESSED IN ADULT LIVER, SIGNAL =  18; EXPRESSED IN BONE MARROW, SIGNAL =  16; EXPRESSED IN LUNG, SIGNAL =  19
ctttcaattctgtcattcgcctatttaacattgtttattgttatctatggggctggtcagtattctactcacctttaccctgttcccttttttgatctgcatagtggcttttttaagcctttccctttcttctcaagctgccccatccctctctcctctggctattgatggctgtaccttctacttttacattcattcatctggagatggaggagtaaaatgtttagagaactcatggctaatatctcttaacattttactcctccatctctaaatttacatttcccttcttttactcttcttctccttctccttcttctcttctctcttattcttctccttctcctccttcttctttttttctttttttccagacacagtcttgtcttcctctgtcacccagg

SEQ ID NO: 3205 - DNA, 474 bp, Homo sapiens
  MAP TO AC010183.6; EXPRESSED IN PLACENTA, SIGNAL = 3.8; EXPRESSED IN HBL100, SIGNAL = 3.7; EXPRESSED IN BT474, SIGNAL = 3.1; EXPRESSED IN LUNG, SIGNAL = 3.4; EXPRESSED IN BRAIN, SIGNAL = 2.7; EXPRESSED IN HEART, SIGNAL = 2.9; EXPRESSED IN HELA, SIGNAL = 3.4; EXPRESSED IN ADULT LIVER, SIGNAL =   4; EXPRESSED IN FETAL LIVER, SIGNAL = 3.1; EXPRESSED IN BONE MARROW, SIGNAL = 3.2
tgactcactcagacccctcctatccccttcattctgatgtcttcacttactagcagacagccctcattggtcagcccctgaaaagagctgcctcctaggttaccccatttcctgacactgttccagccagagactaatcaacaggacagaggtccagtgttcttacctctactcaggacagcttaggtcattctatcttcaggacaccttgttgggttggccaaggctttcatcaagtctatatgaacagctcacccatctgcccaaccctgcttccttctctctgtttccagaggtatcaagccccagaaccttctggacagcaagacagtagcagacaagagggtagacagcatcagggcctccctttgagagggtttgagaaagtaagagaccaagtggaatcttgtatctggagtaccagaaccaagggtatttttaccactctgggagagacttcaatccctggaagca

SEQ ID NO: 3206 - DNA, 420 bp, Homo sapiens
  MAP TO AC011998.2; EXPRESSED IN ADULT LIVER, SIGNAL = 4.8; EXPRESSED IN BT474, SIGNAL =   4; EXPRESSED IN FETAL LIVER, SIGNAL = 3.7; EXPRESSED IN BONE MARROW, SIGNAL = 2.6; EXPRESSED IN LUNG, SIGNAL = 3.3; EXPRESSED IN BRAIN, SIGNAL = 3.3; EXPRESSED IN HELA, SIGNAL = 3.4; EXPRESSED IN PLACENTA, SIGNAL = 3.9; EXPRESSED IN HBL100, SIGNAL =   3; EXPRESSED IN HEART, SIGNAL = 2.7
aagctcagtggcacacaggagtaacacaatggaagctcatttctcactcttctgaggctcagcacagtcttcctgattgatagatggctctcctccaagagaggattctttccttcctgagcctcaacacaggggttcaaagggtgctgtcagcattaacagcccatcagcagatgagggaagagacagagaaaaatgggaaatgaaatgagagattttcctgtcctgtcaggaagtggcacacatttcttgctcatatttcaatgtctttctagactctagaacccagggatgtggccatagccaagtgcagggaggctggcaaatgtagcttcaacctgacccagagtgggccccagccccagtcccatccagtcactgcatgccgtcaaagtccagggcctttaagtggtgagcgtc

SEQ ID NO: 3207 - DNA, 462 bp, Homo sapiens
  MAP TO AC008283.2; EXPRESSED IN HBL100, SIGNAL = 2.5; EXPRESSED IN FETAL LIVER, SIGNAL = 0.67; EXPRESSED IN BRAIN, SIGNAL = 3.7; EXPRESSED IN BONE MARROW, SIGNAL = 0.8; EXPRESSED IN HELA, SIGNAL = 0.6; EXPRESSED IN HEART, SIGNAL = 1.2; EXPRESSED IN PLACENTA, SIGNAL = 1.3
aagtctggtctccctcgtcccccaaagatgatcctgaatgactccaacattgaggaaatcaggagagtggttagttataatgtgaataatacaataaagatatactgtgagtgctaatacctgaatggaaatttgtgtatccaatgctatcaaggtactatattttaaacaattgttgtagatttattttttgaaaaatatgcatttggcaagtaaagaagtgcatgtgaaaatatttatgttagcaaaaattgtaatattctgtttattctttttctatatagcctgagaaaaatgacagtgagccaggcagccagaggataaaacctgttttcattgaagatgctaattttggacgacaaatatcttatcagcacgcagcagtccatattcctactgacatctatgagggctgtaagtaaaagaatgttaacatctgttggaataccatgctctcgcctg

SEQ ID NO: 3208 - DNA, 452 bp, Homo sapiens
  MAP TO AC010899.2; EXPRESSED IN BONE MARROW, SIGNAL = 2.3; EXPRESSED IN HELA, SIGNAL = 2.3; EXPRESSED IN PLACENTA, SIGNAL = 2.3; EXPRESSED IN HBL100, SIGNAL = 2.5; EXPRESSED IN LUNG, SIGNAL = 2.1; EXPRESSED IN BRAIN, SIGNAL = 2.2; EXPRESSED IN HEART, SIGNAL = 2.1; EXPRESSED IN BT474, SIGNAL = 2.4; EXPRESSED IN ADULT LIVER, SIGNAL = 2.7; EXPRESSED IN FETAL LIVER, SIGNAL = 2.2
tcatgctctcttccaatcccacgtatgcatttacatgtatcatttttgtcaaggcggagtgcctggcatcaagcaagttttcaaaatgtgttgttagctggtatgattttccctctccagctacgtttttggttcataatttgcactactgtgagaaacacggaggacacaatcatgagccaaatactgtcactgacattgccctagaggtcttgtgatcaaattatttcacaattagatacatagatacaaactctgatatattatgtggaggaaaacaatgcagggtagtgtgaaagggaatcccagggtgagtctccttagactaggcatttggaaaaggcctcagaggagacagcacctacacactgtgtcccaaacccccaggaggagacagccctggagaagtagataaggaccctccaggataaggggaagtgcgggtgtaaata

SEQ ID NO: 3209 - DNA, 388 bp, Homo sapiens
  MAP TO AC011257.2; EXPRESSED IN HBL100, SIGNAL = 0.95; EXPRESSED IN HELA, SIGNAL = 1.1; EXPRESSED IN PLACENTA, SIGNAL =   1; EXPRESSED IN HEART, SIGNAL =   1; EXPRESSED IN ADULT LIVER, SIGNAL = 1.3; EXPRESSED IN BT474, SIGNAL = 1.1; EXPRESSED IN FETAL LIVER, SIGNAL = 1.1; EXPRESSED IN BRAIN, SIGNAL = 1.1; EXPRESSED IN LUNG, SIGNAL = 0.97
  unsure 187
  unsure 349
gaaccccacaaaggatcttgcagtaccaggactagcaacagccagggtgaatttattacaccaaggtttgagaggggataggggaaaaacagttacccacacccagagacttggcaacctgagcagatccaggaccttcacttgaaagacacaactagactctggcagcccccacaatgaggaagcncaaggcaatcaacaccatgaccttattttcctcccttcctctgatctcctgctagttcttcccattgacaaagactcccaaaaagcaaaagagatggtcgacgtagcagtacagtcagcctctggagggttaggaggggcaaacaaattgtcaagcacggtngagcacattggagccatcccacaacctccactggacctt

SEQ ID NO: 3210 - DNA, 391 bp, Homo sapiens
  MAP TO AC009834.2; EXPRESSED IN HBL100, SIGNAL = 1.6; EXPRESSED IN HEART, SIGNAL = 1.6; EXPRESSED IN FETAL LIVER, SIGNAL = 1.4; EXPRESSED IN ADULT LIVER, SIGNAL = 1.6; EXPRESSED IN LUNG, SIGNAL = 1.5; EXPRESSED IN BRAIN, SIGNAL = 1.4; EXPRESSED IN PLACENTA, SIGNAL =   3; EXPRESSED IN BT474, SIGNAL = 1.2; EXPRESSED IN BONE MARROW, SIGNAL = 1.2; EXPRESSED IN HELA, SIGNAL = 1.4
tgccaatttaatacacttgtggtctaaacaaaatgctttcaatattgtgtatgcagcataaggcagaaaattgtattagtgtgaaatttgagtcattttttctttaatatgagagctaagtggcatatgtacattgtatttaacatattgccatgtgtctttccaggatcagtctgagacagaagccaatgtgagtcttgcaagttgggatgttgagaagacagccatctttgctttcaatatttcccacgtcagtaacaaggttcgaatcctagaactccttccagctcttacaactctgacgaatcacaacagatacttgatcgaatctggaaatgaagatggcttctttaaaatcaaccaaaaggccgggatcagctacctccacttc

SEQ ID NO: 3211 - DNA, 375 bp, Homo sapiens
  MAP TO AL121752.2; EXPRESSED IN BT474, SIGNAL = 1.7; EXPRESSED IN FETAL LIVER, SIGNAL =  22; EXPRESSED IN BONE MARROW, SIGNAL = 1.3; EXPRESSED IN LUNG, SIGNAL = 3.4; EXPRESSED IN BRAIN, SIGNAL = 4.5; EXPRESSED IN PLACENTA, SIGNAL = 2.1; EXPRESSED IN HBL100, SIGNAL = 8.5; EXPRESSED IN HELA, SIGNAL = 4.7; EXPRESSED IN HEART, SIGNAL = 2.8; EXPRESSED IN ADULT LIVER, SIGNAL = 7.2
ggaggtatgagacaaagcggagagtcacattaccaattaccaaacttttttttcaagtcaaaattgttttattgtcattcacatatttaatatgaaaagaaatgcagcaaatggctcagggttgtattaaggaaaaaaaaccaggttgtgcaggttgttctattaacatctgggagaagagctgtccccacatcagacacagcagctgcacgcccctttgcagacacagccctgggcacacttggcacagcccatggggcagcaggagcagcagctcttcttgcaggaggtgcatttgcactctttgcacttgcaggagccggcgcacgtgcaggagccaccagtggtgcaggagcagttggggtccatttcaag

SEQ ID NO: 3212 - DNA, 482 bp, Homo sapiens
  MAP TO Z99758.7; EXPRESSED IN HBL100, SIGNAL = 1.2; EXPRESSED IN HEART, SIGNAL = 0.92; EXPRESSED IN LUNG, SIGNAL = 1.3; EXPRESSED IN FETAL LIVER, SIGNAL = 1.1; EXPRESSED IN ADULT LIVER, SIGNAL = 1.2; EXPRESSED IN BRAIN, SIGNAL = 0.9; EXPRESSED IN BONE MARROW, SIGNAL = 1.1; EXPRESSED IN BT474, SIGNAL = 1.3
ttgggtgtatgactctttctttagcattttgtaaggactactttgctgaaatgatttggtaataaacaaatctttctattcaggtttttaagagtattaaatttgtaataagaagcttttatgttattaccagattggattaggaaatatggaagttattaaaaattatgatttatatttgtaacaaaaaagaaacagaatataacctatctttgataagacagaattaagaattatttctaccttatgatgagattaactttccttattcataactttttttgtttgtttgttatattgttgtgtctggttctagcatgatgtaaagaatcatcgcacctttttaaagcggaccaaatatgataacctgcacttggaagatttatttataggcaacaaagtgaatgtcttttctcgacaactggtattaattgactatggggatcaatatacagctcgccagctgggcagtaggaaagaaa

SEQ ID NO: 3213 - DNA, 492 bp, Homo sapiens
  MAP TO AC007403.2; EXPRESSED IN HBL100, SIGNAL = 2.8; EXPRESSED IN FETAL LIVER, SIGNAL = 2.1; EXPRESSED IN LUNG, SIGNAL = 2.8; EXPRESSED IN BRAIN, SIGNAL = 2.7; EXPRESSED IN BT474, SIGNAL = 3.6; EXPRESSED IN BONE MARROW, SIGNAL = 1.9; EXPRESSED IN HELA, SIGNAL = 1.8; EXPRESSED IN ADULT LIVER, SIGNAL = 1.2; EXPRESSED IN PLACENTA, SIGNAL = 2.9; EXPRESSED IN HEART, SIGNAL = 2.3
tgactctttccctctcattcttctcattaaatctaccctcaaaatacagtaatttatagaatctaagctaccagcaattgtgaggtacatgattatcttatccattcctaaaaaagaaaaaaaatctagcaatctgtgatcagtgctattgcttagaatttttattttatatgtatttgaagacctctacacttatgtaaacataaatttgccatatatcattattcagtatgaggaaagtgtatgtgaaataagttggttaaagtttccaaaaagattattgatttcaaaacctagcttcttaattactttcgattcagaatcatacaagtacatggttttccacaaaatatcatccatagtgccattaagagtagtgggcaatgcaatgctctgcttcctgcagattttgaactgaagttgcaaagctccaggaacctgtgatgcaattgagtgagaataaaaatgcaaaaccaactatgtgtatgtgca

SEQ ID NO: 3214 - DNA, 449 bp, Homo sapiens
  MAP TO AC012458.2; EXPRESSED IN PLACENTA, SIGNAL = 6.4; EXPRESSED IN HBL100, SIGNAL =  19; EXPRESSED IN HELA, SIGNAL =  20; EXPRESSED IN HEART, SIGNAL = 6.9; EXPRESSED IN FETAL LIVER, SIGNAL =  10; EXPRESSED IN BT474, SIGNAL =  12; EXPRESSED IN ADULT LIVER, SIGNAL = 3.5; EXPRESSED IN BONE MARROW, SIGNAL = 7.2; EXPRESSED IN LUNG, SIGNAL =  15; EXPRESSED IN BRAIN, SIGNAL =  26
tatccccacattcacttccctctgctcacataggcccctaatatctctgctgagaaagcctaccatgaaagcttactacagcaaagatcaccaatgcttgttttgagccagtcaatctgatggtaaaatctgagtcttaccatggtaaatacatggcttgctgcctgttgtaccatgatgttgtaccatgaagtacatggtaaatacatgtacttgctgcctgatgtaccagatgttcccaaatatgtcaatgctggcattgtcaccctcaggaccaaccacagcatccactttgtggattggtgtcccactggcttcaaggttggcatcaattatcagcctcccaatgtggtacccggtggagacctggccaaggtacagagagctgtgtgtatgctgagcaacaccattgccattgctgaggcctgggctcacctggaccacaagtt

SEQ ID NO: 3215 - DNA, 462 bp, Homo sapiens
  MAP TO AC010680.3; EXPRESSED IN HBL100, SIGNAL = 0.98; EXPRESSED IN BT474, SIGNAL = 0.92; EXPRESSED IN BRAIN, SIGNAL =   1; EXPRESSED IN HELA, SIGNAL = 0.96; EXPRESSED IN HEART, SIGNAL = 3.3; EXPRESSED IN PLACENTA, SIGNAL =   1; EXPRESSED IN ADULT LIVER, SIGNAL = 1.3; EXPRESSED IN FETAL LIVER, SIGNAL = 1.1; EXPRESSED IN LUNG, SIGNAL = 0.98; EXPRESSED IN BONE MARROW, SIGNAL =   1
tttttgcttggcacacagacttgaggtagataccactgacatttagtagttgggagccaaggatgctaaatgctctgcagtgtgaatgacactccagcacatcaaagattatcctacccaaaatacagatagccccacttagagacaagtgcattattaaaatgctgatttttcaggattactagaataattatccatttttgtaataggcctacctggaccatgcaaagatattaaagcaagtgacattaccaagagttcttgtaagttaacttgggaacctccagaatttgatggtggaaccccaattcttcattatgtcctggagcgcagagaagctgggaggagaacatatataccagtcatgtctggtgagaacaaactgtcatggactgtgaaggatctcataccaaatggtgaatacttcttccgtgttaaagcagtcaacaaggttggtggagg

SEQ ID NO: 3216 - DNA, 469 bp, Homo sapiens
  MAP TO AL080239.11; EXPRESSED IN HELA, SIGNAL = 0.7; EXPRESSED IN ADULT LIVER, SIGNAL = 0.83; EXPRESSED IN BRAIN, SIGNAL = 0.89; EXPRESSED IN HEART, SIGNAL = 0.95; EXPRESSED IN BT474, SIGNAL = 0.71; EXPRESSED IN BONE MARROW, SIGNAL = 0.72; EXPRESSED IN PLACENTA, SIGNAL = 0.82; EXPRESSED IN FETAL LIVER, SIGNAL = 0.76; EXPRESSED IN LUNG, SIGNAL = 0.87
atgatcaggctgtttggtcctttttccagtgggatgtcattgtggtgtatcttggaactttgcccagcaagatatgataggaaagtttctttagttggacctttgtccgtcttgtgttacgacgattaggcaagatttttctcatggcccgaacccccgtggaatgtttcactttgaccaaggtctgaaaaatagcagggtgcttactaaatggtggtttggactcacattcttgccttctactttagtataaaaggaagaggggcattgttgattatctggctgcttcctgccgaataggggagctgtaatcagggtttgggttttgaagcagtgggtgttggacttcagagttgttttcctggaggcactggtactggacttggcagaggagaaggatggtatcaatgtgttgctgggtggccgcctggacaggggagtttagccttcgggagataaagcgggatat

SEQ ID NO: 3217 - DNA, 368 bp, Homo sapiens
  MAP TO AC007687.16; EXPRESSED IN BRAIN, SIGNAL = 1.6; EXPRESSED IN LUNG, SIGNAL =   2; EXPRESSED IN HEART, SIGNAL = 1.9; EXPRESSED IN FETAL LIVER, SIGNAL = 2.4; EXPRESSED IN BONE MARROW, SIGNAL = 2.1; EXPRESSED IN PLACENTA, SIGNAL = 1.8; EXPRESSED IN HELA, SIGNAL = 2.4; EXPRESSED IN HBL100, SIGNAL = 1.9; EXPRESSED IN BT474, SIGNAL = 1.9; EXPRESSED IN ADULT LIVER, SIGNAL =   2
gctaatgagcaacaaagccctaacagcacttgaagtaagagacagcaaaaggcccagcactactgaaatgtaagccggcaagactcctgtcacagaagagaagaggtatgtgcgtgttcatgctcattttcatcctcttctctcattcaaccggcttttcccaccccaccccacccccgcacacacacatcgcacacgcacacacacctgacacagagccatgcgcatctagctagcagccgtgcacactcactgaccagggctggtaactcctcaatatttggtagtgctatttcatagtgatctgggaatataacaagtttggcttcatcttcatattcataatcgtcgctatttaaatcgtcatc

SEQ ID NO: 3218 - DNA, 463 bp, Homo sapiens
  MAP TO AC010681.3; EXPRESSED IN BONE MARROW, SIGNAL =   2; EXPRESSED IN HELA, SIGNAL =   2; EXPRESSED IN PLACENTA, SIGNAL = 2.2; EXPRESSED IN HBL100, SIGNAL = 2.3; EXPRESSED IN BT474, SIGNAL = 1.8; EXPRESSED IN BRAIN, SIGNAL = 1.8; EXPRESSED IN LUNG, SIGNAL = 1.9; EXPRESSED IN HEART, SIGNAL =   2; EXPRESSED IN ADULT LIVER, SIGNAL = 1.9; EXPRESSED IN FETAL LIVER, SIGNAL =   2
catgtaaggcagcaggagtgatatcatctttcccatcttacttagatgaagtagggacacttgcctgcagtctccctctggcacctgatcttaagtctctgattctcacatcagggcctttccagtgcactcgcattattgtgaatacaattgcttggattcctaggggaactatttcctacattaagaaaattccctaaaattcccagttgtcttttgactctattaatataggaaaagtgcaaaaaatccaaagaaaatcagccaagagcagtttcttcaccctactgtgttatgtaccaaattgattcttggcataaatttgcaccctctatggcctggctcatctacagcttcgtactgagagcctgtcatacccaaaaccacggcaggcccatggagagcccaagtgagatatatctgtgaagtgaataaggtaagaaggtaggctttgattcccaca

SEQ ID NO: 3219 - DNA, 460 bp, Homo sapiens
  MAP TO AL079304.2; EXPRESSED IN FETAL LIVER, SIGNAL = 1.2; EXPRESSED IN ADULT LIVER, SIGNAL =   1; EXPRESSED IN BONE MARROW, SIGNAL = 0.82; EXPRESSED IN HBL100, SIGNAL = 0.79; EXPRESSED IN HELA, SIGNAL =   1; EXPRESSED IN BRAIN, SIGNAL = 1.1; EXPRESSED IN HEART, SIGNAL = 0.97; EXPRESSED IN PLACENTA, SIGNAL = 0.74; EXPRESSED IN BT474, SIGNAL = 0.72; EXPRESSED IN LUNG, SIGNAL = 0.91
atctaaaatcctcctggggcgaccatcagagagtttctaaccaaggagggccctgttctcacatctctttccccttaacatttaaacccgtactttgctggaaggaaatttaatccatatgcttctgagtaatttgtacttaacacatcaaaatattccgttctaacagtcatttgttgtctcaatcatcctcctgggtctttttaagggcttttgttcttagtagtcaatgtagtagtcaaaaatggaatttgaactccagaaggatagttccttatccttattattcctcacccattttggtagaccctgccaggatgttccccccgccaccgactccccctcacccaggtaagaaagtgtttgttctaatacacgtttactttcttttatttatagaataagaatgttagttactatttgctgtgcaccaacaatggcaggctccatattgggaact

SEQ ID NO: 3220 - DNA, 403 bp, Homo sapiens
  MAP TO AC010686.2; EXPRESSED IN FETAL LIVER, SIGNAL = 1.3; EXPRESSED IN BRAIN, SIGNAL = 1.3; EXPRESSED IN HBL100, SIGNAL = 2.1; EXPRESSED IN HELA, SIGNAL = 1.6; EXPRESSED IN PLACENTA, SIGNAL = 1.4; EXPRESSED IN ADULT LIVER, SIGNAL = 1.3; EXPRESSED IN BT474, SIGNAL = 1.5; EXPRESSED IN LUNG, SIGNAL = 1.1; EXPRESSED IN BONE MARROW, SIGNAL = 1.2; EXPRESSED IN HEART, SIGNAL = 1.1
ccacacctcaacttctgctgaaatgaagggtgagacttatggtcaatgaaaaacatctgttcagaacctaagaattgtcattgtctgtaagtctcatgtttcatcccgcccaatactatatggccccagggacctgccatagggaggtctggttgtcctgctccctgaaggttaggtattttattgcttccagattgttctaatatggttttcagccatctgacatttttttctaggtgtttgctgagaacaaggatgagattgctttagtcctgtttggtacagatggcactgacaatcccctttctggtggggatcagtatcagaacatcacagtgcacagacatctgatgctaccagattttgatttgctggaggacattgaaagcaaaatccaaccagg

SEQ ID NO: 3221 - DNA, 468 bp, Homo sapiens
  MAP TO AC009437.1; EXPRESSED IN HEART, SIGNAL = 1.5
ggtttccaacataaataagtgttccttggtttatgtaatttttacatatttgatagtagataaattactgctagtaagtacatggatgaatgaatgaatgaattaatgaagcaagtccacataatcttggagacccttatttctggctacatttacagcaacctggcccattcaccttgtccctctgtacacttcagcctcctggcattcactgggatccttacttttccactccaggtcctttgcacattcttcactttctaccaggaatgttctctcttggcctctttccctgaagagctcaaactcatccttcaagccttagttctaattgtgcacccccagagaaatcttctcttcaacctatacgagttatcatttgtaatctcctattccaccctttccttttgcttcgaggaacttatcacattgcatcattatcattcatttgtgagattactggctcag

SEQ ID NO: 3222 - DNA, 483 bp, Homo sapiens
  MAP TO AL049549.3; EXPRESSED IN LUNG, SIGNAL = 0.71; EXPRESSED IN PLACENTA, SIGNAL = 0.72; EXPRESSED IN HBL100, SIGNAL = 0.75; EXPRESSED IN FETAL LIVER, SIGNAL = 0.75; EXPRESSED IN BONE MARROW, SIGNAL = 0.72; EXPRESSED IN HELA, SIGNAL = 0.63; EXPRESSED IN ADULT LIVER, SIGNAL = 0.75; EXPRESSED IN HEART, SIGNAL = 0.82
catgttcacagactcccctgaaaaaaacttggtttccagtcagtttttccatcatcaagaggcagggaccatatttgggtaatttttatgttcaacccccacccttcacacagccctttactcacaataactgttcgctgaatgtgtgtctgattaacctccagctctaacattctatgactccttaattttaaagttgcatcatggtaaattctgtcatctcttaataaaaatactcatgcagttacctggatcagtatcttcgctgtgaagccatctgctcagagttcactctgatgcacacagagggtttctcagatccagagctaagagatgaactaaagccttatgaagtaggagtactaattctgattccttcagaattcatttgcatcttctggcttataatctcaacaagattcagatccacccttttggagcgaataccatacaagtgtatggacattctgctctcatggctga

SEQ ID NO: 3223 - DNA, 459 bp, Homo sapiens
  MAP TO AP000215.1; EXPRESSED IN FETAL LIVER, SIGNAL = 1.5; EXPRESSED IN HELA, SIGNAL = 1.3; EXPRESSED IN PLACENTA, SIGNAL = 0.96; EXPRESSED IN BT474, SIGNAL = 0.99; EXPRESSED IN BONE MARROW, SIGNAL =   1; EXPRESSED IN HEART, SIGNAL = 1.1; EXPRESSED IN BRAIN, SIGNAL = 1.3; EXPRESSED IN ADULT LIVER, SIGNAL = 1.2; EXPRESSED IN LUNG, SIGNAL = 0.94; EXPRESSED IN HBL100, SIGNAL = 1.1
tgcaagaagcttcataggggctcatttgatgatgctgtggagaggagcttgtggtcctagatcttgtctgacaaacacaaattgatcttccaacagcaaggttgtttctggccacagatactgttggaaggccgatggctctgtgatgatttgatgggaaaaaacaatctgactctttggaaagagcaatggtgttaatgtgcttttgtcagcaagacagtctttgtttcctatgataaaattttactgctttttttcttttagatggaaaaattgtacctgcattacttgagagcagagagctttagaaaagctctgatttatcaaaagaagtatcttttgctgttgattggtggattccaggattctgaacaagaaacactctccatgattgcccatttgggggtatttccttccaaagcagaacggaaaatcacatctcgtcctttcaccaggttc

SEQ ID NO: 3224 - DNA, 1960 bp, Homo sapiens
  MAP TO AC011421.2; EXPRESSED IN BRAIN, SIGNAL = 5.8; EXPRESSED IN LUNG, SIGNAL = 7.4; EXPRESSED IN PLACENTA, SIGNAL =  10; EXPRESSED IN HEART, SIGNAL = 4.4; EXPRESSED IN FETAL LIVER, SIGNAL = 0.96; EXPRESSED IN ADULT LIVER, SIGNAL = 1.7
cctggttgtgaaaatgtctgctatgacaagtctttcccaatctctcatgtgcgcttctgggtcctgcagatcatatttgtgtctgtacccatactcttgtacctggctcatgtgttctatgtgatgcaaaaggaagagaaactgaacaagaaagaggaggaactcaaggttgcccaaactgatggtgtcaatgtggagatgcacttgaagcagattgagataaagaagttcaagtatggtattgaagagcatggtaaggtgaaaatgcaaggggggttgctgcgaacctacatcatcagtatcctcttcaagtctatctttgaggtgaccttgctgatccagtggtacatctatggattcagcttgagtgctgttcacacttgcaaaagagatccctgcccacatcaggtggactgcttcctctcttgccccatggagaaaaccatcttcatcatcttcatgctggtggtgtccttggtgtccctggccttgaatatcattgaactcttctacgttttcttcaagggcgttaaggattgggttaagggaaagagcgacccttaccatgcgaccactggcccgctgagccccgccaaagactgtgggtctcaaaaatatgcttatttcaatggctgctcctcaccaactgctcccctctcgcctatgtctcttcctgggtacaagctggttaatggcgacagaaacaattcttcttgccgcaattacgacaagcaagcaagtgagcaaaactgggctaattacagtgcagaacaaaatcgaatggggcaggcgggaagcaccatctctaactcccacgcacagccttttgatttccccgatgataaccagaattctaaaaaactagctgctggacatgaactacagccactagccattgtggaccagcaaccttcaagcagagccagcagtcgtgccagcagcaggcctcagcctgatgacctggagatctagatacaggcttgaaagtatcaagattcctctcacttgtggagaagaaaaaaggtgctgtagaaagtgcaccaggtgttaattttgatccggtggaggtggtattcaacagtcttattcatgaggcttagaaaacacaaagacattagaatacctaggttcactgggggtgtatggggtagatgggtggagagggaggggataagagaggtgcatattggtatttaaagtagtggattcaaaaaacttagattataaataagagttccattacatgatacatagattagggctttttctcccagcaaacacccctaagaatggttctgggtatgtgaatgagtgggtggtaattgtggctaaatatttttgttttaccaagaaactgaaataattctggccaggaataaatacttcctgaacatcttaggtcttttcaacaagaaaaagacagaggattgtccttaagtccctgctaaaacattccattgttaaaatttgcactttgaaggttagctttctaggcctgaccctccaggtgtcaatggacttgtgctactatatttttttattcttggtatcagtttaaaattcagacaaggcccacagaataagattttccatgcatttgaaaatctcagcattatacatatattttttccatccacttgcaccatatcattaccatcactttttcatcattcctcagctactactcacattcatttaatggtttctgtaaacatttttaagacagttgggatgtcacttaacattttttttcttttgagctagagtcagggaatcaagccatgcttaatatttaacagtcacttgtatgtgtgtggaagtttgttttgtttgtcatgtattggtacaagcagatacagtacaaactcacaaacacagatttgaaaataatgcacatacagtgttcaaatttgaacctttctcatggatttttgtggtgtgggccaatacggtgtttaca

SEQ ID NO: 3225 - DNA, 454 bp, Homo sapiens
  MAP TO AF019413.1; EXPRESSED IN HEART, SIGNAL = 1.2; EXPRESSED IN FETAL LIVER, SIGNAL = 1.7; EXPRESSED IN BRAIN, SIGNAL = 1.3; EXPRESSED IN PLACENTA, SIGNAL = 0.95; EXPRESSED IN HELA, SIGNAL = 1.8; EXPRESSED IN HBL100, SIGNAL = 1.7; EXPRESSED IN BT474, SIGNAL = 1.1; EXPRESSED IN LUNG, SIGNAL = 1.6; EXPRESSED IN BONE MARROW, SIGNAL =   1
tgatgatgacctgcaagaggtaaaggctcctaatttctgtccctgaggggttggggatggaggaatatgagagacaaatatattttggaccacatgtcagcaactggaaatcatcttaactgttcttggtctcttttacagtcatccagacgtccccagaggaaatctctgtatgagaggttagagagtagagataaggctgggcccatttggtggagttgattgcctgagtccttgggaggtttgggctgtaggagctgggctatagagggaatattgagtctccacagggtctgaggggagaaggtaaaacccccctttgatcttcagtctgcatctccccagctttgtgtcttctagtgatcgacttcgagaactaggaccagatggagaagaggcagagggcccaggggctggtgatggtccccctcgaagctttgactggggctatgaa

SEQ ID NO: 3226 - DNA, 454 bp, Homo sapiens
  MAP TO AL050331.11; EXPRESSED IN ADULT LIVER, SIGNAL = 0.99; EXPRESSED IN BRAIN, SIGNAL = 1.5; EXPRESSED IN PLACENTA, SIGNAL = 1.2; EXPRESSED IN BT474, SIGNAL = 1.2; EXPRESSED IN HEART, SIGNAL = 1.2; EXPRESSED IN HELA, SIGNAL = 1.3; EXPRESSED IN LUNG, SIGNAL = 1.3; EXPRESSED IN HBL100, SIGNAL = 0.98; EXPRESSED IN BONE MARROW, SIGNAL = 1.3; EXPRESSED IN FETAL LIVER, SIGNAL = 1.4
cttggatgagggatgagaggtgaggaagacagtagataggttacagaagttagcggcagtggtatctggagaaaacaaaacaagcatccccccacctcccatcacattagttgcccttttttacacagctaaaattaaattgagagggaaaagatgacagtggttgtgggggtaaacaccccatgcagaaagcctctacttttacacaactctgctttattggatcgtcaataaaatcaaacaggaaagacttcagacctgcaaagctgccaaaaatgtagtggtctctggattcttgacaactgaactgtgagagtcatgtggtatgtaaaacgtctggaaagaatcgttctgctgagggggcaagtgacaggtctgctggatttcagtaatccaagaaggtgccagagacaggttctcagtttcgttgggatgggttctgtgtggtgcttct

SEQ ID NO: 3227 - DNA, 385 bp, Homo sapiens
  MAP TO AC012545.1; EXPRESSED IN LUNG, SIGNAL =   5; EXPRESSED IN HEART, SIGNAL = 4.2; EXPRESSED IN FETAL LIVER, SIGNAL = 4.5; EXPRESSED IN ADULT LIVER, SIGNAL = 5.1; EXPRESSED IN BRAIN, SIGNAL =   4; EXPRESSED IN BONE MARROW, SIGNAL = 4.4; EXPRESSED IN PLACENTA, SIGNAL = 4.1; EXPRESSED IN HELA, SIGNAL = 4.9; EXPRESSED IN HBL100, SIGNAL = 3.6; EXPRESSED IN BT474, SIGNAL =   4
ttatgaggtaagcatgggcactcctgaaagggttttattggaatgatcaggaaactgaagaaatgccacaaacctgattctttattggcaccacgtccactttatatgtggcaccatctttgaccaccagctgcctctctgcattttcggtaacaatcggctgttctttatgatccgatgatattcgaagcccaacagccacatctccaaatgttccagcaagccgggttatgttaatttggatggatctaataaggttctgcccaataagtattgactggcgatccgaatacagggcaaatactccatgtgggtcatcatttgcataaacagagaaccatgtgatactcttctccagatccagttcggctcctccctctacaga

SEQ ID NO: 3228 - DNA, 406 bp, Homo sapiens
  MAP TO AC010807.2; EXPRESSED IN BONE MARROW, SIGNAL = 2.3; EXPRESSED IN LUNG, SIGNAL = 2.3; EXPRESSED IN BRAIN, SIGNAL = 2.1; EXPRESSED IN HELA, SIGNAL = 2.6; EXPRESSED IN PLACENTA, SIGNAL = 2.7; EXPRESSED IN HBL100, SIGNAL = 2.2; EXPRESSED IN HEART, SIGNAL = 2.1; EXPRESSED IN FETAL LIVER, SIGNAL = 2.4; EXPRESSED IN BT474, SIGNAL = 2.3; EXPRESSED IN ADULT LIVER, SIGNAL = 2.2
atggcagcactagcacagagttcagaaaaagagaaattaaagaatattattgtaaggcttgtatattgcatgtgaagtaataaaatataatttcaacatagacctctgataagttaaagatatatactacaatccctaaaacaattattaagataacaaatcaaggagttagggctaaaacaccaacaaaggagataaaatcattaaaaatattcaattgatccaaaagaaggcaggaaaaaaataggaaaaagaatagatgaaacaaatagggaacatttggaagatgattgacttaaacctaaccatgttaataatcgcattagatgtaaatggtctaaactccccacttacaaaacagattatcagactggacaaagaagtaagacccaactgtatgctgcct

SEQ ID NO: 3229 - DNA, 371 bp, Homo sapiens
  MAP TO AC011174.2; EXPRESSED IN BT474, SIGNAL = 1.2; EXPRESSED IN FETAL LIVER, SIGNAL =   2; EXPRESSED IN BONE MARROW, SIGNAL = 1.5; EXPRESSED IN HELA, SIGNAL = 1.4; EXPRESSED IN ADULT LIVER, SIGNAL = 1.2; EXPRESSED IN BRAIN, SIGNAL = 1.3; EXPRESSED IN LUNG, SIGNAL = 1.1; EXPRESSED IN PLACENTA, SIGNAL = 1.3; EXPRESSED IN HEART, SIGNAL = 1.2; EXPRESSED IN HBL100, SIGNAL = 1.4
ttgtaggtattctgctcaagaaatgacttccaaagggaagttagcataaattattgagtagatgccaccattttgcatgccaaaatcgaaggaggccttaacttgagaaacaaacatcatgatctgagacaacagtgggccacaagtatttatcttctgcagcttaatctactcacatattgatgtggggttgctctaccaccaacctacataaacgaattctgattgtctaatcaacaggttgaaaatatgcatgagaatgaagggtaagtacagaagcttaaggaaagaagaaggagaaaaaggaggagaaggaagaagaactagtagaaatagcagtaaaagtagtagcagtggtggtagtggtggtg

SEQ ID NO: 3230 - DNA, 456 bp, Homo sapiens
  MAP TO AC009155.2; EXPRESSED IN BT474, SIGNAL = 1.7; EXPRESSED IN ADULT LIVER, SIGNAL = 1.5; EXPRESSED IN BRAIN, SIGNAL = 1.6; EXPRESSED IN LUNG, SIGNAL =   2; EXPRESSED IN HEART, SIGNAL = 1.8; EXPRESSED IN FETAL LIVER, SIGNAL = 1.5; EXPRESSED IN BONE MARROW, SIGNAL = 1.5; EXPRESSED IN PLACENTA, SIGNAL = 1.9; EXPRESSED IN HELA, SIGNAL = 2.3; EXPRESSED IN HBL100, SIGNAL = 1.9
cagggacatccagtagcaggatgtcctaacaaaatcctaacaaaatctcactattgtaataacttgtgccttagtaagctgtgccaagatttaggaagagaggtacaaagctaacgatcagcttttattctgtgagtcattttacatctgtggctttgatgaacaacttgacattgctgtttttcaggttttatgagaaagctgaggagagtaagcttcctgagatattgaaggagtgcatgaagttatttcgctctgaggcactattcttgctgctctccaacttcacaggcctgaagcttcatttcttggccccttcggaagaagatgagatgaatgataaaaaagaggcagaaaccactgatatcactgaagaagggactagccatagtcctcctgagccagagaataatcagatggccatcagcaacaacagccaacagagcaatgagcaga

SEQ ID NO: 3231 - DNA, 414 bp, Homo sapiens
  MAP TO AC007498.2; EXPRESSED IN FETAL LIVER, SIGNAL = 2.5; EXPRESSED IN BT474, SIGNAL =   2; EXPRESSED IN ADULT LIVER, SIGNAL = 2.2; EXPRESSED IN BRAIN, SIGNAL = 1.9; EXPRESSED IN LUNG, SIGNAL = 2.6; EXPRESSED IN BONE MARROW, SIGNAL = 2.1; EXPRESSED IN PLACENTA, SIGNAL = 2.2; EXPRESSED IN HEART, SIGNAL = 1.8; EXPRESSED IN HELA, SIGNAL = 2.7; EXPRESSED IN HBL100, SIGNAL = 2.2
tcacatgtggaatagcacccctgcacgacggggtcggcggctctctgtggatggccccatgacatttctaggaggcaatcccgtcaagttcccagaaatgttccagaaggatttggcggcaagatcaggaagtggggatccttccagcttctggaatcagtatgcagcagcgctctccaacgggctggcgatgaaggccaacgagatctccgtcattcagaacggtggcatccctccaattcctggaagcctcggcagtgggaacagctcacctattagtgggctgacgggaaacctggagaggctccagaactcagagcccaatgctcccctggccggcctggagaaaatggcaagcagtgagaacggaaccaacttccgcttcacccgcttcgtggaggacagcatggagat

SEQ ID NO: 3232 - DNA, 365 bp, Homo sapiens
  MAP TO AC011208.2; EXPRESSED IN BONE MARROW, SIGNAL = 4.9; EXPRESSED IN LUNG, SIGNAL = 5.4; EXPRESSED IN HBL100, SIGNAL = 9.2; EXPRESSED IN HELA, SIGNAL = 5.4; EXPRESSED IN PLACENTA, SIGNAL = 5.2; EXPRESSED IN HEART, SIGNAL = 4.9; EXPRESSED IN ADULT LIVER, SIGNAL = 6.1; EXPRESSED IN BT474, SIGNAL =   5; EXPRESSED IN FETAL LIVER, SIGNAL = 5.1; EXPRESSED IN BRAIN, SIGNAL = 2.3
  unsure 167
acccgacctcactcactcacagccatggccaatctctgactttgccatcagcaacaatgccagaccctccattgtctcagcacctgcatcacattctccgaccaccacttcccatactttcagctccatccctttagcagccctgttccaaccgtacttgcaccctncccaggttctctaatctgttggttctacatctgaagcctcctttccttaactacttcgtttaaccctctgcttactcactataatcacttccacccaaacactctcaactcccttgccccgacctgtttcatcgtcctcaccggagaataccacaatctgagataatccacaagcgttgcttgcatttccacagttca

SEQ ID NO: 3233 - DNA, 460 bp, Homo sapiens
  MAP TO AL050309.4; EXPRESSED IN ADULT LIVER, SIGNAL = 0.8; EXPRESSED IN HEART, SIGNAL = 6.5; EXPRESSED IN BONE MARROW, SIGNAL = 0.65; EXPRESSED IN HBL100, SIGNAL = 0.74; EXPRESSED IN FETAL LIVER, SIGNAL =   1; EXPRESSED IN HELA, SIGNAL = 0.78; EXPRESSED IN BRAIN, SIGNAL = 1.1; EXPRESSED IN PLACENTA, SIGNAL = 0.81; EXPRESSED IN BT474, SIGNAL = 0.78; EXPRESSED IN LUNG, SIGNAL = 1.1
tgaaagacaaagctgttttaaacttacagagagaaacagtacataactacactttatgggaaatttgaagatttttcaaaagaaaaattgatgatctacagttagaacatagctctactatagcatgcatgtacatgcacatgtgtgcacacaaactcatatactttcactggaaaggcagtctccctatatttcttgtcctcaaattcttactcttgtgtctgatcattagttccacctatacatatgtgcaaatgtacacacacacacacacacacacatacacaaagacagacttgaagacaaaaagtactcactcttgctgtagtccctgcagactctgcaaggctgaggatccactctcaattgtactctcctcactgtcacttggaatttccagtggagacatggaggtggggtcaactttcactaaaagcaaagaaagggagcagtgtgagct

SEQ ID NO: 3234 - DNA, 390 bp, Homo sapiens
  MAP TO AC007524.1; EXPRESSED IN BONE MARROW, SIGNAL = 2.3; EXPRESSED IN LUNG, SIGNAL = 2.8; EXPRESSED IN PLACENTA, SIGNAL = 2.4; EXPRESSED IN HELA, SIGNAL = 2.4; EXPRESSED IN HBL100, SIGNAL = 2.2; EXPRESSED IN HEART, SIGNAL = 2.1; EXPRESSED IN BT474, SIGNAL = 1.9; EXPRESSED IN FETAL LIVER, SIGNAL = 2.5; EXPRESSED IN ADULT LIVER, SIGNAL = 2.4; EXPRESSED IN BRAIN, SIGNAL = 2.5
  unsure 368
tgaaagtggagagaatggggagtgagtgctaactgggtgatgaaaatgtcctacaagtagattatagtgattattgtactactctgtgaatatactaaaacccactgaattgtatactttaaatgggtaaattttatgtatgtgaattacagctcaataaagccattgattacaggagaatatatatatttttccatctccaggcccagcctccgttatcagcaatgatgatgactctgccagcccactccatcacatctccaatgggagtaacactccatcttcttcggaaggtggcccagatgctgtcattattggaatgaccaagatccctgtcattgaaaatccccagtactttggcatcaccnaacagtcagctcaagccagaca

SEQ ID NO: 3235 - DNA, 405 bp, Homo sapiens
  MAP TO AC012069.2; EXPRESSED IN HEART, SIGNAL = 5.1; EXPRESSED IN ADULT LIVER, SIGNAL = 2.4; EXPRESSED IN FETAL LIVER, SIGNAL = 6.1; EXPRESSED IN LUNG, SIGNAL = 8.5; EXPRESSED IN BRAIN, SIGNAL = 2.6; EXPRESSED IN HBL100, SIGNAL = 9.7; EXPRESSED IN HELA, SIGNAL =  13; EXPRESSED IN PLACENTA, SIGNAL = 7.6; EXPRESSED IN BT474, SIGNAL = 8.4; EXPRESSED IN BONE MARROW, SIGNAL = 6.1
tgcatgcagtatgttctcagcaattcttgttaattaattaaatttacatatatgagagtaccagcttagtaatcctactgtctggtttgaatctcagctaatcgcggtgtgactttagccaaactgtctgagttaaatttttttgactgttaaatgagttcattctacctttctggcggtgatgacctacctacgagaacatgcttcttgcaaaagatctctttcatccctctccagaagaggagaaaaggaaacacaagaagaaatacctggtgcagagccccagttcctacttcagggatgtgaaatgcccaggacgctataaaatcaccacggtctttagctatgcacaaacagtagttttgtgtgttggctgctccactgtcctccacttgcctacaggag

SEQ ID NO: 3236 - DNA, 415 bp, Homo sapiens
  MAP TO AC010819.2; EXPRESSED IN BRAIN, SIGNAL = 2.4; EXPRESSED IN HELA, SIGNAL =   1; EXPRESSED IN HBL100, SIGNAL = 1.5; EXPRESSED IN HEART, SIGNAL =   4; EXPRESSED IN FETAL LIVER, SIGNAL = 1.1; EXPRESSED IN LUNG, SIGNAL = 1.1; EXPRESSED IN BONE MARROW, SIGNAL = 1.7; EXPRESSED IN PLACENTA, SIGNAL =   1; EXPRESSED IN ADULT LIVER, SIGNAL =   1; EXPRESSED IN BT474, SIGNAL = 1.6
aggcttcattggctagaggggttttctttattaaccatattcctgatgagtaaatgaatggagtgtagaaaaattacaggcaacccttgtccgagctttaacaaatagttaaatttaggatgaacattaaagaataagaataattttgagagacagaaatggagataaagtgagtgacctaataagatcactcttttgttgtccattgcagaacattcttgacctccagattaaaaagaaggagaaagagaaggagaaggagaaggaggagcaggaggaggaggaggaggaggaggaagaggaggaagaggaggagaaggagaagtggaagaggaagaggagaaggaagagaaggaagaggaggaggagaaacctgaaagactaattaataccatggaaagcactttggaattgc

SEQ ID NO: 3237 - DNA, 1941 bp, Homo sapiens
  MAP TO AC007114.7; EXPRESSED IN BRAIN, SIGNAL = 2.1; EXPRESSED IN BONE MARROW, SIGNAL = 2.4; EXPRESSED IN LUNG, SIGNAL =   2; EXPRESSED IN PLACENTA, SIGNAL = 1.3; EXPRESSED IN FETAL LIVER, SIGNAL = 2.3; EXPRESSED IN ADULT LIVER, SIGNAL = 1.8; EXPRESSED IN BT474, SIGNAL = 2.5; EXPRESSED IN HEART, SIGNAL = 3.5; EXPRESSED IN HELA, SIGNAL = 3.5; EXPRESSED IN HBL100, SIGNAL = 2.9
ggaaccaagttacagctcccatgacttggggtttcagggcaatctaactcctcagttacccaccagctctacgccgtgtccagacctctgcaggttgcgataaagagctgaagagcactatgactttgctgcacaagtagcagaagggagaggcagactggcagcctttctccaagaaatactgggagcgccccatcctctaaacgaacccgagaccctcctacctcctgaatgatctgcttccgcatccatggtccatccatcctcagcccccaagtctgacaactcccccttcagcaccccattgctgaagggcacagtactttctggcagtggcggggtgatggccttgtccctggggctcgagctggtctctgtgcaagagtcttcaagccctgaagtgctgaaagaatctgagcagtgtcctggagaagccaccaaagggacactttggctgctgtctgacatgcaggtgacacaggtggcatcttccaccaggatgcctgcccggtccggcaactcttcactgggggtggtcagtgccaggcaggaggccagggagatgtggtgtgcagagatatttggcttactgtccttggtggggctggacagaaggctcttcaggcagctcacgtaggtctttggtggtggtgagccctctgctggtaggcctggcaaggggaggccagcatccggcggggcaacagctgcctctgctgtggcaggctccgcagtgtctgggcccaagacagttttctggtgaactgggacacagctctcttccttctgcccttggagctgactggcctgacacacacgacctgcaaccttgccaaccgtggtggccagcacctgttcggttgcttctgagatcacttgggagattatctggaaggcagcccgcttaatctcctcatttctatccaagccctcctcatttctatccaagctctcctcatttctatccaagccctcctcatttctatccaagccctcctcatttctatccaagctctcctcattgcccagttctccctcgacacctctatcctgggctttggcgtctgcgactgggggtgctggcgccgcatcgtcctttgccagctctgtgtgagccgactcgatgaacctacttggcaacttctctgctacatactcttcctcctgcactggccccaccacctgggatgagctgctcttccccttatcttcttccccctctaaagaggccaggctggggcccttgctgttctccaattccaagacatgctcccgagacaacagagcttcttcaagcaccttttcccccaacacggcatcaccagtcccttcggccccacctgtctctcttgccctctccccagagctacgcttctctgcggggactacggggtagcctggctggaccttccttggcaccctgctgaagggggaatcttgcttacacacctcagctgatttgctggagaatagtacaccctttggggatgaaagggggcactctagaggaatcgatttggcttcaccacctgtcagggctagctccagctttgtactgtcatctctgcgtgttcctggtcgcaatctcatgtctgtggtgttaggaagaatgcccgaggactctgatcttcggcaaggtgggtgtgtctggagcaatgctgggggctctgcaggcagcttgctcacggtggacagttccttttctggaggctctgtgacactggggggtgtggacactactttgggacagacgtcttccacggggagaggttccttgatggcagggtcagccctcagctgcacagcaccagcctccacctgctgctcatcatggctgctgacatggccttttttacgagagaaaaaccaccaccagccgaggagcgccagcatcccaggcaatgccaaggggaagagcgaacggaactggattgccatcct

SEQ ID NO: 3238 - DNA, 450 bp, Homo sapiens
  MAP TO AL035409.15; EXPRESSED IN FETAL LIVER, SIGNAL = 0.78; EXPRESSED IN LUNG, SIGNAL = 0.79; EXPRESSED IN HELA, SIGNAL = 0.6; EXPRESSED IN PLACENTA, SIGNAL = 0.71; EXPRESSED IN BT474, SIGNAL = 0.89; EXPRESSED IN BONE MARROW, SIGNAL = 0.72; EXPRESSED IN HBL100, SIGNAL = 0.74; EXPRESSED IN ADULT LIVER, SIGNAL = 0.7; EXPRESSED IN BRAIN, SIGNAL = 1.4; EXPRESSED IN HEART, SIGNAL = 0.88
cctttcccttcacattctggtagaggtgaaaccattttggatctgcttcatggaaacaaaatgtttttttgtttgtttgtttcatttcattttcaagataaatgtatacttaatttttatagaccttcaataaccaccagttggattcccagcagctttagaaagctgtcaagtttaaagcaggttataacctgtctcattttagccttccttttgtcgttgaaccacagaagtcagagcccaagctgttcttccgcctttctgcagatggcatagcatttgtcaatattaaatttaatttgtgctaagagcagttcactaacagcgaaaacacaaagcttgctgaactttacttcacctgtgtgcttagtacagccaggattagcaaatgtaatgaattcagcaacattatcctactgaaatctaggtcagctctgttgattaaaaaca

SEQ ID NO: 3239 - DNA, 474 bp, Homo sapiens
  MAP TO AC005046.2; EXPRESSED IN HBL100, SIGNAL = 0.83; EXPRESSED IN FETAL LIVER, SIGNAL = 0.96; EXPRESSED IN LUNG, SIGNAL = 1.2; EXPRESSED IN HELA, SIGNAL = 1.5; EXPRESSED IN ADULT LIVER, SIGNAL = 1.1; EXPRESSED IN BRAIN, SIGNAL = 0.75; EXPRESSED IN BONE MARROW, SIGNAL = 0.68; EXPRESSED IN PLACENTA, SIGNAL = 1.2; EXPRESSED IN BT474, SIGNAL = 0.8; EXPRESSED IN HEART, SIGNAL = 1.4
agacaactttttaatccttgttgactaaaatatctactttagcaatagcctgaagcaacaaattccaaaaattcatcgtctatgaaatgagtagtctgtacattctccgtgtccaagaaactcttcaaagagaaaatcaacaatcagctacctgtatggtgcaaagggctaaatgtaactctgtaaaactaaaacccccagaaaatgtaaaaggcttaaggtaagactagcttcactttgcattttattaccagccacataaaggagaaaggtgcacagagggcttacttaccattccttccacttcttcattgaatccatccacaggggcacattcgctggcatgaccatagcagaagcaatttcctcgaaccaccatatcataaactgcataataatacttttctctgatttccatcctggaatccagaaggttatctcccaaagtatgcagtttcacaaacttgattctca

SEQ ID NO: 3240 - DNA, 467 bp, Homo sapiens
  MAP TO AC009304.1; EXPRESSED IN HBL100, SIGNAL = 0.75; EXPRESSED IN FETAL LIVER, SIGNAL = 0.86; EXPRESSED IN LUNG, SIGNAL = 0.89; EXPRESSED IN HELA, SIGNAL = 0.65; EXPRESSED IN BRAIN, SIGNAL = 1.1; EXPRESSED IN PLACENTA, SIGNAL = 0.84; EXPRESSED IN BT474, SIGNAL = 0.99; EXPRESSED IN BONE MARROW, SIGNAL = 0.94; EXPRESSED IN ADULT LIVER, SIGNAL = 0.97; EXPRESSED IN HEART, SIGNAL = 1.1
ttggctggatttatggcttcctagctgcaaggcagggctgggaaatcgggcacctggctctccaactagattgaaagtatcttgtttctcaggcataaggattttttcatgttgtggttcaatgaagcattgggtggcttatgcaagaagtgcaagataacagaaaaagcaaagaaaaaagtagaggtttgaatatgggctccatcatttactgactctgtattctaaaagtaattaaccttgctgaatgttattttcttgctagaaaagggaggtactaaatgcctgcctagcagggctgttgtgaagattgaatattatagtgtagttacagttcctggccctgaagagatgcccccaaagagtcattattctattgtggtgtgctttgttctgtctgatgagtatgtggcaagtagacacaaagtggaagcagcagaactttgaggtgaagagcataggcccta

SEQ ID NO: 3241 - DNA, 393 bp, Homo sapiens
  MAP TO AC012443.1; EXPRESSED IN BONE MARROW, SIGNAL = 2.4; EXPRESSED IN LUNG, SIGNAL = 3.2; EXPRESSED IN PLACENTA, SIGNAL = 2.7; EXPRESSED IN HBL100, SIGNAL = 2.5; EXPRESSED IN HELA, SIGNAL = 3.5; EXPRESSED IN HEART, SIGNAL = 2.6; EXPRESSED IN FETAL LIVER, SIGNAL = 2.8; EXPRESSED IN BT474, SIGNAL = 2.7; EXPRESSED IN ADULT LIVER, SIGNAL = 2.7; EXPRESSED IN BRAIN, SIGNAL = 2.2
ttataaatcaggccttgggccacacataaagtacactaacgatagctgatgagcttaaaaaaaaaattgcaaaaaatccttatagtgttttaagaaagtttacaaatttgtgttgggccacattcaaagcggtcctgggccacaggttggacaagctcgttttaaacaatgcgtgattcctaaattaacaataaattatttcagctaatagttatgatactattataactgattaaatatgattttcttaatagttactagaaaaggcagaagcccgtgaacgtgaaagagaaaaagaagaggctcggaagatgaaacgaaaagaatctgcatttaagagtatgttaaaacaagctgctcctccgatagaattggatgctgtctgggaagatg

SEQ ID NO: 3242 - DNA, 474 bp, Homo sapiens
  MAP TO AJ239325.2; EXPRESSED IN FETAL LIVER, SIGNAL =   1; EXPRESSED IN BT474, SIGNAL = 1.1; EXPRESSED IN HBL100, SIGNAL = 1.2; EXPRESSED IN HELA, SIGNAL = 0.94; EXPRESSED IN HEART, SIGNAL = 1.4
tgccccaaacatacagacagaccgaaagaatcagcacacacggagaaaacagttcaaaccctgttggtcaccaaagcccaagttcctgtggcttcagcgtggctgccaggacgcagagcagttcttgcagagctgcggagacatgatgcagcccaggggcaaaaccacagctgtaatctactctggggaatcgccccaagaaacagccaggggcatcccttgctcaaggacattgtcaggtacaggttagctggaaagctgctgagacctcgggtgcctgagggaacaatcccagacctgctgggtatcagcatggtaacccgtcgagcctgcctcacctctcctgatggaagggacgctccgtgcactcgagcctgcctcacctctcctgacggaagtgacactcctcacgtccagctccagcttctgcaccaaggcgctggggtctatcttggtcctggcaaagatgttggt

SEQ ID NO: 3243 - DNA, 452 bp, Homo sapiens
  MAP TO AC011235.2; EXPRESSED IN FETAL LIVER, SIGNAL = 1.2; EXPRESSED IN BONE MARROW, SIGNAL = 1.1; EXPRESSED IN PLACENTA, SIGNAL = 1.4; EXPRESSED IN ADULT LIVER, SIGNAL = 1.1; EXPRESSED IN BT474, SIGNAL = 0.97; EXPRESSED IN BRAIN, SIGNAL =   1; EXPRESSED IN LUNG, SIGNAL =   1; EXPRESSED IN HEART, SIGNAL =   1; EXPRESSED IN HELA, SIGNAL = 1.3; EXPRESSED IN HBL100, SIGNAL =   1
aggggaagtaaggggaaaagttaaggtcaagagaggtaactgacaatgagaacatcatgcgtgacaaaaagaaaaagtaccaaaatgcaaagagatgtgtttagaggaagtggctcacttctgtcttctgcctgtcctgggcttgaatcccagtcccaccttctgctagctatgtgatcttgcatgacttccttgacttctctgtgcctcaattcaattatagagcctatcccctagaattgttttgaagattaaataagttattatataatggcaagcacatagtaggcattaggtgagcattagcttaccactgctgccactgccaccaccaccaccatcatcatcatcatcatcatcatcaattatcatgaccatggaatttctagatgtaggctcaggaatgactgaggtggtagacagaatttaggcctctgtcatgctttgaagga

SEQ ID NO: 3244 - DNA, 455 bp, Homo sapiens
  MAP TO AC012073.1; EXPRESSED IN BONE MARROW, SIGNAL = 1.1; EXPRESSED IN HEART, SIGNAL = 1.1; EXPRESSED IN ADULT LIVER, SIGNAL =   1; EXPRESSED IN BRAIN, SIGNAL = 1.1; EXPRESSED IN HELA, SIGNAL =   1; EXPRESSED IN HBL100, SIGNAL = 1.3; EXPRESSED IN BT474, SIGNAL = 1.1; EXPRESSED IN FETAL LIVER, SIGNAL = 1.2; EXPRESSED IN LUNG, SIGNAL = 0.95
aagagggtttcgtgaaggtggtgatcagtaggagcatatagtgctgggaggtgagataagggagcttgaaaaatgtcctttgggttcagcaacatggatatcactgttgatcttagagtggttttgtaaaataatgggaacagaagtgagtttcaagtgggttgaggtatgagtcacaggcaagaaaatggagaaagtgagtacaagttgagcactgaagatccaaaatctgaaatactccaaaatctgaagctttttgagcactgacatgatggtcaaaggaaatgcttatttccagttttggattttcagatatgggatgttcagccagtaagtgtaatgcaaatactcccaattccgaaatctgaaacacctctagtcccaaaacgttcggatactcaacttgcatggacaactcttttaagtagttttcctggaaaggaaaggggagaaaa

SEQ ID NO: 3245 - DNA, 438 bp, Homo sapiens
  MAP TO AC011242.2; EXPRESSED IN HBL100, SIGNAL = 1.6; EXPRESSED IN HEART, SIGNAL = 1.4; EXPRESSED IN ADULT LIVER, SIGNAL = 1.5; EXPRESSED IN BT474, SIGNAL = 1.4; EXPRESSED IN FETAL LIVER, SIGNAL = 1.5; EXPRESSED IN BONE MARROW, SIGNAL = 1.7; EXPRESSED IN PLACENTA, SIGNAL = 1.3; EXPRESSED IN HELA, SIGNAL = 1.4; EXPRESSED IN BRAIN, SIGNAL = 1.4; EXPRESSED IN LUNG, SIGNAL = 1.3
tgacatcttcaagcccacagctctacactccaattcctttattaaatacaaagcctagagatatattttcaaaataattaagaaactgggttctctttatggaatactgtctcattctacatcattgcaattgtcagcagtttagaggcaaactataattatagtgcctgtaatttttaaggtgctaattgtagcaaaacgaatgtaaagaattattgaagtatattattttacgtttaattcagtgtagaaattagtatcatattatttcaatatattactccatataacatggaagttacctgagataaaagagctgccatttctaatgccagatctttgttcagaggaaaaagtccatttatgatttgatcatttgtctgatacattaacagcaacttttctctatcagtctctccacgagcttgcactgagaaa

SEQ ID NO: 3246 - DNA, 443 bp, Homo sapiens
  MAP TO AP000115.1; EXPRESSED IN HBL100, SIGNAL = 2.1; EXPRESSED IN LUNG, SIGNAL = 0.82; EXPRESSED IN HELA, SIGNAL = 1.3; EXPRESSED IN ADULT LIVER, SIGNAL =   1; EXPRESSED IN BRAIN, SIGNAL = 0.77; EXPRESSED IN HEART, SIGNAL = 0.84; EXPRESSED IN PLACENTA, SIGNAL = 0.72; EXPRESSED IN BT474, SIGNAL = 0.9; EXPRESSED IN BONE MARROW, SIGNAL = 0.99; EXPRESSED IN FETAL LIVER, SIGNAL = 1.1
attcttgcctgcaacactgattaatttgcaagacaagtctctaaatgtatgagcagttactcaatctgacttaaaaaaaaaaaaggtatgaaagcaccataagcaccatctgggaaagacaaaacttcctgtctttgtatctttaaatttccaaagaaaaacttaatggaaggcagcatctgctattttgcaaaggagagcatttcacacttaatttgttactttaacacataactattttatttcagagttacctgtatacttttaggcaaagtaacttctgttgccctacaatgctggacaagaccttgagcttcttcctgtgctttcaaatgatctgcccaggtaaagggttgagaagaggtgaaaaggagtcgcgttttaatactccagtccacaggtaactcagtactttttgaggacggaatatcaggctcggagaa

SEQ ID NO: 3247 - DNA, 577 bp, Homo sapiens
  MAP TO AL078622.6; EXPRESSED IN HBL100, SIGNAL = 0.96; EXPRESSED IN FETAL LIVER, SIGNAL = 1.1; EXPRESSED IN LUNG, SIGNAL = 0.98; EXPRESSED IN HELA, SIGNAL = 0.95; EXPRESSED IN ADULT LIVER, SIGNAL = 1.4; EXPRESSED IN BRAIN, SIGNAL = 1.1; EXPRESSED IN BT474, SIGNAL = 0.97; EXPRESSED IN PLACENTA, SIGNAL = 1.2; EXPRESSED IN HEART, SIGNAL =   1; EXPRESSED IN BONE MARROW, SIGNAL = 1.1
tcacgtccttaagcccactcacctctctcttctcggacctggtgtccctggagcctggggcctggagtcgggagcctctccctgcaggcctgatttgggatgttcatgtccccgagcccactcacctgtctcttctcagacctcctgtccctgcggtctggagtctggagcccctccctgcagacctgatttgggatgttcacgtccccaagcccactcacctgtctcatcttggacctcctgtccctggggcctggagtccggagcccctccctgcagacctgatttgggatgttcacgtccccgagcccactcacctgtctcttctcggaactcctgtccctggggccaggagtccgcagcccctccctgcagacctgatttgggatgttcacgtccccgagcccactcacctgtctcttctcggacctcctgtccctggggcctggagtccggagcccctccctgcagacctgatttgggatgttcacgtccttgagcccacgcacgtgtctctgctcggacctcctgtccctggggtctggagtccggagcccctccctgcagacctgatttg

SEQ ID NO: 3248 - DNA, 466 bp, Homo sapiens
  MAP TO AC012005.2; EXPRESSED IN BONE MARROW, SIGNAL = 2.8; EXPRESSED IN BRAIN, SIGNAL =   2; EXPRESSED IN LUNG, SIGNAL = 2.4; EXPRESSED IN PLACENTA, SIGNAL = 2.4; EXPRESSED IN HBL100, SIGNAL = 2.2; EXPRESSED IN HELA, SIGNAL = 2.5; EXPRESSED IN HEART, SIGNAL = 1.8; EXPRESSED IN ADULT LIVER, SIGNAL = 2.3; EXPRESSED IN BT474, SIGNAL = 2.3; EXPRESSED IN FETAL LIVER, SIGNAL = 1.7
ccattgctacccccacatactgtccatgttctcaggttgtactgtgagtcctgggatcttctttggggtcgcctacctgcctgtggtagttatggagacccccaggtgttgaggcaaggctagggtgtccccttccagccaggctgtcaaggccccaactctggggcagaggcagtggcagggcagccagggttgcgccagagcctaagcagggtgaggtggggtcaggcagggctgggagtcagggcaggggcagcagcagtggacccgctatgcacacaccttcttttccaaggtttgtgtgcagaacatcctgcccttgctgccccagcagcttcagttggcacctgccccagtccagcctctgggacccatgcagcagctcccagcggccctgcagccaccaccagcatctgtttcacctgcagttgaagatccatgaggtgcccagaagatcatgcagtca

SEQ ID NO: 3249 - DNA, 352 bp, Homo sapiens
  MAP TO AC012079.2; EXPRESSED IN ADULT LIVER, SIGNAL = 4.2; EXPRESSED IN FETAL LIVER, SIGNAL = 3.4; EXPRESSED IN LUNG, SIGNAL = 3.2; EXPRESSED IN HELA, SIGNAL = 2.7; EXPRESSED IN HEART, SIGNAL = 2.9; EXPRESSED IN PLACENTA, SIGNAL = 3.6; EXPRESSED IN BT474, SIGNAL = 3.4; EXPRESSED IN BRAIN, SIGNAL = 2.6; EXPRESSED IN BONE MARROW, SIGNAL = 3.1; EXPRESSED IN HBL100, SIGNAL = 3.3
atgttgtctgtcccctctgcagccagagtggacgctcgagcaaccccacaggtaattttcagctactgtaggattccagccgccgagagcctggttaccagcctcctgcttctgatattaatctcttgctatttcctggcccgtgattggcatgatgagcatattcatctctcttcatctgtccctgacagggatggctatgtttatgcccacagggtgcatcattgagataaccatcattaagcaaggccttgatgatgaactgttcagactcattaaatcctctaatgaggtggagcctgttatgatgaatggacaggcagcctgcatgcctccacgccagatactctcc

SEQ ID NO: 3250 - DNA, 408 bp, Homo sapiens
  MAP TO AC011274.2; EXPRESSED IN LUNG, SIGNAL = 2.2; EXPRESSED IN FETAL LIVER, SIGNAL =   2; EXPRESSED IN ADULT LIVER, SIGNAL = 2.4; EXPRESSED IN BT474, SIGNAL = 1.8; EXPRESSED IN BRAIN, SIGNAL = 2.1; EXPRESSED IN BONE MARROW, SIGNAL = 2.6; EXPRESSED IN PLACENTA, SIGNAL =   2; EXPRESSED IN HEART, SIGNAL = 1.9; EXPRESSED IN HELA, SIGNAL = 2.1; EXPRESSED IN HBL100, SIGNAL =   2
ttttcttttctaaaatgcttaaatgctaattatcttaaatcataataactttacaatagctttcaacttgtgaataaaatataatttaatttaaactttctgtactagtcaggatactccagagaaacagaacaaatatatagatagatatatcatataaatacagatataatatagatataggtaccatatagatatacatgtagatatataaaaagagatttaatataagggattggcttacatggttaagggggctgaacagttctacaatcttccgtctgcaagctggatgaccaggaaagtagggcctgagaaccaggggaaacgatggtgtaagtcccaatctgagtctaaggacctgagaacaaggatcattggtgtccaagggcaggagaagatggaagt

SEQ ID NO: 3251 - DNA, 488 bp, Homo sapiens
  MAP TO AC011451.2; EXPRESSED IN ADULT LIVER, SIGNAL = 1.7; EXPRESSED IN FETAL LIVER, SIGNAL = 1.6; EXPRESSED IN LUNG, SIGNAL = 5.8; EXPRESSED IN BRAIN, SIGNAL = 2.5; EXPRESSED IN HEART, SIGNAL = 1.9; EXPRESSED IN HELA, SIGNAL = 1.7; EXPRESSED IN HBL100, SIGNAL = 1.5; EXPRESSED IN PLACENTA, SIGNAL = 1.9; EXPRESSED IN BT474, SIGNAL = 1.7; EXPRESSED IN BONE MARROW, SIGNAL = 1.6
tagaaacccgatcgatgagcatcctgtatccgtggtagctgagaacctggatgggaagccctagccttagccccatccctaggccttgtcacttaagccccgcccagccctcgtctccgccccctaggaatttctaccaagccccgctcccaatctggttccacctttagccccgccccttggagtatttaaaaggccacgcccctaggtctagccccagttccgcccctcaggccgagtcatgcaagtccagttcagggttctgtttcttctctgtttactccaaatcatgaagaaactaggatttctcatccacttgcggctggaaccagccttggcgctcctttgcatcccgctcctacctgctccacccccttcacctcaagtcccgcttcccaggccccgccccatacgccatttgcagcgccgaaagaggaatcagaagtgtgcttctgcgcatgcgcgagtcgacagccttgtcaccctac

SEQ ID NO: 3252 - DNA, 1986 bp, Homo sapiens
  MAP TO AL034380.22; EXPRESSED IN BRAIN, SIGNAL = 2.3; EXPRESSED IN BONE MARROW, SIGNAL =   3; EXPRESSED IN LUNG, SIGNAL = 2.9; EXPRESSED IN PLACENTA, SIGNAL = 3.6; EXPRESSED IN FETAL LIVER, SIGNAL = 2.6; EXPRESSED IN ADULT LIVER, SIGNAL = 1.8; EXPRESSED IN BT474, SIGNAL = 3.1; EXPRESSED IN HEART, SIGNAL =   2; EXPRESSED IN HELA, SIGNAL = 3.5; EXPRESSED IN HBL100, SIGNAL = 2.9
ccctcatggcttctaagctgtctgtctaggacttcattgcatggcaatgaaggagaacctttagttagcttatttcttccttttccaaagttctttggttctattttagtcaacactggaccagattcaacctcatccagaatagtaaggtggagggaacaatggacaagatggaaaggggcagattaggcaaccgaatgaggaagatctccttaccaatgtctttcattgtgagccgcctcctctgcttcaacacaggctgtgtggcttcaacagagccaggtgggaaggtgatatcccgccgaatcatggggggctgcacaggggcaggtgctatgtgcgaggcaggtactgggggacctgccttctgcattttcatcccagagtgcaggaatggagacttgctaggagaggtgcggttctccattggccggggcaggggagcagggctggatacctgaggaatgtgattctgcatgcttggtgggggctggtagttagatggagggggccttgtcatggggggcacaggggcagagggaccatatgggggctggcgtgtgccatgggaaggccacgagccttcgtggttggccctctgatctgtgtgcagcatttcatctgttcggttcacgccatgataggcggggccctggggggcagagcccgtgctctgcctgttggcataattataggtcatgtcattacgcccctgccacatggtgccttgctgagcaacctcagctgatgcctgtatggggccgcccatcatttgtggtggcatgttttgctgggcattggtgccagggggtgcagagacacggtctcggccaaactggaatggaaattggttctgggggccgcctgctggtcggcgctcagtagcagctgtggcagtggcaggataggcattgccatactggttgtatacatcttgctgaggggaaggctgggcagcttgttgctggctggcaggctggggctgggctgggggcaactgctgctgctgaggctgcccctgcccagtgctgtatggcacgctgtacatctccccttcgtgccgcttggcaggagggccatatgtgccatccattggccgcttgtaattctaaggcagagacaagcagaggggaagttaatactctgcactcagggacataaagcccacagatgccaagatggctacaaccagatgcttggtggacacagactccaagaaaacatgggaatcaccttaacaaattgtcttttgaagttgtttccaaaagcaaccaccactctttcttcccttcccttgcttaagtagaaaaatatacaaaacctaaaaatcaaaataaggtctatttctagccccttccaactccaaatagagaagagattgaggacgtggctcttcaggcaggactggccagtcaggtgagagaagaatgccaaaatatctaaagtgagcttcttagacttcaacacgttagattagtttactaactagttttcaaggcgaacctgcatgccagtccattcccagctaccctcctcacctgctgttgctgttgatacattgtagtctgctggctggggaaggggctgccagaaggggtgccttgggtggagaactgattgccataggaatcatgtctataggaggcaaagaaacacaggattagggtgggcagtggcgaagcctgatccatagcagcaccgagaccaggctttactcaccgttgctgctgctgctgctgctgctgcggggggtagcggctaggagaatacatccccgagtctgggttggaaggcatgagattcggctgtggggccccagtgctcatgtttccctcaggccctattccaggctccgtcctaaacaaaattggagaggcagattgagcccactatagcttcagggtgctgggggagtggacaggagctggggtcatgcttacctcactctgtcataaggacctccatagggatagtgctgtcgtggtc

SEQ ID NO: 3253 - DNA, 479 bp, Homo sapiens
  MAP TO AC008101.6; EXPRESSED IN FETAL LIVER, SIGNAL = 1.7; EXPRESSED IN HELA, SIGNAL = 1.1; EXPRESSED IN BT474, SIGNAL = 1.8; EXPRESSED IN BONE MARROW, SIGNAL = 0.86; EXPRESSED IN HBL100, SIGNAL =   2; EXPRESSED IN LUNG, SIGNAL = 0.87; EXPRESSED IN ADULT LIVER, SIGNAL = 1.4; EXPRESSED IN BRAIN, SIGNAL = 1.2; EXPRESSED IN PLACENTA, SIGNAL = 0.95; EXPRESSED IN HEART, SIGNAL = 0.89
aaaggctttcagcttttcccattgattatgctgttagtgatgggtgtgtcgtggggaattcccatgagcatcatcatttcatcggaaagggctcgaggacacagtgaggaggggctggataggagaagcatagtggtcatgggaaatgaaccaatcattgagcactgactcttcttttgttgggattgggttttttggggactgcagcattcttttatacagcaaaatgcaagagcctggagctgtgctggatgtggtgggtgcctggctccaagacccagccaatcaaaaccttccagaatatggagccttggcagaatttcacgtgcagcgggtgctgctgcctctgggctgcttatcggaggctgaggagctagtggtgggctctgcagcctttggtgaggagcggcgactggatgtacttcaggccattcacacagcgaggcagcagcagaaacaggaacactcaggctctgagg

SEQ ID NO: 3254 - DNA, 432 bp, Homo sapiens
  MAP TO AC012064.1; EXPRESSED IN PLACENTA, SIGNAL = 3.8; EXPRESSED IN ADULT LIVER, SIGNAL = 4.1; EXPRESSED IN FETAL LIVER, SIGNAL = 3.2; EXPRESSED IN BT474, SIGNAL = 2.6; EXPRESSED IN BRAIN, SIGNAL =   3; EXPRESSED IN LUNG, SIGNAL = 3.4; EXPRESSED IN BONE MARROW, SIGNAL =  29; EXPRESSED IN HEART, SIGNAL = 2.6; EXPRESSED IN HELA, SIGNAL = 3.4; EXPRESSED IN HBL100, SIGNAL = 3.5
gaaagaggcaaggaaaaggggaagggcagatataccaacccctagtgctaccctccacttctaggtcctgttgcaatctcactgagcctcggttttctcctgggtaaaatgagaggccaagctcaatgctcacagtatccttggcactgttttgtgagatccttatagatcctgactagtgctctttttatgcttacagtgggacagaccagtaagagagggcttggcaccaagggatccattttgattgctttgaattccactcatgtttcaggaaactgataaaaaccaggaagtgataaacactatgcttaggactccagagaaccggaccctaatcaaacgaatgctgattaaatgtgctgatgtgtccaatccctgccgacccctgcagtactgcatcgagtgggctgcacgcatttcggaagaata

SEQ ID NO: 3255 - DNA, 417 bp, Homo sapiens
  MAP TO AC012460.2; EXPRESSED IN BT474, SIGNAL = 1.1; EXPRESSED IN LUNG, SIGNAL = 1.3; EXPRESSED IN HEART, SIGNAL = 1.2; EXPRESSED IN FETAL LIVER, SIGNAL = 1.4; EXPRESSED IN ADULT LIVER, SIGNAL = 1.3; EXPRESSED IN BRAIN, SIGNAL =   1; EXPRESSED IN BONE MARROW, SIGNAL = 1.3; EXPRESSED IN PLACENTA, SIGNAL = 1.2; EXPRESSED IN HELA, SIGNAL = 1.4; EXPRESSED IN HBL100, SIGNAL = 1.1
tttttgctttcccaattagagtgtaaatagggtccaaattcttcatctatgaaagacgttagaagtccttaggacttacctctttgggttacactttaatgactgacatttacttccccattctttcctgtagtgtcgaaggaacattttgagcaatactgtacgtgacttgtcaattctgaaatcacagtggatgcagtgctaactaatatgctaaagtaagcctagacactaatgttcccttctctctcgctagacatgcgatgaggccaacgatgaggtctcccaaaggaaagtgattgaagacaaagacccattctgccagtgggatatgctgggaataccaactatacttgttactgagtgtgcatggctggtgttggccagccttcctgatgccagcaagaggagacagaa

SEQ ID NO: 3256 - DNA, 442 bp, Homo sapiens
  MAP TO AC010737.2; EXPRESSED IN FETAL LIVER, SIGNAL = 1.2; EXPRESSED IN BT474, SIGNAL = 1.3; EXPRESSED IN ADULT LIVER, SIGNAL = 2.2; EXPRESSED IN BONE MARROW, SIGNAL = 2.2; EXPRESSED IN LUNG, SIGNAL = 1.2; EXPRESSED IN BRAIN, SIGNAL = 1.3; EXPRESSED IN HELA, SIGNAL = 1.1; EXPRESSED IN PLACENTA, SIGNAL = 1.7; EXPRESSED IN HBL100, SIGNAL = 1.2; EXPRESSED IN HEART, SIGNAL = 1.3
ttggcactcctgattcactgctcatgagaagcaaagagtttagtgactctatacgtaatatctttgaccgtatgtggagaatcaaggaacataatgaaactggttaattgctcctaaattcagtgtacaaaatgatgaaagaaaatgatgagctcagagtttctaactcctggcttcagaagcagatacttagcctcaaatctgctaagattaccctgagtgagagtcttaactcctgtagagaaagagctgaaattgtgaaaaaacagacacaagctcttatcatgcgagtggctgacctgcagcaaaaggtgcatgcaaaaccttgccatgtgtctactgttaaattgagggcattgactgaaaaagaatgggaccctgcaacatggaatgggaacgtgtgggaggacactgacgaagtgggggacaccgagtttgtaaa

SEQ ID NO: 3257 - DNA, 394 bp, Homo sapiens
  MAP TO AC012135.1; EXPRESSED IN HBL100, SIGNAL = 1.9; EXPRESSED IN HEART, SIGNAL =   2; EXPRESSED IN BT474, SIGNAL =   2; EXPRESSED IN PLACENTA, SIGNAL = 2.2; EXPRESSED IN ADULT LIVER, SIGNAL = 2.2; EXPRESSED IN FETAL LIVER, SIGNAL = 2.3; EXPRESSED IN BRAIN, SIGNAL = 2.1; EXPRESSED IN LUNG, SIGNAL = 2.4; EXPRESSED IN BONE MARROW, SIGNAL = 1.9; EXPRESSED IN HELA, SIGNAL = 1.8
ttaaaatgctgacttgccccaaaacctttcacgatcataaagtatcttagtacttagattcaatgatcttttattgatagtgtactgcgtactttcacatacctgctaaataaagagttcagggaaataaaagtcattacaaacctaattgtatattgcttttaggttcaatggtatattgctttctgtttatcttatttttaacagcaattgaaaaagcaagagtcagtagaataacaaaggcaggtaaagcaagttgcatgcaggtagcatacagctatgagaaaggttactacctccacagaccacaccatcgaggtcttcacagcggcgatcatcacactcacaagtcttgccatacacccggcgatctcctggaggatagcaggtgcat

SEQ ID NO: 3258 - DNA, 455 bp, Homo sapiens
  MAP TO AC012667.1; EXPRESSED IN LUNG, SIGNAL = 2.1; EXPRESSED IN BRAIN, SIGNAL = 1.3; EXPRESSED IN HELA, SIGNAL =   1; EXPRESSED IN HBL100, SIGNAL = 1.2; EXPRESSED IN HEART, SIGNAL = 1.8; EXPRESSED IN ADULT LIVER, SIGNAL =   2; EXPRESSED IN BT474, SIGNAL = 1.3; EXPRESSED IN BONE MARROW, SIGNAL = 1.6; EXPRESSED IN PLACENTA, SIGNAL = 2.1; EXPRESSED IN FETAL LIVER, SIGNAL = 1.5
cattgctttcaatatggtgggtagctttttcagatgaagaaattttaattagacgacccttttttgatggaaacatattttattaactaaaagtaagggtacattataaacttaatgctaaaatgccacacacacacacacacacacacacacacacacagatacatttttcttatcttcagcagttggacgactggtaatgcgttagcggtaaataggtaacccttttatcgtttgtgttttagtccataacgtgtcatggcagcccgcggcggcggcggctacagcgaaatggcggagtccatggctgacacccagtggctgatcaccaagccgcagaacctgaatgacgcctaccggtcccccagcaacttccttgagatctatgagcaacgggcagactgtggggggcggctggggccgcttcaccacattcgaaatcagggtcaaggcta

SEQ ID NO: 3259 - DNA, 489 bp, Homo sapiens
  MAP TO AL035699.4; EXPRESSED IN ADULT LIVER, SIGNAL =   1; EXPRESSED IN BONE MARROW, SIGNAL = 0.88; EXPRESSED IN HBL100, SIGNAL = 0.89; EXPRESSED IN LUNG, SIGNAL = 1.3; EXPRESSED IN HELA, SIGNAL = 1.3; EXPRESSED IN BRAIN, SIGNAL = 1.2; EXPRESSED IN HEART, SIGNAL = 1.1; EXPRESSED IN PLACENTA, SIGNAL = 0.92; EXPRESSED IN BT474, SIGNAL = 0.63; EXPRESSED IN FETAL LIVER, SIGNAL = 0.78
aggtctgggatgaaacctccactggttctctgtatgtaatactatccttggaatccttccccacagagctgactgctgggattgtattctgagaagacaccgttaccccttgcatgagattgaccaaagtctgtggcatactgaatttcatgatgcagcaggattcctaataaaaatgtgtatttatttttgcatagctaaaacattaaagccccagggtggtttaaaaaataatagcctacacatttttttcatgtaaactaagaatgacattttcattagtgcctctttctctttcaggaactatgtgaaaaacaacatttgttttatgagtcatcaccaagaagaattagtgccaaaacagcctcaaaaaagaaaaccccaggagcagctcttggagtgtaacaagctgtgtggtaggggccaatccaggcagctttctccagagacctaatggcctcaacaccttctgaacgtggatagtgccag

SEQ ID NO: 3260 - DNA, 414 bp, Homo sapiens
  MAP TO AC009961.3; EXPRESSED IN BONE MARROW, SIGNAL = 8.2; EXPRESSED IN BRAIN, SIGNAL = 7.5; EXPRESSED IN HELA, SIGNAL = 8.2; EXPRESSED IN HBL100, SIGNAL = 7.1; EXPRESSED IN HEART, SIGNAL = 7.1; EXPRESSED IN BT474, SIGNAL = 6.3; EXPRESSED IN FETAL LIVER, SIGNAL = 5.8; EXPRESSED IN ADULT LIVER, SIGNAL =  11; EXPRESSED IN LUNG, SIGNAL = 8.2; EXPRESSED IN PLACENTA, SIGNAL = 9.1
tgaaggatggtggaattataggtcaatatttatagtttgtatttatattcaaattaaaaatgagcatgatttactgttataatcagaaaatatcttaaagggttatacataatcatacaaccttttagaaggttgggaaaagagaaaattagtcaagtttgaaatcttaactgtataagtgtaattcaagtcttgatttaatctctaagcataggaaaaaatgtttcttctctagataagtctcttatgtggtttgataagaccccactgtcatatacacattggagagcaggaagaccaactataaaaaatgagaagtttttggctggtttaagtactgacggcttctgggatattcaaacctttaaagttattgaagaagcagtttattttcaccagcacagcattcttgct

SEQ ID NO: 3261 - DNA, 455 bp, Homo sapiens
  MAP TO AF130351.1; EXPRESSED IN HBL100, SIGNAL = 1.6; EXPRESSED IN FETAL LIVER, SIGNAL = 1.3; EXPRESSED IN HELA, SIGNAL = 1.4; EXPRESSED IN BRAIN, SIGNAL = 1.2; EXPRESSED IN BT474, SIGNAL = 0.89; EXPRESSED IN BONE MARROW, SIGNAL =   1; EXPRESSED IN ADULT LIVER, SIGNAL = 0.91; EXPRESSED IN HEART, SIGNAL = 1.1; EXPRESSED IN PLACENTA, SIGNAL = 0.7; EXPRESSED IN LUNG, SIGNAL = 0.74
tttattatagagatctttcactttgggatttaattttatgtgtggctagtgtaaataggattactttttaatttcttttttatattgttgcctgttctcatagaaatgctactggtattttatgttgaaattgtatcctgcaacgttgctaaatttgtttattagttctaacagttttcctgaggaatttttagggttttccaaatcatatcatatcatctgcaaacaggtataatttgacttcttcatttctaatttggatgccatgtatatctttccttgtctaatttctctagctaggacttccagtactatgtggaataacactggtgagccaggttatattccagatcttagaggaaaggctttcatcttttccccagtcagtatgatactagctgtgggtctattgtataaggcttttattatgttgaggtatgttccttctagactca

SEQ ID NO: 3262 - DNA, 470 bp, Homo sapiens
  MAP TO AC008151.1; EXPRESSED IN FETAL LIVER, SIGNAL = 0.79; EXPRESSED IN ADULT LIVER, SIGNAL = 0.88; EXPRESSED IN BONE MARROW, SIGNAL = 1.2; EXPRESSED IN HBL100, SIGNAL = 0.75; EXPRESSED IN LUNG, SIGNAL = 0.65; EXPRESSED IN HELA, SIGNAL = 0.84; EXPRESSED IN PLACENTA, SIGNAL = 0.75; EXPRESSED IN BT474, SIGNAL = 0.8; EXPRESSED IN HEART, SIGNAL = 1.2
ctccaaagaactctcaggtaaatcattagaattactaagataatttagtaaggttgctcagtccaaaatagacaaaaataatttcatttttatatacaagcatcaggcaaaaagtgacttttttatttaaaaaaaaaagatatttaccatagcaacaaaaataggtacctagaaaaaaaataacaaaaaaaggaagctctttatagagagtatgataaaaccttattaagaaatatattaaataagacctaagtatgtggagacataaaccctatccgtggaaggaattgtaaatatgtcagctctcttccaattgatctagagactcattgcaactcccgtcacaattccaacagagttcttcatgaatactggcaagctgattctgaaatataaatggaagaacaaaaggcagggaatggccaagacattcctgaagaggaaaaacaaggtgatgattcttgccctct

SEQ ID NO: 3263 - DNA, 450 bp, Homo sapiens
  MAP TO AC007463.3; EXPRESSED IN FETAL LIVER, SIGNAL = 0.66; EXPRESSED IN HELA, SIGNAL = 0.6; EXPRESSED IN ADULT LIVER, SIGNAL = 1.1; EXPRESSED IN BONE MARROW, SIGNAL = 0.69; EXPRESSED IN HBL100, SIGNAL = 0.7; EXPRESSED IN PLACENTA, SIGNAL = 0.66; EXPRESSED IN HEART, SIGNAL = 1.1
aaggaatgctgatgcctacgtctccgaggcttgacccagggaggagacatcatgcgattaccaataagctccttcaaactgagagcccgtaggatgccaccatcactgacaacggctacttgggttttcattgcttggagaagacaattgctgttcattgtgcccattgagcagacatgtttgtgggcatgcaagaaacagcatatagtaatccttggacttgattatatgcacattcttttttcctttttaattacagtagtcttctgtgacacaagtggcacttctgttactctcctgaaggaggaccctctgaatcaccctcgaggacaggcacttgctctgcacagacttccctgtttggagagccgtctgtgcatccagcttcccactctccccaggcaccaaacaatgaggttctgtctaaggcttcttgaatttgtcaaacca

SEQ ID NO: 3264 - DNA, 431 bp, Homo sapiens
  MAP TO AL035694.8; EXPRESSED IN PLACENTA, SIGNAL = 0.63; EXPRESSED IN BT474, SIGNAL = 1.1; EXPRESSED IN FETAL LIVER, SIGNAL = 0.79; EXPRESSED IN LUNG, SIGNAL = 0.74; EXPRESSED IN HELA, SIGNAL = 0.7; EXPRESSED IN ADULT LIVER, SIGNAL =   1; EXPRESSED IN HBL100, SIGNAL = 0.85; EXPRESSED IN BRAIN, SIGNAL = 1.3; EXPRESSED IN HEART, SIGNAL = 0.82
ggctttcctaacagctttcctgttcttagtgtaaatgatatgctgtacttctaatagtaaatcattaatttggggttttgctataaatcactctcatgaccttcacttgtgtaagttttccaaaattctgatcactagagaaattgtttgatcactaatgttccaacttgaagctttgacaaatcaaatatattagaatataaaggctgtctgaacatcttttgtctcctccaggtcttctgtaagtttgagagagcctgggctgtttttgatgcttgcagggtattagataataaacattacatggagttaaaataactgtagtatattttaaatgtttacaagcaataaaataatgtttttacctctcaaagtaaaacttattataattattataattcccttattaccataggctgtcaacagtctga

SEQ ID NO: 3265 - DNA, 471 bp, Homo sapiens
  MAP TO AC007561.2; EXPRESSED IN BT474, SIGNAL = 0.82; EXPRESSED IN HBL100, SIGNAL = 0.82; EXPRESSED IN FETAL LIVER, SIGNAL = 0.86; EXPRESSED IN LUNG, SIGNAL = 0.72; EXPRESSED IN HELA, SIGNAL = 0.68; EXPRESSED IN ADULT LIVER, SIGNAL = 1.1; EXPRESSED IN BRAIN, SIGNAL = 0.85; EXPRESSED IN HEART, SIGNAL = 1.2; EXPRESSED IN PLACENTA, SIGNAL =   1; EXPRESSED IN BONE MARROW, SIGNAL = 0.99
gtgaggtcaagggtgagctgacgggcagtctgcacaagacactagtgacaaagagcggagataaaaaggagttcagaggagttttccaggagggaaaaagaaggcttggggagggagggagtggagctgtgggagaatgaacctgtcataggagaagggtcttctgggaaggggtggaagctacagagaagagctgagtgtatcaggaacagatctctgaccccaggaagcataaggcaaggttgagtagagggaacagcttaggagtgagaggatacattgtgtgaaacatccaggttcccaccctagataatggaggtaggagatcgaccatacgatgtccagctgaattggtcccaaatcttcctgtgtctgggggcaggtgagaggaaggttcaggcctctgaaaaggagtcaacagaagcaagctggaggaaagcaagttctggcccaaagaggaggccagaggta

SEQ ID NO: 3266 - DNA, 378 bp, Homo sapiens
  MAP TO AC012513.2; EXPRESSED IN BRAIN, SIGNAL = 9.4; EXPRESSED IN BONE MARROW, SIGNAL = 8.1; EXPRESSED IN LUNG, SIGNAL =  13; EXPRESSED IN PLACENTA, SIGNAL = 8.2; EXPRESSED IN HBL100, SIGNAL =  14; EXPRESSED IN HELA, SIGNAL =  12; EXPRESSED IN HEART, SIGNAL = 8.2; EXPRESSED IN BT474, SIGNAL = 8.6; EXPRESSED IN FETAL LIVER, SIGNAL =  12; EXPRESSED IN ADULT LIVER, SIGNAL =   8
atatccgtcacgtctaccgccagatccgtaaccaccaccaccacaggaactccccgagcttcttccaccaaaactgcaccctttaatgggttcataatttgattgtttttgtctgctaaaatttccagaatcattatagttcccaccaccaccatagttaccactgccaaaatttcctccttcattgtaaccatcatatccttcaccactatccccatacccgccattgtggttttcatatcctggttcaccatctccatagcccccactactgctgtaggcaggcccaccaccattgttgcccaccgtcacctccacatccattatatccaccattacaccctccataaccacctctgctgccaccacctctacttc

SEQ ID NO: 3267 - DNA, 494 bp, Homo sapiens; identical to SEQ ID NO: 298
  MAP TO AP000182.1; EXPRESSED IN BONE MARROW, SIGNAL = 1.3; EXPRESSED IN FETAL LIVER, SIGNAL =   1; EXPRESSED IN LUNG, SIGNAL = 1.1; EXPRESSED IN HELA, SIGNAL = 0.95; EXPRESSED IN ADULT LIVER, SIGNAL = 0.95; EXPRESSED IN BRAIN, SIGNAL = 1.6; EXPRESSED IN BT474, SIGNAL = 1.1; EXPRESSED IN PLACENTA, SIGNAL = 1.6; EXPRESSED IN HEART, SIGNAL = 1.1; EXPRESSED IN HBL100, SIGNAL = 0.99

SEQ ID NO: 3268 - DNA, 432 bp, Homo sapiens
  MAP TO AC012130.1; EXPRESSED IN BT474, SIGNAL = 3.6; EXPRESSED IN FETAL LIVER, SIGNAL = 4.9; EXPRESSED IN LUNG, SIGNAL = 3.9; EXPRESSED IN BONE MARROW, SIGNAL = 3.2; EXPRESSED IN HEART, SIGNAL = 3.4; EXPRESSED IN PLACENTA, SIGNAL = 4.3; EXPRESSED IN ADULT LIVER, SIGNAL = 5.6; EXPRESSED IN BRAIN, SIGNAL = 3.4; EXPRESSED IN HELA, SIGNAL = 3.6; EXPRESSED IN HBL100, SIGNAL = 4.1
tccacctggaaaactggaacttctttctggggtatgtgtaggtgtttagagaggtgaatgatggaaatgggatggagggaaggacaagaatgccttcttgattttttttagagagatttgggtcagtatcccaaatgaaaacttgccattacaacttttccttgagaggtctttgagacattaaatatatttttttctgttttagagcaataaccagattgagatgatcacaggtttggaggatctgaaagccctgcagaacctggatctgtcccacaatcagataagcagcctccaaggcttagagaatcatgacctcctggaagtgatcaacctggaggataataaggtagtgttgcacttcacatgtcttggtttcagtgttgacataagaggacatattagagacttagcacacacccttcatttttg

SEQ ID NO: 3269 - DNA, 425 bp, Homo sapiens
  MAP TO AC011291.3; EXPRESSED IN FETAL LIVER, SIGNAL = 1.6; EXPRESSED IN LUNG, SIGNAL = 1.4; EXPRESSED IN BONE MARROW, SIGNAL = 1.6; EXPRESSED IN HELA, SIGNAL = 1.6; EXPRESSED IN HEART, SIGNAL = 1.4; EXPRESSED IN PLACENTA, SIGNAL = 1.5; EXPRESSED IN BT474, SIGNAL = 1.6; EXPRESSED IN ADULT LIVER, SIGNAL = 2.1; EXPRESSED IN BRAIN, SIGNAL = 1.9; EXPRESSED IN HBL100, SIGNAL = 1.5
agcacctctacgaaagcacaggagtttatatggtaccacaaagttttgtcaccatttcattatctcatctttcagtatccagtttgccagcacccactgacacacagatctgcagcccatgtggcacaaacaaaccagaacctctttttatctaataaatgagccaactttctcatgaatgatcaaagagtagccaaattcccaataccatcaagggcttacatattctatagaagaagaaatctagaagaagtaatccaaactcttagaggagaagtgaagacagagagagatggcagtaaggcctcataaacaacactaccttgtgcagctaactctttccacctctctttgttctgctgaatgatgtccaccaggttgttcttgaaactcttcaggtccactgctgcaagggagtagtctgg

SEQ ID NO: 3270 - DNA, 402 bp, Homo sapiens
  MAP TO AF027390.1; EXPRESSED IN HELA, SIGNAL = 1.1; EXPRESSED IN HEART, SIGNAL = 0.97; EXPRESSED IN FETAL LIVER, SIGNAL = 0.99; EXPRESSED IN BONE MARROW, SIGNAL = 1.1
ttcacttgggaccctcactggggaggcgagtgagaagcctggcctgagcctgccatgctgaggggctgagcagagacgtgaacccctggccaggcgtgtgtgtgcctgagccgtgtggcgtccagcctggggctggccacggcgacatgaatggccccacgtgggaactgcccagctgaacccttcccaagtttctgacacacaacattttgtgtataggcaaaataaaattcatgtttgaagccgctaaatcctggagtgtttgttccacagcagcagcagctgaagcaggtcccggatgatgtcaaacatcttgcagctgtgcagagggcaccatccatcctgcacctttctcagctgactctcaggccggaaagcgtcccgatgaaatggggtcctaag

SEQ ID NO: 3271 - DNA, 432 bp, Homo sapiens
  MAP TO AE000659.1; EXPRESSED IN FETAL LIVER, SIGNAL = 2.4; EXPRESSED IN BRAIN, SIGNAL = 2.6; EXPRESSED IN LUNG, SIGNAL = 1.9; EXPRESSED IN HELA, SIGNAL = 2.1; EXPRESSED IN HEART, SIGNAL = 1.5; EXPRESSED IN ADULT LIVER, SIGNAL =   2; EXPRESSED IN BT474, SIGNAL = 2.2; EXPRESSED IN BONE MARROW, SIGNAL =   2; EXPRESSED IN PLACENTA, SIGNAL = 2.2; EXPRESSED IN HBL100, SIGNAL = 2.4
tctatggctgcacaagcatcatccgagggaaatatctctaccatcctccatcagcactgtggcaacactgaaccatccaaaactcagtccagggcaattggtctgaacccaaactctcatggactcatatctaaattctgatatgcttttcaataacgattcctcttgatgtattactccatctttacatgaaatcttattgctaatggactctaggactaaaacaccatcatagatttggtcaggaagaaacacgtcttgtggaagttttgatacatctcagaaaacaggaagaacacactaatgaacagtctgtgctaaactctggttctgcacttggcctccagagagcgatgctgcacacactggagcttttgtttctgttgaagatcagtccactgctcagtttcttcttcctgcagctggttgagt

SEQ ID NO: 3272 - DNA, 462 bp, Homo sapiens
  MAP TO AC006548.19; EXPRESSED IN BT474, SIGNAL = 0.62; EXPRESSED IN FETAL LIVER, SIGNAL = 0.79; EXPRESSED IN BRAIN, SIGNAL = 1.1; EXPRESSED IN ADULT LIVER, SIGNAL = 0.79; EXPRESSED IN PLACENTA, SIGNAL = 1.1; EXPRESSED IN BONE MARROW, SIGNAL = 0.93; EXPRESSED IN LUNG, SIGNAL = 7.8; EXPRESSED IN HELA, SIGNAL =   1; EXPRESSED IN HEART, SIGNAL = 0.97
tctccacctttgaaactggggaaatccgaaagggagacataggctgagtgcaggtccgagtcccatccttaacttagtgatgtctcagacctgttaaaagctttgtaataacaaatgcatgcttcccctcttcttactccttccttaggcctggaggaaacgctggtttatcctgcggaggggccagactagcagtgacccagatgttctggaatactacaagaatgatggctccaagaagcccctgcgcaccatcaacctgaacctctgtgagcagctggatgttgatgtgactctgaacttcaacaagaaggagattcagaagggctatatgtttgacatcaagaccagtgagcgtaccttttacctggtggctgagaccagggaggacatgaatgagtgggtccagagcatctgtcagatctgtggcttcaggcaggaggaaagcacaggtatgggagc

SEQ ID NO: 3273 - DNA, 465 bp, Homo sapiens
  MAP TO AP000221.1; EXPRESSED IN PLACENTA, SIGNAL = 1.3; EXPRESSED IN BT474, SIGNAL = 1.1; EXPRESSED IN LUNG, SIGNAL = 1.3; EXPRESSED IN HELA, SIGNAL = 1.7; EXPRESSED IN HBL100, SIGNAL = 1.2; EXPRESSED IN FETAL LIVER, SIGNAL = 1.1; EXPRESSED IN ADULT LIVER, SIGNAL = 0.9; EXPRESSED IN BRAIN, SIGNAL = 1.3; EXPRESSED IN BONE MARROW, SIGNAL = 1.3; EXPRESSED IN HEART, SIGNAL = 1.1
ccaatatagatctttcagctgcctttgatctctgggcagaaaggactgtttaacacactttttaagcttcttcaatatttgggaattcttatggataacctatacgtgggtaccctctagtcactagattcttcaattccccagtgtggccaggtgggctcattagacaagagccaaatgttatcagtctcacatagcacagttcaacgcctccacactgaccaggcggtctgtcttgctcagcctcctaattcctcctggcagaagtgcagaagttctccttggccccactcaccacatttacacacaaaccttggtgccttccacacatttgctcttcaatccaaccgaaaacagtctcactctttcgtggatgtctgcaacgtgaagagaagtacaggataggactctggctgctgaacctgtgcagaaaagaaaaaatcaagttgaatttctgcacaccca

SEQ ID NO: 3274 - DNA, 434 bp, Homo sapiens
  MAP TO AF001549.1; EXPRESSED IN PLACENTA, SIGNAL = 1.5; EXPRESSED IN HBL100, SIGNAL = 1.2; EXPRESSED IN HEART, SIGNAL = 0.99; EXPRESSED IN BRAIN, SIGNAL = 1.3; EXPRESSED IN LUNG, SIGNAL = 1.5; EXPRESSED IN HELA, SIGNAL = 1.4; EXPRESSED IN ADULT LIVER, SIGNAL = 1.6; EXPRESSED IN FETAL LIVER, SIGNAL = 1.3; EXPRESSED IN BT474, SIGNAL = 1.3; EXPRESSED IN BONE MARROW, SIGNAL = 1.4
gtggtcaggtgagcacacagcaagatggcggccacctacaggccaagagaagaggcctcagaatgaaacctacctttctgacacctcgatgttggacttcccagtctccagaactgtgagaaataaatttatgttgtttacgtcactcaatctacagtatatttttatggcagcctggcaggtctaatacacttaggtcatcttaggggaataaaaaagagtttaaaactccagctgaccttctcatgggccaagtatttggcagacaagatgatgacctggctcttggcccaacctgagacctggttgagggtggagatggctccgtgcacagcctcgggggagagggattccagttggctgtaggtcaaacctacaactgcatccgacaaagaacccagggtctcattgagggtctggttctccatggcaat

SEQ ID NO: 3275 - DNA, 404 bp, Homo sapiens
  MAP TO AC007221.1; EXPRESSED IN BT474, SIGNAL =   4; EXPRESSED IN FETAL LIVER, SIGNAL = 5.2; EXPRESSED IN BRAIN, SIGNAL = 4.6; EXPRESSED IN BONE MARROW, SIGNAL = 3.9; EXPRESSED IN HBL100, SIGNAL = 4.3; EXPRESSED IN PLACENTA, SIGNAL = 4.5; EXPRESSED IN HEART, SIGNAL =   4; EXPRESSED IN LUNG, SIGNAL = 5.6; EXPRESSED IN HELA, SIGNAL = 4.1; EXPRESSED IN ADULT LIVER, SIGNAL = 6.7
aggactgccataagaccagccgaacccttcattaaaaagtcaggggatgggggactggggatgaaggcaagcaggtctgcaaaaagtcaccagctactgctttctgtgagaggctctgcaattggtatttcacagtatatggtcctttttagcttcctgctggaaaacaccaagtggctgtaaatcattccaccgcagctgtccgagtgagaagtgactgggaattgagaagggatgggggatgtgctcccatcctcaggagccatatgggctctttccaaggcttggcaacttatgctgaaaatcaaggggcttggttctttagctcccaaatcaacaggactcagagcaacatttgttcttatagtggggccaatggcaaatgttgggagccaggtatcttg

SEQ ID NO: 3276 - DNA, 487 bp, Homo sapiens
  MAP TO AP000023.1; EXPRESSED IN BONE MARROW, SIGNAL = 0.64; EXPRESSED IN FETAL LIVER, SIGNAL = 1.7; EXPRESSED IN ADULT LIVER, SIGNAL = 0.95; EXPRESSED IN BT474, SIGNAL = 0.92; EXPRESSED IN HBL100, SIGNAL = 0.86; EXPRESSED IN LUNG, SIGNAL = 1.1; EXPRESSED IN HELA, SIGNAL = 0.88; EXPRESSED IN PLACENTA, SIGNAL = 0.71; EXPRESSED IN HEART, SIGNAL = 0.96
catgggaaataggatgttggtcacatctttaggatcattattctgtctcccacatggggattaggatgtggacatctttggggccattattctgtctaccacatggggattaggacatggacatctctggggacattattctgtctaccacatggggaataggatattggtaacatctttagggccattattctgtctaccacatggggattaggacatggatatctttggggccattattctgtctaccacgagataattagaacttggacatcgttggtgaaatcactttgtctttgtcctttcttattcttagaattctagtgacaagcgtcttcttcttcctcaacttcttcttcctcagcgttcctatggggcctccaacactcaccagacagctccctgactgcattaccctagattgtatttggccaagattctcgggtttttcttggtttctccaagcaggatggaagctttagagggc

SEQ ID NO: 3277 - DNA, 431 bp, Homo sapiens
  MAP TO AC007027.2; EXPRESSED IN HELA, SIGNAL =   2; EXPRESSED IN ADULT LIVER, SIGNAL = 2.9; EXPRESSED IN BT474, SIGNAL =   2; EXPRESSED IN BRAIN, SIGNAL = 2.9; EXPRESSED IN BONE MARROW, SIGNAL = 1.9; EXPRESSED IN HBL100, SIGNAL = 1.8; EXPRESSED IN HEART, SIGNAL = 1.9; EXPRESSED IN PLACENTA, SIGNAL = 2.1; EXPRESSED IN FETAL LIVER, SIGNAL = 2.3; EXPRESSED IN LUNG, SIGNAL = 2.4
ctgggtcacacgatgaaatcgaatctacatctacaaaatcaagtatgtttaaataactgacttaaatgggaaaaatatttatttcattgtttggttgcctttttaaaagcaatcagagttattcattaaacatgcctcaaatctcacaaaatttgccataagaaactataaactgtagtaataactaattataattcggagaataggaactgttagattctttatgccaccaatcttttattattctttcatcataggaccataaggctaggattcaatccagcctcatattagatgaatgtaattcacaccgcaaacagcaaaaggcacccactaatcccttctctgacaggactggtgctgaagctcagtgtgtggttttagctggaagaagattatctgtgattgtttgggtgagtctgctctggtct

SEQ ID NO: 3278 - DNA, 426 bp, Homo sapiens
  MAP TO AC007228.1; EXPRESSED IN PLACENTA, SIGNAL = 3.1; EXPRESSED IN HELA, SIGNAL = 3.4; EXPRESSED IN ADULT LIVER, SIGNAL = 4.6; EXPRESSED IN BT474, SIGNAL =   3; EXPRESSED IN LUNG, SIGNAL =   4; EXPRESSED IN BRAIN, SIGNAL =   4; EXPRESSED IN BONE MARROW, SIGNAL = 2.8; EXPRESSED IN HEART, SIGNAL = 2.7; EXPRESSED IN HBL100, SIGNAL = 3.2; EXPRESSED IN FETAL LIVER, SIGNAL = 3.7
tttgccttcagttcctttccatctggttctcagatctgtgaccttctgttccagaatgtttcatatgggatttatttctctatcagagtgccaacccaatataactagacacagagaaaactgtgagtgatccctttagaactctgcatcttattgaaatcacttcagctacatcccatctgcctcccctaaatcctcttggcttttctggccattcctccacgcctctgtaaggagggccctgcgatgagcggatgtgggtttcctcttacaggaatcagtgacgttcagggatgtgactgtggacttcacccaggaggagtggcagcagctggagcctgcccagaaggacctgtacagggatgtcatgctggagaactacaggaacctggtctcactgggtaaggggcagcttcgttgagttac

SEQ ID NO: 3279 - DNA, 465 bp, Homo sapiens
  MAP TO AP000161.1; EXPRESSED IN HEART, SIGNAL = 0.98; EXPRESSED IN PLACENTA, SIGNAL = 0.88; EXPRESSED IN BT474, SIGNAL = 0.75; EXPRESSED IN BONE MARROW, SIGNAL = 0.7; EXPRESSED IN LUNG, SIGNAL = 0.88; EXPRESSED IN HELA, SIGNAL = 0.98; EXPRESSED IN ADULT LIVER, SIGNAL = 0.85; EXPRESSED IN BRAIN, SIGNAL = 0.84; EXPRESSED IN HBL100, SIGNAL = 0.7; EXPRESSED IN FETAL LIVER, SIGNAL = 0.81
taacctgtgtgtttccaccgcaggtgatcttctctgaagttgcgctatgtgttcttgatgtgattcaggtaggatttgaagcttcagctgcaggttctggatcccacctgcaagttgggaattttcaaactgcaaagacgctttctcagtttggagatgtttgatttgtcctgtgagctcttcattcattgattttttttcccacaattgtcaagctatttcttgatttttcttgactttcacagaacacatttaagtcaccatcacccaggacgctcttcagatggccttctgactgatagttgggcgggaggggctggggcaggcagtcttcattttctgctttcctctttagctgtactttcgagtcctcgtcactgtggtccctagagaaatctcccaactgcatggtgtccagcaggttttcagccatagattttaattggctcatggtatctttcatga

SEQ ID NO: 3280 - DNA, 476 bp, Homo sapiens
  MAP TO AL049838.2; EXPRESSED IN BT474, SIGNAL = 0.61; EXPRESSED IN BONE MARROW, SIGNAL = 0.74; EXPRESSED IN LUNG, SIGNAL = 0.76; EXPRESSED IN FETAL LIVER, SIGNAL = 0.78; EXPRESSED IN HELA, SIGNAL = 0.77; EXPRESSED IN ADULT LIVER, SIGNAL = 0.83; EXPRESSED IN PLACENTA, SIGNAL = 1.1; EXPRESSED IN HEART, SIGNAL =   1; EXPRESSED IN BRAIN, SIGNAL = 0.74; EXPRESSED IN HBL100, SIGNAL = 0.67
gagagccggaactcccacacccacccaacagtcatgaggaacactttttcctcgggcattaactgaggctgagagggaaacctgggcctctacctctactggcagtaataaggctatgccctcccttcccctggcagtgtggtgtgcgataaagctagttaaaacagaaaggtttcagtaagactcagagtcccataatgtaatccaaaaatgtccaggtttcaataggaaatcacttgtcaagaaccaggaagatctcaaactgagtgaagaaaagcaatcaaaatgtgccaaaaccaagatgacagagatgctagaattacctgacaagaattttgaagcagctatgatgataataatgcttcatcaattaagaacatcttgaaacacatgaaacaataacaaacttcctcaagaagaagaagaaccaaatggaaattttacaactgaaaaatacaataaccacaaaagctccg

SEQ ID NO: 3281 - DNA, 369 bp, Homo sapiens
  MAP TO AC007246.2; EXPRESSED IN BT474, SIGNAL = 3.8; EXPRESSED IN FETAL LIVER, SIGNAL = 4.2; EXPRESSED IN BONE MARROW, SIGNAL = 3.8; EXPRESSED IN PLACENTA, SIGNAL = 4.1; EXPRESSED IN BRAIN, SIGNAL = 4.3; EXPRESSED IN LUNG, SIGNAL = 5.3; EXPRESSED IN HEART, SIGNAL = 3.6; EXPRESSED IN HELA, SIGNAL = 4.5; EXPRESSED IN HBL100, SIGNAL = 9.2; EXPRESSED IN ADULT LIVER, SIGNAL = 5.3
aacccaagacacttccatccaacctactaacaggccacaatggggatatagaggatgcatttctcacactgttgttttccttaaattctgtattttccagcaaagccaaaatgaccttctggttgcttttctaacagtgaaaacaaaattaacagggagataacaaagcgacactagctagccgcatgcagagcagccttcaccttggctgggacagacggcctgaggcatgcagcctacctgtcatgaggaacaggagtccagccacgtgctgggtcaagctctcctcccagaagaaactgactgtggccacaatgcagccgcagagaaggacggctacggccatgccgaggaagccagcagtgattc

SEQ ID NO: 3282 - DNA, 440 bp, Homo sapiens
  MAP TO AF067844.1; EXPRESSED IN BONE MARROW, SIGNAL = 2.9; EXPRESSED IN HBL100, SIGNAL =   6; EXPRESSED IN BT474, SIGNAL = 4.5; EXPRESSED IN ADULT LIVER, SIGNAL = 1.1; EXPRESSED IN FETAL LIVER, SIGNAL = 5.6; EXPRESSED IN BRAIN, SIGNAL =   2; EXPRESSED IN LUNG, SIGNAL =  10; EXPRESSED IN PLACENTA, SIGNAL = 3.1; EXPRESSED IN HEART, SIGNAL = 4.9; EXPRESSED IN HELA, SIGNAL = 8.2
gctcttcctgttctccatcgtggtgcaggatcaaggtgaaaaggataaccccatgcaggaattttgcatctgcaggctccgcttcaacatctgtttaggagaaagtggagacagactgacctgagtaactaaggtcttggaacagcttacaggtcagaaccaggtgttttccaaagctagatatactgttagcccctttggcaacagaagaaatgaaaagactgttgtctgctgcacagttcgaggggccaaggcagacgaaatcctggagaatgatctaaaggtgcaggagtgtgagttaagaaaaaataacttctcagatactggaaactttggttttgggacccaggaacacattgatctgggtatcagatatgacccaagcattgatgtctacagcctggacttctatgtggtgctggaaaagccaggtttcatca

SEQ ID NO: 3283 - DNA, 382 bp, Homo sapiens
  MAP TO AF001905.1; EXPRESSED IN BONE MARROW, SIGNAL = 1.1; EXPRESSED IN LUNG, SIGNAL = 1.6; EXPRESSED IN HELA, SIGNAL = 1.1; EXPRESSED IN HEART, SIGNAL = 1.1; EXPRESSED IN BT474, SIGNAL =   1; EXPRESSED IN BRAIN, SIGNAL =   1; EXPRESSED IN PLACENTA, SIGNAL = 1.4; EXPRESSED IN ADULT LIVER, SIGNAL = 1.8; EXPRESSED IN FETAL LIVER, SIGNAL = 1.6
ctgaaggccctggtagagtggattatgaggagatatcctgacctgaaggttgcaaagatctgcgagagaagtgtgggttcccaggttgctcactcacttactgcttccctggaatggggaggttcccctggctctgtgttgctcccaagtgggcagcttccttcctgccttgcttttctccgttttcaacgggtttaattgtttccttgattagtcccaatgtgtgtatctggatgttttagttgaagctgctgtatttactcacccctccctttcctctccatgagagaggcacaccctagctgcttctagtagacgatcttcaccaaacatccccatctccaaaatcttatcattttcaacaacatggatggaattggag

SEQ ID NO: 3284 - DNA, 488 bp, Homo sapiens
  MAP TO AP000183.1; EXPRESSED IN FETAL LIVER, SIGNAL = 0.76; EXPRESSED IN HELA, SIGNAL = 1.6; EXPRESSED IN ADULT LIVER, SIGNAL = 0.9; EXPRESSED IN BT474, SIGNAL = 0.77; EXPRESSED IN LUNG, SIGNAL =   1; EXPRESSED IN BRAIN, SIGNAL = 1.1; EXPRESSED IN HEART, SIGNAL = 0.87; EXPRESSED IN PLACENTA, SIGNAL = 0.92; EXPRESSED IN BONE MARROW, SIGNAL =   1; EXPRESSED IN HBL100, SIGNAL = 0.74
tcagctgcttaacagcagtagcaacaaacaacagcaggttttcaggctccacctacgatgctgtgttttgatgaaaaggttactgtgcactgtattttatttttttagatgagaagaaacttcagaagcaattgagagaccaggaagtgggtcctctggggctcaggaggcattctgatggatggcttttaaagatgtttcctccagaatcaactgcctcgttaaagcataaatgtcaagcgtaaattgttcttgtcttagaagtctctctttgactttataaacctgatatgatttattgttctgttatgaatgcgtggtgctctagtccttcaatgagcccatcacacgttttcattatgtcgtctagaggcaatttttctgcagtgttaactatgttatcttcagcattgtgcacctgcattttgactgcgacccatcacacgaggtcaggtgagaaatcttccacttgtggcatcatgttggtg

SEQ ID NO: 3285 - DNA, 457 bp, Homo sapiens
  MAP TO AL035552.9; EXPRESSED IN BONE MARROW, SIGNAL = 0.65; EXPRESSED IN FETAL LIVER, SIGNAL = 0.62; EXPRESSED IN ADULT LIVER, SIGNAL = 0.99; EXPRESSED IN HEART, SIGNAL = 0.95; EXPRESSED IN BT474, SIGNAL = 0.99; EXPRESSED IN LUNG, SIGNAL = 0.6; EXPRESSED IN PLACENTA, SIGNAL = 0.72
cagtgtgtttatactgctctgacctaaattgactagaattccaataaaataaaaatcatttacttaattataatgcatgaattgtaataatcaacatttataaatgtaggagattattattgttgttgatgaattttccttgtgatgatgatgcaggagactgtttaggtggaggcattaaaaataaatctattgtttcaaatacttggccaaatgttttgaagactctagacttgaaatgcagtaaactgaaaatcaagtacaaaatgcatcaaatttacaaaggctattattagaagattcagcatataaagtaccttgagagcttccttcagacaaacagatggatacttcatcatttctgtcattatcctctcctacttcaggcccagcttcctctcctggtgtgagtgcagataaagaaccagactcaggctgctcagagaaatcagcaggg

SEQ ID NO: 3286 - DNA, 384 bp, Homo sapiens
  MAP TO AC007251.1; EXPRESSED IN PLACENTA, SIGNAL = 1.8; EXPRESSED IN ADULT LIVER, SIGNAL = 2.2; EXPRESSED IN BRAIN, SIGNAL = 1.1; EXPRESSED IN LUNG, SIGNAL = 1.4; EXPRESSED IN BONE MARROW, SIGNAL =   2; EXPRESSED IN HEART, SIGNAL = 0.99; EXPRESSED IN HELA, SIGNAL = 1.7; EXPRESSED IN HBL100, SIGNAL = 1.2; EXPRESSED IN BT474, SIGNAL = 1.2; EXPRESSED IN FETAL LIVER, SIGNAL = 1.2
ccttcagcaagcaccttagcaggtcatggtttttatttttcctggtggagtgacccaaaccttcattcctgaagggtctgggccatttgtagtcctgcctgaattgggctgttgtagtttcccattgaccttaatcacagggcatgtcaccccagccaacatggtaactcccttcttagcctgttgacttaaaggtaggaggagcccaaagtgtccaggtggcaatcttaacttccaatgtaatgggattgttgttgtgtctgctggtggcagtgttcctccctctgaaactaagacctctaggccagcagaacgtaatgtagcaggcacaggaagcaaaaattttgctagtggatcactaggggtgatggtgagtgatgccac

SEQ ID NO: 3287 - DNA, 472 bp, Homo sapiens
  MAP TO AP000193.1; EXPRESSED IN PLACENTA, SIGNAL = 0.9; EXPRESSED IN BT474, SIGNAL = 0.94; EXPRESSED IN BONE MARROW, SIGNAL = 1.1; EXPRESSED IN FETAL LIVER, SIGNAL =   1; EXPRESSED IN LUNG, SIGNAL =   1; EXPRESSED IN HELA, SIGNAL = 3.3; EXPRESSED IN ADULT LIVER, SIGNAL =   1; EXPRESSED IN BRAIN, SIGNAL = 1.1; EXPRESSED IN HEART, SIGNAL = 1.1; EXPRESSED IN HBL100, SIGNAL = 1.3
gtgtgtggccaaactccagggccacagccccgtccatgccacacacagctgccgcactgatcccctgaaacacagccaagaccttcccagctccgcagccagcgcctcctcgactggacttccccacctgttagggctgaactgtgtccctcagattcacacgttgaagcccaggacatcagaatatgacttcgtttggagataaattctttaaagaggtgatgaagtgaacacgaggctgttagggtgagccctaattccatctgatgggtgctcttaataagagggggaaatgtggacacacagacgctggagatgtgcatgcacagaggaaagaccctgccgaggagagaggcctcaggaggaaccagccctgttgtcaccttgatcttggactttgtatctttagaaccatgaggaagtatatgttgtttaagcggctgggtctgtggcctttgttatggtcgcctga

SEQ ID NO: 3288 - DNA, 494 bp, Homo sapiens
  MAP TO AC012678.1; EXPRESSED IN BONE MARROW, SIGNAL = 7.3; EXPRESSED IN LUNG, SIGNAL = 9.3; EXPRESSED IN PLACENTA, SIGNAL = 8.9; EXPRESSED IN HELA, SIGNAL = 8.2; EXPRESSED IN HBL100, SIGNAL = 7.2; EXPRESSED IN HEART, SIGNAL = 6.6; EXPRESSED IN FETAL LIVER, SIGNAL = 9.3; EXPRESSED IN ADULT LIVER, SIGNAL =  11; EXPRESSED IN BT474, SIGNAL = 6.8; EXPRESSED IN BRAIN, SIGNAL = 6.5
ctgggcactgacacacagaggcatgccatttctccccatatatggacgggaactgggaaatgtgttcttggtaccaaaataattcctctcaatggattcagtcatgagcagatcaggcaagcatcatgaccatgggcttctgggtggggcttggacattcttgcattttgtgtcatgaattgttcactgtaatgataccctacttgctgccttcttggtgaggcagtgattttaagcaccagaaaggagaaaccctgacctgtgggcaagaactccatccaagacctaaccacaagctgctgtttatctgggtaatactgctgaaactatgacttaaattctcaaatttctctaatggcttgtctgtgtaaatgatcttttggttactactggagttataagtaggtatgaagtgactcaaggggtgatttgggtgagccaaacagctggacaccttctccctgctggccatggcgcctgaagttctgtcatca

SEQ ID NO: 3289 - DNA, 490 bp, Homo sapiens
  MAP TO AH007699.1; EXPRESSED IN BT474, SIGNAL = 2.8; EXPRESSED IN BONE MARROW, SIGNAL = 2.4; EXPRESSED IN HBL100, SIGNAL = 2.1; EXPRESSED IN HELA, SIGNAL =   3; EXPRESSED IN ADULT LIVER, SIGNAL = 2.6; EXPRESSED IN FETAL LIVER, SIGNAL = 2.3; EXPRESSED IN BRAIN, SIGNAL = 2.3; EXPRESSED IN LUNG, SIGNAL = 2.6; EXPRESSED IN PLACENTA, SIGNAL = 2.4; EXPRESSED IN HEART, SIGNAL =   3
cctgctgtgaactggatgtgcggcgtctggatggtgcaggtctggggtgtggtcgccaggccctcggtgagctggaggtatggagtccggatgatgcaggtccggggtgaggtcgccaggccctgctgtgagctggatgtgcggcgtctggatggtgcaggtctggggtgtggtcgccaggccctcggtgagctggaggtatggagtccggatgatgcaggtccggggtgaggttgccaggccctgctgtgagctggatgtgctgtatccggatggtgcagtccggggtgaggtcgccaggccctgctgtgagctggatgtgctgtatccggatggtgcaggtctggggtgaggtcaccaggccctgcggtgagctggttgtgcggtgtccggttgctgcaggtccggggtgagttcgccaggccctcggtgagctggatgtgcggtgtccccgtgtccggatggtgcaggtccagggtgaggtcgctag

SEQ ID NO: 3290 - DNA, 474 bp, Homo sapiens
  MAP TO AP000036.1; EXPRESSED IN HBL100, SIGNAL = 0.78; EXPRESSED IN LUNG, SIGNAL = 0.98; EXPRESSED IN HELA, SIGNAL = 0.98; EXPRESSED IN BT474, SIGNAL = 1.1; EXPRESSED IN BONE MARROW, SIGNAL = 0.85; EXPRESSED IN PLACENTA, SIGNAL =   1; EXPRESSED IN HEART, SIGNAL =   1; EXPRESSED IN BRAIN, SIGNAL = 1.2; EXPRESSED IN ADULT LIVER, SIGNAL = 1.1; EXPRESSED IN FETAL LIVER, SIGNAL = 0.91
ccatgtcaaaggcaaggttcacaggggctaggggctgcagtgggggcaggctggcctccaggggcctatctgcagatggctgcagactctgatggcgcttccttaacatctgtccgatgcccatcatagggaaccggcctcggcttttcacacaattggggctccccagaggctgcatggggccattgctgggaaccggaggtgggcaacacaggccctcctcttttggggggctgttcttatcttcgtgagcaaaagagaccagagttggatgcaaaggagtatggagaggcgacatgcttccggatggcagacccggggacagcgtcctctcgctggaatttctgcgagccaagctgaccggggagttcagaatcctgtagtgatgagagggagacagcacttctacgtggtcgtcgcgatccacagactcgaaggagcgcaccatgtccagcatcagggggtcttccttgt

SEQ ID NO: 3291 - DNA, 385 bp, Homo sapiens
  MAP TO AC006984.2; EXPRESSED IN BONE MARROW, SIGNAL = 0.63; EXPRESSED IN HBL100, SIGNAL = 0.89; EXPRESSED IN LUNG, SIGNAL = 0.86; EXPRESSED IN BT474, SIGNAL = 0.8; EXPRESSED IN FETAL LIVER, SIGNAL = 0.68; EXPRESSED IN PLACENTA, SIGNAL = 0.79; EXPRESSED IN HEART, SIGNAL = 0.87
agggcttcaatagacgcaagtggctagggattttattttattttttaatttacaagaaaagtaaccaaagcaaaatcaaagtaggtttttttttttttaatgtgaatttcctgtgctgccctctattcaactacacatatgagatacccaagaaagtgcactaaataacttttatagctcatttgggagtccctccgttgagtcagagagtaagaaaagattcatgtggttcagctgtccaagggtattgagcatgagaaaccagcgcaaagtgaaggctcccttaggatggcctctcttattcccactgctgtgccattccacaatgcttgtcttctcaccctcagcagtatgacaggtgctacactcagagcatctgcaaaga

SEQ ID NO: 3292 - DNA, 392 bp, Homo sapiens
  MAP TO AC007256.1; EXPRESSED IN HELA, SIGNAL = 1.6; EXPRESSED IN HEART, SIGNAL =   1; EXPRESSED IN ADULT LIVER, SIGNAL = 1.8; EXPRESSED IN BT474, SIGNAL = 2.1; EXPRESSED IN FETAL LIVER, SIGNAL = 1.2; EXPRESSED IN BRAIN, SIGNAL = 1.3; EXPRESSED IN BONE MARROW, SIGNAL = 1.1; EXPRESSED IN HBL100, SIGNAL = 1.2; EXPRESSED IN PLACENTA, SIGNAL = 1.3; EXPRESSED IN LUNG, SIGNAL = 1.6
ctttagcaggaccacccaaggcactactgtctttctgtagaagcttagaattgtggcactgctgggttcccaggcactaggcagggtaccacaaaaaaaagccccaatcagctcagaggctgtccattcaacccacacctcccagtcccacaatgggagtttccacccacctgtaggcagaaatttgagccctgcctggtgtctgaagttccctttccatctcctcctttctagtgtttaggtaggtaatcagcaaatccagtctattaattcggaagagcagctccttcaggaaggacagattgctttcctccaacattctcttttcctggagtctctggaataacatcaaggcatccttgatgggttcttgcttcctttgcggaatgtag

SEQ ID NO: 3293 - DNA, 490 bp, Homo sapiens
  MAP TO AF181450.1; EXPRESSED IN FETAL LIVER, SIGNAL =   2; EXPRESSED IN HEART, SIGNAL = 1.1; EXPRESSED IN BRAIN, SIGNAL = 0.93; EXPRESSED IN LUNG, SIGNAL = 2.7; EXPRESSED IN ADULT LIVER, SIGNAL = 1.1
tcagtggtacttggcaaatcagaaaaatcattcgtcttcaccatttcgctttaatactacaagcagaaaagattaacctacacaaaagccaaactgtcccaggccagagattcaaaactctgtaaaatcccaggccagagccagattctcaagatggccacaatggcttattgctattgtgcaagaatgacataggccagcggtttaattgtgacatgaaatgtttcctcatgccacaggtatgggaaaaaggtcatggttcatccaggctcctcctccctctcacctgtctggagttcgcctcttcccgttttcgttcacatcgagaagcagctctgaggagtcaacaggtgaggtggtgctggcatccagaagcagctgttcatgctgggcgaggtactgggcagggttctgtttggccagtcttgcgcagtggaggagctcacgctgcagcaggggcaagttggcctgcaagggaatgacaggaatg

SEQ ID NO: 3294 - DNA, 472 bp, Homo sapiens
  MAP TO AC005769.9; EXPRESSED IN BONE MARROW, SIGNAL = 1.1; EXPRESSED IN HBL100, SIGNAL = 0.76; EXPRESSED IN FETAL LIVER, SIGNAL = 0.83; EXPRESSED IN LUNG, SIGNAL =   1; EXPRESSED IN ADULT LIVER, SIGNAL = 0.73; EXPRESSED IN PLACENTA, SIGNAL = 1.1; EXPRESSED IN HEART, SIGNAL = 0.92; EXPRESSED IN BRAIN, SIGNAL = 0.84; EXPRESSED IN HELA, SIGNAL = 0.75; EXPRESSED IN BT474, SIGNAL = 1.4
tcagcagaaagcagttcaccaccataattggaaatacaggctcgtggttacttaatagaagtgaacatttaatcatgtcagggccactgtgtgccgtagatttagcataccatctctaacatattttgcaacttggacaattaattccacacctttactgtcccatattcagctttataaaacatgtcctccccataaaaataaatgtatgtggcagatagccccctctcttgtttgccaaaaaacagattactatcaggaaggccgaattatcacctgctgtcaacaaatggattacccaagttaaggtcattattgttgctgtcattctcttacatattaaaactgttatttatgaacataggaatgaaatggatgatcttaaatttatctggggtttctatgagacctttttgaacttcattttgcatgcttgtaagattacgaattaaaactatccatgcagccccac

SEQ ID NO: 3295 - DNA, 417 bp, Homo sapiens
  MAP TO AC007073.2; EXPRESSED IN HELA, SIGNAL = 1.4; EXPRESSED IN ADULT LIVER, SIGNAL = 1.7; EXPRESSED IN BT474, SIGNAL = 1.4; EXPRESSED IN BRAIN, SIGNAL = 1.4; EXPRESSED IN BONE MARROW, SIGNAL = 1.3; EXPRESSED IN HEART, SIGNAL = 1.2; EXPRESSED IN HBL100, SIGNAL = 1.2; EXPRESSED IN PLACENTA, SIGNAL = 1.4; EXPRESSED IN FETAL LIVER, SIGNAL = 1.4; EXPRESSED IN LUNG, SIGNAL = 1.5
aaccaagcctgtcagcattcgccaagggcctcttccatgtttggtgccatgttgtgtctgttttgtatctgagtccctctgtgactttgggcaaggtgttaatctctctgagctttactctccttatctgtaaaaaggagctgataccatctactcttagaatttctggaagcattagtaaacgtacacaacaggacgacttaattcaaatcacccttcctgtgggttaagcattgcccctctgcagagtctgtccttctggagccctgaagtgacccaaggtgcctggagcctcaccaaggagatgaagttggaggaaggcctggaagagccagaagagaaaatggcaccctaaagaaaagggggaacagaagaaaccgctttccttgcactttgcctgtgtgggaggagctgaat

SEQ ID NO: 3296 - DNA, 414 bp, Homo sapiens
  MAP TO AJ003147.1; EXPRESSED IN HBL100, SIGNAL =  11; EXPRESSED IN PLACENTA, SIGNAL =  12; EXPRESSED IN HELA, SIGNAL =  13; EXPRESSED IN HEART, SIGNAL =  11; EXPRESSED IN ADULT LIVER, SIGNAL =  14; EXPRESSED IN BT474, SIGNAL =  11; EXPRESSED IN FETAL LIVER, SIGNAL =  13; EXPRESSED IN BONE MARROW, SIGNAL =  11; EXPRESSED IN LUNG, SIGNAL =  13; EXPRESSED IN BRAIN, SIGNAL = 9.8
gatacaaggccagaagcaggaagagagatgcagtgttgggcattcagtcaggcccctgaccacccactggacagatagtcagaggagctgtgttcttccctccatcacgtgtcccagggctgaagataggttgaaggggcccagagaaagagcagctggcgaatgtatagatgtgggatctggctgtcacattgtaaaaggagatgcttccaactctgtagtccacgaagatgcccacacgcttgggaggctcctttattagcaggcgggtcgggggaacgctggacgcctggtactcattttccttcatcattatcaccacccagtagccattctctggcgacagagtcatgttccctttcctgcttatggatgtcttgcaggctcccaggatccatgctgtcttgtctccaa

SEQ ID NO: 3297 - DNA, 383 bp, Homo sapiens
  MAP TO AF064863.1; EXPRESSED IN BRAIN, SIGNAL = 1.6; EXPRESSED IN BONE MARROW, SIGNAL = 1.8; EXPRESSED IN LUNG, SIGNAL = 1.2; EXPRESSED IN HBL100, SIGNAL = 1.6; EXPRESSED IN PLACENTA, SIGNAL = 1.3; EXPRESSED IN HELA, SIGNAL = 1.4; EXPRESSED IN HEART, SIGNAL = 1.8; EXPRESSED IN ADULT LIVER, SIGNAL = 1.1; EXPRESSED IN BT474, SIGNAL = 1.5; EXPRESSED IN FETAL LIVER, SIGNAL = 1.4
ttttgtaggaggcagggttggcaggatccaggcgagataattggtgctgtcctcagccctaagtccatgccccaaaacaggtcaaaggaaggccagaagtattgatagagaagtagaggaaggaggagggtggtgggaggtcaacgctgagtaaataaagcaacactgcctcttccctctagcttctttgtgtgcatagtcagaacaatttctccaaatttactctgaagattagttactggcatccgtgaagaacttggaagggacaaacgtaccattgttttcatttttgttcctcacaggaaaattcatactctcaaaatcattgttttttcccctgcagtggtctgttttgtagagttccctaaccactttgtttccag

SEQ ID NO: 3298 - DNA, 470 bp, Homo sapiens
  MAP TO AC004985.2; EXPRESSED IN HEART, SIGNAL = 0.96; EXPRESSED IN BONE MARROW, SIGNAL = 1.1; EXPRESSED IN ADULT LIVER, SIGNAL = 1.2; EXPRESSED IN PLACENTA, SIGNAL =   1; EXPRESSED IN BT474, SIGNAL = 1.8; EXPRESSED IN HBL100, SIGNAL = 1.3; EXPRESSED IN FETAL LIVER, SIGNAL = 0.89; EXPRESSED IN LUNG, SIGNAL = 0.94; EXPRESSED IN HELA, SIGNAL = 0.93; EXPRESSED IN BRAIN, SIGNAL = 1.3
tcaggtcagccttgagcacaccctgagcctcctgtgcctgcactctgctctctgaagggggtcgtcactctccccatcctgctgggctctccttcaccagctcttccctggcccctagctcagaaacacagggtgagcacttatgtcttcatttctttccacagtggagagaagcaggcttcaagaaatgctgtcacttttgggcctagagacgtaccaggtccagaaactcagcctccaggactctctgcagatcagttttgacagtatgaagaactgggcccctcaggttcccaaagacttgccctggaatttcctcaggaagttgcaggccctcaatgctgatgccaggaataccactatggtgctggacgtgctcccagacgccaggcctgtggagaaggagagccagatggaagaggagatcatctactgggacccagctgatgaccttgctgccgacatttatt

SEQ ID NO: 3299 - DNA, 398 bp, Homo sapiens
  MAP TO AC007222.1; EXPRESSED IN LUNG, SIGNAL = 1.7; EXPRESSED IN HELA, SIGNAL = 1.8; EXPRESSED IN ADULT LIVER, SIGNAL = 2.1; EXPRESSED IN BT474, SIGNAL = 1.4; EXPRESSED IN BRAIN, SIGNAL = 1.8; EXPRESSED IN BONE MARROW, SIGNAL = 1.7; EXPRESSED IN HEART, SIGNAL = 1.4; EXPRESSED IN HBL100, SIGNAL = 1.6; EXPRESSED IN PLACENTA, SIGNAL = 1.6; EXPRESSED IN FETAL LIVER, SIGNAL = 1.9
atccccgaagctgatgttcagccagaagagaagaaatgcaactccctgaagtcagacttcggcaggctttggtgaagtcaggtggcactgacctgggtggtatgcagcttcatggaagtgagtgacaggccagtctcagcatatcttaggccaaagctcccagagctcagaatttttcatctgaactctaccatcaccaccactatcaccactgtcaccaatccagtgctattatcaccaccactatcaccatcgccattaggaccatcaccatcacgaagcaactggtctcatgtatgagttggtagcagtcaccaaagacaaaggcactcaccagcttggtaaggtgctctgtagcatcccacttctaatatggtgggtgagaagtggggagtcat

SEQ ID NO: 3300 - DNA, 486 bp, Homo sapiens
  MAP TO AL049736.10; EXPRESSED IN BONE MARROW, SIGNAL = 0.76; EXPRESSED IN FETAL LIVER, SIGNAL = 0.59; EXPRESSED IN ADULT LIVER, SIGNAL = 0.93; EXPRESSED IN HEART, SIGNAL = 0.87; EXPRESSED IN PLACENTA, SIGNAL = 0.65; EXPRESSED IN BT474, SIGNAL = 0.63; EXPRESSED IN LUNG, SIGNAL =   1; EXPRESSED IN HELA, SIGNAL = 0.68; EXPRESSED IN BRAIN, SIGNAL = 0.88
ctcatgtcagcttatacgagccaacataaagaaatacctttgtggactagatgcagtcatctcacgctttacagtctccatcgttttgatccccccaatagccctgtgaagtaggaaagaggtgtgtcttggattcccacagtgtcttggatagctttgttatggtacctactgcattataccgaaatttagtatttattgtgtgctttcccaacagcactgtgaccttttgcaaagtgaccttccttagggctttaaacatagtaggcattcgataaaccttcactaagtaaatgtgttgttctctctctgaactgtgtttctagagcagtggttttcaacagcggtggtgttgtcctcaggggatatctggcaatgtctgaagacctttggctgaggtgggggtggggtactggtggcatccagtgggtggaggccagggatgttgctaaacatcctacagtacacaagacagtccttcatgca

SEQ ID NO: 3301 - DNA, 469 bp, Homo sapiens
  MAP TO AP000247.1; EXPRESSED IN HBL100, SIGNAL = 0.67; EXPRESSED IN HELA, SIGNAL = 0.74; EXPRESSED IN ADULT LIVER, SIGNAL = 0.72; EXPRESSED IN PLACENTA, SIGNAL = 0.7; EXPRESSED IN BONE MARROW, SIGNAL = 0.97; EXPRESSED IN BRAIN, SIGNAL = 1.1; EXPRESSED IN BT474, SIGNAL = 0.75; EXPRESSED IN HEART, SIGNAL = 0.92; EXPRESSED IN LUNG, SIGNAL = 0.85; EXPRESSED IN FETAL LIVER, SIGNAL = 0.65
gccttaattttctgttgtgttcttcacctagattttctaaaaggtttgcaatgagcatgtgatacatgcattagaaatctatcaaacacacacattgaaagatgctacttagaagagttcctctcttcccaaaggtgaagcattcactaatataattttgaatactatcacaaaggaatgcaatgctgctccgaaatgaaagggaggtgtgttttaagcaccttcctctcccacacggctctgggtttccacatgtgccttagaagattgctacaccccattctgctcttcttggagaaacaacccaaagcagctccataccttgcaaatcagctccagggtgtcccgtgcagtgtcgcctggccggacgaccgtcagggcaggctgattattgggcagacagaaccaggatggagtgaaatactcgtggacccaaatgtcgcagtcagggttgtgctggtgaacgtta

SEQ ID NO: 3302 - DNA, 490 bp, Homo sapiens
  MAP TO AC008038.1; EXPRESSED IN HBL100, SIGNAL = 1.8; EXPRESSED IN FETAL LIVER, SIGNAL = 1.4; EXPRESSED IN BRAIN, SIGNAL = 0.95; EXPRESSED IN PLACENTA, SIGNAL = 0.69; EXPRESSED IN BT474, SIGNAL =   1; EXPRESSED IN BONE MARROW, SIGNAL =   1; EXPRESSED IN LUNG, SIGNAL = 0.97; EXPRESSED IN HELA, SIGNAL = 1.6; EXPRESSED IN ADULT LIVER, SIGNAL = 1.1; EXPRESSED IN HEART, SIGNAL = 1.4
aaaaattctcacaccttgctgtgataataaaaaaaatagaagtatgagaaaaaaaaggaaaagaaaaaacaatcttactatgaaggtttccatccatggagatgtacaggtattaaagagtatcatgatttttattctattaaacagcacactgtaaacatgtctcatgatattaaatactctggagatacatttgttacttggtttttatttaaaaccatgttttaaagactgaaaaataaagattggcacatcttttccttagatgtattaatatagtccatcggcaacaggccattcttgttctgaagccactcagtacatttcaagctttatcccaagaccactatttctctcttacttctaagttatttaagaataagtgtcttactataatctgtgagcacaggtaagtcctcccaaaataacagtgccctggccagttggaagcttaggtcttatgaaatttccacagtgacaaggtagcaaa

SEQ ID NO: 3303 - DNA, 452 bp, Homo sapiens
  MAP TO AL022397.1; EXPRESSED IN PLACENTA, SIGNAL = 0.79; EXPRESSED IN BONE MARROW, SIGNAL = 0.85; EXPRESSED IN LUNG, SIGNAL = 0.78; EXPRESSED IN ADULT LIVER, SIGNAL = 0.89; EXPRESSED IN BRAIN, SIGNAL = 0.84; EXPRESSED IN BT474, SIGNAL = 0.62; EXPRESSED IN HELA, SIGNAL = 0.79; EXPRESSED IN HEART, SIGNAL = 0.99
tggctttaaaaatgtttcccagtaaaaggattcaagaaagtcttaaatatagacacatgaacaggaaagctgagaaatttggatgatgttttactaatttaaaaaaaatcaagagaaaatttaatcactcacaccaacattaggagacctcacctttttctggtattatcttagaatatttttcatctttactctttgctgttcctttcttggcagaaatggcctcagttttctttggttttatgtcttcgttcactttacagtatttcgttgaatttatttgttcttcaattttcccagataacttatctttagaattagttgatggtgctggatgtatgtcttcttttataatagatttctgtgtcatatgcctattgcttgtcaaaatatcttttaaagaacattcatttcctgaacactcattccctttggatgctttacttttaaca

SEQ ID NO: 3304 - DNA, 476 bp, Homo sapiens
  MAP TO AC007750.2; EXPRESSED IN HEART, SIGNAL = 0.94; EXPRESSED IN PLACENTA, SIGNAL =   1; EXPRESSED IN BT474, SIGNAL = 0.66; EXPRESSED IN BONE MARROW, SIGNAL = 0.88; EXPRESSED IN FETAL LIVER, SIGNAL = 0.63; EXPRESSED IN LUNG, SIGNAL = 0.97; EXPRESSED IN HELA, SIGNAL = 0.96; EXPRESSED IN ADULT LIVER, SIGNAL = 0.92; EXPRESSED IN BRAIN, SIGNAL = 0.93; EXPRESSED IN HBL100, SIGNAL = 0.85
tttattcattcattcattcaacaaacatttactgagtctgattgtatatcaaacactgtgcaagactttgaggatgtagtaagagcaaggcagcaacttgcatggcagttttttaagtgttcacctttcataaagctttattagattcttattttgtctagaaagataaaaggtacatgaagtacaaaagggagagattttaagtagaaaatgccaagctaaaagaaagatttaaaaatatcttgccttttctatctttaggaagctggagtataataataattatcatttaccacattttattattggatatgagacatggaaaagggggtatcccaatagcctaattaaagctgcaaagtataattatccttcacacatgacaaacaagattttcattcattcattcactcattcagtgactgcaattgcaagccactattttaggtactgtaggtaagacctcccctcaaaaa

SEQ ID NO: 3305 - DNA, 487 bp, Homo sapiens
  MAP TO AC007740.1; EXPRESSED IN HEART, SIGNAL = 0.94; EXPRESSED IN PLACENTA, SIGNAL = 0.64; EXPRESSED IN LUNG, SIGNAL = 0.76; EXPRESSED IN BRAIN, SIGNAL = 0.71; EXPRESSED IN BT474, SIGNAL = 0.63; EXPRESSED IN BONE MARROW, SIGNAL = 0.79; EXPRESSED IN FETAL LIVER, SIGNAL = 0.73; EXPRESSED IN HELA, SIGNAL = 0.71; EXPRESSED IN ADULT LIVER, SIGNAL = 0.75
tgtattgagtctgaatgcctgcagttaattcagagaacaagtatttgagttaaaaattttgacatgtttagcaaatcaagtattcattaaggtaggcgaggtagaagagtagtaggaactcctgcgtggcaatgactacacctgcagttctgtgagcaagaaattgactgtatttcaggcagagatacccagaacactggtagtatgaaactctttctttttttcctcaggtcctaaagggtttcccagaatgcttacaagcagacatttgtctacatctcaaccagacattgctgcaaaactgcaaagcctttcggggggcaagtaaaggttgccttagagctttggcaatgaagttcaaaaccacccatgcacctccaggagacaccctcgttcactgtggggatgtcctcactgcactttatttcttatccagaggctccattgaaattctcaaagatgacattgtggtggctattctgggtga

SEQ ID NO: 3306 - DNA, 428 bp, Homo sapiens
  MAP TO AL049797.8; EXPRESSED IN HBL100, SIGNAL = 0.75; EXPRESSED IN LUNG, SIGNAL = 0.98; EXPRESSED IN HELA, SIGNAL = 1.1; EXPRESSED IN ADULT LIVER, SIGNAL = 0.84; EXPRESSED IN BONE MARROW, SIGNAL = 0.95; EXPRESSED IN BRAIN, SIGNAL = 0.75; EXPRESSED IN PLACENTA, SIGNAL = 0.93; EXPRESSED IN BT474, SIGNAL = 0.65; EXPRESSED IN HEART, SIGNAL =   1; EXPRESSED IN FETAL LIVER, SIGNAL = 0.83
gcaccttctctcttggactgtggatgaaagttcagtgtttcctctgacacctctttttttctttaccttcatggtagactagctcctgtctgattgacacattcttttcttaaatgttttaatatctgcaatcagataatgaagttaaccaaatatgtccaccatgctttatttacagagtgtgccttctttctttggagactgttgtgtaatgctctttatctttactgattgtgttttgttttctgtataggtatatgtcaaccttgtattctcaccctgattttccagagaaagggccagaggagattaatgaagaactaatgaaaaatgttagccacaatccccttttacttctcacaccacagaaagttaaaagatatgttgagtctttatggaagaagaaaagctctggacaacctgtcacc

SEQ ID NO: 3307 - DNA, 454 bp, Homo sapiens
  MAP TO AC008277.1; EXPRESSED IN BT474, SIGNAL = 0.87; EXPRESSED IN FETAL LIVER, SIGNAL = 0.72; EXPRESSED IN HELA, SIGNAL =   1; EXPRESSED IN PLACENTA, SIGNAL = 0.86; EXPRESSED IN BONE MARROW, SIGNAL = 1.1; EXPRESSED IN LUNG, SIGNAL = 0.85; EXPRESSED IN ADULT LIVER, SIGNAL = 0.8; EXPRESSED IN BRAIN, SIGNAL = 0.88; EXPRESSED IN HEART, SIGNAL = 0.93
taagcagttgcctcccattcccctctctctcagccctggaagcgatcagttttcactttgtccctgtaggtttacctgctctgaatatttcatgtagatggaatcatacaacatgaccttttctgtcttctttcacttatcatattttcaagttcatccaactgtacatatatctgtacttcatttttaaatgatgcaataatattccattgtataaacatgtttatttttattttcaaggtgtaaatgggtcaataaatggaagtaatacatcatctgtaattggtatcaacacatctgtactatccactactgcttcaagttccatgggacaaactaaaagtacaagctcaggtggaggaaatcgaaaatgtaatcaggaacaaagcaaaaaccagcctttggatgctagagttgacaaaatcaaagataaggtaagttgtacttggaagga

SEQ ID NO: 3308 - DNA, 456 bp, Homo sapiens
  MAP TO AC007247.2; EXPRESSED IN HBL100, SIGNAL = 4.6; EXPRESSED IN PLACENTA, SIGNAL = 5.8; EXPRESSED IN HELA, SIGNAL = 4.9; EXPRESSED IN HEART, SIGNAL = 4.2; EXPRESSED IN ADULT LIVER, SIGNAL =   6; EXPRESSED IN BT474, SIGNAL = 4.2; EXPRESSED IN FETAL LIVER, SIGNAL = 6.9; EXPRESSED IN BONE MARROW, SIGNAL = 5.5; EXPRESSED IN BRAIN, SIGNAL = 5.1; EXPRESSED IN LUNG, SIGNAL = 4.9
acacccatacacagacacccatgaatacatacaagaatacacacacagacgtgtattcatgcagacacacacatacacaagacacagatacacatacatgctcacagagacatacaggggcatatacacagacatatacacatgcatacacacaccaaaccacacagatacacacagaacagacaccgaggcacacagacacccacacccagccactcaccatctttgctaaggggaacagtactttcagagtcttcagacctacttacagccgcatccctccttacatgaactggatcccacatgccgccgatacacccagccctgtgaccatcagaggccctgtctcccctttcttgagggagccaccccctacctggctctcaaactcattctctacctggaaaacataaagctcttctatgaccgtccacaccatcgtccagcaagcctact

SEQ ID NO: 3309 - DNA, 484 bp, Homo sapiens
  MAP TO AL035687.13; EXPRESSED IN PLACENTA, SIGNAL = 0.75; EXPRESSED IN BONE MARROW, SIGNAL = 0.84; EXPRESSED IN FETAL LIVER, SIGNAL = 0.59; EXPRESSED IN LUNG, SIGNAL = 0.71; EXPRESSED IN HELA, SIGNAL = 0.68; EXPRESSED IN ADULT LIVER, SIGNAL = 0.73; EXPRESSED IN BRAIN, SIGNAL = 0.81; EXPRESSED IN HEART, SIGNAL = 0.91
catcaaaatcaaggaatgataaagcttagtgaggaaggcttgttgaaaatggaaaaaggccaaatactaggcatcttgtgtcagctaggcaagctgtgaatgccaaagaaaagttcttgatggaaaacaaaaatgctacttcagtgaacacgtgaatgataagaaagtaaaacagccttattgatgacatggagaaagtctgagtggtttgggtaggagatcaaaccagctacaacatttccataagtcaaagcctaattcagagcaagatcctaactgtcttcaattctctgaaggctgagcaaagtgaggaagctacagaagaaaagtctgaaaccaacagaagttggttcatgaggtttaaggaaagaagctgtctttataacataaaaacgaaagatgaagcagcaagtgcagatataaaatctgtagcaagttatccagaagctctacctaagatatttaatgaaggtaggtccactaa

SEQ ID NO: 3310 - DNA, 491 bp, Homo sapiens
  MAP TO AC007160.3; EXPRESSED IN FETAL LIVER, SIGNAL = 0.83; EXPRESSED IN ADULT LIVER, SIGNAL = 0.67; EXPRESSED IN PLACENTA, SIGNAL = 1.1; EXPRESSED IN BONE MARROW, SIGNAL = 0.65; EXPRESSED IN HBL100, SIGNAL = 0.98; EXPRESSED IN LUNG, SIGNAL = 0.73; EXPRESSED IN HELA, SIGNAL = 0.79; EXPRESSED IN BRAIN, SIGNAL = 0.82; EXPRESSED IN BT474, SIGNAL = 1.9; EXPRESSED IN HEART, SIGNAL = 3.2
tgggaatgaagttgtaggagcttctactagaatgacttacgagtaacagagaatagacatctctgcctacgtccccatcctctctccctatcctcctgcaagagtcccccgccttcgctctagagagaacagctttctcagggtgggtttaagcagcagaaggcagggtgtgaactggagcccctcaactgtgcaggtgcttcacggggtagccacatggtctatccagactggattcttataccatgaaaataagaaacaggaaaagaacattcatgaagaaaacataacaaagaggcattgtcttactggcagtaattggtgacgttgagaaaacccagctggctttttcgtagcatggaagatgcattaaatcccatcctggcaatctatatttattacaaaaaagagaacaattcaatgaagatttatttgttaggggatgatggagaatgtttttagttccataggatgtaatgaaggaaacaggc

SEQ ID NO: 3311 - DNA, 477 bp, Homo sapiens
  MAP TO AC007716.1; EXPRESSED IN PLACENTA, SIGNAL = 0.61; EXPRESSED IN BONE MARROW, SIGNAL = 0.78; EXPRESSED IN HBL100, SIGNAL = 0.73; EXPRESSED IN FETAL LIVER, SIGNAL = 0.57; EXPRESSED IN LUNG, SIGNAL = 0.7; EXPRESSED IN ADULT LIVER, SIGNAL = 0.67; EXPRESSED IN BT474, SIGNAL = 0.65; EXPRESSED IN HELA, SIGNAL = 0.66; EXPRESSED IN HEART, SIGNAL = 0.78
tcttcggtattgaggtaatgtggtaaatgaccatggatttgtggggctccctaaaatcccttccaaatggattaccatatgacttattgatttctagatatgtatgatttatggtacatccagtatgctgctcttactctcttttattcttgcttaccttatcatactctttttgaaagtctttttttgcttgaccttcctcttccaattcctaatacatttttgaaccccagctacatatcagcccctgtggtcctcagtggtgatcaagacaaatgcaatccttgatctaatgatgcttcctttcaacttacttctttgaataagcaccaaattcagggaatgcagctacaccacaagtcacagattggtcctgcaggcaatggcaaagtaccagattcccagccattaggctgccagactcagagccccaggctgtgaggctatagagcctgggcccctgtgtccaggtccagt

SEQ ID NO: 3312 - DNA, 500 bp, Homo sapiens
  MAP TO AC007033.3; EXPRESSED IN ADULT LIVER, SIGNAL = 1.2; EXPRESSED IN HEART, SIGNAL = 0.99
ggggtcagagaaaggatagaagaagcatagaattggaactaaaactgtgtagccttaaagtgctctggcctgaaaatctagagaaggcttcagcaggagaaagcaggagaggacatggttattttcagtaagtcatagaagggaagatggctaacagaaatgaaatggacacagaacatcaccaaagtagcatgaaggtatcagatcccctgagataggtcttagccaaataattccactcctgcacattagagtttgacatctaaggcccctccatcttttttccagtcaagacctacacaaatgggtgagggcttgctacatgagaagtaagcaggaacaatacgagaaccaagacaagctacaagcaggacatgaacacatcaaaaggcttctgaaaagacacgtctacctagcctgtgaccaggtcaactccctcattaagtttagcccctttaaaaaatatatcttgtttatggtgcctttggtttctccctttt

SEQ ID NO: 3313 - DNA, 465 bp, Homo sapiens
  MAP TO AC007857.1; EXPRESSED IN PLACENTA, SIGNAL = 0.89; EXPRESSED IN BT474, SIGNAL = 0.78; EXPRESSED IN FETAL LIVER, SIGNAL = 0.62; EXPRESSED IN HEART, SIGNAL = 0.8; EXPRESSED IN ADULT LIVER, SIGNAL = 0.79; EXPRESSED IN BRAIN, SIGNAL = 0.84; EXPRESSED IN BONE MARROW, SIGNAL = 0.76; EXPRESSED IN LUNG, SIGNAL = 0.81
ccctttcaacctgtcctctgcgtagatgcctggctagttagcctaaaacactactacttcattatgattctccataaattcgtggtttacaaaaccacactcgatgcggatccaccttcctaaaccaatctcatctccaactattccatctgggattgcttcctcaactcttaaagcttcatgctcgtcttcatttccggcaccctcatctccttttaacttactctaaacatcctccactgttgaaagctccattccattttcacctttgtagaggactaccaagcatcacagaacatgccagtcatttaccttttgctcttgattcattgccacctttcttctgttctgctccatatgcagggagctcgtccctgcaaactccattcccaggcattcttgttaactggcttccagacaggttcatccattaagacgtgagatccagaagacatctccgaagag

SEQ ID NO: 3314 - DNA, 484 bp, Homo sapiens
  MAP TO AC007777.1; EXPRESSED IN HBL100, SIGNAL = 0.68; EXPRESSED IN BRAIN, SIGNAL = 1.1; EXPRESSED IN LUNG, SIGNAL = 1.2; EXPRESSED IN HELA, SIGNAL = 0.88; EXPRESSED IN ADULT LIVER, SIGNAL =   1; EXPRESSED IN HEART, SIGNAL = 0.89; EXPRESSED IN PLACENTA, SIGNAL =   1; EXPRESSED IN BT474, SIGNAL = 0.8; EXPRESSED IN BONE MARROW, SIGNAL = 0.93; EXPRESSED IN FETAL LIVER, SIGNAL = 0.89
gggatcagtgatgtctgtggttttctctatggcttagagtttagttgttagtggaggctgtggtgaagttttgctgggaatggggatgccaggttgaccagtgcttggacccaatggtggcagtaaaaggctgaacatgtttgtccttgggtcccacagtgatgtacactggtgccagtgttagcagttccatgtgggtcaattattggccctctagatgacttgttcacatgctgacagtggcaacaatgggctgggtgggtgagcaataagccttaggcccctggacagcatgtgtagtgtgggcaatggcaatagcagtggtgggataatctgttctcaaacagtccacactgatgttggtggtggctgtgatgggctgggtggggagcttacaggcctgcaggtggtacatgtaggtgggtgccagctgtattggttgcagcaggtcaggtggatccaacctcaagcccctgtaggagtg

SEQ ID NO: 3315 - DNA, 488 bp, Homo sapiens
  MAP TO AC009419.1; EXPRESSED IN BRAIN, SIGNAL = 0.95; EXPRESSED IN BT474, SIGNAL = 0.96; EXPRESSED IN ADULT LIVER, SIGNAL = 1.2; EXPRESSED IN HEART, SIGNAL = 0.88
  unsure 27
  unsure 291
  unsure 375
caggtttgattcttgccctccaattgnttcccattgtagtgaaagagacagatcagtaaataggtaaatgcaatgctgtatgatggacatttatcacttagcatttataattaacattgacatttaaaaatgtatgttatttatcgtcttggtccccgatagaaaataagctccacgagggcaaaggtttttgcatttttttttgttcattcagtgtctctagaacctcaaagagctacaggcacatagtagatacccaatgttgtttgaatggaagaaaaaaccccacantttatccctctgctcccattttccctccccagaggcaactggtgttattaggccctgggaggagtgtactatttcaacagaccnaccatgctctccaccaaactttgactttggtactgcaggtgagtctctgagtatcccacaatttgggggattctacttgccaggaggtgtagggtgctgtccaccagctgtaa

SEQ ID NO: 3316 - DNA, 475 bp, Homo sapiens
  MAP TO AC007280.2; EXPRESSED IN PLACENTA, SIGNAL = 0.6; EXPRESSED IN FETAL LIVER, SIGNAL = 0.58; EXPRESSED IN LUNG, SIGNAL = 0.7; EXPRESSED IN HELA, SIGNAL = 0.61; EXPRESSED IN ADULT LIVER, SIGNAL = 0.92; EXPRESSED IN HEART, SIGNAL = 0.84
gggctctgctaacatccctcaacttcaataatacgctttcttttctcttgtgattatagggaagaataatgatgctcataataaataattaagggcctttgtaaataaaacataaagtacagaatgttcttccaagcttttttctgattctcttcccacgtatttcctcttattgtgatacacgcatcccacaacagtgtgcagtcttcagactggctagaaattgtgtgcagacattattattgtaattacagaatctctgggtagcaagaaacgcatgctacagttatttaacagggagcaccatgacaagaactgtagtaaagattactccactgaagctggtatgggtcagagggagagggaaaagaaggagggagggagacgacatgaggggaagatgtgagcaagcagaaggagaaggtatgaagcgcaattggaattgcagattttttgcaagtgagagggtttccat

SEQ ID NO: 3317 - DNA, 410 bp, Homo sapiens
  MAP TO AC007736.3; EXPRESSED IN HELA, SIGNAL = 0.77; EXPRESSED IN ADULT LIVER, SIGNAL = 0.66; EXPRESSED IN HEART, SIGNAL = 0.83; EXPRESSED IN PLACENTA, SIGNAL = 0.82; EXPRESSED IN HBL100, SIGNAL = 0.82; EXPRESSED IN LUNG, SIGNAL = 0.99; EXPRESSED IN FETAL LIVER, SIGNAL = 0.76; EXPRESSED IN BONE MARROW, SIGNAL = 0.72; EXPRESSED IN BT474, SIGNAL = 0.7
agagccagcaacgacaatgatgattccaacagcctcacatatgaaactaatttattaagacatatcagaaactcttgggaatgaagtgtctgctaattaggccaacacaaacagattcccaaaccttaacacagtttttccaaacatctgatgaagaactttgatttatgggctgtccaggtgaaacctgaacagatggtatcttttaataataattgacacatgagtttgttaaggatttcagtctcttgaaaacatgcagctctgtagaggaaaacaaagaggcacatttttagagttatctaccttgtctttatcttcaacaacatctgccaagacatcatctggatccaggattcctccatctgtatattctaagtgatgaatcttcacccagtaaccaggaccct

SEQ ID NO: 3318 - DNA, 490 bp, Homo sapiens
  MAP TO AC007720.1; EXPRESSED IN LUNG, SIGNAL = 1.2; EXPRESSED IN HEART, SIGNAL = 1.2; EXPRESSED IN PLACENTA, SIGNAL = 1.1; EXPRESSED IN BONE MARROW, SIGNAL = 1.5; EXPRESSED IN HBL100, SIGNAL = 1.1; EXPRESSED IN FETAL LIVER, SIGNAL =   1; EXPRESSED IN ADULT LIVER, SIGNAL = 1.1; EXPRESSED IN BRAIN, SIGNAL = 1.3; EXPRESSED IN BT474, SIGNAL = 1.3; EXPRESSED IN HELA, SIGNAL = 1.2
attgcttgctatgtggtccctaaaccagtgccacatatttctagtcaggagaggttacattgtccttgtgtaatgacacagcccaaaatatcagtaatttagtagaacagtttattttttgttgctattacatttccttgtggttaatggaatgcgaagtgaggataggaagggagtgccttctcagaagagacccaggtgaataactctcttgaatgtagctgttcccccagtccaaaggagagatttttggagggttctttatcaaccattatatattctgttacaaaagtgacttatgccacttcctacttgcaggtcattggctacaattattgacacagttgcacccagtgacaaaggggccaagaaatgcagttctcccatgtgcactcaggtggaaaacatcatgaatggctgaggcaacatggttgctaccagagttaggaaaggaaaagatcatgaaactaacctcccaagcaatgggtag

SEQ ID NO: 3319 - DNA, 469 bp, Homo sapiens
  MAP TO AP000095.1; EXPRESSED IN HELA, SIGNAL = 0.6; EXPRESSED IN BRAIN, SIGNAL = 0.85; EXPRESSED IN HEART, SIGNAL = 0.85; EXPRESSED IN ADULT LIVER, SIGNAL = 0.65
tccttctttttctcacatgccctttttaaaggcatcttcctgcatttttgtctttagttccagaatgatggatatatatttgtgtatgtatatgtgtgttttatactttctggtttctctttgctgatactgtttcataaacataactgtataaattggcttttttttattagaaccaaccatcacaggagcttcatgaatgagaagcatttagagttgagaataagaatcaggagtacccaggaaaagtctagacatttgcaaagaaactagactaagctgacaattttggacttgcttttgcagagggctgacctggcagtggctcctcttaccatcacctacgtgcgggagaaagtcattgacttctccaaacccttcatgaccctaggcatcagcattctctaccggaagcccaatggtaccaatccaggcgttttctccttcctcaaccccctgtctccagata

SEQ ID NO: 3320 - DNA, 487 bp, Homo sapiens
  MAP TO AC007243.2; EXPRESSED IN PLACENTA, SIGNAL = 1.2; EXPRESSED IN BONE MARROW, SIGNAL = 1.3; EXPRESSED IN FETAL LIVER, SIGNAL = 1.3; EXPRESSED IN LUNG, SIGNAL = 1.5; EXPRESSED IN ADULT LIVER, SIGNAL = 1.2; EXPRESSED IN BRAIN, SIGNAL = 1.9; EXPRESSED IN BT474, SIGNAL = 1.4; EXPRESSED IN HBL100, SIGNAL = 0.92; EXPRESSED IN HELA, SIGNAL = 1.9; EXPRESSED IN HEART, SIGNAL = 1.5
catcggtgggtgtgtgttacagggtactctcttagttggccatctataggcggcttgtgtcaaccagctcagttagacccccttccgtatcacaaggacagggggatttctgtatcctaggatttcttgctttggtgtactggaagaatcagatcacatgtgggcttggagaatgagtgcaaggttttattgagtagaagtacctctcagcacatgtgggagccagatgggagatggttttcccctggaccaagtggctggacttttctctgactgctccagccaaactccatgtccttccgctggtcgatggcctgcaggtgcccatcagcgtgctcgtctgctggcgtgctctcaatgaccagccacttgtgtcttcttccccggatgtgttcctctccacatctagctgcttctgtgtgtctgcccactagggtctcgggtttttatcaagatgggggcatggtgggccagggtagtcctagaa

SEQ ID NO: 3321 - DNA, 366 bp, Homo sapiens
  MAP TO AL033380.10; EXPRESSED IN ADULT LIVER, SIGNAL = 1.8; EXPRESSED IN BT474, SIGNAL = 1.1; EXPRESSED IN FETAL LIVER, SIGNAL = 1.6; EXPRESSED IN BRAIN, SIGNAL = 1.3; EXPRESSED IN BONE MARROW, SIGNAL = 1.3; EXPRESSED IN PLACENTA, SIGNAL = 1.2; EXPRESSED IN HBL100, SIGNAL = 1.1; EXPRESSED IN HELA, SIGNAL = 1.2; EXPRESSED IN HEART, SIGNAL = 1.3
gcacacttctatccatccccaccactataatctaaattaccatgatctctctcctgaactactccactgctctcttaatacacccactctcaccatcctccaatcagttttccacaatgtaattagagtgatcttttcaaaatgtaaatctgggttcctttcccttaaattataatccttcagtgcctctccattgctcatagtaaaaatgcttcttaacagcccatgatgccctacctacctccccagcattgcccacaccatgaccacaatacccatctccaccatcagtgtgatcatatcctccaaccccaaaatccccccagcctcctccaccaccatcacaggagtctgcataaagcagcc

SEQ ID NO: 3322 - DNA, 461 bp, Homo sapiens
  MAP TO AC009296.1; EXPRESSED IN HEART, SIGNAL = 0.87; EXPRESSED IN FETAL LIVER, SIGNAL = 0.65; EXPRESSED IN LUNG, SIGNAL = 0.71; EXPRESSED IN PLACENTA, SIGNAL = 0.73; EXPRESSED IN BONE MARROW, SIGNAL = 0.74; EXPRESSED IN ADULT LIVER, SIGNAL = 0.79; EXPRESSED IN BRAIN, SIGNAL = 0.82; EXPRESSED IN BT474, SIGNAL = 0.61; EXPRESSED IN HELA, SIGNAL = 0.77
ccttctcacctcttcacgttctgattttacttgacttcagcctcacattcccacagttggtaggtttcagtctggaggccctctctcctgtgtggttgctgactgttgaattgacctaggatccatggaacccattgctcttctctggccaacacagcctgcccaggtgacctcccgagttagttgcatggccatagatgccatctctgtgccaaggggtcctgtctcccctcaggccatgactgctcccagtccttccacattctccccctctccttcccctgccaactcctactcacccttcaaagcccaggtcacagtctgtggcaacttctggaactcccctggggagatgtagttcctccctttctgtgctccagggacacttgtacctccactaagttggtccatggcatgccatgtctttctctcacaagcccctcaaaggctagaaccatgga

SEQ ID NO: 3323 - DNA, 453 bp, Homo sapiens
  MAP TO AC007106.6; EXPRESSED IN BT474, SIGNAL = 0.94; EXPRESSED IN BONE MARROW, SIGNAL = 1.4; EXPRESSED IN FETAL LIVER, SIGNAL =   1; EXPRESSED IN HELA, SIGNAL = 0.93; EXPRESSED IN ADULT LIVER, SIGNAL = 0.85; EXPRESSED IN BRAIN, SIGNAL = 1.2; EXPRESSED IN HEART, SIGNAL = 1.1; EXPRESSED IN PLACENTA, SIGNAL = 1.1; EXPRESSED IN HBL100, SIGNAL = 1.1; EXPRESSED IN LUNG, SIGNAL = 1.1
tgcctaaccactcttcttttgaaaaatagcctttgtcttgttatcagaactccgtagagaccaaatgctttatcatgggttatcaagtcaatatgtgacctgaactgcccatcagaaactgggtattgtctgactcctcaacccataaagttgggcgttcacagcagtgctccataaattgaaagtagcatatatgagatcagctttaagcatgccctgaaggcacaagtgaatgaggaagtaacacaaatccacacttcatatactcctgctgcactggcttctctttctcaatccacacatttacgttgaacagttggttgaggaagaaaaactcaagcttggtttccagatggttctgcacaatatgtaggcaccatgcaaagatggacagtttgagtacgattgcaccaatccaggatgaccctgaaaggcaatgctgatggtaaattc

SEQ ID NO: 3324 - DNA, 490 bp, Homo sapiens
  MAP TO AP000045.1; EXPRESSED IN PLACENTA, SIGNAL = 1.3; EXPRESSED IN BT474, SIGNAL = 0.8; EXPRESSED IN LUNG, SIGNAL = 0.94; EXPRESSED IN HELA, SIGNAL = 1.2; EXPRESSED IN BRAIN, SIGNAL = 1.1; EXPRESSED IN HEART, SIGNAL = 1.1; EXPRESSED IN BONE MARROW, SIGNAL = 1.3; EXPRESSED IN HBL100, SIGNAL = 1.2; EXPRESSED IN FETAL LIVER, SIGNAL = 0.78; EXPRESSED IN ADULT LIVER, SIGNAL = 1.4
gttttatgatggccccactggggaagtagaaatgcaacaagtgtaggctggtgaaaggagggggctgtggcccatgacaaacagcaagaaaaacccagcccatcaccggagacctaagggaattcatcctttcgctaacatgccaattcctctgaccttgatcctggaatttcttgaaacaagggggcaccaagtcacatatcagggccccacttggtaatgatcaaggcctactttgagctcggacctcttacagctctgttgaatccagggaagacactcacctacccactcacaggtgtcagcggccctgcctttggctatgtcaatccccacggacaccaacgatgacacaaaatggcagcaaacagtggaagatggtagtcagagaaggcaacagagttctcaggaaatggagtccagaagttgtagaatttggactgtgggtatggcaggagtgggggttgggggaggcgttgtagatgaaggc

SEQ ID NO: 3325 - DNA, 471 bp, Homo sapiens
  MAP TO AL049738.4; EXPRESSED IN PLACENTA, SIGNAL = 1.1; EXPRESSED IN BT474, SIGNAL = 0.91; EXPRESSED IN BONE MARROW, SIGNAL = 1.5; EXPRESSED IN LUNG, SIGNAL = 1.3; EXPRESSED IN HELA, SIGNAL = 1.3; EXPRESSED IN ADULT LIVER, SIGNAL = 1.2; EXPRESSED IN BRAIN, SIGNAL = 1.5; EXPRESSED IN HEART, SIGNAL = 1.5; EXPRESSED IN HBL100, SIGNAL = 1.1; EXPRESSED IN FETAL LIVER, SIGNAL = 1.4
ttgagcttagtgaggaaggtatgttgaaagccaagatagatggaaagctaagccccttgcaccaagttaggcaatctgtgaatgcaaagaaaaagttcttgatggaaattaaaagtcagagaacatataaatgataggaaagtaaaacatcattattgctgataggaagaaaattttagtggtccaaatagaagatcaaaccaaaagaaaatcaaacaaaaacctaattcagagtaagctctgaactctcttaaattctatgaaggctgagaggtgcaagaaagctgcagaggaaaagttgggagttagcagatgttcattcttgaggttggaggaaaataaaaaagccatcttcatgacatacaagtgcaaagtgaagcagcaagtgctgatgtagaagttgcagcaagtcatccagaagatctagctaagctattgttgaagttgactaccctagacaacagattttca

SEQ ID NO: 3326 - DNA, 466 bp, Homo sapiens
  MAP TO AC007385.2; EXPRESSED IN BONE MARROW, SIGNAL = 0.8; EXPRESSED IN HBL100, SIGNAL = 0.79; EXPRESSED IN ADULT LIVER, SIGNAL = 0.77; EXPRESSED IN BRAIN, SIGNAL = 0.81; EXPRESSED IN BT474, SIGNAL = 1.2; EXPRESSED IN LUNG, SIGNAL = 1.3; EXPRESSED IN HELA, SIGNAL = 0.86; EXPRESSED IN PLACENTA, SIGNAL = 0.8; EXPRESSED IN FETAL LIVER, SIGNAL = 0.94; EXPRESSED IN HEART, SIGNAL = 0.89
cccagttcctgccaacttagctggaaacgatgccacagcgagaccagaaagaggagtcgccttaaggtatccctacaaagtcacctttctgataaaaaggagggaaaaaaaagttagatatctaaaataagcctagaatctcacacacagctgtgacttctaagtgaaactcttttctccctcatgtccttaaatagtcacagaatcacacacagcctgacttttaaagacaagcttggctacaggaaatgaaccaaccccaaagactcttctaacctgtctcctgactgggctccttcagaaagtgttctcctgttccatctgtagggctgcttactactggaacctaaaacaaaacctgttgtttgtaccatcactttttctggtgtttcctgtgcttttgtgattccaagtctgttcataagttctgaagataaattatgtgaaatcatattttggcatatgg

SEQ ID NO: 3327 - DNA, 485 bp, Homo sapiens
  MAP TO AL031320.6; EXPRESSED IN ADULT LIVER, SIGNAL = 0.65; EXPRESSED IN LUNG, SIGNAL = 0.7; EXPRESSED IN HEART, SIGNAL = 0.81; EXPRESSED IN PLACENTA, SIGNAL = 0.73
tcaggcaacgtgtcaatttcccattggctctgcaagacaaactagcatcctttcagggcccccaggtaaggttgcacaggtggtgccccgctaaagcatgcctggcccagagggtgaataaaagaggctgggatagagccccttccatggtttctaaacaaagctaagacaaaccacccagagacacccatctgctcataagcactagccagaggggtgctttcacccaaagaggaggccttgtaattcacactaggccccaagtgggctaatggcagccctgggtcttcacttagggagagaagatccaggagctgggcaggccatggatgaagaagtgaactatccatgtggcgacccagttctgcacccccagaatggcatagagtcagcctctgctggaggcctctcaccacagctgctcattccttttcttgaagacacatctcccatttatttttgggcctgaagaatgagggcgtctc

SEQ ID NO: 3328 - DNA, 442 bp, Homo sapiens
  MAP TO AB008681.1; EXPRESSED IN PLACENTA, SIGNAL =   1; EXPRESSED IN LUNG, SIGNAL = 0.6; EXPRESSED IN BRAIN, SIGNAL = 0.81; EXPRESSED IN BT474, SIGNAL = 0.77; EXPRESSED IN FETAL LIVER, SIGNAL = 0.72; EXPRESSED IN HELA, SIGNAL = 0.65; EXPRESSED IN ADULT LIVER, SIGNAL = 0.74; EXPRESSED IN HEART, SIGNAL = 0.8
gaacctttcctagggctgtggagtgaggccagtaagctcagaaagatgactgccatgaaggcaggcatgctgattcctgaagtttcccccaggcctctgctggtggacctgctgctgtggttggggctggtgggctctgcctgatccttgggaatatcaagtttactgtcccccaaagcttttcctcactgaagggtcctaacaaaggtgtctttcctgtctgccctatgctgcttagggcctggcccagctttgtgtgaccatcgaggattgctgggaccatgatgcagaggctcgcttgtccgcgggctgtgtggaggagcgggtgtccctgattcggaggtcggtcaatggcactacctcggactgtctcgtttccctggtgacctctgtcaccaatgtggacctgccccctaaagagtcaagcatctaagcccaggac

SEQ ID NO: 3329 - DNA, 481 bp, Homo sapiens
  MAP TO AC007786.1; EXPRESSED IN BT474, SIGNAL = 0.6; EXPRESSED IN BONE MARROW, SIGNAL = 0.92; EXPRESSED IN LUNG, SIGNAL = 0.9; EXPRESSED IN FETAL LIVER, SIGNAL = 0.7; EXPRESSED IN HELA, SIGNAL = 0.82; EXPRESSED IN ADULT LIVER, SIGNAL = 0.75; EXPRESSED IN HEART, SIGNAL = 0.82; EXPRESSED IN PLACENTA, SIGNAL = 0.77; EXPRESSED IN BRAIN, SIGNAL = 0.72
gaggtgacccttctgcaatgttgagacaggaacactcaccaactggattctgtgatgtgcaggcaggaaacctaaaattgtgggaacaactatggctgcaaaaagggaagtcagcccagggccaaagccagcacacacagaaggacccagagggagatcaagcaaaatagggcaccctgatcatgccattcctgaagctgtgctttccttgatttccaacagtttattccagtaggaataaatcttgcttgttttataggctggttggaatttggcagcagtttgatgtttgcatgttaagagttctgacactgagcaggttggagaatgagaaagagcaagacaagagaaaggaagggagagggaaattaagaaagggaagcaaggagaaaagagagggaagaaaggaggaaagaaaggaaaagaaaggagaaaaggagagggaaattaagaaagagaataaatgagaagaggcaaatca

SEQ ID NO: 3330 - DNA, 479 bp, Homo sapiens
  MAP TO AC006286.12; EXPRESSED IN PLACENTA, SIGNAL = 0.85; EXPRESSED IN LUNG, SIGNAL = 0.92; EXPRESSED IN BT474, SIGNAL = 0.88; EXPRESSED IN BONE MARROW, SIGNAL = 0.87; EXPRESSED IN HBL100, SIGNAL = 0.73; EXPRESSED IN FETAL LIVER, SIGNAL = 0.88; EXPRESSED IN HELA, SIGNAL = 0.79; EXPRESSED IN BRAIN, SIGNAL = 0.86; EXPRESSED IN HEART, SIGNAL = 0.88
ctgctctcctgacactagcaactgtgttttattccacagcaactaacacaataagacatgctttgatgcttatgggattaactcagaattaaactacaaactgaattgcctacgacaggcttgggatttttatggggatggagacaaataagactgccttgctctgaggcataggacagaagaaccacaaaatgttagcatacagaatttgcagactgattagttgttttaattaatttgctttattgtactaaaaaaatcagtaacaacaaccaaaaaggagaatggatatacttacaatgtctgaagattggaaagaaatctaaatacaccatcagcaatatgagtgactctgttgtctcctaaattcaatctctccaataagctcagacccacaaaggcagattcatccaggcgggtcagctggttataggacaaatcactgaaaacaagaaatgtggaaggtaaggaattcattg

SEQ ID NO: 3331 - DNA, 496 bp, Homo sapiens
  MAP TO AL033377.2; EXPRESSED IN BT474, SIGNAL =   1; EXPRESSED IN BRAIN, SIGNAL = 1.1; EXPRESSED IN HELA, SIGNAL = 1.2; EXPRESSED IN HBL100, SIGNAL = 1.4; EXPRESSED IN ADULT LIVER, SIGNAL = 1.7; EXPRESSED IN FETAL LIVER, SIGNAL = 1.1; EXPRESSED IN LUNG, SIGNAL = 1.1; EXPRESSED IN BONE MARROW, SIGNAL = 1.6; EXPRESSED IN PLACENTA, SIGNAL = 1.5; EXPRESSED IN HEART, SIGNAL = 1.1
cccgtatacccagaggttccactataccagactcacctttccacattttctagatccgcaattacattattaagcaaagagatttttctcagtattaaaaaaaaaaaaaaaactgaaaaaacctactttgtcttttttcttttctttatctttctttgtttttctttttactgtcagtggttacttctcatctttgggatattgaaagtgagattttaaatagtacgtatacaaggtcaaagtaagaaattatcaatatcctcttattgtttacatgtcagtctcttctctgagccattgccagcatatcagaaaatcagatgctccagataaataatgcagtgatgattttttcagagcagttcatattcccggtaaagcagattgatagggtgatgtcattttttttttcagattggagtaagacagctaccaatatcatcaagaaaagttctgataatctaggaaaatctttgtcttcaagctccattggttc

SEQ ID NO: 3332 - DNA, 456 bp, Homo sapiens
  MAP TO AC006546.9; EXPRESSED IN PLACENTA, SIGNAL = 1.1; EXPRESSED IN FETAL LIVER, SIGNAL = 1.3; EXPRESSED IN LUNG, SIGNAL = 1.1; EXPRESSED IN ADULT LIVER, SIGNAL = 0.98; EXPRESSED IN BT474, SIGNAL = 0.88; EXPRESSED IN HEART, SIGNAL = 1.1; EXPRESSED IN BRAIN, SIGNAL = 1.1; EXPRESSED IN HELA, SIGNAL = 1.1; EXPRESSED IN HBL100, SIGNAL = 0.85; EXPRESSED IN BONE MARROW, SIGNAL = 1.2
tgtttgataacagagcagggtgactatagttaacaataatgtatatatcaaaatatctaaaagagaggacttgaaatattcccaagacataaaaatgataaatactcaagtgatggacaccttaaataccttgagttgatcattacacattctatgcatgtaagaaaataacacgtgtactccatatatatgcacaaatattatgtatcagtaaaaaacttgattatattctcatacagaattgcctacctatccgtgatgtggaaaatgcactgaaattgaaggacaaaataaagcccatcagctctggagccagggataagtcacagcctctggacaccaagggcctcatccatcagataaagaagttggagcttcaggggtctgtgagttcacatacagcatccaagaacatggagggacagcaataggcccagaaagagacccctcacgtga

SEQ ID NO: 3333 - DNA, 384 bp, Homo sapiens
  MAP TO AC007881.2; EXPRESSED IN BONE MARROW, SIGNAL = 4.4; EXPRESSED IN HEART, SIGNAL = 3.4; EXPRESSED IN PLACENTA, SIGNAL = 5.3; EXPRESSED IN ADULT LIVER, SIGNAL = 3.9; EXPRESSED IN BRAIN, SIGNAL = 4.1; EXPRESSED IN HELA, SIGNAL = 3.2; EXPRESSED IN HBL100, SIGNAL =   4; EXPRESSED IN BT474, SIGNAL = 3.6; EXPRESSED IN FETAL LIVER, SIGNAL = 3.7; EXPRESSED IN LUNG, SIGNAL = 4.7
aattcactcatgagccctccaggatatctgctggcaggtgcactgaggatgtacatagcacatgtgtttgataatgcagtccaattggggagtggataaagtgcatttattttcttctatgtttgtttttgtaaaaaggagaaaggaagcaaaagactccttcctttcagacccagtgtccactgagcttggagggggtggagccgggaccagccccctaggaaaaggtgtaggaatagaaggcaatggcattggcgctatagtccatggggaggaggtgcccgatgtgcctggcccctaggctggccccacccagagcggaggagtgcctcagcttcatcagggtgaagctggagaagaagttctgagcctggatctctctgc

SEQ ID NO: 3334 - DNA, 417 bp, Homo sapiens
  MAP TO AC007327.1; EXPRESSED IN ADULT LIVER, SIGNAL = 1.9; EXPRESSED IN FETAL LIVER, SIGNAL = 1.9; EXPRESSED IN LUNG, SIGNAL =   2; EXPRESSED IN BRAIN, SIGNAL = 1.9; EXPRESSED IN HBL100, SIGNAL =   2; EXPRESSED IN HELA, SIGNAL = 1.7; EXPRESSED IN HEART, SIGNAL = 1.7; EXPRESSED IN PLACENTA, SIGNAL = 1.8; EXPRESSED IN BT474, SIGNAL = 1.9; EXPRESSED IN BONE MARROW, SIGNAL = 1.7
tttccaaacgtgttgctgacttactcttaatattggtggcagggtgatatgcacatgaaatgtggaagagtgaggagagtgagaaccatgccacagtactaaccccatgggagtcaagtcagagaatctcaatcccgtttcaaagggccacggtcagtgttgggttttacttcccaacaactcttaaactcattttcttccttccacttccaggagaaaaggatgtcattatcttaggggattttggccaagggccagacagcaatgactatgatatcctgaggaaagaaaagttccaccacctgatccccgcgcacaccttcaccaacatcagcaccaagaaccctcaaggctcgaagtctctggacaacatctggatcagtaaaagcttaaagaaggttttcacaggtgaggcag

SEQ ID NO: 3335 - DNA, 455 bp, Homo sapiens
  MAP TO AC010899.1; EXPRESSED IN HEART, SIGNAL =   1; EXPRESSED IN LUNG, SIGNAL = 6.3; EXPRESSED IN BRAIN, SIGNAL = 0.98; EXPRESSED IN FETAL LIVER, SIGNAL =   1; EXPRESSED IN ADULT LIVER, SIGNAL = 1.1; EXPRESSED IN HBL100, SIGNAL = 1.4
aaaaggaaaagcagaagagaaagtagagttgaatctgaaggggattgacatcctttgaaattatccagcaagggtacaaggaggaagtggcttttgaactaggcaaaaataggcaggtttttgatagctctcggggaaggaggtacattcaaaactgctgccctttctgaaatgttcaagtgtctttctctctccaagtggcttcagaacactgaaaactgtgacccattcagaagttctacctcctaagactttcccaaaggtgacccttatgcaattgtcattcccagtgccttcccggatcattggagatggggctaactccacagtccttctggtctctgtctcgggcagtgtggtgctggtggtaattctcattgcagcttttgtcatcagccggaggtaagcactgaagccactcactgtgcagcccccgaccttcccagtgtttatga

SEQ ID NO: 3336 - DNA, 471 bp, Homo sapiens
  MAP TO AC006367.3; EXPRESSED IN HBL100, SIGNAL = 1.3; EXPRESSED IN FETAL LIVER, SIGNAL = 1.1; EXPRESSED IN LUNG, SIGNAL = 1.1; EXPRESSED IN BRAIN, SIGNAL = 1.2; EXPRESSED IN PLACENTA, SIGNAL = 1.3; EXPRESSED IN BT474, SIGNAL = 1.2; EXPRESSED IN BONE MARROW, SIGNAL = 1.3; EXPRESSED IN HELA, SIGNAL = 1.3; EXPRESSED IN ADULT LIVER, SIGNAL = 0.97; EXPRESSED IN HEART, SIGNAL = 1.2
gaatttcttcccatctgaggcctcttgggatggttttattcaggcctgattaagcactagtaaggctgtaaatgtcttaaaatactaaaattcttccatgggagttggtaaatacctagtgcttccccactggcccagctgcctagtcctctcccttccactgcccaggatccagcaactaaaggtctcccaggggtctcatctattctcattggtcactgcaggtgccagtcagctctgcataggtccaacctctctgccaccgccaatggtacctcgggggttggctgtgtccagcctatactcctgttctgtggagggaaatgggatgagcatcgggagaatcttgggtgggtggtaccccagccagtttaccttggttctggtgtaagcgcccctgtctccacacgtctgacaggccacaatggatggagtcctggtgggtgagagggcattcctagtggtggtgct

SEQ ID NO: 3337 - DNA, 358 bp, Homo sapiens
  MAP TO AL049593.8; EXPRESSED IN HELA, SIGNAL = 2.5; EXPRESSED IN PLACENTA, SIGNAL =   3; EXPRESSED IN HBL100, SIGNAL = 2.5; EXPRESSED IN HEART, SIGNAL = 2.2; EXPRESSED IN FETAL LIVER, SIGNAL = 2.3; EXPRESSED IN ADULT LIVER, SIGNAL = 3.3; EXPRESSED IN BT474, SIGNAL = 2.6; EXPRESSED IN BRAIN, SIGNAL = 2.5; EXPRESSED IN BONE MARROW, SIGNAL = 2.6; EXPRESSED IN LUNG, SIGNAL =   3
tcctgagaaagcagaccaggctccctttactgggttaggaaaagataaaaggctaaacttcccaaggcagttgactggtgatttttcattctaacatccgaaaaaataggaataaagttgctatggtttgaatatatgtgtcccttcaaaattcatgctgaaatttaatccctagtaaaacagtattaagtgaggactttacgaggtttaggtcatgagggccttacctccatgaatggggatagtgcccttataaaagggcttgagggagcctgctttgctctttttgcccttctgccatgtgaggacacagcaaaaaggtatcatcttggatgcaggagatgagccctcaccagac

SEQ ID NO: 3338 - DNA, 480 bp, Homo sapiens
  MAP TO AL033543.6; EXPRESSED IN BT474, SIGNAL = 4.6; EXPRESSED IN ADULT LIVER, SIGNAL = 5.4; EXPRESSED IN BONE MARROW, SIGNAL = 4.9; EXPRESSED IN FETAL LIVER, SIGNAL =   5; EXPRESSED IN LUNG, SIGNAL = 4.7; EXPRESSED IN BRAIN, SIGNAL = 4.1; EXPRESSED IN PLACENTA, SIGNAL = 5.4; EXPRESSED IN HBL100, SIGNAL = 4.7; EXPRESSED IN HELA, SIGNAL = 5.4; EXPRESSED IN HEART, SIGNAL = 3.9
tacccttgttgggatggttcattgcggagagggagcccttttttagtgccagagataataacgcacatccttgtgatgggtaagtggccgtgacctgctttccatgctcttttcccttctgtgctaattttactatcctgttcctttccctcatcactgcccaatttattgcttttaaaaacattgtgcttctaaaagtggttgcacaagtcaccttaggccaacaggaaaggagacagtgaagctagaagtaaattcaccaggttgctcatcagctctcttgatttgtccacacttcgctccatccttgtctcgctggggtctcatttagatgctgtgtctctgttgccttctgcacgtgggctcaggttcctgtgtaacctgatctaaagcgtctcccttcctccttcctcctgcagcaattcacgggaagaacctggtggccatcctccacctgctggtctctctggccatgcactt

SEQ ID NO: 3339 - DNA, 369 bp, Homo sapiens
  MAP TO AC007336.2; EXPRESSED IN BONE MARROW, SIGNAL = 3.9; EXPRESSED IN HEART, SIGNAL = 3.8; EXPRESSED IN PLACENTA, SIGNAL = 5.1; EXPRESSED IN ADULT LIVER, SIGNAL = 4.5; EXPRESSED IN BRAIN, SIGNAL = 3.8; EXPRESSED IN HELA, SIGNAL = 4.4; EXPRESSED IN HBL100, SIGNAL = 4.2; EXPRESSED IN BT474, SIGNAL = 3.9; EXPRESSED IN FETAL LIVER, SIGNAL = 3.9; EXPRESSED IN LUNG, SIGNAL = 4.4
attgggataaccagggaagcaggggttctctctgggagctcagagaagcagctccttaccaaccagtagagatgttttcttaatattttaacaatgcatcaacttcactggtgtgaaccggcaggtgggcagccagccagccctgtgcccatggaagcatgtctcattcacatccttccctctctcccccacccttagccctgttcaccatgggcggcaacgctgaaggacagccctgcaagtttccattccgcttccagggcacatcctatgacagctgcaccactgagggccgcacggatggctaccgctggtgcggcaccactgaggactacgaccgcgacaagaagtatggcttctgccctgaga

SEQ ID NO: 3340 - DNA, 407 bp, Homo sapiens
  MAP TO AL031659.6; EXPRESSED IN PLACENTA, SIGNAL = 1.3; EXPRESSED IN HBL100, SIGNAL = 1.3; EXPRESSED IN HELA, SIGNAL = 1.4; EXPRESSED IN BONE MARROW, SIGNAL = 1.8; EXPRESSED IN HEART, SIGNAL = 1.2; EXPRESSED IN BT474, SIGNAL = 1.1; EXPRESSED IN ADULT LIVER, SIGNAL = 1.7; EXPRESSED IN FETAL LIVER, SIGNAL = 1.6; EXPRESSED IN BRAIN, SIGNAL = 1.1; EXPRESSED IN LUNG, SIGNAL = 1.5
atctcatccctcccatgagctatgccatatctcaaaggccagggccttaactttcacatctacgtaaccccaatagtgcctgctataatatgaaaacggccttcctgtataatgtttatagaaattcacagatactagcactcacaaagtttatacttccttcactcacttaatatttattaagcacgtaccatgttgccaagccccgtgcatgaccccaggactatttatggagactgcacacagtgcctcacctcccaagcttatttataggaggcacaggcaaggcgaaggtgaagagccccatgcccctgaaaaagagccaccagtgcctggggcacagccactctcacctgggtcggggtacattcaggcacataccacattccagaggattgggttcttca

SEQ ID NO: 3341 - DNA, 392 bp, Homo sapiens
  MAP TO AL034350.2; EXPRESSED IN PLACENTA, SIGNAL = 3.1; EXPRESSED IN HEART, SIGNAL = 2.6; EXPRESSED IN HBL100, SIGNAL = 2.6; EXPRESSED IN HELA, SIGNAL =   2; EXPRESSED IN BT474, SIGNAL = 1.8; EXPRESSED IN FETAL LIVER, SIGNAL = 3.1; EXPRESSED IN ADULT LIVER, SIGNAL = 3.2; EXPRESSED IN BONE MARROW, SIGNAL = 2.4; EXPRESSED IN LUNG, SIGNAL = 2.3; EXPRESSED IN BRAIN, SIGNAL =   2
ggagaagaaagggtagaggaggaggaagaggaagagcagaagggggaaggatggagaaagaagaggaaaagaggtggcaggagaggaaaaagggaaggaaaatggtgagaatgcatctgggccttaattaaacattttcttccctctgtcctccgtggctccgcctcccagctgcattcatccaccaagtctctatcggtctgtgtcctctcctatccttctggtgagtgctctatagaatgagggaatcagcacttcctgccccccagggagtaccaacacaccacaggtggcaaaatgaaatgtgttttaaagaaggcaacaagagcagaaaaggagctgctaattttgtctggggagatcgagaaaagcctgatggaggagatggcatt

SEQ ID NO: 3342 - DNA, 373 bp, Homo sapiens
  MAP TO AC007349.1; EXPRESSED IN ADULT LIVER, SIGNAL = 1.3; EXPRESSED IN FETAL LIVER, SIGNAL = 1.3; EXPRESSED IN LUNG, SIGNAL = 1.5; EXPRESSED IN HELA, SIGNAL = 1.3; EXPRESSED IN HEART, SIGNAL = 1.4; EXPRESSED IN PLACENTA, SIGNAL = 2.1; EXPRESSED IN BT474, SIGNAL =   1; EXPRESSED IN BRAIN, SIGNAL = 3.1; EXPRESSED IN BONE MARROW, SIGNAL = 1.3; EXPRESSED IN HBL100, SIGNAL = 1.4
gagccgaggaacagaatcagggcggtgagcaagatgccagctaggggctgaaagttgccagggctagaggtgatgctgaagggaatgtggacccacagcttccctttaccaaaggacggttccaaggcgtgggtgtgttttcattcctctctcctgttagctaggtgttccagttttggaaggggcatgtctgggcccggccacttcagttacagtcatagacgaagtcatagttgctgggctccttgggaatcggcggaggtgcgtcagggatctggatgttttccaggtccaggaggcggagcttgatttccatgctgagcagggtgtccaggtcattccgcgtcaggtcgctcatcatgtccttcccgag

SEQ ID NO: 3343 - DNA, 386 bp, Homo sapiens
  MAP TO AL031663.1; EXPRESSED IN BRAIN, SIGNAL = 2.3; EXPRESSED IN HELA, SIGNAL = 2.8; EXPRESSED IN HBL100, SIGNAL = 2.6; EXPRESSED IN BT474, SIGNAL = 2.5; EXPRESSED IN LUNG, SIGNAL = 2.9; EXPRESSED IN BONE MARROW, SIGNAL = 2.8; EXPRESSED IN PLACENTA, SIGNAL = 2.8; EXPRESSED IN HEART, SIGNAL = 2.3; EXPRESSED IN ADULT LIVER, SIGNAL = 3.1; EXPRESSED IN FETAL LIVER, SIGNAL = 2.9
ctgaagcccttgacttggacactgtgcagctggcagatcctagaccctcccagaaatgagcacctctggtcctccctgcagtcaaggcaacagacaagaaggcagtgagtttgccaagcctggaggggggtggctcaggagcactgcagactcactctgcagggtggctgcctcagtgttcccatctgaaaaaggggaacaggtaagacggctcagattatttcagaggtgcttctagcagtgacctcctgccaagctggcttttggaagatgtgttaagtctgcggtttcacaggacacgtcgccactttctcctcggaaggcagagagagcctcagcatcagaggagggacactgtgtaggtgcgaggggtgtaggacctgtga

SEQ ID NO: 3344 - DNA, 498 bp, Homo sapiens
  MAP TO AC008082.12; EXPRESSED IN ADULT LIVER, SIGNAL = 1.4; EXPRESSED IN FETAL LIVER, SIGNAL = 1.2; EXPRESSED IN LUNG, SIGNAL = 1.1; EXPRESSED IN BRAIN, SIGNAL = 1.6; EXPRESSED IN HEART, SIGNAL = 1.2; EXPRESSED IN HBL100, SIGNAL = 1.2; EXPRESSED IN PLACENTA, SIGNAL = 1.3; EXPRESSED IN BT474, SIGNAL = 1.1; EXPRESSED IN BONE MARROW, SIGNAL = 1.2
tgagggtggatcttctactcgatctattgattcaaatgacaatctcttcaagaatcacacacacacacacacacacacacacacacacacacagagagagagagagagagagagagagagagagagaaataactctttaccgtctatctgtgcatcccctacttcagttgtcacataaagttaaccatcaaaggtcttatgttgcctttacccggtttcacaatgataacgtattgtgaaactatactacagcatcacagccaggatattgatattgatatagtcaaggtaaagaacactaccatcatcataaggatctctcatgttgcccttttgtagccactttcctccagctccaccctctcctaaacgttacctatgacaaccactactctgttcttcaattctataattttgtcatttcaagaaagttatataaatggaaccacaaagtaaataagacaaagtaagacttatgcccggcatttttcccttagt

SEQ ID NO: 3345 - DNA, 400 bp, Homo sapiens
  MAP TO AL035209.1; EXPRESSED IN BONE MARROW, SIGNAL = 1.9; EXPRESSED IN LUNG, SIGNAL =   2; EXPRESSED IN HBL100, SIGNAL = 1.8; EXPRESSED IN HELA, SIGNAL = 2.1; EXPRESSED IN PLACENTA, SIGNAL = 2.3; EXPRESSED IN HEART, SIGNAL = 1.5; EXPRESSED IN BT474, SIGNAL =   2; EXPRESSED IN FETAL LIVER, SIGNAL = 1.8; EXPRESSED IN ADULT LIVER, SIGNAL = 2.3; EXPRESSED IN BRAIN, SIGNAL =   2
tccatcttccaggaaaccacaggctgctgctgcccagagttggcatgaggcttcgaggctgctgcttttccccctacatcataaccgatttcaaatggtgctagacaaaaacagactctgaacaccaggagaaatcggtcagcctgtgtaagagatgggccagtggtgctcccagggtctgcacctcgacagtccaggtggcaagtctgatttcgggtgccccgcaatcaacgccgaatactccagggcatcctctaagagcagactgatggtgtcgatgtggacaaaatggtcctccaggtgtactgccctctcccctgccccatgacaatcgacacccaatacattgttatccaacagaatatgacaatcgccacactcaaaggccctacgaacacat

SEQ ID NO: 3346 - DNA, 455 bp, Homo sapiens
  MAP TO AL031666.3; EXPRESSED IN BT474, SIGNAL = 2.2; EXPRESSED IN ADULT LIVER, SIGNAL = 3.7; EXPRESSED IN FETAL LIVER, SIGNAL = 2.7; EXPRESSED IN BONE MARROW, SIGNAL = 2.3; EXPRESSED IN BRAIN, SIGNAL =   2; EXPRESSED IN LUNG, SIGNAL = 2.6; EXPRESSED IN HELA, SIGNAL = 2.6; EXPRESSED IN PLACENTA, SIGNAL = 2.4; EXPRESSED IN HBL100, SIGNAL = 2.3; EXPRESSED IN HEART, SIGNAL = 2.7
cacgttttacatggcagcaggagaaggggggtgggaagtgccaaacacttttaaaccacaagatcttgtgagaactcactcactatcacgagaacaggatgggggaaaccacccccataatccagtcacctcccaccaggttcctcccttgacatgtagggattaaaatttgagatgaggttgggtggggacacagagccaaaccatatcaattgggcaatgacatagtaaaacgttgagggggattgaaaattctgactggttgcaaagtgaaacctcctataacacccagcaaggggagctttgtgctccttcccatgggagttaggaaaatccatttcaatgaggaagctgagcacaacacagtttatttatgtcccagatctgatgatggaaccttcaaggaaaactcaaccagtgacttttctgtagagggtgagaatttggttagttcc

SEQ ID NO: 3347 - DNA, 420 bp, Homo sapiens
  MAP TO AL031678.2; EXPRESSED IN PLACENTA, SIGNAL = 3.7; EXPRESSED IN HELA, SIGNAL = 3.4; EXPRESSED IN HEART, SIGNAL =   3; EXPRESSED IN HBL100, SIGNAL = 3.2; EXPRESSED IN BT474, SIGNAL = 3.1; EXPRESSED IN FETAL LIVER, SIGNAL = 2.7; EXPRESSED IN ADULT LIVER, SIGNAL = 2.9; EXPRESSED IN BONE MARROW, SIGNAL = 3.1; EXPRESSED IN LUNG, SIGNAL =   3; EXPRESSED IN BRAIN, SIGNAL = 2.6
tgatacgagacacacggaccttgggctggacgggcctcctgtgacctcctgtcctgttctgatggaggctgggcaaggccactgcttctttagctccctctagctgtctctctgggttacggggcccctccagccctggaactcttcagcaggggaagcaggaggggggggtcccatgatctcccaaatattctaagccctgaaggccagctcttagctctggtgacctgttcttctcaggagttcaagtttggtgaacccccaaaccaaatgcaaaagcagattctagagttccaagacccccaaaagagtaaagaacccaaggtcagagggagctctgtctgtcccacccaggggatctggagggcccccccgccccctcccgccctcctgcaccggccacttaggcccaggactcac

SEQ ID NO: 3348 - DNA, 440 bp, Homo sapiens
  MAP TO AL034418.2; EXPRESSED IN HELA, SIGNAL = 1.2; EXPRESSED IN HBL100, SIGNAL = 1.3; EXPRESSED IN BT474, SIGNAL = 1.1; EXPRESSED IN BRAIN, SIGNAL = 1.1; EXPRESSED IN LUNG, SIGNAL = 1.3; EXPRESSED IN BONE MARROW, SIGNAL = 1.2; EXPRESSED IN PLACENTA, SIGNAL = 1.2; EXPRESSED IN HEART, SIGNAL = 1.1; EXPRESSED IN ADULT LIVER, SIGNAL = 1.1; EXPRESSED IN FETAL LIVER, SIGNAL = 1.1
atttgtttacccgcaagcagctctcgcttgaaatcctcttgagtcagtggcttcttggctccaggacttccgtcttgccggtgtgatcacctcgaggccctcccctgcggtccaggatctgcgagcaggcgggtagattccacgacccctcgagtcgcaggcaaagctgagcctcatgcttggaagcccggccctatcttgatgaaggacccactgccctgggagcctggccagcctttcctgcctccctaactctgccactcctctaatgcccacagagtacaaggccagctatgtccgcagtcgctccatccgctcagtggccatcgaggtggacggcagggtgtaccacgtaggcctgggtgatgccgcccagccccgaaacctcaccaagcggcactggccaggggcccctgaggaccaagatgacaaggatggtg

SEQ ID NO: 3349 - DNA, 432 bp, Homo sapiens
  MAP TO AC007012.1; EXPRESSED IN BONE MARROW, SIGNAL =   4; EXPRESSED IN ADULT LIVER, SIGNAL = 8.5; EXPRESSED IN BT474, SIGNAL = 3.6; EXPRESSED IN BRAIN, SIGNAL = 4.3; EXPRESSED IN LUNG, SIGNAL = 4.2; EXPRESSED IN PLACENTA, SIGNAL = 4.1; EXPRESSED IN HEART, SIGNAL = 3.4; EXPRESSED IN HELA, SIGNAL = 4.5; EXPRESSED IN HBL100, SIGNAL = 4.3; EXPRESSED IN FETAL LIVER, SIGNAL = 4.2
aaaagatggcaaacccacaggatgaaggacagagagtagcagtatgctacaaaagatgagatgtgaggtcactgatcccctgtttctaaagtatagtcgtgccctagacatcaacgatccacaatgatatatggtcagtatctgcctgtgcttctggcaatatttttgtgtcctttttagttgtgcagaactctacttcccacctcatcttaccatttcccattagccttcagtatctggatttagttcctctaggatctgatatgtatcttccctgtatttttgcatcttagataattctagctgtcctcagcagtccctctgtattcatcttctaattcaggctttccaagggaggaatataaccagttttccaaaggtaaaggatattcctgaggtaggaatttataatctggcttctgatctgggttg

SEQ ID NO: 3350 - DNA, 430 bp, Homo sapiens
  MAP TO AC007204.1; EXPRESSED IN BT474, SIGNAL = 6.6; EXPRESSED IN FETAL LIVER, SIGNAL = 3.2; EXPRESSED IN BONE MARROW, SIGNAL = 4.2; EXPRESSED IN HELA, SIGNAL =   3; EXPRESSED IN ADULT LIVER, SIGNAL = 2.3; EXPRESSED IN BRAIN, SIGNAL = 4.4; EXPRESSED IN LUNG, SIGNAL = 4.3; EXPRESSED IN PLACENTA, SIGNAL =  10; EXPRESSED IN HEART, SIGNAL =   3; EXPRESSED IN HBL100, SIGNAL = 3.1
ggcaaagcctttattgcatcctcaacccttagtagacatgagttcattcatatgggaaagaaacattacaaatgtgaagaatgtggcaaagccttcatttggtcctcagtcctaactagacataagagagttcatactggagagaagccctacaaatgtgaagaatgtggcaaagcctttaagtactcctctacccttagttcacataagagaagtcatactggagagaaaccctacaaatgtgaagaatgtggcaaagcctttgttgcatcctcaacccttagtaaacatgagatcattcatactggaaagaaaccctacaagtgtgaagaatgtggcaaagcttttaaccagtcctcatcccttactaaacataagaaaattcatactggagagaaaccctacaaatgtgaagaatgtggcaaagctt

SEQ ID NO: 3351 - DNA, 381 bp, Homo sapiens
  MAP TO AC007016.5; EXPRESSED IN PLACENTA, SIGNAL = 1.6; EXPRESSED IN HBL100, SIGNAL = 1.4; EXPRESSED IN HEART, SIGNAL = 1.5; EXPRESSED IN ADULT LIVER, SIGNAL = 1.9; EXPRESSED IN BT474, SIGNAL = 1.2; EXPRESSED IN FETAL LIVER, SIGNAL = 1.6; EXPRESSED IN BONE MARROW, SIGNAL = 1.3; EXPRESSED IN HELA, SIGNAL = 1.6; EXPRESSED IN BRAIN, SIGNAL = 1.5; EXPRESSED IN LUNG, SIGNAL = 1.7
gccatctacaagccaggaagggaaccttcaccagaacctgacaatgtcactctttgttctcaaacttcagcatctaggactgcaggaaataaatgtctgttgtttaagccactcagtcgatgatattttgttatggcagcccaagccaactaagacaacatgtcctttaatccattttctgctgctataaaataataccacagactgtataatttataaagaaaagatatttatttggctcacagttctggaggctgggaagtccaagattgagaagtggcatctggtgagggtcttcttgctgcatcataacatactgaaaggatcacatggtgagcaaactgtgatgcagagagaggatgggggcagaactcatcctta

SEQ ID NO: 3352 - DNA, 461 bp, Homo sapiens
  MAP TO AL022725.8; EXPRESSED IN BT474, SIGNAL = 0.67; EXPRESSED IN FETAL LIVER, SIGNAL = 0.96; EXPRESSED IN LUNG, SIGNAL = 0.85; EXPRESSED IN PLACENTA, SIGNAL = 1.2; EXPRESSED IN BONE MARROW, SIGNAL = 0.98; EXPRESSED IN HBL100, SIGNAL = 0.73; EXPRESSED IN ADULT LIVER, SIGNAL = 0.79; EXPRESSED IN BRAIN, SIGNAL = 1.1; EXPRESSED IN HELA, SIGNAL = 0.96; EXPRESSED IN HEART, SIGNAL = 0.99
ccatgaaactcttaacatttatacagcaaatgtataaatagaatagcaaaaacaatctcatcagagaagagcaaagttcttcagctctcaccataccgaaattcaagtcttactacagtggctaaaattataaagaaaaacgtcagtgctgctaggatgcaggacaacagggactctcctgcgatgcctgtcagagtcaagagtggcacaactcccctggaaaaccatgtggagcttcttaaacacacacctccctcagcaattccactcctaggtatttttgccaaaagaaatttctgtgtttgtccacagaaagacccacgcaagaatgttcatagccactttagtcataagaaccagaaacggaatcagcccaggtacccactgagagcaaagtggataaacatgctgggtatgttcacacaatggaacactgctcaccatcccacgacaacacagac

SEQ ID NO: 3353 - DNA, 384 bp, Homo sapiens
  MAP TO AL035088.1; EXPRESSED IN LUNG, SIGNAL = 8.3; EXPRESSED IN HBL100, SIGNAL = 7.9; EXPRESSED IN HELA, SIGNAL = 9.6; EXPRESSED IN PLACENTA, SIGNAL = 9.1; EXPRESSED IN BONE MARROW, SIGNAL = 6.5; EXPRESSED IN BRAIN, SIGNAL = 6.3; EXPRESSED IN HEART, SIGNAL = 6.6; EXPRESSED IN ADULT LIVER, SIGNAL = 8.3; EXPRESSED IN FETAL LIVER, SIGNAL =   8; EXPRESSED IN BT474, SIGNAL = 8.1
aattccaaggggtttcttgcagatatagacaagcttattctaaaattaatatgaaaaggcaaaggtgtggacaatgcccgcatcgttctgaagatcgacaatgcctgtcttgcatcagcagatgactttagagtcaaggatgagacagagctgaccatgcaccagtctgtggagagcgacatccatgggctccacaagatcattgatgacaccaatgtcactcagctgcagctagaggcagaggtcaaggctctcaaggaggagttgctcttcatgaagaagaaccacgaagaggaagtaaaaggcctacaatcccagattgccagctctgggttgtccatggaggtagataccccaaatctcaggacctcaccaaaatcatgg

SEQ ID NO: 3354 - DNA, 362 bp, Homo sapiens
  MAP TO AL034422.18; EXPRESSED IN PLACENTA, SIGNAL = 3.6; EXPRESSED IN HBL100, SIGNAL = 3.4; EXPRESSED IN HEART, SIGNAL = 1.7; EXPRESSED IN BT474, SIGNAL = 1.6; EXPRESSED IN ADULT LIVER, SIGNAL = 1.8; EXPRESSED IN FETAL LIVER, SIGNAL = 2.9; EXPRESSED IN BONE MARROW, SIGNAL =   2; EXPRESSED IN BRAIN, SIGNAL = 1.5; EXPRESSED IN LUNG, SIGNAL = 2.4; EXPRESSED IN HELA, SIGNAL = 3.4
taagcacgtaccatgttgccaagccccgtgcatgaccccaggactatttatggagactgcacacagtgcctcacctcccaagcttatttataggaggcacaggcaaggcgaaggtgaagagccccatgcccctgaaaaagagccaccagtgcctggggcacagccactctcacctgggtcggggtacattcaggcacataccacattccagaggattgggttcttcaaagtggcatctccaatgattaagtagagagtgtaggtgccagaggcagagtcaaattcaatctttctttcagaggtatccagttcaaacttgtacacgttcttgttgtctggctcggcaacaaacaccacttcct

SEQ ID NO: 3355 - DNA, 424 bp, Homo sapiens
  MAP TO AL035091.2; EXPRESSED IN BT474, SIGNAL = 1.3; EXPRESSED IN ADULT LIVER, SIGNAL = 1.2; EXPRESSED IN LUNG, SIGNAL = 1.3; EXPRESSED IN HBL100, SIGNAL = 1.5; EXPRESSED IN HELA, SIGNAL = 1.3; EXPRESSED IN HEART, SIGNAL = 1.3; EXPRESSED IN FETAL LIVER, SIGNAL = 1.4; EXPRESSED IN BRAIN, SIGNAL = 1.2; EXPRESSED IN BONE MARROW, SIGNAL = 1.2; EXPRESSED IN PLACENTA, SIGNAL = 1.2
tttcaacagccgttcctctctaagcttaattatttctagcttttcatttaatgtgaggcatgtgtgactcttcctttgtacttaaacacgtaggggccattataggataattcattggcctaatttcattattgtcatatctcaggaaatagggaggcttggggagagggagagagaagggagaatggccagtctgtggagcagtgagagaacacacaagatgtatccattaaactctctgtcttttatgggcacagttcatgacatccccccaaaatgacattagtaacatcaaagatgacttatcacagatcactacaacagatataataataatgaaaaaggttgaaatattgcaagaattttcaaaatgtgacacagaggcaaagagtgagcacatgctgctcaacaatggtgccaatga

SEQ ID NO: 3356 - DNA, 452 bp, Homo sapiens
  MAP TO AL035447.3; EXPRESSED IN HELA, SIGNAL = 2.9; EXPRESSED IN HEART, SIGNAL = 2.8; EXPRESSED IN PLACENTA, SIGNAL = 2.8; EXPRESSED IN HBL100, SIGNAL = 2.9; EXPRESSED IN BT474, SIGNAL = 3.5; EXPRESSED IN FETAL LIVER, SIGNAL = 3.2; EXPRESSED IN ADULT LIVER, SIGNAL = 3.8; EXPRESSED IN BONE MARROW, SIGNAL = 2.7; EXPRESSED IN BRAIN, SIGNAL =   3; EXPRESSED IN LUNG, SIGNAL =   3
aaaccgcaaggatttaactctgagtaatatttcaagttcatttgttgcaaaagttagaatatttttctaaaagttgcataatatttgaaaatgtattcagtgttaagttagatggagtctcctaaactaagtttagttccatgactctggtttgcccgcataagataaatggtcagtgtcattagcattctctggccataaggcctgatctgccccagggaaacagcctgaaagtctatttatatcctgctgctgggtacacttaccagtcattctttggcttatgattttgcagccatgggcttttagggatactctagatttggttttgaaggaaaatttacattaaaagctgagcaatttttgagaaacccaaactagaaaaaaaaatgtattgataaaagttgtatttgagctagtgagaacaatatgttctcctcattttacagttt

SEQ ID NO: 3357 - DNA, 486 bp, Homo sapiens
  MAP TO AL049739.1; EXPRESSED IN HEART, SIGNAL = 1.7; EXPRESSED IN BT474, SIGNAL = 0.98; EXPRESSED IN FETAL LIVER, SIGNAL = 0.94; EXPRESSED IN ADULT LIVER, SIGNAL = 1.1; EXPRESSED IN BONE MARROW, SIGNAL = 1.1; EXPRESSED IN BRAIN, SIGNAL = 0.95; EXPRESSED IN HELA, SIGNAL = 0.94; EXPRESSED IN HBL100, SIGNAL = 0.95
ctggatgtgctctccagatgttcttcttcctcttctttggcgccacggagtgctgcctcctggcagccatggcctatgaccgctatgcagccatctgtgaacccctccgctacccactgctgctgagccaccgggtgtgtctacagctagctgggtcggcgtgggcctgtggggtgctggtggggctgggccacacccctttcatcttctctttgcccttctgcggccccaataccatcccgcagttcttctgtgagatccagcctgtcctgcagctggtatgtggagacacctcgcttaatgaactgcagattatcctggcaacagccctcctcatcctctgcccctttggcctcatcctgggctcctacgggcgtatcctcgttaccatcttccggatcccatctgttgcgggccgccgcaaggccttctccacctgctcctcccacctgatcgtggtctccctcttctatggcaccgcactct

SEQ ID NO: 3358 - DNA, 411 bp, Homo sapiens
  MAP TO AC009886.2; EXPRESSED IN PLACENTA, SIGNAL = 7.5; EXPRESSED IN HBL100, SIGNAL = 6.2; EXPRESSED IN ADULT LIVER, SIGNAL =   7; EXPRESSED IN FETAL LIVER, SIGNAL = 5.7; EXPRESSED IN BONE MARROW, SIGNAL = 6.1; EXPRESSED IN LUNG, SIGNAL = 7.3; EXPRESSED IN HEART, SIGNAL = 5.3; EXPRESSED IN HELA, SIGNAL = 7.6; EXPRESSED IN BT474, SIGNAL = 5.2; EXPRESSED IN BRAIN, SIGNAL = 5.8
  unsure 183
ttcctgaactttttggcaccagggaccagtttcatggaagacaatttttccactgatggggcaggatggtttcagcatgaaactgttccacctcagatcatcaggcattagattgtcataaggagtgtgcaacctagatccctcccatgcacagttcacagtagggttcaagctcctaggggnaatctaatgccacactgctgatctgacaggaggcagagctgaggcagtaatgccagcttgcccgcggctcacctcctgctgtgctcctggttcctaacaggccatgactggtactgatccttggcctgggggttgggaacccctgtgctaggcatcgttctgggtaccaggatgcagcagtatacatacacactgtacccctcgtggagcttgtggtctaacagggga

SEQ ID NO: 3359 - DNA, 438 bp, Homo sapiens
  MAP TO AL035457.13; EXPRESSED IN FETAL LIVER, SIGNAL = 1.7; EXPRESSED IN ADULT LIVER, SIGNAL = 1.8; EXPRESSED IN HELA, SIGNAL = 1.5; EXPRESSED IN HBL100, SIGNAL =  12; EXPRESSED IN BT474, SIGNAL = 1.7; EXPRESSED IN BRAIN, SIGNAL = 1.6; EXPRESSED IN LUNG, SIGNAL = 1.8; EXPRESSED IN BONE MARROW, SIGNAL = 1.4; EXPRESSED IN PLACENTA, SIGNAL = 1.6; EXPRESSED IN HEART, SIGNAL = 1.8
tcttacttcagcccaccctggtgggagtctagggtgctgcacagccaactggcaaatcttcccataccctcaacccttgcctactggtggtcttcatggctctgacctgcattattcttccagctctcacactctctttgttcacctctcgaaatctttttctggtccccaggacaggtgatgttaaaaatacctgtgagcgtcctcattcgaggacctcagttcccggaggccctggggccttctgccgcagtgactcaccagctgttcttagggaacatgactgtctggatgcatctggcttgcagcaggttgacagattcaaagtgaaaggtgctataagtgggttccaggatacagaccttcctaaaggcaccctggagaatcttcccaaggtgaagctttaaatgtacagtgtgtggtaagaggagtggcgag

SEQ ID NO: 3360 - DNA, 449 bp, Homo sapiens
  MAP TO AC008274.1; EXPRESSED IN HELA, SIGNAL = 1.4; EXPRESSED IN HEART, SIGNAL = 1.4; EXPRESSED IN BT474, SIGNAL =   2; EXPRESSED IN HBL100, SIGNAL = 1.9; EXPRESSED IN FETAL LIVER, SIGNAL = 1.9; EXPRESSED IN LUNG, SIGNAL = 1.1; EXPRESSED IN BRAIN, SIGNAL = 1.4; EXPRESSED IN PLACENTA, SIGNAL = 1.2; EXPRESSED IN BONE MARROW, SIGNAL = 6.3; EXPRESSED IN ADULT LIVER, SIGNAL = 1.3
gaaaatatgttcaccactcagtacaagaaagaaaaaaaaggttaaaaaagcggcagcttgctcatcgtttccatacagttttatttgcaatttgttggaaccatggagaacaatcggcagatacacatgttgcttctgggaacagcattcaactccagatgctttttctgctaaggagcagggccacaggtggccctcacacccagtgctgtgctgcgcggagggctgtactgaaggttctgaaggcctggtgagtccccctcacggccagaaggagagacccggcttcggcttcatggccggcctcccgcaggtgtctgcccagctcctctgcatcccagcgcccttgctggaggctagccaagaggtggtcaacaatacgtggatagaagggagtggagacacacttcaccagcagcttggcatccaggagcagggaaagaagttct

SEQ ID NO: 3361 - DNA, 454 bp, Homo sapiens
  MAP TO AL022319.2; EXPRESSED IN PLACENTA, SIGNAL = 1.3; EXPRESSED IN LUNG, SIGNAL = 1.2; EXPRESSED IN HELA, SIGNAL = 1.2; EXPRESSED IN HEART, SIGNAL = 0.99; EXPRESSED IN BT474, SIGNAL = 1.1; EXPRESSED IN HBL100, SIGNAL =   1; EXPRESSED IN FETAL LIVER, SIGNAL =   1; EXPRESSED IN BRAIN, SIGNAL = 1.4; EXPRESSED IN BONE MARROW, SIGNAL = 1.5; EXPRESSED IN ADULT LIVER, SIGNAL = 1.1
ctgaccacctgctctgtctgtgcgaacccaacagtgtgtgtggcctggggatgctgagatgtccagactcccgagggagttgagggcatctcccccaggagccataatgaaggtgtgtgcaaggcacagtgaggctccccagagaaggggaccacagtgggccagtgggggttttcatggccataacagaggtggggaagggtgaccaaggcaggggaacagcatgtgccaaggcctggaggcagtgacaaggccatcctgctatgctgcatggcctctcccttcctgatcctcctgacagtgacccctcccctttccctcttttacccaccctcgcctgtggacagacaaggggatgtggccttgcccccatactaccagccggaggaggatgatgagatgcccttcatctgctccctgtcgggcgacaatgggataatgggctgccatgaga

SEQ ID NO: 3362 - DNA, 488 bp, Homo sapiens
  MAP TO AC008268.1; EXPRESSED IN PLACENTA, SIGNAL = 0.98; EXPRESSED IN LUNG, SIGNAL = 1.1; EXPRESSED IN HELA, SIGNAL = 1.1; EXPRESSED IN HEART, SIGNAL = 0.94; EXPRESSED IN BT474, SIGNAL = 0.89; EXPRESSED IN BONE MARROW, SIGNAL =   1; EXPRESSED IN HBL100, SIGNAL = 0.82; EXPRESSED IN FETAL LIVER, SIGNAL = 0.67; EXPRESSED IN ADULT LIVER, SIGNAL = 1.2; EXPRESSED IN BRAIN, SIGNAL = 1.1
ggttctcacctgactctggcagcccaggtagacagagcaggcattgctccctccattttgtgggttgaaaaactaaggctcagaaagtcgtaactgaggctttttctgaaattgggaacacaggaaggaaacatattgggtggttaaaacatggggtttggctttaaacctcttgcacttgaggtgtctgtggcgtattcatgaagttaatgtgcagccttgaatacagcttccagatgattaactgggagtggaatgagatctcatatcctgattattttgctttatctgtacatttctccattccttccagctgttgtattgtgttctgtcttcttgatcccagatgtcctggcttggtttttctcaaggccgtcctccatagcctcaccgacctcattggcctggttgcacacagcttcgagtgcccacagaccaactgaaggggagttgctgtctgctggggagggttctggtggaggagtctg

SEQ ID NO: 3363 - DNA, 394 bp, Homo sapiens
  MAP TO AL035553.13; EXPRESSED IN BONE MARROW, SIGNAL = 0.96; EXPRESSED IN LUNG, SIGNAL = 1.2; EXPRESSED IN PLACENTA, SIGNAL = 1.2; EXPRESSED IN HEART, SIGNAL = 1.2; EXPRESSED IN BT474, SIGNAL = 0.97; EXPRESSED IN ADULT LIVER, SIGNAL = 1.3
tgcccatatggaaaaagtttgagttgtctccatagaaattcaaacaagctacaacattcccttaagccaaagcctaacccagagcagggccctaattctcttcaattctgcagaggttgagagagataaggaagctgcagaagaaaagttggaagccagcagaggctggttcatgaggttcaaggaaagaagctatcttcataacataaaagtgcaaggtgaagtggcaagtgctgatgtaaaagttgcaaaaagttatctagaaaatctagctaagataatcgatgaaagtggctacacaaaacaacaaattttcaatgcagacaaaacagccttatattggaataagacgccatctaggactttcacagatagagagaagtcaatgcctggc

SEQ ID NO: 3364 - DNA, 405 bp, Homo sapiens
  MAP TO AC010778.2; EXPRESSED IN HELA, SIGNAL = 1.4; EXPRESSED IN HEART, SIGNAL =   1; EXPRESSED IN PLACENTA, SIGNAL =   3; EXPRESSED IN HBL100, SIGNAL = 1.2; EXPRESSED IN ADULT LIVER, SIGNAL = 1.5; EXPRESSED IN BT474, SIGNAL = 1.2; EXPRESSED IN FETAL LIVER, SIGNAL = 1.4; EXPRESSED IN BONE MARROW, SIGNAL = 1.3; EXPRESSED IN LUNG, SIGNAL = 1.5; EXPRESSED IN BRAIN, SIGNAL = 1.1
ggctgggttaagagttgcacaagtgcgcagttgcagcactggcccttcaagtaatagagcctgatatttaagtaaacggttgtctgacatccacaagtctcctttagcagtgagtatgctgttcacatcatgagatgtccacagagtaagatctcctgtattattttaactgcttcagatactaagactgctactgctgccactacccgtaaacaatgaggccaaccctttgctactacatcattttctttattcaggtatgccacaggttgcaagctcgtccctcggacctgtataaggactcctagagctattcctttttcttctgtgacatataaagaaaagtcttgccctgttggcaagcttaacactggggcttgggttagggccttctttagggtatgg

SEQ ID NO: 3365 - DNA, 359 bp, Homo sapiens
  MAP TO AL078624.22; EXPRESSED IN FETAL LIVER, SIGNAL = 1.5; EXPRESSED IN ADULT LIVER, SIGNAL = 1.6; EXPRESSED IN HELA, SIGNAL = 1.6; EXPRESSED IN HBL100, SIGNAL = 1.7; EXPRESSED IN BT474, SIGNAL = 1.4; EXPRESSED IN BRAIN, SIGNAL = 1.4; EXPRESSED IN LUNG, SIGNAL = 1.4; EXPRESSED IN BONE MARROW, SIGNAL = 1.5; EXPRESSED IN PLACENTA, SIGNAL = 1.5; EXPRESSED IN HEART, SIGNAL = 1.7
agactcccacatgcgttaccaccagaggttgccctgtccagcctacttccttccctttatcttccccagacatcacacccctctataaaccttttacacccctaactccatctctttgcccactccctagagaactccacagtgaggaagtttccccaatgtatatcactctcaaatacaggttcacttggtgatggtgcccagcacttctgggaaggaaataaagacaattggattggattacagttggccttggaacaacacagttttcaatttcgaggattcacttatacttgaatcttccttcacctttgccatccctgagacagcaagaacaatcccttctcttcttcctccct

SEQ ID NO: 3366 - DNA, 411 bp, Homo sapiens
  MAP TO AC007322.2; EXPRESSED IN ADULT LIVER, SIGNAL = 4.9; EXPRESSED IN BT474, SIGNAL = 3.3; EXPRESSED IN FETAL LIVER, SIGNAL = 3.4; EXPRESSED IN BRAIN, SIGNAL =   3; EXPRESSED IN BONE MARROW, SIGNAL = 2.8; EXPRESSED IN LUNG, SIGNAL = 3.6; EXPRESSED IN HBL100, SIGNAL = 3.3; EXPRESSED IN PLACENTA, SIGNAL = 3.3; EXPRESSED IN HELA, SIGNAL = 4.3; EXPRESSED IN HEART, SIGNAL = 2.9
ccactttatttatttgcctccagttgttaagaaattttctttttatatatagttctatgaacatgtagtgtggtaaaagcatatttagaatgtgtttaaatattgacctttttttcttttgcagcaaaagggctcttgttcggtctattaattttgccttttggtctcatgttccagtaggcaaagattgagcttctatcattgagtttaatgttaccactgcatactcggcttgttggatttttttctagctcaaaactctttcagttatgaagtattcaacatctgggtttttgagggattgatctgtaagatctcctggttcagcaaatacgtgatccactgtttagacacagttatggaggggagcatcaaatttgactgggagcagggtggttgggcttaagttgt

SEQ ID NO: 3367 - DNA, 406 bp, Homo sapiens
  MAP TO AC007955.3; EXPRESSED IN PLACENTA, SIGNAL = 1.6; EXPRESSED IN HELA, SIGNAL = 1.6; EXPRESSED IN HEART, SIGNAL = 1.4; EXPRESSED IN BT474, SIGNAL = 1.3; EXPRESSED IN BRAIN, SIGNAL = 1.3; EXPRESSED IN BONE MARROW, SIGNAL = 1.3; EXPRESSED IN LUNG, SIGNAL = 1.3; EXPRESSED IN HBL100, SIGNAL = 1.2; EXPRESSED IN ADULT LIVER, SIGNAL = 1.7; EXPRESSED IN FETAL LIVER, SIGNAL = 1.5
ctgtgactgcagggttcttggcctctgtcaggtacccccaggctctccagctggcctagctggctctgtgttgccaatctctcatgaattccagacatctgacctcacaacccactgacctcaggtagacctgtgtgtgcctacctgggcctctgcctacctggtttctcttctctattttcttgttagaggatcccactcacctcgatatgtctgctcctggaacctgtcccttggaatcaaggattctgaagatccaggcctcttaggcttatctccactcccccagtggccctctgctgcccccacttgccgcaagttcacactaaccacagaagtcctgcaggcctgcaccacagggctcaaaacacactgtttttgctctgtgcctggtattgtattgcct

SEQ ID NO: 3368 - DNA, 426 bp, Homo sapiens
  MAP TO AL109829.10; EXPRESSED IN LUNG, SIGNAL = 2.5; EXPRESSED IN HBL100, SIGNAL = 3.1; EXPRESSED IN HELA, SIGNAL = 2.7; EXPRESSED IN PLACENTA, SIGNAL = 4.3; EXPRESSED IN ADULT LIVER, SIGNAL = 2.4; EXPRESSED IN BONE MARROW, SIGNAL = 3.2; EXPRESSED IN HEART, SIGNAL = 2.9; EXPRESSED IN BT474, SIGNAL = 3.1; EXPRESSED IN FETAL LIVER, SIGNAL = 2.2; EXPRESSED IN BRAIN, SIGNAL = 3.8
gcaagtgccttctgcctatgagtctgtaaaatcaaaggcaagctagttacttccaagatacaatgggggtacaagtattgggtaaatatagccattccaaatgggagaaattggccaaaacaaagggggttacagggttcatgcaagtccaaaatccagtggggaagtcaaattttaaagctccaaaatgatctcctttgactccaggtctcacctccaggtcacgctgatgccagaggtgtgggttcctgtggtcttgggcagctccacccctgtgactttgcagggtacaccctccatcctggctgccttcatgggctggcattgaatgtctgcggcctttccaggtacatggtgcaagctgtcggtggatctactattctggggtctggaggacagcatggtggcccttgtcttacagctcca

SEQ ID NO: 3369 - DNA, 432 bp, Homo sapiens
  MAP TO AL035662.23; EXPRESSED IN PLACENTA, SIGNAL = 1.5; EXPRESSED IN HEART, SIGNAL = 1.4; EXPRESSED IN FETAL LIVER, SIGNAL = 1.4; EXPRESSED IN BONE MARROW, SIGNAL = 1.5; EXPRESSED IN HELA, SIGNAL = 1.5; EXPRESSED IN HBL100, SIGNAL = 1.2; EXPRESSED IN BT474, SIGNAL = 1.4; EXPRESSED IN ADULT LIVER, SIGNAL = 1.5; EXPRESSED IN BRAIN, SIGNAL = 1.3; EXPRESSED IN LUNG, SIGNAL = 1.6
ccccacactggaacttgttgttacacgtgtgccagcacaccactgtatatacctagtggctaagtatagtgtaacagagatccactaagaaactatcagataagtaagtgactatgcaagactcttccatggtacttaagagaggggccctaccatatatgaactgagatataagagtcatttgcccaaaacctgcttcttctgagtaaggcataaaggactaataatggactagtgactacctccggtattctgactctgtaccttgcggggttccaaacatgatgttgactgtgcaggagcggtgaatctggtgttgctgggtgatgacaatagcaaaaggagaacctcccctgctaacatcctccaaggcttgtgacagtgacacttctgtgttaaggaagatcaagtccactaccatgcccaggtctc

SEQ ID NO: 3370 - DNA, 403 bp, Homo sapiens
  MAP TO AL050349.9; EXPRESSED IN BT474, SIGNAL = 3.4; EXPRESSED IN HBL100, SIGNAL = 5.6; EXPRESSED IN HELA, SIGNAL = 4.7; EXPRESSED IN PLACENTA, SIGNAL = 4.9; EXPRESSED IN ADULT LIVER, SIGNAL = 4.7; EXPRESSED IN FETAL LIVER, SIGNAL = 4.9; EXPRESSED IN BRAIN, SIGNAL = 4.3; EXPRESSED IN LUNG, SIGNAL = 5.1; EXPRESSED IN BONE MARROW, SIGNAL = 4.8; EXPRESSED IN HEART, SIGNAL =   4
tactcagcaccacaccttgcacaggtgggtgtttaatgaactgagtgtttaatgaacatggtgatggtcatgatgacacccttagtcatcatgggagtaaacaacacaagatgcccacagtcaacagaactggtctttgagttgagttcgtcccgtcgtgagcctcattttcctctcttgtacaatgggaataacagaacttacccacaagattgtttttttcatttaacaaatgctgaccattaaccatgtgcaaagcactgtgctaggtggtggggacacagtgatgaatgtgaccatcacatcttacttcatggacctcacagtttcaggggatgctgagcggttttccaaacctaccaggactatacaattatcaagtacacgctccttctcctgtttc

SEQ ID NO: 3371 - DNA, 415 bp, Homo sapiens
  MAP TO AL096712.17; EXPRESSED IN PLACENTA, SIGNAL = 2.2; EXPRESSED IN HEART, SIGNAL = 1.9; EXPRESSED IN BT474, SIGNAL = 1.6; EXPRESSED IN LUNG, SIGNAL = 2.1; EXPRESSED IN HBL100, SIGNAL = 2.1; EXPRESSED IN HELA, SIGNAL = 3.4; EXPRESSED IN ADULT LIVER, SIGNAL = 2.3; EXPRESSED IN FETAL LIVER, SIGNAL = 2.1; EXPRESSED IN BRAIN, SIGNAL = 1.7; EXPRESSED IN BONE MARROW, SIGNAL = 1.6
ctctcacttcaggcagggactgtcacactcaccctgcagaagccacaccacctgccgaaccaaactgaacagggattctccttgcttccaagaattctaattcagcctttgccaaagcaaggggatgcctttccttgggagatgccttggttggccatggttgtgggcctgtggcacctatcctggcaagctggcacaggctcagaagaccctggtcttgtggtactgtactttaggctgatactgtgggaagctcatctttttcatcatgaatctaaaatcatcaccttggcatctatggcagcttctaaaactgtctccaaccaggaaattagtgttggacatcctgagagaggtagaggtatgaaaggctcagttactggggcttagttttcgcctccaatcctcaaagttg

SEQ ID NO: 3372 - DNA, 456 bp, Homo sapiens
  MAP TO AC010809.2; EXPRESSED IN PLACENTA, SIGNAL = 2.5; EXPRESSED IN HBL100, SIGNAL = 2.5; EXPRESSED IN LUNG, SIGNAL = 2.8; EXPRESSED IN BRAIN, SIGNAL = 2.9; EXPRESSED IN HEART, SIGNAL = 2.2; EXPRESSED IN BT474, SIGNAL = 2.7; EXPRESSED IN ADULT LIVER, SIGNAL = 2.4; EXPRESSED IN FETAL LIVER, SIGNAL = 2.5; EXPRESSED IN BONE MARROW, SIGNAL =   3; EXPRESSED IN HELA, SIGNAL = 2.4
tgcagtcacattgagaagccaccagcaggccgtgtagttattcctggggcctgataccacaacctcatggccactttaataacagcaaaggaatcaagcaacgtctttagtcagttatttcatcagtagcactcttctggaaaatcaagatgccactctcctctttccctgtggccacaagtgtctgtagcaattagggaaacatagaaatggacccctgcccttaagccgttttactgccagaggtttggaggtggggtggagggaggtgtgggaacctcacttatctaatgtcattctcaaccctatcttccagctcatccagacaggaaagggggaagccatccgcatcaggtccatcctgcgctccctggtccccacagaagacctggttgggatcatcagcatccccttgaaactgccctccctcaacaaaggtaaggggagtgactgcag

SEQ ID NO: 3373 - DNA, 378 bp, Homo sapiens
  MAP TO AC009974.3; EXPRESSED IN HELA, SIGNAL =   4; EXPRESSED IN HEART, SIGNAL = 4.1; EXPRESSED IN PLACENTA, SIGNAL =   4; EXPRESSED IN HBL100, SIGNAL = 3.9; EXPRESSED IN ADULT LIVER, SIGNAL = 5.8; EXPRESSED IN BT474, SIGNAL = 3.8; EXPRESSED IN FETAL LIVER, SIGNAL = 5.3; EXPRESSED IN BONE MARROW, SIGNAL = 4.8; EXPRESSED IN LUNG, SIGNAL = 4.2; EXPRESSED IN BRAIN, SIGNAL = 4.4
gctccctagcacctatgcacagggccatgcagtagcggaggtgaaaggtgtcagctggtcatagcggctccacagatggggaaattgagccccagggtctcccagctggccatgcagactccggatggactttcctccaccctggcccctggctgggcttggcctgaagccaagcttgtggtatatcagagatcagccccagaacaaccgtacaagatctccccctcacctcctccatctcccttcacctccccagcctctcctcacccacaaagctctgcttcttgctgtcccatagaggggctgcccgcacaccgttggccaccagagcaaagaaggccttcttgatctgaggggccagggagaacagtcaagggt

SEQ ID NO: 3374 - DNA, 448 bp, Homo sapiens
  MAP TO AL096774.8; EXPRESSED IN BONE MARROW, SIGNAL = 2.2; EXPRESSED IN LUNG, SIGNAL = 2.7; EXPRESSED IN BRAIN, SIGNAL = 2.1; EXPRESSED IN HELA, SIGNAL = 2.3; EXPRESSED IN HBL100, SIGNAL = 2.8; EXPRESSED IN PLACENTA, SIGNAL = 2.1; EXPRESSED IN HEART, SIGNAL =   3; EXPRESSED IN ADULT LIVER, SIGNAL =   3; EXPRESSED IN BT474, SIGNAL = 2.3; EXPRESSED IN FETAL LIVER, SIGNAL = 2.3
cacccagctaggaaatggagaaactgagattggacacttccaccccctaagccccctaaactcaccacatccaacctgaaatgaatcctcttctccagctccgaccccctcctcttcccatgttccctgccacttgaccttctgctgcctcacactcaaacccaaaacctgcctggtggaggctgaccatgggggctgcagtgatggtgctgtgatgggggtgtccagtggggcctgggatcctcaggcctcttaacctcatcttcccctcccacaggcctgcatgattccagggagcatcaaggcaagagacacagggagaaggagcagccagtccccctgccgcaggactggccacatctgtcacatctggagaagtctgcccagagtggttcccctggactaagggcagatggcgttggggaagagggagctctttctccttgct

SEQ ID NO: 3375 - DNA, 387 bp, Homo sapiens
  MAP TO AL035704.9; EXPRESSED IN BT474, SIGNAL = 8.3; EXPRESSED IN HBL100, SIGNAL = 6.6; EXPRESSED IN FETAL LIVER, SIGNAL = 6.3; EXPRESSED IN ADULT LIVER, SIGNAL = 8.2; EXPRESSED IN BONE MARROW, SIGNAL =   7; EXPRESSED IN LUNG, SIGNAL =  11; EXPRESSED IN BRAIN, SIGNAL = 5.8; EXPRESSED IN HELA, SIGNAL = 7.3; EXPRESSED IN PLACENTA, SIGNAL = 8.2; EXPRESSED IN HEART, SIGNAL = 6.3
ctcccagaggtgactggaacttttctggacccctgacattcttgaaggggttctgtgtctgcaaggatgagtgggccattgagaagaaaatgtacctgcaggccccgtgagtggacatgacagggaacaggaaggtggcccttccacctggcaagtgacatcctgtctgtcttggtgtttctctctcaggggagtttggcgaggtctgcagtggccacctgaagctgccaggcaagagagagatctttgtggccatcaagacgctcaagtcgggctacacggagaagcagcgccgggacttcctgagcgaagcctccatcatgggccagttcgaccatcccaacgtcatccacctggagggtgtcgtgaccaagagcacacctgtga

SEQ ID NO: 3376 - DNA, 465 bp, Homo sapiens
  MAP TO AL031684.11; EXPRESSED IN PLACENTA, SIGNAL = 0.96; EXPRESSED IN BT474, SIGNAL = 0.98; EXPRESSED IN LUNG, SIGNAL = 0.91; EXPRESSED IN HELA, SIGNAL = 0.79; EXPRESSED IN HEART, SIGNAL =   1; EXPRESSED IN BONE MARROW, SIGNAL = 0.8; EXPRESSED IN BRAIN, SIGNAL = 1.1; EXPRESSED IN ADULT LIVER, SIGNAL = 0.84; EXPRESSED IN FETAL LIVER, SIGNAL = 0.76; EXPRESSED IN HBL100, SIGNAL = 0.86
gcacaaatgctggcacatagcaggcactccttgtaagagacacttgactctgttgtatggcattccctttccttttttttttttaaactgaccttctaaagggaaccgaggccagaaaatacttccagaaaaaggtacctttcctctggaagtggtaatgacaccatcaatacatagaaacatctggggttttttttctatttctttcctgtttttagacaaaaacctgaataataataattttatattgaataatacaaatttgaataataattttttaccttcttctcaaacttttatttcctgcttgagggcatgtctgtgtcaatggaaaggtggtccctctccgaattccctctcctgctgcttctccttctctccctccaggcgaggagcccctgacatcactttattctgtcaggtcttttgctgtatatcctcactccttcttgccttttccacctg

SEQ ID NO: 3377 - DNA, 446 bp, Homo sapiens
  MAP TO AL080274.13; EXPRESSED IN PLACENTA, SIGNAL =   2; EXPRESSED IN HEART, SIGNAL = 1.3; EXPRESSED IN BT474, SIGNAL = 1.4; EXPRESSED IN FETAL LIVER, SIGNAL = 1.3; EXPRESSED IN BONE MARROW, SIGNAL = 1.1; EXPRESSED IN HELA, SIGNAL = 3.2; EXPRESSED IN HBL100, SIGNAL = 1.4; EXPRESSED IN ADULT LIVER, SIGNAL = 1.4; EXPRESSED IN BRAIN, SIGNAL = 1.7; EXPRESSED IN LUNG, SIGNAL = 1.7
atcaggcaagttggaaccagatgtgcactttggagctcaagctgcttcaggaagtgagttttcaagcatagaatataagttcagggatctgccctccctgtaccccagtgccattggtgctatctgaggagcactgaaactggacagtcactttgccacactgaacttctgtcatgccttcttgtccaaagtagctgagttcattgccatccagtatcacactggctgtgtagaaggtgtctggctcgatctgcactgggtattcaaaccatacgggaaaggtattgctggacccatctgagaagtacttgctcaagttctgccccaggacaacgccctgccgcttaagttcaatcttggcactgtattctgcagaaccacagctggagccatacagcccaaagccagcaatgaacactcttttatcaactgcaaactggatgctg

SEQ ID NO: 3378 - DNA, 377 bp, Homo sapiens
  MAP TO AC010083.2; EXPRESSED IN BT474, SIGNAL = 1.2; EXPRESSED IN BRAIN, SIGNAL = 1.3; EXPRESSED IN HELA, SIGNAL = 0.96; EXPRESSED IN HEART, SIGNAL = 0.96; EXPRESSED IN PLACENTA, SIGNAL = 0.92; EXPRESSED IN ADULT LIVER, SIGNAL = 1.3; EXPRESSED IN FETAL LIVER, SIGNAL = 1.1; EXPRESSED IN LUNG, SIGNAL = 0.94; EXPRESSED IN BONE MARROW, SIGNAL =   1; EXPRESSED IN HBL100, SIGNAL = 1.1
taggcgtttgtttccgagagagttagcctattttccaaccagcgtattttctttctctctcagtgacaattatacttgaatttctgcctgtgtgtttttccagatcttaccagagctctgcaggatataacagcagcaaaaccaagacaaaaagccctccccaagaatgttccaaggagaaaagagattataacaaaagacaaaaccaacggagctctggaagatgcaccattaaaaggtttggaagacacaaagctggtacaggtggtacttaaagaggaaagtgaatctaagtttgaatcagaaagtaaagaagtaagtcccctgacacaagaaggggctccagaggatgtgccagatggagggcagataagcaa

SEQ ID NO: 3379 - DNA, 391 bp, Homo sapiens
  MAP TO AL080312.8; EXPRESSED IN LUNG, SIGNAL =   8; EXPRESSED IN PLACENTA, SIGNAL = 7.5; EXPRESSED IN BT474, SIGNAL = 7.1; EXPRESSED IN BRAIN, SIGNAL =   6; EXPRESSED IN BONE MARROW, SIGNAL = 6.7; EXPRESSED IN HEART, SIGNAL = 6.7; EXPRESSED IN HELA, SIGNAL = 7.4; EXPRESSED IN HBL100, SIGNAL = 7.5; EXPRESSED IN ADULT LIVER, SIGNAL = 7.9; EXPRESSED IN FETAL LIVER, SIGNAL = 7.3
ttggcactgctgctttattgatgttaccaagaaatgtcaacagaaattaggaatcacggacacatgctgttttgctctcgctctcagctgtgtgttgagaacgcagtcgtaggacagcagggtgatgcaggggagctgctggcatcggcagagagaaatgggaagacagccacatcttcaacggaaggcaagctgcccgatgcatggagaccctggggctgcctgcacttacactagctgttcagacgccatggacaccaagggtatttgagtggctgaaaggttgacgaggattccacagggtggcagcagaaccaggaccaggaccaggggagcactaccaaggaaaacctggacacagccacctgggggcaggagccacacctacttc

SEQ ID NO: 3380 - DNA, 411 bp, Homo sapiens
  MAP TO AL035452.6; EXPRESSED IN FETAL LIVER, SIGNAL = 0.99; EXPRESSED IN ADULT LIVER, SIGNAL =   1; EXPRESSED IN BONE MARROW, SIGNAL = 0.97; EXPRESSED IN HEART, SIGNAL = 0.96
cctctcataggaagaggacagatgtataaattggacatagaataggaacaggacataggataggaataggacagatatagaaattgctgaatggtagcctcatttcaatgaggctaatataaatgaaataaaaacattaaaacatggtttaaaacattactctttgacttctgcttcagacaagatggagtagacatacttttccttacaccttctaataagtacagataaaaaccataaacactatattcaaaacaaaatgacaacaatctgaaagtaggagagaagaaggcagatgtacttagagaccttggaaccagaggaatggcatagtgatgcattccctggtattctctttgccccatatatccatggtagtattggagaaattggaaacctggaaacacagga

SEQ ID NO: 3381 - DNA, 415 bp, Homo sapiens
  MAP TO AC009892.2; EXPRESSED IN BT474, SIGNAL =   2; EXPRESSED IN FETAL LIVER, SIGNAL = 1.7; EXPRESSED IN BRAIN, SIGNAL = 5.4; EXPRESSED IN HELA, SIGNAL = 2.1; EXPRESSED IN PLACENTA, SIGNAL = 2.3; EXPRESSED IN ADULT LIVER, SIGNAL = 1.6; EXPRESSED IN LUNG, SIGNAL = 2.1; EXPRESSED IN BONE MARROW, SIGNAL = 2.8; EXPRESSED IN HEART, SIGNAL = 1.7; EXPRESSED IN HBL100, SIGNAL = 2.1
ggtccctcctcctcactagggacaaggggccacccccgtgcagctggggatggggaatagcagttctgggctgactgatgggggtgtctggagggtcctgcagctgagagctgagatctgttgggtgggaaatgacttagaatccgacctctgatttccttccagggcacctccccaagcccaccctctgggctgagccaggctctgtgatcatccagggaagtcctgtgaccctcaggtgtcaggggagccttcaggctgaggagtaccatctatatagggaaaacaaatcagcatcctgggttagacggatacaagagcctgggaagaatggccagttccccatcccatccatcacctgggaacacgcagggcggtatcactgtcagtactacagccacaatcactcatcaga

SEQ ID NO: 3382 - DNA, 434 bp, Homo sapiens
  MAP TO AL132780.1; EXPRESSED IN BONE MARROW, SIGNAL =   5; EXPRESSED IN HELA, SIGNAL = 5.2; EXPRESSED IN FETAL LIVER, SIGNAL = 5.2; EXPRESSED IN ADULT LIVER, SIGNAL =   7; EXPRESSED IN BT474, SIGNAL = 5.9; EXPRESSED IN BRAIN, SIGNAL =   5; EXPRESSED IN LUNG, SIGNAL = 5.2; EXPRESSED IN PLACENTA, SIGNAL = 5.8; EXPRESSED IN HEART, SIGNAL = 4.2; EXPRESSED IN HBL100, SIGNAL = 6.2
aagatccacaggggtcacagctcacctcagcttaaggatcatagcaccgcacttgacttccaggtactgggcattgatgcggtctagctcggattgagtcttcagccggtgttcttgaagaagcctctgcagcaaagtgaggcagcggagaagcacctgagcccaagatggaggaagaagagggcataaataaagatagtagaaaggagggtagatcaggaatctttgtcttccccaaaagtgctcctggggtcaggataaaggaaaggggctgtcccatgccctgataaacctgggagtaagcagcactcttcttctccagcagcaacatctgctccttctgctggctcttggcatcctggcactgctgctgctcacccaccaggacctctgcgagtttccacacctttgctgccttcacggtttcactgtca

SEQ ID NO: 3383 - DNA, 417 bp, Homo sapiens
  MAP TO AC010737.2; EXPRESSED IN BT474, SIGNAL = 8.4; EXPRESSED IN BRAIN, SIGNAL = 7.8; EXPRESSED IN HELA, SIGNAL = 8.7; EXPRESSED IN HEART, SIGNAL =   7; EXPRESSED IN PLACENTA, SIGNAL = 9.2; EXPRESSED IN ADULT LIVER, SIGNAL =  11; EXPRESSED IN FETAL LIVER, SIGNAL = 8.1; EXPRESSED IN LUNG, SIGNAL = 9.3; EXPRESSED IN BONE MARROW, SIGNAL = 8.9; EXPRESSED IN HBL100, SIGNAL = 8.4
ggccagcattttgcatttactgaatgatacagtttagatatttgtcccctcaaaatatcatgttgaaatttgatccacaatgttgaaggtagggcctggcgtgaggtgttttggtcatgtgagtggattcttcatgaaagacttggtgccattattgaagtaatgagtgacttctcactctattagttcctgtgagatacaatcgttaaaaaaaatccggcacctctatcccctctctcttgcttctttctcaccatgtgatctgcacacatcaatttctttttccctttcatcataagtggaagctttctgaagttctaaccagaagcacatgttcatgccatgcatcctatacagcttgcagaagagtgagccaaataaacctcttttctttatgcattgcccagcttcaggtat

SEQ ID NO: 3384 - DNA, 415 bp, Homo sapiens
  MAP TO AL121757.7; EXPRESSED IN BT474, SIGNAL = 1.2; EXPRESSED IN BONE MARROW, SIGNAL = 1.2; EXPRESSED IN HELA, SIGNAL = 1.1; EXPRESSED IN FETAL LIVER, SIGNAL = 1.1; EXPRESSED IN ADULT LIVER, SIGNAL = 1.8; EXPRESSED IN BRAIN, SIGNAL = 1.4; EXPRESSED IN LUNG, SIGNAL = 1.3; EXPRESSED IN PLACENTA, SIGNAL = 1.5; EXPRESSED IN HEART, SIGNAL = 1.2; EXPRESSED IN HBL100, SIGNAL = 1.4
ataggaccaaggaaaagggggaggcaagagagtcagaggagatgtgatgacagaatcagagactggagtaacacactttgaaaatggagtgaagagccaaggaatgcaggcagcatccagaggctggaaaatgtgagaaaatggattatcttttacagccactagaaagaacagagccctactgaccccttgctctcccactgccctaaacctccaccttccatgatgaggggcccaacctgagaaactgaggtccattgccaaacagctgcacatgcagctggtctgggagtcagagatgctgaggggtgacccagcaggagctgcagcagccacaaccaggaggctgagcttatggacaggtaagccagcaggtgagtgatgccatgcacaagcagcaacagcacactgatcc

SEQ ID NO: 3385 - DNA, 464 bp, Homo sapiens
  MAP TO AL078600.14; EXPRESSED IN BONE MARROW, SIGNAL = 1.9; EXPRESSED IN LUNG, SIGNAL =   3; EXPRESSED IN BRAIN, SIGNAL = 1.7; EXPRESSED IN HBL100, SIGNAL = 1.8; EXPRESSED IN HELA, SIGNAL = 2.1; EXPRESSED IN PLACENTA, SIGNAL =   2; EXPRESSED IN HEART, SIGNAL =   2; EXPRESSED IN BT474, SIGNAL = 1.7; EXPRESSED IN ADULT LIVER, SIGNAL = 1.7; EXPRESSED IN FETAL LIVER, SIGNAL = 4.2
aaaagcccaaacttcacacacaaaatatcatgcttttctttaaaaataaaatatctttgacaaaatgcatatttatcctatttacaacactgaaggcctctcacatacaaaagattagcctgcctcttcacacataagaacaaatatttctaggaaatctcatgatttccttttggttaatttttcttctttaagaattcagctgtgtaagacttgccattttctggcatcattaaaatcacttctgaaattctatttggactacttttgatcttcaactattagaaaagcatcctgattcattccaaaaggagaaagatccttccgcagatctccagagaggtcaataccttcctcaagtatctgaggcaaaatcccaactgtcacttaaaaatgaagatgcgctggtaaagctggctaggtctcagctgaaggatgtgggctgtcccaagtgcctggtaaga

SEQ ID NO: 3386 - DNA, 435 bp, Homo sapiens
  MAP TO AL109615.9; EXPRESSED IN HEART, SIGNAL = 5.1; EXPRESSED IN BT474, SIGNAL =   4; EXPRESSED IN LUNG, SIGNAL = 5.5; EXPRESSED IN PLACENTA, SIGNAL = 5.5; EXPRESSED IN HELA, SIGNAL = 5.2; EXPRESSED IN HBL100, SIGNAL = 4.8; EXPRESSED IN ADULT LIVER, SIGNAL = 5.8; EXPRESSED IN FETAL LIVER, SIGNAL =   5; EXPRESSED IN BRAIN, SIGNAL = 4.3; EXPRESSED IN BONE MARROW, SIGNAL = 4.6
tccctctccactcctcactgaggaccaagcgtctgctgcccccgcagcacagagtgcctggggcggctgtccaatcacatccatgggggtttgggggagatgtaggagtggacagagggtcttcctcgtgctgcaggcagcagggccagtctgaaagaacctcccccacccccagaactggtcttccgcccccagttgatggagcccctgggtactgtccagggtatcagtccctccgcatttcacttgtatccctcaatggacagaggaggtaggccccattgaccctcttgctcctctcacccaccgtgctttggaaaacatattggagatgtttccttgccctcctttgtcccactctgcctgttggggcccaagcaccaggagagagcgagggatcctggggatgaagggggcacagaagtggtgttgcat

SEQ ID NO: 3387 - DNA, 413 bp, Homo sapiens
  MAP TO AL035633.15; EXPRESSED IN PLACENTA, SIGNAL = 1.8; EXPRESSED IN HBL100, SIGNAL = 1.6; EXPRESSED IN BT474, SIGNAL = 1.8; EXPRESSED IN FETAL LIVER, SIGNAL = 1.6; EXPRESSED IN LUNG, SIGNAL = 1.5; EXPRESSED IN HEART, SIGNAL = 1.6; EXPRESSED IN HELA, SIGNAL = 1.6; EXPRESSED IN ADULT LIVER, SIGNAL = 1.9; EXPRESSED IN BRAIN, SIGNAL = 1.7; EXPRESSED IN BONE MARROW, SIGNAL = 1.7
ggagtctctgctgttggtggaacatacaagaggtttattacattagagcaacaccaattagtctttaaaaaccacatggcgttcacatttgcaataataacttgtcagtttgatttgaattccatttcaataattgcgtgatgggttctcttctttgaaattactgtcatgtacgagtaaccaggttttccttggacaaatgtgttggtatcaaagttaatgtgaacctgctgactgaagatcttttttggccctaatgttttagggttctcccaacatgtctttctagaaggggacacgcagccccaagagcaactgatcagccagtcattaggggaaaacatcctgctcgctcaaggtcgagtgagcactctagtatcagaacactgtgttctatgcaccaccttgtccct

SEQ ID NO: 3388 - DNA, 374 bp, Homo sapiens
  MAP TO AL034428.1; EXPRESSED IN BT474, SIGNAL = 1.8; EXPRESSED IN LUNG, SIGNAL = 2.1; EXPRESSED IN BRAIN, SIGNAL = 1.5; EXPRESSED IN HBL100, SIGNAL = 1.9; EXPRESSED IN HELA, SIGNAL = 1.8; EXPRESSED IN HEART, SIGNAL = 1.9; EXPRESSED IN ADULT LIVER, SIGNAL =   2; EXPRESSED IN FETAL LIVER, SIGNAL = 2.1; EXPRESSED IN BONE MARROW, SIGNAL = 2.1; EXPRESSED IN PLACENTA, SIGNAL =   2
tagaagaatggcacacagcgtacctgctcattcaatatttgttgaataagcatttgttgaaaaaaatgttggagcaactgtgggttcatccactaccattttctatgcatggccttctctgatctcaaatagagtcaaataaattctacccaatccctagtagtaaaataaaagaagaaagaggcatatttttaaaagaactataaatttagtctttgttctgcttttagggataaaaattataacatcagaaactgtcatcacctcctttctctttcccttctctttcatcttttcaggaggctcatcaatcagcttcctaaccagctatttgctatctggagacctggggggcagcacctttaccacctgct

SEQ ID NO: 3389 - DNA, 372 bp, Homo sapiens
  MAP TO AL035045.2; EXPRESSED IN HELA, SIGNAL =   2; EXPRESSED IN BRAIN, SIGNAL =   2; EXPRESSED IN HBL100, SIGNAL = 2.7; EXPRESSED IN PLACENTA, SIGNAL = 2.6; EXPRESSED IN ADULT LIVER, SIGNAL = 3.5; EXPRESSED IN HEART, SIGNAL = 2.5; EXPRESSED IN BT474, SIGNAL = 2.5; EXPRESSED IN FETAL LIVER, SIGNAL = 2.5; EXPRESSED IN BONE MARROW, SIGNAL = 2.4; EXPRESSED IN LUNG, SIGNAL = 2.6
catgtgtctcccaccaacagctcttgacaggcaccgcactcaacaggaactttaagctgaagtttaactcgtgtgatgcaagggtccctgaaactggacgtgagatgggtaaggtagtggagtcatgagagaggggagaggctctgaacattaaaagtaccaaaaactcacccttttctattccgggtgtcaaagaccaccaaggaccccaccactcttgtggcctcccattttttaccttccatgtttgaaaaatgacaatagttaatacttcctggatgctgtggtaggttaaagatggccacacattctttgctactcttcttgttgggatgtggggtctgtgtcccttcttgctgaatttggagaggc

SEQ ID NO: 3390 - DNA, 476 bp, Homo sapiens; identical to SEQ ID NO: 2701
  MAP TO AL078638.6; EXPRESSED IN BRAIN, SIGNAL = 1.8; EXPRESSED IN HELA, SIGNAL = 3.1; EXPRESSED IN HEART, SIGNAL =   6; EXPRESSED IN PLACENTA, SIGNAL = 3.1; EXPRESSED IN HBL100, SIGNAL = 1.4; EXPRESSED IN BT474, SIGNAL = 1.5; EXPRESSED IN ADULT LIVER, SIGNAL = 1.6; EXPRESSED IN FETAL LIVER, SIGNAL = 1.6; EXPRESSED IN BONE MARROW, SIGNAL = 1.4; EXPRESSED IN LUNG, SIGNAL = 4.9

SEQ ID NO: 3391 - DNA, 403 bp, Homo sapiens
  MAP TO AC009966.3; EXPRESSED IN HBL100, SIGNAL = 1.4; EXPRESSED IN BT474, SIGNAL = 1.2; EXPRESSED IN BRAIN, SIGNAL = 1.6; EXPRESSED IN HELA, SIGNAL = 1.3; EXPRESSED IN HEART, SIGNAL = 1.2; EXPRESSED IN PLACENTA, SIGNAL = 1.3; EXPRESSED IN ADULT LIVER, SIGNAL = 1.4; EXPRESSED IN FETAL LIVER, SIGNAL = 1.5; EXPRESSED IN LUNG, SIGNAL = 1.3; EXPRESSED IN BONE MARROW, SIGNAL = 1.3
gtgttggatttgggatttgcaggcgagggactgtggacctgtaaatataaagcccttagaagagaatgtggcactaagtaggtgctgtgggcctagcatgcagcagccacttggtacatgttagtttccttctctccagccaggctctgatagcacccaagcctctcatagctctccccttctatttccccaggagatgagataatccccactcctctcttgccccagaaggtggtagcacttgcaaattcctacttaccagtctgtatgggcatcatcgatcaccaacaggatcctgggtctttgaacaatgggcgtggagggacctggaggctccatcagtcctgaggtggcctgaggggcctgcttcatggcactggagagggagctaaaaaggctggat

SEQ ID NO: 3392 - DNA, 396 bp, Homo sapiens
  MAP TO AL109748.2; EXPRESSED IN PLACENTA, SIGNAL = 1.4; EXPRESSED IN HEART, SIGNAL = 2.9; EXPRESSED IN FETAL LIVER, SIGNAL = 2.3; EXPRESSED IN BT474, SIGNAL = 1.4; EXPRESSED IN BONE MARROW, SIGNAL = 2.2; EXPRESSED IN HELA, SIGNAL = 2.7; EXPRESSED IN HBL100, SIGNAL = 3.5; EXPRESSED IN ADULT LIVER, SIGNAL = 1.8; EXPRESSED IN BRAIN, SIGNAL = 1.2; EXPRESSED IN LUNG, SIGNAL = 3.9
ctggcacacttgcttgtacccatctggaggctgatggtcgagtggtccatggggggcaggatgttgttcttggggtcgtagagatgcctcctcgtgctctgccgtacacagtcgtgcctgactggctggcgcgtttattggtaatctgcagccggatgatgcactggccagccttcatggtggcatcgtcgaagttcccctcctgcttctctgagtactcctcaccgatgtccacctcgctctgcagccccttagtcttggccttccttgccagggcgagaagagacacctgcacctgcctcacgttcccactctcaaacaggtcgttggtctcaaataggtccacggggttcatgctgtagctgaccatggccttgaggaggttggagaggcttt

SEQ ID NO: 3393 - DNA, 395 bp, Homo sapiens
  MAP TO AL035703.19; EXPRESSED IN PLACENTA, SIGNAL = 0.95; EXPRESSED IN HBL100, SIGNAL = 1.2; EXPRESSED IN HELA, SIGNAL = 1.3; EXPRESSED IN BT474, SIGNAL = 0.97; EXPRESSED IN ADULT LIVER, SIGNAL = 1.4; EXPRESSED IN FETAL LIVER, SIGNAL = 1.2; EXPRESSED IN LUNG, SIGNAL = 1.1; EXPRESSED IN BONE MARROW, SIGNAL = 1.3; EXPRESSED IN BRAIN, SIGNAL = 0.99; EXPRESSED IN HEART, SIGNAL = 1.1
tcctagtgtcagggccaaactgtcccagggacagatctggggcaatactgggaggcagctgggcctcaaggagctggggtgggcacaaggcacctgctgactgtggcggtggccctgagactctcagggctgcggatgagcgcatcgaggacactgacaatctgggagaagcgaggccgctgcgcccggtccttgtgccaacagtcgagcatgagctggtgcagggcgtgggggcagcccatgggtgcgggcaggcggtacccctcctccacagagctgatgacctgcaggggatcagcgctgggctcagccgtccctccctgcaccctgaggctccaccgcccgcggacctgccagggcttggcactcacatcccggttggtcatgttccagta

SEQ ID NO: 3394 - DNA, 436 bp, Homo sapiens
  MAP TO AC009974.3; EXPRESSED IN FETAL LIVER, SIGNAL = 1.1; EXPRESSED IN BRAIN, SIGNAL = 1.2; EXPRESSED IN HBL100, SIGNAL = 0.99; EXPRESSED IN PLACENTA, SIGNAL = 1.1; EXPRESSED IN ADULT LIVER, SIGNAL = 0.96; EXPRESSED IN BT474, SIGNAL = 1.1; EXPRESSED IN BONE MARROW, SIGNAL =   1; EXPRESSED IN HEART, SIGNAL = 0.98
cattgcacagtgggtctttgttcttttgttgtttctttttgttttttcacagtgggtctttgaaggcagagactgagcccttgcaaagtaaggaatgatcttggaaagaacctgctctctcaggctccacgttgtgtctcatgtggagtgctgtggggcaggacttccagctctctgtggcatttctcaccatagcttggcttttctctctcccaggttttgggcttctttatagctgcatatactctctctctccctgaatccttttacctcctgttctctcaggtctgctgctaccatcttccgttgatgcaagtggagctgcccatcagccttctcacacgcctggccctcatggatcccacctctctcaaccagtttgtgaacacagtgtctgcctcccctagaaccatcgtctcgtttctctcagttgccc

SEQ ID NO: 3395 - DNA, 431 bp, Homo sapiens
  MAP TO AL096801.16; EXPRESSED IN PLACENTA, SIGNAL = 2.5; EXPRESSED IN BT474, SIGNAL = 1.9; EXPRESSED IN BONE MARROW, SIGNAL = 2.1; EXPRESSED IN BRAIN, SIGNAL = 2.4; EXPRESSED IN HBL100, SIGNAL = 2.2; EXPRESSED IN HEART, SIGNAL = 2.1; EXPRESSED IN ADULT LIVER, SIGNAL = 2.5; EXPRESSED IN FETAL LIVER, SIGNAL = 2.4; EXPRESSED IN LUNG, SIGNAL = 2.6; EXPRESSED IN HELA, SIGNAL = 2.8
taaggttgcccttggttttggtgtaagaatgtgagtttagtggttcagttccatttttgccttccacatgaaggtgccattagggtctttatgaaaatgtgcaacacaatttattcttaagccccaagggtcatcttatctttgattatctggcctagcttggagatgaccagggaaaggagggaatgtatagatccccaaatatggaaaagctcttcccccctccttactcttttttctaggcatgaactcaacagaatccaactcttctgcctctgttagaccaaaggtactgagtagcatccaggaagggacagtccctgacaacacaagctcagcaagggggaaggaagacgtgaacaagaccctcccaaaccttcaggtagtcaaccaccagcaaggcccccaccacagacacatcctgaagctgc

SEQ ID NO: 3396 - DNA, 376 bp, Homo sapiens
  MAP TO AC010826.2; EXPRESSED IN BRAIN, SIGNAL = 2.2; EXPRESSED IN HEART, SIGNAL = 1.5; EXPRESSED IN HELA, SIGNAL = 1.4; EXPRESSED IN HBL100, SIGNAL = 1.4; EXPRESSED IN PLACENTA, SIGNAL = 1.8; EXPRESSED IN ADULT LIVER, SIGNAL = 1.5; EXPRESSED IN FETAL LIVER, SIGNAL = 2.6; EXPRESSED IN BT474, SIGNAL = 1.3; EXPRESSED IN LUNG, SIGNAL = 1.2; EXPRESSED IN BONE MARROW, SIGNAL = 1.8
cctgaacaataatctcccacatcagaattgaaaagattaaaagagggtacagaggctaatacttacttcaggactctgcggatccctttcttcctcttccaccttgacctcagttaaggatccacctgcatccctgaaatctgccacattttgccagtcaaaatttgcatcatttcggaatccaatcttttcatctatctcttcagtgagagagtcatccaaatcagaggagggaaggggaaatcctgaaccaaccagcttaatgttggccttcatcctctttctcttcataagtgctcgccagtcaaggtaccttcttttcacctctgtccctgtcctctgttctccttctcctacagcattcacacactgtgca

SEQ ID NO: 3397 - DNA, 423 bp, Homo sapiens
  MAP TO AC007614.2; EXPRESSED IN HELA, SIGNAL = 2.3; EXPRESSED IN HEART, SIGNAL = 1.9; EXPRESSED IN FETAL LIVER, SIGNAL = 2.5; EXPRESSED IN ADULT LIVER, SIGNAL = 2.3; EXPRESSED IN LUNG, SIGNAL = 2.2; EXPRESSED IN BRAIN, SIGNAL = 2.3; EXPRESSED IN PLACENTA, SIGNAL =   2; EXPRESSED IN HBL100, SIGNAL = 2.5; EXPRESSED IN BT474, SIGNAL = 2.2; EXPRESSED IN BONE MARROW, SIGNAL = 2.7
aaacgcagacacaaagacccttattgctgtctgtggagtcttacattgcatagacttcaagctagcatgagaccctagaggctgtgtggtgtcactcctcggggaacagacttgtttctgctctcagcctggatcccaacttttcatgacagagacagggacatatttaggcaatcaaggaaaacagctgcaaacttcacagcctcaaagagcaccactgtcactcactttgatgcaggaggttattgaggcctacatgctggtgaacctgccaagtaagtccccacttgggaggcatcgagagcccagagcaggaggaagaaaatgcaccagacacccagatgccatgtgaggatgagctgtgagttcgcacccacagctcaattagtattgctaacatgccctctccctcagcaccttcag

SEQ ID NO: 3398 - DNA, 400 bp, Homo sapiens
  MAP TO AL096814.11; EXPRESSED IN BONE MARROW, SIGNAL =   1; EXPRESSED IN HBL100, SIGNAL = 0.96; EXPRESSED IN HEART, SIGNAL = 1.5; EXPRESSED IN BT474, SIGNAL = 1.2
tcttgcatggagatacgctgttgcccggcttgctgctgttgctgcggtgggtaatactggtgctgctgcatctgttgcatgtgctgtgacagcatctgtggggcctgcagtggctgtcctccctgcactggcacctgagccagaggctgctggtagtcataatacaggtgcccttgggtagggtgctgcccgacctgaagagctggtttggacagcccaccagtgaaaccagggtgaggctgctggggcacctgctggtagcgggaagggatagccggtgctgggggctccatgggcttctgagacagcagctggcggagagcactgtcaggggctccatccatcactgctgactgagtgtgcagcacctgggccatattgttgacctgaattcgcaggt

SEQ ID NO: 3399 - DNA, 471 bp, Homo sapiens
  MAP TO AC009453.1; EXPRESSED IN PLACENTA, SIGNAL =  16; EXPRESSED IN HEART, SIGNAL = 0.85
  unsure 102
tctgagtccctgatggtatgctagactcatgaccggttattataatgggagaataacaacaacaacaaaaatatattattatattcaatcataggtttttanattaatttcagccaaatttatgttaagtaataaagtaataaatattgttgaagggatgaacaaacaagtgaatataggcttcctcattgctagctttagtttccaatagtctttctccttttaatttttgtacattttgcttggtaacattctatatagaattattactaaatcttctatgcatatgtgcaatctcatcagaatgaattatagacctttcagaaacagaagatgagatttatttttctttctatctccaccagtttcaggatcagtatgtagtaggaacttgatcattctgatgataatgatgatgatgatgctgttaaagataatggtaataaaacacctgcggtgaaaagaatttaa

SEQ ID NO: 3400 - DNA, 485 bp, Homo sapiens
  MAP TO AL049542.5; EXPRESSED IN FETAL LIVER, SIGNAL = 5.9; EXPRESSED IN HEART, SIGNAL = 5.5; EXPRESSED IN PLACENTA, SIGNAL = 5.5; EXPRESSED IN ADULT LIVER, SIGNAL = 5.9; EXPRESSED IN BT474, SIGNAL = 4.7; EXPRESSED IN BRAIN, SIGNAL = 5.5; EXPRESSED IN LUNG, SIGNAL =   6; EXPRESSED IN BONE MARROW, SIGNAL = 5.6; EXPRESSED IN HELA, SIGNAL = 6.1; EXPRESSED IN HBL100, SIGNAL = 4.8
acacatcgttttccctccagcacacatcgcgatacacttctaagccagacgtggcgcggcctgcaacgatcagggatctatatggatctaattgggatctgtatggacctgattattggatctatccagtggataatgtggataagtgaaaaaccggccaacgtagccggttggaagggagtcgtattattctacgctttcgatgagaagaccatgttcatagcatgtaagctcatcgccctcgtacaggaattggtatccaataccaccatattcaggcacattagggaataactcatcacttaccgaagaacaaatcacaccaatgcagcgatcaacgccttctcgttcttcagtgctgaaaaaatcctcttcggtaagaacatgagtacattgctcatcagcataggtcggaaatacatgctcaatgcaatccgggtgttttaaaccaagctgatcggcaagctcgaaagcacgacggtatt

SEQ ID NO: 3401 - DNA, 423 bp, Homo sapiens
  MAP TO AC010961.2; EXPRESSED IN FETAL LIVER, SIGNAL = 1.3; EXPRESSED IN LUNG, SIGNAL = 1.5; EXPRESSED IN HELA, SIGNAL = 1.5; EXPRESSED IN PLACENTA, SIGNAL = 1.5; EXPRESSED IN BT474, SIGNAL = 1.3; EXPRESSED IN BRAIN, SIGNAL = 1.7; EXPRESSED IN BONE MARROW, SIGNAL = 1.5; EXPRESSED IN HEART, SIGNAL =   2; EXPRESSED IN HBL100, SIGNAL = 1.6; EXPRESSED IN ADULT LIVER, SIGNAL = 2.1
tttgcatcaactagccctccagtttattgttgcagtttattttgtcacacctggacattgctaacagggtgtttcttcttcctcatttttgtggcatcctagcatttatatctttgactctgatcataggagcctcttcagattataagagtggactgcagtggagctaagaaaaaacaagcatggagtttgattttataaagcaaccaaagtcttgttaatagtgtagtcagcataatcagtgctcatgtttttgacccattactgttttctacctgtcttgtttttagcttacagtattgcccataaaaaggaagcttctgatcatcctatgggagtgtactttgtcataactaaagacaaaaatgtgtccagtgagtttctgattattctctatgtgtgcagacatttaacaaacacatt

SEQ ID NO: 3402 - DNA, 407 bp, Homo sapiens
  MAP TO AL049812.4; EXPRESSED IN BT474, SIGNAL = 1.2; EXPRESSED IN BRAIN, SIGNAL = 1.5; EXPRESSED IN HBL100, SIGNAL = 1.1; EXPRESSED IN HELA, SIGNAL = 0.95; EXPRESSED IN PLACENTA, SIGNAL = 1.4; EXPRESSED IN FETAL LIVER, SIGNAL = 1.2; EXPRESSED IN LUNG, SIGNAL = 1.2; EXPRESSED IN BONE MARROW, SIGNAL = 1.3; EXPRESSED IN HEART, SIGNAL = 1.2; EXPRESSED IN ADULT LIVER, SIGNAL = 1.5
accaccaaagaaacacaggggttacatcctacaggtcagcccaagccctgccccagggaggtggtccctttttacaaagacaaggaggagcagagaagttccctgcagttccaccccctcccactgaccacacaaaaaagcaaagaacacctttatcaaaaactgctgtggacacagctggccggccagtgaatgctggacggtcaaggcccaggctggggaaggggtacagaatggttgtgggcgaagccccatgcaggttaggtgtgaggatggggggcctctcttgtggcctagggaacatcgtaaggtcacactggtccagactgcaaatgtctggtgccagaggcccctgaaggaggttgcagggggcagcagagcagtgacccccaagagcctcaatcttt

SEQ ID NO: 3403 - DNA, 441 bp, Homo sapiens
  MAP TO AL035419.9; EXPRESSED IN BONE MARROW, SIGNAL = 1.3; EXPRESSED IN LUNG, SIGNAL = 1.2; EXPRESSED IN HELA, SIGNAL =   1; EXPRESSED IN BRAIN, SIGNAL = 1.4; EXPRESSED IN HBL100, SIGNAL = 1.1; EXPRESSED IN PLACENTA, SIGNAL = 1.5; EXPRESSED IN ADULT LIVER, SIGNAL = 1.6; EXPRESSED IN HEART, SIGNAL = 1.5; EXPRESSED IN BT474, SIGNAL = 1.5; EXPRESSED IN FETAL LIVER, SIGNAL = 1.2
agccttggtttttcctctcctataaaaagggaataataacgtgtcacatagggttgttgtgagaatcaaaggaattaatatctgtaaaatgcctggtgcgtagtaactgcttagtgacagctgccatcatcaccatcattgcccaaactaagatactggattattgtgaagatcaaacttgtcaagctcttggcatcatcaccatcatcagtggcaacagcagtagcatcaccatcattatcatcaccatcagcatcatcgttattatcaccatcatcgccatcaccatcattaccattattaccctcaccatcatcatcattaccatcatcatcatcaccatcatcaccgtcagcagcatcaccatcatcataaccatcaaaaccatcagcaggatcaccaccagcagcagcagcagcatcaccatcgtaatcaccacca

SEQ ID NO: 3404 - DNA, 455 bp, Homo sapiens
  MAP TO AL117374.5; EXPRESSED IN FETAL LIVER, SIGNAL = 0.99; EXPRESSED IN BONE MARROW, SIGNAL = 0.98; EXPRESSED IN BRAIN, SIGNAL = 0.98; EXPRESSED IN HELA, SIGNAL = 1.1; EXPRESSED IN HEART, SIGNAL = 0.95; EXPRESSED IN PLACENTA, SIGNAL = 1.1; EXPRESSED IN HBL100, SIGNAL =   1; EXPRESSED IN BT474, SIGNAL = 0.9; EXPRESSED IN ADULT LIVER, SIGNAL = 1.1
agagagagacagcagggacgtgtggcacagaagaaagaccacgtgaggacacagaagttggccatctgcaagccaaggagagaggcctcaggagaaaacaaacctgccagcacctcaatcttcaacttctctagcccccagaactgtgagaaaatacatttctgttgtttaggacactcagggtatggtaatttgttatggcagcccctcataaatgaatacactacctacatgtgtaactcacttctattacctacacagcaccgacagcattgaagttgccaatttctggtcaagagatgagtgacaagataccttctggaataaatctcagagccagttctgctccctttctgagcttccaaagaatgacatgcagccccatcagcatttccatcccagcactgcccgtcaccctaagaaacacttatttctctgttgaagcgaaagaccct

SEQ ID NO: 3405 - DNA, 410 bp, Homo sapiens
  MAP TO AL109614.15; EXPRESSED IN LUNG, SIGNAL = 1.4; EXPRESSED IN HELA, SIGNAL = 1.6; EXPRESSED IN PLACENTA, SIGNAL = 1.5; EXPRESSED IN HEART, SIGNAL = 1.5; EXPRESSED IN FETAL LIVER, SIGNAL = 1.6; EXPRESSED IN BT474, SIGNAL = 1.4; EXPRESSED IN BONE MARROW, SIGNAL = 1.3; EXPRESSED IN BRAIN, SIGNAL = 1.2; EXPRESSED IN HBL100, SIGNAL = 1.5; EXPRESSED IN ADULT LIVER, SIGNAL = 1.4
aggttccagacatgagccagctgagcaggagggccaacgggatttccggagccacctgctctggggactgaggcggagatgcatagagggccttgccatctgcttacaccccaagtagggtgggggctgagaagtgccatccatggttgctagccagggtgctttagtggcctgggctacagctcagagaccaacgtctaacctagaacgccaggctgggaaggaggacacagtccaggaacctgagggaatgccaaggagaagaggcctggggctgagtcctggacctcgccagacataggcactggatgcagaaagacaagcccgctaaggatgttgatgaaggcccacaagggggtcctaggggagcaggagaaggtaccaaggagactgatgaaggtcctcaaggg

SEQ ID NO: 3406 - DNA, 470 bp, Homo sapiens
  MAP TO AC009802.8; EXPRESSED IN BONE MARROW, SIGNAL = 2.4; EXPRESSED IN HELA, SIGNAL =   3; EXPRESSED IN FETAL LIVER, SIGNAL =   3; EXPRESSED IN LUNG, SIGNAL =   3; EXPRESSED IN BRAIN, SIGNAL = 2.6; EXPRESSED IN PLACENTA, SIGNAL = 2.4; EXPRESSED IN HEART, SIGNAL = 2.1; EXPRESSED IN HBL100, SIGNAL = 2.8; EXPRESSED IN BT474, SIGNAL = 2.2; EXPRESSED IN ADULT LIVER, SIGNAL = 2.4
ctgttttcttggaagcagccactctttccatgccttaggcatttgttaaaatagctggattgtgtctgggacggactgagctggccttatgaggtttacctgggcttgataaccagcagtagtggcataaaaattcttgaaatctgagtctggtgaacagtcttatcctctgcttcccccagcccctcattgtagacccagaggacccccagggtgacttgcggggctactatagcctctgcgaagggcatccagaagtgtttttcaatggcatgggtcttgttacagtgtaccaaacctgccagatctgtcggagcccaagtagtacccagctgaggaccaatgatccccctcggaaccgaaaagcttctgtaaacaacacattagcacactctaagggtgccctgcggggtccactggcacctcccagacaccccgtggcatggctggcaagtgttctgcggtaccct

SEQ ID NO: 3407 - DNA, 404 bp, Homo sapiens
  MAP TO AL121959.4; EXPRESSED IN BT474, SIGNAL = 1.1; EXPRESSED IN LUNG, SIGNAL = 1.1; EXPRESSED IN BRAIN, SIGNAL = 0.98; EXPRESSED IN HELA, SIGNAL = 1.1; EXPRESSED IN PLACENTA, SIGNAL =   2; EXPRESSED IN HBL100, SIGNAL =   1; EXPRESSED IN HEART, SIGNAL = 1.1
gggatggaggttacacatgggctcagcaacatggacttccatcctccaaggctaaactggctacggccactgctgagtgcccaatttgccagcagcagagagcaacactgagccctcgatgtggcaccattcctcggggtgatcagccagctacctggtggcaggttgattatattggacctcttccatcatagaaagggaagaggtttgtcctcactggaatagacacttactgtggatatgggtctgcctattctgcacgcaatgcttctgccaagactaccatccacggactcacggaatgccttttccactgtcttggtattccacacagcattgcctctgaccgaggcactcactttatggataaagaagtgcgacaatgggctcatgctcacagaatt

SEQ ID NO: 3408 - DNA, 407 bp, Homo sapiens
  MAP TO AP000075.1; EXPRESSED IN HEART, SIGNAL = 1.1; EXPRESSED IN BT474, SIGNAL = 1.1; EXPRESSED IN BONE MARROW, SIGNAL =   1; EXPRESSED IN BRAIN, SIGNAL = 1.2; EXPRESSED IN PLACENTA, SIGNAL = 0.91; EXPRESSED IN HBL100, SIGNAL = 1.2
taccaccctttctgaggcaccaggctatagaagctgactctgttagcttgaaaaactgaatgaagcttagatcttttactaaacacaaaactaccccaaactcatctctgacttcacacagagggatccctaacaaggaaactgaccaagataattcctgttcccttgatgatttgccattttttaacagatctccagatcagcctgaagatcaacaggatgatgagtccactgaagaaggtcacaaaggaagagagaatgaatgctgcttggatctcagttgtgcaggacatttttggcaagtcttcccaagtttcatttcgtagcttagtctgaaacatgttcgagacatcagtagacggaattgccaggtcatttgatgacgccgtggtcgcctggtaacaatt

SEQ ID NO: 3409 - DNA, 390 bp, Homo sapiens
  MAP TO AL049553.15; EXPRESSED IN PLACENTA, SIGNAL = 4.2; EXPRESSED IN HEART, SIGNAL = 3.7; EXPRESSED IN ADULT LIVER, SIGNAL =   4; EXPRESSED IN BT474, SIGNAL = 4.2; EXPRESSED IN LUNG, SIGNAL = 4.6; EXPRESSED IN BRAIN, SIGNAL = 3.5; EXPRESSED IN HELA, SIGNAL = 4.1; EXPRESSED IN HBL100, SIGNAL = 4.1; EXPRESSED IN FETAL LIVER, SIGNAL = 3.9; EXPRESSED IN BONE MARROW, SIGNAL = 5.1
taccccaggacctagcacagtgcctggcatattaacagggactcaataaaagcacgtggcatgaacaagtggtggcctcctcactctggcttccctttcccaagccgttgcctccccactacctcctgtctgtgggcctctccacccccctcacatttccgcagtgcccctccagctgcccacctgtctcagaggagatgttgacctcgacgctgaggtcgggcacgggtgcccctgggaaagaagccatgcacaggtaggtgccatagtcactgaagtgcaggtcaatgagctctaggctgctggtgactgcgggcagctcaggatcattgcgggtcaccagcagccgcttggacatgcgtgccggcttgccattcttgaaccactggt

SEQ ID NO: 3410 - DNA, 348 bp, Homo sapiens
  MAP TO AC010808.2; EXPRESSED IN PLACENTA, SIGNAL = 4.4; EXPRESSED IN HEART, SIGNAL = 2.5; EXPRESSED IN FETAL LIVER, SIGNAL = 3.8; EXPRESSED IN ADULT LIVER, SIGNAL = 1.4; EXPRESSED IN HELA, SIGNAL = 2.9; EXPRESSED IN HBL100, SIGNAL = 3.7; EXPRESSED IN BT474, SIGNAL = 3.3; EXPRESSED IN BRAIN, SIGNAL = 2.2; EXPRESSED IN LUNG, SIGNAL = 4.4; EXPRESSED IN BONE MARROW, SIGNAL = 3.3
ttcattggttcgtcaagcagccaaaagtagagactatgtgtgtatgtatgtttgagtgtgttttgtgtgtgtgtgtgtttgggggagtggggtggaatagacatcacagctctattggttataactaaaaatgttggcttctcatcttcattatttgctttctgctaattttaaggttttattatacataatatgggtttattgagttgaaatctgagactgtcttttgatgattaggagcttcttatgccaccaggaaaatggtaaaataaatgggagaggtgtcagcactagtggaggtgatgagttggatgatgtgtactgtcacaaaatagggacagggagagg

SEQ ID NO: 3411 - DNA, 404 bp, Homo sapiens
  MAP TO AL109659.18; EXPRESSED IN HELA, SIGNAL =   5; EXPRESSED IN PLACENTA, SIGNAL = 5.3; EXPRESSED IN BT474, SIGNAL =   4; EXPRESSED IN BONE MARROW, SIGNAL = 3.9; EXPRESSED IN BRAIN, SIGNAL = 3.6; EXPRESSED IN HBL100, SIGNAL =   5; EXPRESSED IN HEART, SIGNAL = 3.8; EXPRESSED IN ADULT LIVER, SIGNAL = 5.7; EXPRESSED IN FETAL LIVER, SIGNAL = 6.7; EXPRESSED IN LUNG, SIGNAL = 4.4
tgtgtgtgtgtgtgtgtgtgtctatgggtgtttgtgatataataattcaaataaaaattttgtcttggtccacttctcatcctttcgttgctgtctcccttcacagaacaattcatagtgaatagcttatagaggccaatcttggctccactgggtggaaaagttgagctcagttgccagctgtctccaccacaaagcgcagaacacatggaaatacgctggttccagagtcactacacacgacctgtttacctgtataaggatggtaaagacctgtatggagaaactatctccaagtatgtggagcggacagagctcctgaaagaagccattggagaaggtaaagtgaccctcaggatccttaatgtcagtgctgatgatgacgggcagtaccactgcttctt

SEQ ID NO: 3412 - DNA, 424 bp, Homo sapiens
  MAP TO AC009972.3; EXPRESSED IN BONE MARROW, SIGNAL = 3.7; EXPRESSED IN BRAIN, SIGNAL = 3.1; EXPRESSED IN HEART, SIGNAL = 2.8; EXPRESSED IN FETAL LIVER, SIGNAL =   3; EXPRESSED IN ADULT LIVER, SIGNAL = 3.4; EXPRESSED IN PLACENTA, SIGNAL = 2.8; EXPRESSED IN HELA, SIGNAL = 3.1; EXPRESSED IN HBL100, SIGNAL = 2.8; EXPRESSED IN BT474, SIGNAL = 2.5; EXPRESSED IN LUNG, SIGNAL = 3.4
gaaaaagaaccagcccagtgctcgcccagaggccaagattacaccacttggctccccgttcagttgcccttctccactcaccctcatttcaagaccctctcccactctgccagccaggcccattcacccaggccccatccacagcgaagggcaaggcaggaagttacagccgagtgcagaagccctgctggatgcttccaatgatagccttatcctagctcacagcttagaggggtggaaataaacccttctcagctattccagcctccattgaccatgtcccttttaggaaacattgtaaacgagaagtacgaggcgtccagagtggctgccggacagagagaacggaagacacccaatccatttcgacagacaagtgggaatggaggcagcaaaaagggtggctcaagggaagtgggcacta

SEQ ID NO: 3413 - DNA, 1978 bp, Homo sapiens
  MAP TO AC005828.1; EXPRESSED IN FETAL LIVER, SIGNAL = 2.1; EXPRESSED IN BONE MARROW, SIGNAL = 1.7; EXPRESSED IN LUNG, SIGNAL = 3.7; EXPRESSED IN BRAIN, SIGNAL = 2.5; EXPRESSED IN PLACENTA, SIGNAL = 1.9; EXPRESSED IN HELA, SIGNAL = 2.6; EXPRESSED IN HEART, SIGNAL = 2.7; EXPRESSED IN HBL100, SIGNAL = 1.6; EXPRESSED IN BT474, SIGNAL = 2.5; EXPRESSED IN ADULT LIVER, SIGNAL = 1.4
ttgggcaccaaaacaacttcccgaagggcctggctggactgacaaaatggggcatttctccactattcccagagaggccagaaggaagatggaggccgaatgggttagggaatcattcggactcttccagaatgagtcttcctgtttccttccctataaatccaactaaaccgaaataccccagactcccacagacgccaccacagctctctgagatagtgaccatgttctcagctcttggtgatttctctggattcagaataactccagttcctgtgttcacattttgtcaagcagacagttcgcagcagccttagaggacctgaacgaggccatcaagctgtgtcccaacaaccgtgagatccagagacttctgctgagagtggaagaagagtgtagacagatgcagcagccacagcagccaccgccgccaccgcagcctcagcagcagttgccggaagaagcagaacctgagccacagcatgaagacatatactctgtacaggatatattcgaggaggagtacctggaacaggatgttgaaaatgtttccattggcctccagacagaggcccggcccagccaggggctcccggtcatccagagcccaccctcctctcccccgcatcgggactcagcctacatctccagctcacctcttggctctcatcaggtttttgacttccggtccagtagttctgtaggctctcccactagacagacctatcagtccacctcacctgccctttctccaactcatcagaactcacattacaggcctagcccaccacacacttccccggctcatcagggaggatcttaccgtttcagcccccctcctgtgggaggacagggcaaagaatacccaagccctcccccttcccctctccggagaggccctcagtatcgggccagccctccagctgaaagtatgagtgtctatagatcccagtctggttcacccgtgcgctatcagcaggaaacaagcgtcagtcagcttcctggcagacccaaatctccattatccaaaatggcccagcggccctaccagatgcctcagctccctgtggcagttccccagcaagggctcaggctacagcctgccaaggcccagattgtgagaagtaaccagcccagcccagccgtccattcaagcaccgtcatccccacaggagcctatggccaagtagcccattcaatggccagtaaataccagtcttcacaaggagacataggagtcagccagagccggttggtttatcaagggtcaattgggggaatcgtaggggatggaaggccggtgcagcatgtccaagccagcctgagtgcaggcgccatctgtcagcatggaggattgaccaaagaggatcttccacagcgaccttcctcagcataccgaggtggcgtgagatacagccagacaccacagatcggacgcagccagtcagcatcctattacccagtctgtcactcaaaactagatctggagcgctcctccagccaactaggttcccctgatgtgtcgcatttaatcagaagacctatcagtgtcaaccctaacgaaatcaaaccgcacccgccaactcccaggccgttgctgcattcccaaagtgtaggccttcgcttctctccatctagcaatagtatctcctccacctccaacctaactccgaccttccggccatcttcttccatccagcaaatggagatcccactgaaacctgcatatgagaggtcatgtgacgagctgtcgccagtgtctccaactcaaggaggttaccccagtgagcccacccgatccaggaccacaccattcatggggatcatagataaaacagcacggactcagcagtacccccacctccaccagcagaatcggacctgggcagtgtcatctgtggacaccgtcctcagtcccacgtctccaggcaacctgcctcagcctgagtccttcagtccaccatcatccatcagcaac

SEQ ID NO: 3414 - DNA, 438 bp, Homo sapiens
  MAP TO AC010812.2; EXPRESSED IN LUNG, SIGNAL =  13; EXPRESSED IN ADULT LIVER, SIGNAL =  12; EXPRESSED IN BONE MARROW, SIGNAL =  12; EXPRESSED IN BRAIN, SIGNAL = 9.6; EXPRESSED IN HELA, SIGNAL =  10; EXPRESSED IN PLACENTA, SIGNAL =  11; EXPRESSED IN HBL100, SIGNAL =  10; EXPRESSED IN HEART, SIGNAL = 9.5; EXPRESSED IN BT474, SIGNAL = 8.5; EXPRESSED IN FETAL LIVER, SIGNAL =  11
agactccagaggcacccacactgagcctgtgcccagacactgtcctagaactctgccttcttctatgcgtttttctcaacaaccatgccatgcaggcatttgcttctgtatgcaaatgaggaagctgtggctcaaaggggctaagtaacttccatccacctgacatggaaaacagagaacaggaagggcctaggggccaggctgttgggcttcacagtctgttctctttcatccagatctagaaagtaaaccaagggatgattacctttaacggcagaaaggaaagctgatgtctcagcctgggcactaagctctgcaccccagccatgtctagttcttcagtatttctgtcctggtcttgtgtgtgtgacaacaaacttccctggtacccgaagctcaggatgtctgtagaggagaccccagaattggctgtgctat

SEQ ID NO: 3415 - DNA, 385 bp, Homo sapiens
  MAP TO AL109752.7; EXPRESSED IN ADULT LIVER, SIGNAL =   4; EXPRESSED IN HELA, SIGNAL = 4.1; EXPRESSED IN HEART, SIGNAL = 3.8; EXPRESSED IN FETAL LIVER, SIGNAL = 4.6; EXPRESSED IN BT474, SIGNAL = 3.3; EXPRESSED IN BRAIN, SIGNAL =   3; EXPRESSED IN LUNG, SIGNAL = 5.1; EXPRESSED IN BONE MARROW, SIGNAL = 3.4; EXPRESSED IN PLACENTA, SIGNAL = 4.3; EXPRESSED IN HBL100, SIGNAL = 4.9
agttggatgagggtggtgaggcatgcagaagaggccaaaggggtaagagaagtgggagagccaagaaacgagtgtctcacctggcattggtgcaatcggtgaacaaagtttcgaagtctttcctggtgatgagtttgcagcggtttaccccgggctggatggcccccagcccgcggaggatccggacctgctcaacagtacacaccacgggggatatatccagtctcttcagcttggtgtacacagtgtgcaagcctcccaccaggtgcttgagaaaaagatcaaagacttgcggcaggcagatcagttcctggccgtccatcaggaacgaagccaccttcatcccgtgcatgtcgaccatgcggcactcgttggtgttggtgtt

SEQ ID NO: 3416 - DNA, 496 bp, Homo sapiens
  MAP TO AC009974.3; EXPRESSED IN LUNG, SIGNAL =   4; EXPRESSED IN BRAIN, SIGNAL = 3.4; EXPRESSED IN HELA, SIGNAL = 3.2; EXPRESSED IN HEART, SIGNAL =   3; EXPRESSED IN BT474, SIGNAL =   3; EXPRESSED IN ADULT LIVER, SIGNAL = 3.5; EXPRESSED IN FETAL LIVER, SIGNAL = 3.2; EXPRESSED IN BONE MARROW, SIGNAL = 3.8; EXPRESSED IN PLACENTA, SIGNAL = 4.8; EXPRESSED IN HBL100, SIGNAL = 3.6
tcaccagtgagtcatcagggttcccagggctcttggacttcccagtacttcctctaaactacttccctttcacttccccgaccatctagatataacatgtcgtctttcctccagcagcttgaactttcttcctagcccttcacttaacctttgccacttcccttacaacccactctctctctgtcactttttcaaaatgatcttcttccacagaagcctggagacactgaagttgtccctggccaagtggacacagggactatggcccccatgatcatgtcttcctcctcttccctccctgcagtaataactgagccagcaggcccagatttggggaccccattcaccagccgcctacccccagaacttcaggtcctaaaggacgaacaggcccatcggttggcccccaagggtaatcagtctcgcatcttgactcaggcctataaacgcatggctgaggaggccatgcagaaggtgtgtggggcagaggaaaata

SEQ ID NO: 3417 - DNA, 457 bp, Homo sapiens
  MAP TO AL121748.2; EXPRESSED IN HBL100, SIGNAL = 0.91; EXPRESSED IN HEART, SIGNAL = 0.98; EXPRESSED IN ADULT LIVER, SIGNAL = 1.6
ttagaatgaatgcaaaactgatgaaaattctagatttttcagaaagaagccttttttttctgtttgagccaaatcactataatgtctatttccaaaagccaatagtgaaaaagttctccccaaagtgaagagatcctatagaaatttaaaaccataattaggaacaaaccatagcggtcatttctatttgctgtggcagctattcaactgcagtatacggatttcatctccacctagaaaaagtgagttctagtgtcttactgctttgaggaaaccagtgagatgggagagttccctgacccccttgtgggacctgcgacagtggggtggggggcggctcattttgctcagcagagcttaaaccccttgtgggaggaggagcatgcaggtgagcgggtgaaagagccagggtgagtgtctttaggcgccagcaggaacgaaccctgtactggtccac

SEQ ID NO: 3418 - DNA, 478 bp, Homo sapiens
  MAP TO AL035070.3; EXPRESSED IN BT474, SIGNAL =   9; EXPRESSED IN FETAL LIVER, SIGNAL = 9.7; EXPRESSED IN BONE MARROW, SIGNAL =  11; EXPRESSED IN LUNG, SIGNAL =  11; EXPRESSED IN BRAIN, SIGNAL =  11; EXPRESSED IN HBL100, SIGNAL = 9.7; EXPRESSED IN HELA, SIGNAL =  10; EXPRESSED IN PLACENTA, SIGNAL =  12; EXPRESSED IN ADULT LIVER, SIGNAL =  11; EXPRESSED IN HEART, SIGNAL = 8.6
tgctcatgctaatggtcagcaggccaggataaatggggctggggcattaatgcagagccctgtaaatcatgcatgaaggggaagaccatgcccagcaccgaggggccagccagccgaggaggctgcatgaaatattcagcagccagacagactcaggcctgctccaaatccccacgtccagacctctgaggatgtgatttttgcagaaagctttaaaagaacctcaaatgccttatccttgtgttccccaagtctcctatcaaagctggttcttgctgaatggtgtctctgtgttccgcctctggggcgttggtcatgaggaccccacactgatggttcccctcccctgtgccactgcagcactgctcacccatccggccccgcagcaggctgtggtttccctccctgtcaaccacagggcccttgtacatactttcctgtttcaggaaggtctctgcctggctcatcttgctctcct

SEQ ID NO: 3419 - DNA, 430 bp, Homo sapiens
  MAP TO AL049698.3; EXPRESSED IN BONE MARROW, SIGNAL = 1.6; EXPRESSED IN HELA, SIGNAL = 1.4; EXPRESSED IN HEART, SIGNAL = 2.2; EXPRESSED IN ADULT LIVER, SIGNAL = 1.6; EXPRESSED IN LUNG, SIGNAL = 2.3; EXPRESSED IN BRAIN, SIGNAL = 1.8; EXPRESSED IN PLACENTA, SIGNAL = 3.6; EXPRESSED IN HBL100, SIGNAL = 1.9; EXPRESSED IN BT474, SIGNAL = 1.8; EXPRESSED IN FETAL LIVER, SIGNAL = 1.8
cttcgtccttctgcttcgactcctggagtctcttctggaactgccactccagcatgagcttgcgcagccggtcgctctcctcggcgctgcggtccggtttgctctggagctcctggatctccttgctcagcatgtccacgatgtgcatctgctgctgcttctccagcttctccttggcgtcccgcttccacgggtcgggggacagactgtcccccgaggaaagctcctctttgctgactgtaatgtactgcaagtctctgcgctcgatcgtgcggggctgctgctgaggctgcagctcccgaatgactgtttcctgtggccgctggagtgtggaaggcttttcgggcttcatctgctgtgcagtcaggggagaaaacggagcagggtttaaggactgagtgcgcatctggcccaacttcctctcctgctc

SEQ ID NO: 3420 - DNA, 1946 bp, Homo sapiens
  MAP TO AF111167.2; EXPRESSED IN BONE MARROW, SIGNAL = 6.2; EXPRESSED IN PLACENTA, SIGNAL = 5.4; EXPRESSED IN HEART, SIGNAL = 2.9; EXPRESSED IN HBL100, SIGNAL = 5.2; EXPRESSED IN HELA, SIGNAL = 2.8; EXPRESSED IN BT474, SIGNAL = 4.5; EXPRESSED IN FETAL LIVER, SIGNAL = 2.1; EXPRESSED IN LUNG, SIGNAL =  36; EXPRESSED IN BRAIN, SIGNAL = 1.8
gctgcaggagccagttctactggggtgggtgaatggaggtgatggcagacacttttactgaatgtcggtctttttttgtgattattctagttatctccagaagaagaagagaaaaggagaatccgaagggaaaggaataagatggctgcagccaaatgccgcaaccggaggagggagctgactgatacactccaagcggtaggtactctgtgggttgctcctttttaaaacttaaggggaaagttggagattgagcataagggcccttgagtaagactgtgtcttatgctttcctttatccctctgtatacaggagacagaccaactagaagatgagaagtctgctttgcagaccgagattgccaacctgctgaaggagaaggaaaaactagagttcatcctggcagctcaccgacctgcctgcaagatccctgatgacctgggcttcccagaagagatgtctgtggcttcccttgatctgactgggggcctgccagaggttgccaccccggagtctgaggaggccttcaccctgcctctcctcaatgaccctgagcccaagccctcagtggaacctgtcaagagcatcagcagcatggagctgaagaccgagccctttgatgacttcctgttcccagcatcatccaggcccagtggctctgagacagcccgctccgtgccagacatggacctatctgggtccttctatgcagcagactgggagcctctgcacagtggctccctggggatggggcccatggccacagagctggagcccctgtgcactccggtggtcacctgtactcccagctgcactgcttacacgtcttccttcgtcttcacctaccccgaggctgactccttccccagctgtgcagctgcccaccgcaagggcagcagcagcaatgagccttcctctgactcgctcagctcacccacgctgctggccctgtgagggggcagggaaggggaggcagccggcacccacaagtgccactgcccgagctggtgcattacagagaggagaaacacatcttccctagagggttcctgtagacctagggaggaccttatctgtgcgtgaaacacaccaggctgtgggcctcaaggacttgaaagcatccatgtgtggactcaagtccttacctcttccggagatgtagcaaaacgcatggagtgtgtattgttcccagtgacacttcagagagctggtagttagtagcatgttgagccaggcctgggtctgtgtctcttttctctttctccttagtcttctcatagcattaactaatctattgggttcattattggaattaacctggtgctggatattttcaaattgtatctagtgcagctgattttaacaataactactgtgttcctggcaatagtgtgttctgattagaaatgaccaatattatactaagaaaagatacgactttattttctggtagatagaaataaatagctatatccatgtactgtagtttttcttcaacatcaatgttcattgtaatgttactgatcatgcattgttgaggtggtctgaatgttctgacattaacagttttccatgaaaacgttttattgtgtttttaatttatttattaagatggattctcagatatttatatttttattttatttttttctaccttgaggtcttttgacatgtggaaagtgaatttgaatgaaaaatttaagcattgtttgcttattgttccaagacattgtcaataaaagcatttaagttgaatgcgaccaaccttgtgctcttttcattctggaagtcttgtaagtttctgaaaggtattattggagaccagtttgtcaagaagggtagctgctggagggggacacaccctctgtctgatcccttatcaaagaggacaaggaaactatagagctgattttagaatattttacaaatacatgccttccattgg

SEQ ID NO: 3421 - DNA, 477 bp, Homo sapiens
  MAP TO AP000126.1; EXPRESSED IN PLACENTA, SIGNAL = 0.93; EXPRESSED IN HBL100, SIGNAL = 0.75; EXPRESSED IN BONE MARROW, SIGNAL = 0.85; EXPRESSED IN FETAL LIVER, SIGNAL = 0.67; EXPRESSED IN LUNG, SIGNAL = 1.1; EXPRESSED IN HELA, SIGNAL = 0.75; EXPRESSED IN ADULT LIVER, SIGNAL = 0.93; EXPRESSED IN HEART, SIGNAL =   1; EXPRESSED IN BT474, SIGNAL = 0.87
tggcacaaagattcagaaaaagatgtaagagcttacattagaaaattacactagaaaattaatcagaataaaatctcctctcttcagcgatgtgatgaaactactcagtctccatccactgccaacagcttctcttatatgcattcagatagtcaggtgaccatagtcaacctttacttagatgtgaagataatgggtaggggagatttcaattgaacttgatcttggagaggtcattgcaaagccaaggatgacctgtagtgatgattagtagcaagaggaatagcatcttctgtagcaaagtggtcggtagccacagcagctagagctgtatccacagccatatccacagccagagccgtatccacagccatagccacagccagttccatagccagagccatatctacagccagagccgtatccacagccatagccacaaccatatccacagccggaactccagccagagccata

SEQ ID NO: 3422 - DNA, 439 bp, Homo sapiens
  MAP TO AC010896.2; EXPRESSED IN HBL100, SIGNAL = 3.7; EXPRESSED IN PLACENTA, SIGNAL = 3.8; EXPRESSED IN HELA, SIGNAL = 4.8; EXPRESSED IN HEART, SIGNAL = 3.9; EXPRESSED IN BT474, SIGNAL = 3.9; EXPRESSED IN FETAL LIVER, SIGNAL = 4.5; EXPRESSED IN ADULT LIVER, SIGNAL = 4.5; EXPRESSED IN BRAIN, SIGNAL = 3.8; EXPRESSED IN BONE MARROW, SIGNAL = 3.8; EXPRESSED IN LUNG, SIGNAL = 4.8
tggtccttatgtctctggggcctctctcattagtctccctactcaggttccaagctcagggcctgtgatctgctatgatggctggctttttctcccacccagaggagcagctgtgcttggaccagctggccaaactacaggttcagagaggagaaaaccactgagaacatttatttcacttaaggccattggtttccaagttcccaaccttcctcaccaggtggcagcaactggcagtacccgggttcgggatggctgaagacaaggcagccacaaggctggtggttgtggaggctttgacaaggagggtaatggaggcagatgctggtgttccactggtagccagagaggcaagcacaatagaaattccccttgtggttgacattacactctgacagagagaagagaagagggggtgggcaggctgtctgaagaagct

SEQ ID NO: 3423 - DNA, 383 bp, Homo sapiens
  MAP TO AC011310.2; EXPRESSED IN BT474, SIGNAL =   1; EXPRESSED IN FETAL LIVER, SIGNAL = 1.1; EXPRESSED IN ADULT LIVER, SIGNAL = 1.1; EXPRESSED IN HELA, SIGNAL =   1; EXPRESSED IN HEART, SIGNAL =   1; EXPRESSED IN BRAIN, SIGNAL =   1; EXPRESSED IN BONE MARROW, SIGNAL = 1.1
aaatgatagacttcaggcttttctgtaggtctctggaaacttaaatataataggttagaaggagaagaagaaatctgtaaacaaggtaaactttttattagttctagtagtttttaatggattcctgaggaatttctaaacacaggattatgttgtctgtgaaggaagacagctttactttttcctttccaatcttgaatgcttttatttgtttttgttgcctaattgtacagactagaaattccatgacaacattgaatggaagtgatgagagtggatatccttgccttgttcctgattttaggggggaaatctttcattatttgtatgagttcagctgtaagtttttcctagatgatcttcagcaaggtgaggaaattttc

SEQ ID NO: 3424 - DNA, 407 bp, Homo sapiens
  MAP TO AC010361.2; EXPRESSED IN BONE MARROW, SIGNAL =   2; EXPRESSED IN LUNG, SIGNAL = 2.1; EXPRESSED IN HBL100, SIGNAL = 1.8; EXPRESSED IN HEART, SIGNAL = 1.9; EXPRESSED IN PLACENTA, SIGNAL =   2; EXPRESSED IN HELA, SIGNAL = 2.9; EXPRESSED IN FETAL LIVER, SIGNAL = 2.2; EXPRESSED IN BT474, SIGNAL = 2.1; EXPRESSED IN ADULT LIVER, SIGNAL = 1.9; EXPRESSED IN BRAIN, SIGNAL = 2.2
tctaagtcctcagtagcccccggttcaaacgagttcttcaaaaatattaattaattgaagatagtctttaatccttataaacagcttttaggacatagagttacgccagctttggcaaagctaaaggcactaggaataacatttatcgcttactgtttttaggcctgtttgtgccgcttaaatgttatactcaatctctctctcctatatctcctccctgttttatgtgatcaatactccactttaagcactcattaccctcatgctctctcgtttcaaaaactatctggaaaaaatgctcctttcttcagttttaccaatgcgtttgctctgccagaggtgtctgttttccatatctctaatgatgatactaaagagttgtaccttctggcaaaggttcgtcttga

SEQ ID NO: 3425 - DNA, 350 bp, Homo sapiens
  MAP TO D87675.1; EXPRESSED IN BT474, SIGNAL = 1.6; EXPRESSED IN BRAIN, SIGNAL = 1.1; EXPRESSED IN BONE MARROW, SIGNAL = 1.2; EXPRESSED IN LUNG, SIGNAL = 1.3; EXPRESSED IN HELA, SIGNAL = 1.1; EXPRESSED IN PLACENTA, SIGNAL = 1.3; EXPRESSED IN HBL100, SIGNAL =   2; EXPRESSED IN HEART, SIGNAL = 1.4; EXPRESSED IN FETAL LIVER, SIGNAL = 1.3
tttctgccatcttttgggaccttttcagtagctattgttaactcctttaaagggtggaggtgagattcacattatgccattttgcgaagtgttggtagaagggtaggtaattcagtctactgaggtttgagggtggtttatctggttctctctgtgtccactgaaaagatgtaattacgagttgactgtcttttatagagcttagaaaataggtctgctgcaggtggctgtagaaaagaaatgaataagggcaatgataatggggccttggctatcgggggaaacatggttattatctgggttgatgattttggctggtatgttgatagaggtgtgagtttaacaaaccc

SEQ ID NO: 3426 - DNA, 1975 bp, Homo sapiens
  MAP TO AC006078.1; EXPRESSED IN PLACENTA, SIGNAL = 1.4; EXPRESSED IN HBL100, SIGNAL = 1.1; EXPRESSED IN HELA, SIGNAL = 1.9; EXPRESSED IN HEART, SIGNAL = 1.1; EXPRESSED IN BT474, SIGNAL = 1.7; EXPRESSED IN ADULT LIVER, SIGNAL = 1.6; EXPRESSED IN FETAL LIVER, SIGNAL = 1.4; EXPRESSED IN BRAIN, SIGNAL = 1.3; EXPRESSED IN BONE MARROW, SIGNAL = 1.1; EXPRESSED IN LUNG, SIGNAL = 2.7
tttgtcaagctcttcaaccagttagagacaagttttcagactgttatatcattcactatgttgatgatattttatgtgctgcagaaatgagagacaaattaattaactgttatacatttctgcaagcagaggttgccaatgctggactggcaatagcatctgataagattcaaacctctactccttttcattacttagggatgcaaatagaatatagaaaaattaagctacaaaaaatagaaataagaaaagacacattaaaaacattaaatgactttcaaaaattgctaggagatattaattggattcggccaactctaggcattcctacttatgtcacgtcaaatttgttctctatcttaagaggagacccagatttaaatagtaaaagaatattcactccagaggcaacaaaaaaaattaaattagtggaagaaaaaattcaaccagcacaaataaatagaatagatcccttagccccactccaacttttgatttttgctactgcacattctccagcaggcatcaatgttcaaaatactgatcttgtggagtggtcattccttcctcacagtacaattaagacttttacattgtacttggatcaaatagttacattaattggtcaggcaaaattacgaataataaaattgtgtggaaatgacccagacaaaatagttgttcctttaaacaaggaacgagttagacaagcctttatcaattctggtgcatggcagattggtcttactgattttgtgggaattactgataatcattaccccaaaacaaaaatcgtccagttcttaaaattgactacttggattttacctaaaattacgagacatgaacctttagaaaatgctctgacggtgtttactgatggttccagcaatggaaaggcagcttacatagggccaaaagagcaagtaatcaaaactcattatcaatcggctcaaagagctgagttggttgcagtctttacagtgttacaagattttaatcaacctattaatattgtatcagattctgcatatgtagtacaggctacaagggatgttgagacagctctaattaaatatagcatggatgatcagttaaaccagctgttcaatttattacaacaaactgtaagaaacagaaatttcccattttacattactcatattcgggcacacactaatttaccagggcctttaactaaagcaaatgaacaagctgacttactggtaccatctgcattcataaaagcacaagaacttcatgctttgactcatataaatgcagcaggattaaaaaacaaatttgacgtcacatggaaacaggcaaaaaatattgtacaacattgcacccagtgtcaagtcctacacctgcccactcaagaggcaggagttaatcccagaggtctatgtcctaatgtgttatggcaaatggatgtcacgcatgtaccttcatttggaagattatcatatgttcatgtaacagttgatacttattcacatttcatatgggcagcttgccaaacaggagaaagtacttcccatgttaaaaaacatttattgtcttgttttgctgtaatgggagttccagaaaaaatcaaaactgacaatggaccaggatattgtagtaaagctttccaaaaattcttaaatcagtggaaaattacacatacaacaggaattccctataattcccaaggacaggccatagttgaaagaactaatagaacactcaaaactcaattagttaaacaaaacgaagggggagacagtaaggagtgtaccactcctcagatgcaacttaatctagcactctatactttaaattttttaaacatttatagaaatcagactactacttctgcagaacatcttactggtaaaaagaacagcccacatgaaggaaaactgatttggtggaaagacaacaaaaataagacatgggaaatagggaaggtggtaacgtgggggaaaggttt

SEQ ID NO: 3427 - DNA, 398 bp, Homo sapiens
  MAP TO AC010680.3; EXPRESSED IN ADULT LIVER, SIGNAL =   2; EXPRESSED IN BONE MARROW, SIGNAL = 2.1; EXPRESSED IN BT474, SIGNAL =   2; EXPRESSED IN FETAL LIVER, SIGNAL = 2.1; EXPRESSED IN BRAIN, SIGNAL = 1.6; EXPRESSED IN LUNG, SIGNAL = 2.2; EXPRESSED IN PLACENTA, SIGNAL = 1.8; EXPRESSED IN HEART, SIGNAL =   4; EXPRESSED IN HELA, SIGNAL = 2.1; EXPRESSED IN HBL100, SIGNAL = 2.1
attgttgattaagggcagggtatataacatttgaaatcacaattgctaaatatactctatgataccttgactggccaaaaaagaacagtcagggtctcccataatcagtgcatgaaacaaacgcaaaagaataaaatcaaagcacattgttactatcagtcatccttaaaagtgctttaaagtaaagtgctgcctgttgttaatattgtttcagaagtaactataatggaagagaaagaaagggcttataccctagaagaagaagctgtttcagtacaacgggaagaagaatatgaggaatatgaagaatatgattataaagaatttgaggagtatgaaccaacagaagaatatgaccaatatgaagaatacgaggagcgggagtatgaacgatatga

SEQ ID NO: 3428 - DNA, 458 bp, Homo sapiens; identical to SEQ ID NO: 1936
  MAP TO AL035414.23; EXPRESSED IN HEART, SIGNAL =  13; EXPRESSED IN FETAL LIVER, SIGNAL =  17; EXPRESSED IN ADULT LIVER, SIGNAL =  16; EXPRESSED IN LUNG, SIGNAL =  17; EXPRESSED IN BONE MARROW, SIGNAL =  17; EXPRESSED IN HELA, SIGNAL =  15; EXPRESSED IN BRAIN, SIGNAL =  15; EXPRESSED IN PLACENTA, SIGNAL =  15; EXPRESSED IN HBL100, SIGNAL =  16; EXPRESSED IN BT474, SIGNAL =  13

SEQ ID NO: 3429 - DNA, 428 bp, Homo sapiens
  MAP TO AC011493.2; EXPRESSED IN BT474, SIGNAL = 2.1; EXPRESSED IN HEART, SIGNAL = 1.5; EXPRESSED IN PLACENTA, SIGNAL = 1.8; EXPRESSED IN FETAL LIVER, SIGNAL = 1.5; EXPRESSED IN ADULT LIVER, SIGNAL = 1.6; EXPRESSED IN BRAIN, SIGNAL = 1.9; EXPRESSED IN LUNG, SIGNAL = 1.3; EXPRESSED IN BONE MARROW, SIGNAL = 1.7; EXPRESSED IN HELA, SIGNAL = 1.9; EXPRESSED IN HBL100, SIGNAL = 2.3
tagggtctccctgaccgagctggtcctggcaagtggcatccatcatgggggctccaatgcaggtcaaagggttgccggagcgatggttggaaaacatggaactaagctggaggacacccgagtactcttaaagcaatccccgtggtgagtaaaaaggggagctcagaagcatcagggtaaaaatgggacaagtgtggggtctggtttgttccaccttggaactttttcacactgatgatgaggaggaaggagagtataacgaattaacagaagaggttacagagcaggtttatttgccagctaaagctaaagcggcaaaggagggagaggttcattcctacccttctgcaccccctcattattattttgaagaaaaagaccctccagatctttcttttctggaggacactgggcaaaaagtagttgcc

SEQ ID NO: 3430 - DNA, 420 bp, Homo sapiens
  MAP TO AL132661.2; EXPRESSED IN LUNG, SIGNAL = 0.96; EXPRESSED IN PLACENTA, SIGNAL = 1.1; EXPRESSED IN BT474, SIGNAL = 1.2; EXPRESSED IN BONE MARROW, SIGNAL = 1.5; EXPRESSED IN HBL100, SIGNAL = 1.2; EXPRESSED IN HEART, SIGNAL = 1.5; EXPRESSED IN FETAL LIVER, SIGNAL = 0.96; EXPRESSED IN BRAIN, SIGNAL = 2.5
caggctctcttcagcgtaggctgaaggcccttcattgtctgttcaccctccatcccggcactggcacccaaaccaccctgatgcccagcgtgccaaccatcccactcactcctgcctctggggcttgcacagctgcctccactgttgagctcccccaaggcctgcaaacccatcttggatgcagctccccctgtggtcctctctcccacctttccggtgacctggactccaggaactcctgcactggctgccttcaccagcgccctcgcacgctggctgccttcaccagtgcccttgtcgtgctggctgccttcaccagcaccctcgtcccactggctgccttcatcagcgccctcgtcgcactggctgccttcatcagcgccctcgtcgcactggctgccttcatcagcacccttgtca

SEQ ID NO: 3431 - DNA, 416 bp, Homo sapiens
  MAP TO AC010940.2; EXPRESSED IN BRAIN, SIGNAL = 5.4; EXPRESSED IN BONE MARROW, SIGNAL = 6.8; EXPRESSED IN LUNG, SIGNAL = 6.6; EXPRESSED IN HBL100, SIGNAL = 6.6; EXPRESSED IN HEART, SIGNAL = 6.2; EXPRESSED IN PLACENTA, SIGNAL = 5.8; EXPRESSED IN HELA, SIGNAL = 7.1; EXPRESSED IN FETAL LIVER, SIGNAL = 6.5; EXPRESSED IN BT474, SIGNAL = 5.7; EXPRESSED IN ADULT LIVER, SIGNAL =   7
atctctagcctctccctggcctgtaaataataaagattttaatgaaggcacatcgtaacaatggtctttcctgtttatccttcaaagaacaacataataaggtggctacccctgtggaattttgtctcttcaatatcagaaggaattcatgaagttcttatttattcacagataatgagtgtgtatatggcaactaccctgaaatacctttggaagaaatgccagatgcagatggagtagccagcactccctccctcaatattcaagagccatgctctcctgccacatccagtgaagcattcactccaaaggagggttctccttacaaagcccccatctacatccctgatgatatccccattcctgctgagtttgaacttcgagagtcaaatatgcctggggcaggactaggaata

SEQ ID NO: 3432 - DNA, 421 bp, Homo sapiens
  MAP TO AC011561.2; EXPRESSED IN HEART, SIGNAL = 2.2; EXPRESSED IN PLACENTA, SIGNAL = 3.1; EXPRESSED IN HBL100, SIGNAL = 2.6; EXPRESSED IN BT474, SIGNAL = 2.5; EXPRESSED IN FETAL LIVER, SIGNAL = 3.2; EXPRESSED IN ADULT LIVER, SIGNAL = 3.6; EXPRESSED IN LUNG, SIGNAL = 2.8; EXPRESSED IN BONE MARROW, SIGNAL = 2.1; EXPRESSED IN BRAIN, SIGNAL = 2.6; EXPRESSED IN HELA, SIGNAL = 2.8
gctcacacagctcacagaggcagaatcaggatttgaccccaagcaatctggttcctgaggttacacccttagccaaccaagctccatagaagcccaggaacaggatggcttagctggcttttattcaggccccagggattcctctttgatggtgtggcaagccccttatcttgtctctgctcccttttccctttgcctctctttcttcctcccagccttcctgcttcatgcagttcctcgacgcccacgtgtcctgccctcagaggccacgccctgcagagccgccctgctcttggatcttcacctccagagtgggacactacacaccaaccaacgtcctcttgccaccactgacatctaccctgtgttagggtgctaggctgaaagtctcctatccatcagggctgagaatgaggatgaa

SEQ ID NO: 3433 - DNA, 319 bp, Homo sapiens
  MAP TO AC007463.3; EXPRESSED IN ADULT LIVER, SIGNAL = 0.66; EXPRESSED IN HEART, SIGNAL = 0.79; EXPRESSED IN PLACENTA, SIGNAL = 0.66; EXPRESSED IN BT474, SIGNAL = 0.61; EXPRESSED IN FETAL LIVER, SIGNAL = 0.62; EXPRESSED IN LUNG, SIGNAL = 0.78; EXPRESSED IN HELA, SIGNAL = 0.71; EXPRESSED IN BRAIN, SIGNAL = 0.8
ttacctgcctttccaggatggagtgagggtgaaatgagcaatgcaaacatatgacaggctggacgaaccctcttacctctcctctgccttaagaactattgaactcacactcaaaaaaaaaaaaatccgtaaaccaaaattgtcccaaaagggaaggaggagggattgactgtcagccagtatagaacttcagtcaacttctgaaagatgacacggctggaccacccgttgacaattgaaccatcagaggaaactgatgtggagaatacccacagggagatggtgggatgcaaactcatcctcccagaacatcctcttg

SEQ ID NO: 3434 - DNA, 482 bp, Homo sapiens
  MAP TO AC011032.2; EXPRESSED IN LUNG, SIGNAL = 5.9; EXPRESSED IN BONE MARROW, SIGNAL = 5.4; EXPRESSED IN BRAIN, SIGNAL = 4.4; EXPRESSED IN PLACENTA, SIGNAL = 4.9; EXPRESSED IN HBL100, SIGNAL = 4.9; EXPRESSED IN HELA, SIGNAL = 5.6; EXPRESSED IN HEART, SIGNAL = 4.6; EXPRESSED IN FETAL LIVER, SIGNAL = 5.2; EXPRESSED IN BT474, SIGNAL = 4.3; EXPRESSED IN ADULT LIVER, SIGNAL =   7
taggtgccaaagaagccaagcatcttttgagatggacctcatttaggattctgaatattacctggcccctaaacacccccagcttaacatggagctatgattatactttaattatctgtgtatctacatcaaatcaaattttatgctatatattgaatgtttgtgtccccccaccccaaattcataagctattcccaccccccaaagtgatgatgttaggaggtggagtgattacatcatgagggtgaaactctcatgggcaggattagtgcccttgtaaaagaggcctcagagaggcccatgacccaattgccatggaagattacagtgaagagagggctgtctatgaggaagtggtcccttagcagacgacatatcttctggctggttgatcttagacttttcacccctaaaactgtgagaaataaatttatgttgtttataagccacctagtctctggtattttgtttcagcagctgga

SEQ ID NO: 3435 - DNA, 393 bp, Homo sapiens
  MAP TO AC010684.2; EXPRESSED IN BT474, SIGNAL = 5.3; EXPRESSED IN ADULT LIVER, SIGNAL = 5.3; EXPRESSED IN BONE MARROW, SIGNAL = 5.7; EXPRESSED IN PLACENTA, SIGNAL = 4.8; EXPRESSED IN HELA, SIGNAL = 5.6; EXPRESSED IN FETAL LIVER, SIGNAL = 5.7; EXPRESSED IN BRAIN, SIGNAL = 4.6; EXPRESSED IN LUNG, SIGNAL = 5.1; EXPRESSED IN HEART, SIGNAL =   5; EXPRESSED IN HBL100, SIGNAL = 5.2
tttacctccaggaccaccagtaggctgactcccggcccctctcccaggccctctcccacctccaggtctttctcctgggaacaaccaccaaagcgacctccccctgcaccttcaggtatccctctttctcatcctggcaggatgatccacctttggtgcctccacatagacttgcccctatccacccttggttttttccaccagctcccttgctaaaccctgcgattttcagtgcaccacccaccttgattcggcaacccaaggtggatgatatgagtgtggccaccattgagaagaaagccacaacaaccaccagtgccaagccacagatcactgctaattccaaggcagagcttacttgatttgtgcccatggcattgagagtagatcggg

SEQ ID NO: 3436 - DNA, 444 bp, Homo sapiens
  MAP TO AC012122.1; EXPRESSED IN BRAIN, SIGNAL = 1.2; EXPRESSED IN HEART, SIGNAL =   1; EXPRESSED IN HBL100, SIGNAL = 0.99; EXPRESSED IN BT474, SIGNAL = 0.96; EXPRESSED IN FETAL LIVER, SIGNAL = 0.94; EXPRESSED IN LUNG, SIGNAL = 1.2
ccagggacaatgttttcaggctgaaattcctttaaattcaatgaggttgttttcatgtttggaaattccagtggaaagtgagtggtattggtgacctctctcctttttcagctcctgcttcaggtgcagaaatacagcgatttccagtgccagctgttgagccagtgccagcaccaggggcagattcccctccagggacagcgctggagctagaggaagctccagagccctcctgccgctgccctgggactgcccaggaccagcccagtgaggagctgcctgacttcatggcacctcctgtagagccaccggcctcagccctggagctgaaagtgtggctggagctagaggtggcagagaggggtggccagcacagctccagccagcagctcccacactgctcccagtcctgggcacagtggaagctatggaggcagagaccag

SEQ ID NO: 3437 - DNA, 344 bp, Homo sapiens
  MAP TO AC011851.2; EXPRESSED IN BT474, SIGNAL =  39; EXPRESSED IN FETAL LIVER, SIGNAL =  12; EXPRESSED IN ADULT LIVER, SIGNAL = 3.4; EXPRESSED IN LUNG, SIGNAL = 7.5; EXPRESSED IN BONE MARROW, SIGNAL =  15; EXPRESSED IN BRAIN, SIGNAL =  20; EXPRESSED IN HELA, SIGNAL =  20; EXPRESSED IN PLACENTA, SIGNAL =  10; EXPRESSED IN HBL100, SIGNAL =  37; EXPRESSED IN HEART, SIGNAL =  26
atggtacacgacaacatggggctccctaggcccctccctcttcaaggggtgtgcatggaatgtgtgaggagggaagattcagtgtggtggggaatgagtgtgccagggactccccaacagtgagggcctctttcttcctcctgtgctctcgctgaggctggtggtccaggggtcttactccttggaggccatgtgggccatgaggtccaccaccctgttgttgtagccaaattcattgtcataccaggaaatgagcttgacaaagtggtcgttgagggcagtgccagccccagcattgaaggtggaagagtgggtgtcactgttgaagtcggaggagaccacct

SEQ ID NO: 3438 - DNA, 429 bp, Homo sapiens
  MAP TO AC010958.2; EXPRESSED IN ADULT LIVER, SIGNAL =  10; EXPRESSED IN BONE MARROW, SIGNAL = 9.2; EXPRESSED IN PLACENTA, SIGNAL = 8.7; EXPRESSED IN BT474, SIGNAL = 7.8; EXPRESSED IN FETAL LIVER, SIGNAL = 9.8; EXPRESSED IN BRAIN, SIGNAL =   8; EXPRESSED IN LUNG, SIGNAL =  11; EXPRESSED IN HEART, SIGNAL = 7.8; EXPRESSED IN HELA, SIGNAL = 9.1; EXPRESSED IN HBL100, SIGNAL = 8.3
agtttgggtaagagctcggcttctggatccagcccatgtcctggctggacaggggcagccccaaggggtgaggactgacgtagttgaaatcctctccttgcggggcggcctgagcctcagcttcacctgctgcaggcaccatgccacacctgcctggtcacccatcctcactcagccacggtggtcacacactgtcggggtccacacaggcacctgcccaggctcttccacagccacggtgtctgtattccgcatttcaggctcctccccatctgtcaacaccaacgcacccccgctgccctcatcatctacacccacctcaccctccaatccttgtcagggaacagtcttcaaatccagtaaaaactggaggaagaggaatgcaaacactctcagaaaatccgcccttcggagcctgctgtgttaatt

SEQ ID NO: 3439 - DNA, 354 bp, Homo sapiens
  MAP TO AC011112.2; EXPRESSED IN PLACENTA, SIGNAL = 6.9; EXPRESSED IN HBL100, SIGNAL = 6.1; EXPRESSED IN HEART, SIGNAL = 5.2; EXPRESSED IN LUNG, SIGNAL = 6.4; EXPRESSED IN BRAIN, SIGNAL = 6.3; EXPRESSED IN HELA, SIGNAL = 6.6; EXPRESSED IN BT474, SIGNAL = 5.9; EXPRESSED IN ADULT LIVER, SIGNAL =   7; EXPRESSED IN FETAL LIVER, SIGNAL = 5.7; EXPRESSED IN BONE MARROW, SIGNAL = 6.3
cttcttcaggacaactgggcctggctggagtatccagaaagcttttaaatttcagttcgtgaccagccgtttccttcccccaccatcaacctgctaatgcttttctaataattaccattttttaaactattttggctgttaaaaatgtttctttttaataagctgattaaaagaggctgcttattagcataagctctttgccgttcagctctctttctaattaaaagcactcatctgtggagacctcgatttttcccttctttctgtgatgggtttttggatatttttccttggcaatttgttttattttactcttcattcttttggtggttttctgctcctgtgttccacaga

SEQ ID NO: 3440 - DNA, 1986 bp, Homo sapiens
  MAP TO AC006460.2; EXPRESSED IN LUNG, SIGNAL = 4.5; EXPRESSED IN PLACENTA, SIGNAL = 2.6; EXPRESSED IN HEART, SIGNAL = 2.1; EXPRESSED IN HBL100, SIGNAL = 2.7; EXPRESSED IN HELA, SIGNAL =   3; EXPRESSED IN FETAL LIVER, SIGNAL = 2.5; EXPRESSED IN BT474, SIGNAL = 2.4; EXPRESSED IN ADULT LIVER, SIGNAL = 2.3; EXPRESSED IN BONE MARROW, SIGNAL = 1.8; EXPRESSED IN BRAIN, SIGNAL = 1.8
gctcaaacatgttcaagttcaatacaaatataccctgaacacaataaatatggtctattttcacaaaagtgctacatgttgctaacacctcaatgtttttaatactgctttcaggtagtgtatcacatttgtggcaaactattaccaaatttatctctaacgactagcaacatgccacatacacacacagaaggaacaacgcgggctttgtacctcatgaagtgtgagatgtttcccatccttcctctttgagtcaaatctgccatatattgcactgtatttccgaatttcctcctctttgtgtggatcatcatcgttcatctcaaagatgtgaccaatcattttggccaacttcttgttggtttttagcagctctttcacttcattcaagtcactttttggcagtgtgggggccatccgctccacacactcagccacagagagcgcagcagcagcatccagcgcctcactgctctcctttggggacgcgggggagcccaggtctgctggggagaggctgtgctcgctctcagtggcatggtggccttgccagagtctggactcaccaacactctgcagtgctaggctcccaaccacatctgacttcccctgtcccaagctctgcacacaggtggtggcagcacatttggggatttttaaatgaggttcccgggcattgctactcctttcataactactgcaggatattcccagccatgttggtgatccctctggtaatttatagatgggtatgctactgacaggaagggaagtcagtggctgattgaaaagcccagggtttgtgacccagtctctcaaagccttctgcagccttctaacatgaaggggcttgctagccatgcccacgagtgccatgatttccaaaaactcctcttctcctgcttcacagagttgctggacatcatcaccaccttgttggataaaggcatcaaaataagaaagtagattggctttttgtaatattctatacagctgcaactcccccagggtcctgggtaaggccgcagccattactctggatgggtttaacctgccaaaaaaaaaaaaaaaagtaaaaactcatcatacttgcttcaaactccttacaccaaataggttacactacaggttttaagaacaaaaacgagaagcatctgcatcgtgactgcctgtgaaggcagcattctctctacatactttatctcattctgaactcctaaaaaccttataggtcagtaactaaactgacgtactttcccaaaagagaataaatggtaagcaggaatctggaggttcaaaccaaggatcaaaccaaaggttccatgtcccgtatttttggctatatactttgctactgccaaggtttggacgcaggtggagtgaaagatagtcaaatttagcaggaggtaagaagcagagtatgctaaccatttgctgaatacttactttgtgccaggcaatacaataaacactttacattacgtatgtctaattctcacaatggccctgtgacacaggtacagttattcccattttatagagaaaaaatgagcaagatgagtctggcaggcagaggaagatagatttcagtatgaattggaggtgagaaatagaaggtgttaatttaggaatcaagaaagaagaggtagagaaaagtcaaacaagtaactgacaagacttggtgatcacttagatctaagtgaggaaggaagttactctttattgacatttattgatgaagaaaacagttaccatttattgacactctgtggtttaagggaagagttacaggtgactacgagattacatctgagagttcagaattctaacaggcactggagacacagaaaaatgaggatgatgggattccctttcaaacacatggcactcgcacatggcacagggtagaaggcttatgtagaatggccctgcatgcaaaataatagactagaatctaactacgtatcagggagagggctgtaggat

SEQ ID NO: 3441 - DNA, 447 bp, Homo sapiens
  MAP TO AP000095.1; EXPRESSED IN HBL100, SIGNAL = 0.72; EXPRESSED IN ADULT LIVER, SIGNAL = 0.89; EXPRESSED IN BRAIN, SIGNAL = 1.1; EXPRESSED IN PLACENTA, SIGNAL =   1; EXPRESSED IN BT474, SIGNAL = 0.7; EXPRESSED IN HEART, SIGNAL = 0.93; EXPRESSED IN FETAL LIVER, SIGNAL = 0.84; EXPRESSED IN HELA, SIGNAL = 0.85; EXPRESSED IN LUNG, SIGNAL = 0.83; EXPRESSED IN BONE MARROW, SIGNAL = 0.79
gtgaggacagattccttgccttaggtcaccatgggcggcctgcctccaatgaccagccaaagtgagtacaaaagaccagctcctttgccccaacttgggacaactctgaagggccatttcagcttcagagctcctgatggcatcagttgaggacttcacttggactgtatcacagctactttgtctctctggccaattctcccttcttctcttcccttctacaagagttgatcccaagaatgcttcctaataaactgcccactactcttcattttatagtgcgcttcccaaagaacctgacctacaacaagacccacttaaacagtgggaaaatgtggcatcttttctccactatacatatctgtgtagccccaacaagcctctgacctttagacttctccagaatgatttagaggtcaatgtctatgtctccaaaactctggcaga

SEQ ID NO: 3442 - DNA, 493 bp, Homo sapiens
  MAP TO AP000055.1; EXPRESSED IN HBL100, SIGNAL = 0.68; EXPRESSED IN FETAL LIVER, SIGNAL = 0.7; EXPRESSED IN ADULT LIVER, SIGNAL = 0.86; EXPRESSED IN HEART, SIGNAL = 0.8; EXPRESSED IN PLACENTA, SIGNAL = 0.72; EXPRESSED IN HELA, SIGNAL = 1.8; EXPRESSED IN LUNG, SIGNAL = 0.81; EXPRESSED IN BONE MARROW, SIGNAL = 0.74
ggagacttgactcttcccctgatgattaggagttttgttgtcttttgatgttcccaggccagatgccacagttaaattagcaaaagaactcaaataaccctgaatagaagaaagaggagactctcgttatgatgcaccaatgattggtaaaggtgacttcccacagtgctgttttgttacagggcaatttgccagggttgttgaggccaccatgttactcccagcactacagtgagatatatatatgtacttactggaagatctgcaatagtgtaagatgtactattgcctctttgagcttttggacagatgtgtggctttaagaactgttgtgcaccctgcgccagacagccaactcatcggagaccccgaggaaacagtcagtcaattggtaaaggtgaccatacatatccttattcccatgggaattcaggtgcttggtttatcagagtagattgtcactaaaaatgtccaaactctctgatcatctttt

SEQ ID NO: 3443 - DNA, 474 bp, Homo sapiens
  MAP TO AL035534.1; EXPRESSED IN HELA, SIGNAL = 1.1; EXPRESSED IN ADULT LIVER, SIGNAL = 0.95; EXPRESSED IN BT474, SIGNAL = 0.91; EXPRESSED IN HBL100, SIGNAL = 1.3; EXPRESSED IN HEART, SIGNAL = 1.2; EXPRESSED IN PLACENTA, SIGNAL = 0.94; EXPRESSED IN BONE MARROW, SIGNAL = 0.83; EXPRESSED IN FETAL LIVER, SIGNAL = 0.81; EXPRESSED IN LUNG, SIGNAL =   1; EXPRESSED IN BRAIN, SIGNAL = 0.96
aagtccttggaggtgttagctgatttcttatacctgtcctccaagcaggcatgtaatcagaaactccccaacaggagagagttctagaggaaggtctgctagatacagattttttgtaatattcttggtgaagattgacgcaatgaaatggaatgccccataaacatacaaaatctgcttgggcagatgtgaaaatttatcagtagggataggaattaatcaaataattatataaatatgtatcaaattgctagattctaaaatttacattattctttcttctcttttaacatctctgtaatagtattgcatctcaattattgacggcttgccagtagttgtgccatggtagttgcgattaattgcctatgcataagcatgaaaattttcagaatggatgacagcaatttcccagagacaaaagtggaaaacacttttaagaagtactacactatcaatactcctgatgacaca

SEQ ID NO: 3444 - DNA, 428 bp, Homo sapiens
  MAP TO AC010099.2; EXPRESSED IN HEART, SIGNAL = 1.1
ttcaatttaaaacatggataaaggacttacatagtcatttcactaaaaaaaaaaaaaaaacacaaattgccaagagatataaaaacatgttcaaaaaactacctattgtgtactaaactcactaactgggtgacagtatccctactccaaaccttagcatcatgtaatatacccatgtaacaaacttatacaggtaccccctgtatctaaaataaaagttgaaattttacaaaagaaacataatgtcagtaatcatcaaagaaatacaaatcaaaaccacaatgaacaatcacctcgtacctgtcaggatgattattatcaaaaagaaagaaagaaagaaagaaaacaagataagtgttggtaagaatgtggagaacttagaacattgtacatggctggtgggaatgtgaaatggggctgctatagga

SEQ ID NO: 3445 - DNA, 403 bp, Homo sapiens
  MAP TO AC010130.3; EXPRESSED IN BONE MARROW, SIGNAL = 1.4; EXPRESSED IN LUNG, SIGNAL = 1.2; EXPRESSED IN PLACENTA, SIGNAL = 1.2; EXPRESSED IN HBL100, SIGNAL = 0.93; EXPRESSED IN HEART, SIGNAL =   1; EXPRESSED IN FETAL LIVER, SIGNAL = 1.4; EXPRESSED IN HELA, SIGNAL = 1.2; EXPRESSED IN BT474, SIGNAL =   1; EXPRESSED IN ADULT LIVER, SIGNAL = 1.2
tctcctggcagtctttgagcagctcactcacatatttcagtaacatctatttctaaatcacttttctgctctctctttccaagtcgtctccctctttgagaaaaactttctaggactattgtactcttgaatagccctcctacttctcacctctgtccaactgtcttatttgtttgcctatgatctgtttgcctttttacttttctgtattttcaaacaattagaaaagtatttttcactctaacattttgagttcatgatttcattcatttttacctgtcctgtcttcattaccacatcccacaccaaggtgccacagtactcacatttaagctctgccatgacactatcaccttggctgtgctttacttcactccccctgggggacaaatagcaaagccaa

SEQ ID NO: 3446 - DNA, 453 bp, Homo sapiens
  MAP TO AP000156.1; EXPRESSED IN BT474, SIGNAL = 0.84; EXPRESSED IN HBL100, SIGNAL = 0.74; EXPRESSED IN FETAL LIVER, SIGNAL = 0.72; EXPRESSED IN LUNG, SIGNAL = 0.71; EXPRESSED IN BRAIN, SIGNAL = 1.3; EXPRESSED IN PLACENTA, SIGNAL = 1.1; EXPRESSED IN BONE MARROW, SIGNAL = 0.81; EXPRESSED IN HELA, SIGNAL = 0.73; EXPRESSED IN ADULT LIVER, SIGNAL = 1.2; EXPRESSED IN HEART, SIGNAL = 0.96
tccctctgggcatttatctgtgatgacccggtagccataaccaatggtggtttctgtctctattgagaataaaaaagcagagacgaacccgttgaggttggtaacacaaggagtccaggaggggtcctctatgtggtccatgtctccccgtatgtatgcgatcaaccaccagatcattccaaaaaagagccaggtcactgtgtaaaccatgacaaaaatcaataggttgaatctccacttcaggtccactaatgtggtgaagatatcggtcaggtagcgataggtctccctcacgttgccgtgatgaacattgcactttccgtctttcctcacgtacctctggattttccttttggtccgatctcggctgatgtgtcttggcaggtcatccctggcctgcttaggcaactttggctggtgaatggccactgggctttcgacgtcctgatccat

SEQ ID NO: 3447 - DNA, 449 bp, Homo sapiens
  MAP TO AP000045.1; EXPRESSED IN BT474, SIGNAL = 0.87; EXPRESSED IN BONE MARROW, SIGNAL = 0.84; EXPRESSED IN LUNG, SIGNAL = 1.2; EXPRESSED IN HBL100, SIGNAL = 0.79; EXPRESSED IN HELA, SIGNAL = 0.69; EXPRESSED IN ADULT LIVER, SIGNAL = 0.91; EXPRESSED IN BRAIN, SIGNAL = 1.4; EXPRESSED IN PLACENTA, SIGNAL = 0.85; EXPRESSED IN HEART, SIGNAL =   1; EXPRESSED IN FETAL LIVER, SIGNAL = 0.88
actcccagtaaatgggcctctagcataaaatcctggctgtctaaggtaaagaaggaaagcagaaagtctggagacagctgagaggtaccagctttgtcagtggcttggatttcctaaccagggctatcctactgcactaagtgttcccactgacaagttttattaaactcatgtatcttcacacagagcagtatcttcaatctaagtgaacaattatactaagttgtactcaaggtagagtaagccaaatataaaagacatatctgaatctctcctataaaatacaagaagaatatatacttactttgggtaacatatgcaccaaaaagaatccacatggaagcaataagtgacccaaacatcaacatgaaaccaatgaaaagccaaactcgagcacctgtgtagagaagaggctttatgattttgttcatttttgcagctctgtaacg

SEQ ID NO: 3448 - DNA, 474 bp, Homo sapiens
  MAP TO AP000039.1; EXPRESSED IN HBL100, SIGNAL =   1; EXPRESSED IN FETAL LIVER, SIGNAL = 1.2; EXPRESSED IN LUNG, SIGNAL = 1.1; EXPRESSED IN BRAIN, SIGNAL = 1.1; EXPRESSED IN HEART, SIGNAL = 1.2; EXPRESSED IN PLACENTA, SIGNAL = 1.2; EXPRESSED IN BT474, SIGNAL = 0.97; EXPRESSED IN BONE MARROW, SIGNAL = 0.99; EXPRESSED IN ADULT LIVER, SIGNAL = 1.3; EXPRESSED IN HELA, SIGNAL = 1.1
ttgttggcaatgctggtaacgttttcaatactatatgatttaaggctgagtccctgttgaaaagagccatatctaagaatgagatatacatacatggctgccagcctttgtgtaaccacatgggcttctctctggagtcactgtccccaccgctatggatgagtaagctctgctctgggaagggatgcttggcctccatgttgatgcgcagcctcttcagaccacaaatagccaggtattcagtggggagagtgttggtgctgcacagggaaagcttcaggtcttggaccagcgtgaagttcagcaggtggcccagcgcagatgtgtccgtgaaccagatggtcagatggccattgtagctggttcgctctactgcaaggggcaggacggttttacagttgcacatcaggttggccaaactgtagtcacaatcccggatgtccgcagaacagctgcagttccgaatggtgtttt

SEQ ID NO: 3449 - DNA, 410 bp, Homo sapiens
  MAP TO AL049649.4; EXPRESSED IN HBL100, SIGNAL = 0.69; EXPRESSED IN FETAL LIVER, SIGNAL = 0.72; EXPRESSED IN LUNG, SIGNAL = 0.86; EXPRESSED IN ADULT LIVER, SIGNAL = 0.77; EXPRESSED IN BRAIN, SIGNAL = 0.71; EXPRESSED IN HEART, SIGNAL =   1; EXPRESSED IN PLACENTA, SIGNAL = 0.87; EXPRESSED IN BT474, SIGNAL = 0.62; EXPRESSED IN HELA, SIGNAL = 0.69; EXPRESSED IN BONE MARROW, SIGNAL = 0.7
tcatcgagtagcattccattgtagggatacaacacaatttagttaaacattataacacagtttggttaaacgttcaccagttgaaagacttttgtgctgtttccagtttttgaagattattagtaaagtcactataaacatgtgtaaataggtatttttgtgaacatagatttttatttctcttgggtaagtacctaaaagacagattgattatataaaaagtatatggttaactttgtaggaaactgtcaaactactttccagaggggctgtaccatttcgtattcccaccagcagtgttcatatgcatgggaatgtatgtatgtgaatcttggtgtttctggatccctgccaacatttggcattgtcagttttataataataatggtgatggtgatgatgataatgtt

SEQ ID NO: 3450 - DNA, 383 bp, Homo sapiens
  MAP TO AC011236.2; EXPRESSED IN BONE MARROW, SIGNAL = 1.3; EXPRESSED IN BRAIN, SIGNAL = 1.1; EXPRESSED IN HBL100, SIGNAL =   1; EXPRESSED IN HELA, SIGNAL = 0.97; EXPRESSED IN PLACENTA, SIGNAL =   1; EXPRESSED IN HEART, SIGNAL = 1.1; EXPRESSED IN BT474, SIGNAL = 1.2; EXPRESSED IN FETAL LIVER, SIGNAL = 0.99; EXPRESSED IN ADULT LIVER, SIGNAL = 1.7; EXPRESSED IN LUNG, SIGNAL = 1.2
ggtatttgctctggcgacaccagtttttgattgtttacaggctgggttttccctagttgttcagctgtgagaatctgaggatatgtttgttctttcctaattgcatcctgtgcctctttcctttttttccctccagaagtggaaggcatttttctgccttgataaagtgtaccaggccaaggggcctgttgtactccaaaacccctcttctcaaggtgaccccagttgccactcacctgcttttctgggggtctgcggaaccttcctcacagcctgcacaactgtctcccttaagaacccttcctggtacaaagcctccataaaactcatttgctcttgagtcttagttctggtggaacatatccctgagtttttgcacactg

SEQ ID NO: 3451 - DNA, 468 bp, Homo sapiens; identical to SEQ ID NO: 2977
  MAP TO AP000210.1; EXPRESSED IN BT474, SIGNAL = 0.82; EXPRESSED IN FETAL LIVER, SIGNAL = 0.95; EXPRESSED IN PLACENTA, SIGNAL = 0.94; EXPRESSED IN HEART, SIGNAL = 0.95; EXPRESSED IN BRAIN, SIGNAL = 0.73; EXPRESSED IN ADULT LIVER, SIGNAL = 1.1; EXPRESSED IN HELA, SIGNAL = 0.67; EXPRESSED IN LUNG, SIGNAL = 0.71; EXPRESSED IN HBL100, SIGNAL = 0.76; EXPRESSED IN BONE MARROW, SIGNAL = 0.91

SEQ ID NO: 3452 - DNA, 419 bp, Homo sapiens
  MAP TO AC010196.5; EXPRESSED IN BONE MARROW, SIGNAL = 1.1; EXPRESSED IN LUNG, SIGNAL = 0.96; EXPRESSED IN PLACENTA, SIGNAL =   1; EXPRESSED IN HBL100, SIGNAL = 0.94; EXPRESSED IN HEART, SIGNAL = 0.95; EXPRESSED IN FETAL LIVER, SIGNAL =   1; EXPRESSED IN BRAIN, SIGNAL =   1
gaaagctggagtggctatggtaatttcttaaaatcaaaaaacaatgaagtttgccacatctatttactcttccttttacaacagatttctctatagcatgtgatgatgttatatagcattttacccacaatagaactttcaaaattggaaccaatcctctccaatcctgccacagctttatcaattatgtttattctaaattttttgttgtcaatttgaaactgttcatagcatctttaccagcagtttgtttcatctcaaaaaagcactttctttgttcatccgtaagaagcaattcctcatctatttacgtgtgatcatgagatttcaacaattcagtcaaatcttctagctctagttcccttgccatttttaccacatccacgattacttcctccactgccgacttgaaagtctca

SEQ ID NO: 3453 - DNA, 431 bp, Homo sapiens
  MAP TO AC011257.2; EXPRESSED IN BT474, SIGNAL = 1.3; EXPRESSED IN ADULT LIVER, SIGNAL = 1.3; EXPRESSED IN LUNG, SIGNAL = 1.5; EXPRESSED IN BONE MARROW, SIGNAL = 1.4; EXPRESSED IN BRAIN, SIGNAL = 1.3; EXPRESSED IN PLACENTA, SIGNAL = 1.2; EXPRESSED IN FETAL LIVER, SIGNAL = 0.97; EXPRESSED IN HEART, SIGNAL = 1.6; EXPRESSED IN HBL100, SIGNAL =   1
  unsure 329
tgggatagcttgaacaaggggatcagtgatcactgatggacgctctggtcacagaacctgccatgttaagggacttagcaacttattctaagtgtgatggtatcagatcccagggtccaggtccagcccatgctgaagtccagaggggagtgggttgatgagcagaaagaacactccgggggccgtgagcaggtgaaagatgattttatttagcagcagctctcatcaacagctttctcacactgtccacctttatctcagctgtctgctctggctctgtggctcctgctgccccccacacctgcagctgcatggctggctctcccctngccttcagggtcagcagcttaactctttctctgggcacaagcaagcagagctatgccctggctccctcctgtctgtccgcaggatggacagctttggctctc

SEQ ID NO: 3454 - DNA, 459 bp, Homo sapiens
  MAP TO AL033379.2; EXPRESSED IN PLACENTA, SIGNAL = 0.95; EXPRESSED IN BT474, SIGNAL = 0.71; EXPRESSED IN HBL100, SIGNAL = 0.93; EXPRESSED IN FETAL LIVER, SIGNAL = 0.83; EXPRESSED IN LUNG, SIGNAL = 1.4; EXPRESSED IN ADULT LIVER, SIGNAL = 1.2; EXPRESSED IN BRAIN, SIGNAL = 1.2; EXPRESSED IN HEART, SIGNAL = 1.3; EXPRESSED IN BONE MARROW, SIGNAL = 0.8; EXPRESSED IN HELA, SIGNAL = 1.1
catccttcctgttcctcagcacttagcagacatatgcatctgtggttcctctagattccaatcagagtcaccccattgttaggtttggccaggggagagcgaggggaaattatgtaagctagttctgagcagaagcttgaaaaaccactgaatatttccatgcatatacttttttccctctgccatgagactggcatgtctgtgttcgtttcttagacctgccagataaggtacccacaaaactggggctcaaataacataaatttattgcctcacacttccggagcctagaagtccacaatcaagaagttcaaaggattggttctttccgaggactgtgagggaaagatctgtccaggcctctcgccttggcttgtggatggccgtcttctccctgtgtctctgcacatcatctttcctgtaaaccaaaaataaaattctaaacccccaaccaactga

SEQ ID NO: 3455 - DNA, 1976 bp, Homo sapiens
  MAP TO AC006116.1; EXPRESSED IN LUNG, SIGNAL =   1; EXPRESSED IN HEART, SIGNAL = 0.94; EXPRESSED IN FETAL LIVER, SIGNAL = 0.95; EXPRESSED IN BT474, SIGNAL = 1.1
gcttttaaatcctttaacttgtgatgtattttattcacgtttttgttttagaaatttcttctagtgaattaaatacaaaagtcatttgtttcttgatatcttttagattgggagtatgtatttaaaaacagtgaattttcatcaaagcaagagacatatgaagaatcatccaaagttgtgacagtgggagcaagacatcttagttatagccttgactatcccagtttgagagaagactgtcaaagtgaggactggtataagaaccagctgggaagtcaagaggtacatcttagtcaattaatcatcactcataaagaaatccttccagaagttcaaaataaagaatataacaaatcttggcaaacattccaccaggatacaatctttgatatacaacagagttttcccaccaaagaaaaagcacataagcatgaaccacaaaagaaaagttaccgaaaaaaatctgttgaaatgaaacataggaaagtctatgtagaaaagaaacttttgaaatgtaatgattgtgagaaagtcttcaaccagagctcatcccttactcttcatcagagaattcatactggagagaaaccctatgcatgtgttgaatgtgggaaaacgttcagccagagtgcaaacttggcgcaacataagagaatacatactggagagaaaccctatgaatgtaaagaatgtaggaaagccttcagccagaatgcacacctggcccaacatcagagagttcatactggagagaaaccttatcagtgtaaagaatgtaaaaaagccttcagccagattgcacacctgactcagcatcagagagttcatactggagagagacctttcgaatgtattgaatgtggaaaggcctttagtaatggttcatttcttgctcagcatcagagaattcatacaggagagaaaccttatgtgtgtaatgtgtgtgggaaagcctttagccatcgtggatacctaattgtacatcagagaattcatactggagagagaccctacgaatgtaaggaatgtaggaaagccttcagccagtatgcacaccttgctcaacatcagagagttcatactggagaaaaaccttatgaatgtaaagtatgtaggaaagccttcagccaaattgcataccttgatcaacatcagagggttcatactggagagaaaccctatgaatgtattgaatgtgggaaggcctttagcaatagttcatcacttgcacaacatcagagaagtcatactggagaaaaaccctatatgtgtaaggaatgtaggaaaacatttagccagaatgcaggccttgctcaacatcagagaattcatactggagagaaaccttatgaatgtaatgtttgtgggaaagcatttagctatagtggatctcttactctacatcagagaattcatactggagaaagaccctatgaatgtaaagattgcaggaaatctttcaggcagcgtgcacatcttgctcatcatgagagaattcatactatggagtcattcttgactctttcctctccctcaccctccacatcaaatcagttgccaagacctgtaggtttcatctcctgaatatttctggaatccacctcttgaatccatttccatcccatcatccttgtccaatgcacattaatatatttgacatgggatactcgagtagctttctaattggtctccttgtactcaccattgtctctgtcagatgtccacattgcaaccaaatttgtatttttaaaaatatgtttaatctcatttctccctcattaaaatccctcagtggcatcccatggtttttaagttaaagcacacattcttcaaaatagcctaaaaacctagcctctaacaccttgttccaggttaccttccaaagtttctatcttgtgtcactatccatctcattctctgaatacttatccaggattaagatacatattccaggatcaaaaagacctgggttccaa

SEQ ID NO: 3456 - DNA, 471 bp, Homo sapiens
  MAP TO AC009238.1; EXPRESSED IN HELA, SIGNAL = 0.87; EXPRESSED IN ADULT LIVER, SIGNAL = 0.95; EXPRESSED IN BRAIN, SIGNAL = 0.89; EXPRESSED IN HEART, SIGNAL = 0.89; EXPRESSED IN PLACENTA, SIGNAL = 0.9; EXPRESSED IN HBL100, SIGNAL = 0.69; EXPRESSED IN FETAL LIVER, SIGNAL = 0.73; EXPRESSED IN LUNG, SIGNAL = 1.1; EXPRESSED IN BT474, SIGNAL =   2; EXPRESSED IN BONE MARROW, SIGNAL = 0.64
aacttcccaatgcgtcctcggcagcagtgggttcaggaccatgaacagcaacacatgctgttgggttgggggagaggttgtccattcctgtgtgaccggggtggtggcaggaggacaggcccaggggcacatgatctggggacacctccacaggaagaggccccaggaaatgtggaagagccagagctgggacaaggcaagatgcacacccagctcctctgtgggccccttcgttccatcaccacctgctgaggaagccctgctgaggtgcccaccgctgacctgaacgaggaagtcggggtagtggatgcgctgaagcccactgctctgcagggcctccaggtcccggcgggcggctgagctcagcaggtccaggctctgtgtgtctactttcaggctctgcaactcctgccgtagcttgttggtatactgggagagcaggcgcagggtgggagtcatgcccagttgctg

SEQ ID NO: 3457 - DNA, 411 bp, Homo sapiens
  MAP TO AC011012.2; EXPRESSED IN BT474, SIGNAL =   2; EXPRESSED IN LUNG, SIGNAL = 1.8; EXPRESSED IN BRAIN, SIGNAL = 2.5; EXPRESSED IN PLACENTA, SIGNAL = 1.6; EXPRESSED IN HBL100, SIGNAL = 2.4; EXPRESSED IN HELA, SIGNAL =   2; EXPRESSED IN HEART, SIGNAL = 1.2; EXPRESSED IN FETAL LIVER, SIGNAL = 1.2
ttccatcaggaaccttataccttctaacccagtccacagtagcttctaagtagccaggtttcagctgtttgacatcattgatatcattacaattggctgcatcaggatcatctacattgatggcaatgactttccagttagtttcccctttgtcaatcatagccaatatgcctagaactttcatgccaattatttcacctcttgcacataccttgcttccaatttcacacacatcaattgggtcactgtcaccacaacagccagtatgttcatcattgtgccctgggtctttccaagtctgagggatggcaccatagttccagatatatcctttatacgggaacaaattcgcaacataacgaagtttttcttttttcacatcttgtttaatggggtttaaagggtcctttg

SEQ ID NO: 3458 - DNA, 1966 bp, Homo sapiens
  MAP TO AC006213.1; EXPRESSED IN HEART, SIGNAL = 1.1; EXPRESSED IN HBL100, SIGNAL = 1.4; EXPRESSED IN BT474, SIGNAL =   1; EXPRESSED IN LUNG, SIGNAL = 1.2; EXPRESSED IN HELA, SIGNAL = 1.2
tgaaaaatgtgtctttctaactagcacagtgcctcaacatctcccaaccttggaataaacttccaatgaaataatcccaggcaaaggtttttgaaaatttatgtgtaggagttttactagacattttgaacagggccactttgttcagatgtctatgcagtaggcaatggaaccttctcctggttcaatgaagccttaggctatgggcccgagtttataaacttgacatcttggaacaaaacattattcacatgccccatctccacattttctttatccttttaggagccaagaatctaaaagagatggagactcttcaagaagtaggattaaggtacctgcctcatgaagagcttttctgctcccagatctggcaacagattacaagagagttaatcaagtatcaagattctgtggtaaatattcaaagaacaggctgccagttggaaaaacgagatgatttgcactataaagatgagggattcagtaatcagagttcccatcttcaagttcacagagtccacactggtgaaaaaccctacaaaggagaacattgtgtgaaaagtttcagctggagctctcatcttcaaattaaccaaagggctcatgcaggagagaagccctacaaatgtgaaaaatgtgataatgccttccgtcggttttcaagtcttcaagcccatcagagagtccacagtagagcaaaatcatacacaaatgatgcaagttacaggagttttagtcagaggtcacatcttccccatcatcagagagttcccactggagagaatccatacaaatatgaagagtgtgggaggaatgttgggaaaagctcacattgtcaagctcctctgatagttcatacgggagagaaaccctataaatgtgaggagtgtggggtgggcttcagtcagagatcatatcttcaagttcatctgaaagttcacactggaaagaaaccatataagtgtgaagagtgtgggaagagcttcagttggcgttcacgactgcaggctcatgagcgaatccacactggcgagaaaccatacaaatgcaatgcatgtggcaagagctttagttacagctcacaccttaatattcattgtagaatccacacaggagagaaaccctataagtgtgaggagtgtgggaaaggtttcagtgtgggttcacaccttcaggcccatcagataagccacactggagagaagccatacaaatgtgaggagtgtgggaaaggcttctgccgggcctcaaatctgctggaccatcaaagaggccatactggagagaaaccgtatcagtgtgatgcatgtggtaagggcttcagtcgtagctcagattttaacattcattttagagtccatacaggggaaaaaccctataaatgtgaggagtgtggcaagggcttcagccaggcctcaaatcttctggcccatcaaagaggccacactggagagaaaccctacaaatgtggtacatgtgggaagggcttcagtcggagctcagatcttaatgtacactgtagaatccacacaggagagaaaccctataaatgcgagaggtgtggtaaggccttcagtcagttctccagccttcaggtgcatcagagagttcacactggagagaaaccatatcagtgtgcagagtgtgggaagggcttcagtgtaggttcacagcttcaagcccatcagaggtgccacactggagagaaaccctatcaatgtgaggagtgtgggaagggcttctgtcgggcctccaattttctggcacatcgtggagtccacacaggagaaaaaccataccgatgtgatgtgtgtggtaagcgcttcagacagagatcctaccttcaagcccaccagagggtccacacaggagagagaccatacaaatgtgaggaatgtgggaaagtcttcagctggagctcataccttcaagcccatcaaagagttcacaccggagaaaaacc

SEQ ID NO: 3459 - DNA, 368 bp, Homo sapiens
  MAP TO AF002223.1; EXPRESSED IN PLACENTA, SIGNAL =   5; EXPRESSED IN HBL100, SIGNAL = 4.3; EXPRESSED IN HEART, SIGNAL = 3.9; EXPRESSED IN ADULT LIVER, SIGNAL = 5.4; EXPRESSED IN BT474, SIGNAL = 5.3; EXPRESSED IN FETAL LIVER, SIGNAL = 4.8; EXPRESSED IN BONE MARROW, SIGNAL = 4.6; EXPRESSED IN LUNG, SIGNAL = 5.5; EXPRESSED IN BRAIN, SIGNAL = 4.6; EXPRESSED IN HELA, SIGNAL = 4.3
gccttacaaagcagtccagctttggagtccaggtctcctgctgcccagtccaccctagggctgcaaagcatcactgcccaagcccagactgagttgacggctgtctgcataggtggcaaagagactgtgtgtttttctccccacttttggtgagccccatgtggtggtgctcaggatgaaaaggatccccctaactccagctgacatctacttggcaagcagggcaatggaaggcttcaacattggttctcaaagatggagcctcatgtacacagtccttacttggcagtcatatgttatggtcctggcacacaacaatggcaacaagaacaatggcaacaacaacaacaacagtgggtctcggtttt

SEQ ID NO: 3460 - DNA, 377 bp, Homo sapiens
  MAP TO AC011750.2; EXPRESSED IN FETAL LIVER, SIGNAL = 2.6; EXPRESSED IN BT474, SIGNAL = 2.5; EXPRESSED IN ADULT LIVER, SIGNAL = 3.7; EXPRESSED IN LUNG, SIGNAL = 2.7; EXPRESSED IN BRAIN, SIGNAL = 2.8; EXPRESSED IN PLACENTA, SIGNAL = 2.8; EXPRESSED IN BONE MARROW, SIGNAL = 2.8; EXPRESSED IN HEART, SIGNAL = 2.4; EXPRESSED IN HELA, SIGNAL = 3.1; EXPRESSED IN HBL100, SIGNAL = 2.4
agatgaagaaactgtccctggtaagttaagtaacttctccaagaccacacaattcagtctctaagcttacaccagaaggcaggtctcccagttgtcagactacagtatacacttgctgctaatgaacacattgtattttcaactcaggtagaaataacaagaattatctgtggtttagagttttctgcttcattggttcctccatcagtacagccttccatgagagtgagaatattgctaactttcaggaaaaaggcacctatcttaactgtattaccagaaggaatttctcttcgtgtttgatgttaaccatgcgaccaaatgtcaggactcctgccagacaaagaaatgctaaaagggtgggttgttctgttcaa

SEQ ID NO: 3461 - DNA, 438 bp, Homo sapiens
  MAP TO AF030453.1; EXPRESSED IN HBL100, SIGNAL =   2; EXPRESSED IN HELA, SIGNAL =   2; EXPRESSED IN PLACENTA, SIGNAL = 3.3; EXPRESSED IN HEART, SIGNAL = 2.2; EXPRESSED IN ADULT LIVER, SIGNAL = 2.3; EXPRESSED IN BT474, SIGNAL = 2.4; EXPRESSED IN FETAL LIVER, SIGNAL = 1.5; EXPRESSED IN BRAIN, SIGNAL = 2.2; EXPRESSED IN BONE MARROW, SIGNAL = 2.3; EXPRESSED IN LUNG, SIGNAL = 3.7
caaacgccctttgagaagacggggactcgccaggatacccctctctcccctcatccagcctccagcccacccaattcctccccacctcctccacctccccaggccccactcacctcctccaactcctctggggaaacccaagccctgcagctcatggaacagaagaagtggaaccgtcgtttctggaacaggactatctgagagcggttcttcctggccctcgagttcatggaacggtataactggaaccgacgcttacagagcaagggtatgcgagagcggttcttcctggccctcgggttcgtggaacggtataactggaaccgacgcttacggagcaagggtatgcgagagcggttcttcctggccctcgggttcatggaatggcctaactggaaccaacgcttacggagcaagggtatgcgagagcggttcttc

SEQ ID NO: 3462 - DNA, 476 bp, Homo sapiens
  MAP TO AC009237.1; EXPRESSED IN LUNG, SIGNAL = 0.72; EXPRESSED IN BT474, SIGNAL = 0.7; EXPRESSED IN HBL100, SIGNAL = 0.93; EXPRESSED IN FETAL LIVER, SIGNAL = 0.7; EXPRESSED IN BRAIN, SIGNAL = 0.74; EXPRESSED IN PLACENTA, SIGNAL = 0.84; EXPRESSED IN BONE MARROW, SIGNAL = 0.7; EXPRESSED IN HELA, SIGNAL = 0.65; EXPRESSED IN ADULT LIVER, SIGNAL =   1; EXPRESSED IN HEART, SIGNAL = 0.79
tctggtgaaatgtgcagactcaaatggttagagatttcttgcagcttgagaaaattcagcactttgaaaaaattagtcctggaagctaagaaatgtgttaaaaatacaaacaaaagccaaaaaggcaggaaccatccagactttccaaagaggccccttactgcttatatccgcttcttcaaggagaattggccccagtactcccaaatgtaccctgggatgagaagccaggaactgaccaaaatcctgtcaaagaaatacaaggagctcccagagcagatgaaacagaaatatattcaggatttccagaaggaaaagcaagaatttgaggaaaaacttgttcgattcagggaagagcaccctgatttagaccagaagggcaagaaatctgatatctccaagaggattcaaaccaaagtgcaaaagaaagttcagaaaaatattgaagaagtgacgtctcttccaaaaacggatca

SEQ ID NO: 3463 - DNA, 450 bp, Homo sapiens
  MAP TO AP000052.1; EXPRESSED IN BONE MARROW, SIGNAL = 1.1; EXPRESSED IN HBL100, SIGNAL = 1.1; EXPRESSED IN ADULT LIVER, SIGNAL = 1.3; EXPRESSED IN BRAIN, SIGNAL = 0.92; EXPRESSED IN HEART, SIGNAL = 1.4; EXPRESSED IN PLACENTA, SIGNAL =   1; EXPRESSED IN FETAL LIVER, SIGNAL = 1.1; EXPRESSED IN HELA, SIGNAL = 1.2; EXPRESSED IN LUNG, SIGNAL = 0.94; EXPRESSED IN BT474, SIGNAL = 0.88
aaatatgcattaaatcaccagccaggttaagaagaaatactattacttataccctggcatctccctcccacctttacatagccaaatccagaaaagatccgttttcctaaccttgttcgcctattttattatttaaattgcagcaggagggaagcatgtctactttatccaatttcacacagacgctggaagacgtcttccgaaggatttttattacttatatggacaattggcgccagaacacaacagctgagcaagaggccctccaagccaaagttgatgctgagaacttctactatgtcatcctgtacctcatggtgatgattggaatgttctctttcatcatcgtggccatcctggtgagcactgtgaaatccaagagacgggaacactccaatgacccctaccaccagtacattgtagaggactggcaggaaaagtacaagagcc

SEQ ID NO: 3464 - DNA, 459 bp, Homo sapiens
  MAP TO AL035682.16; EXPRESSED IN FETAL LIVER, SIGNAL = 0.83; EXPRESSED IN LUNG, SIGNAL = 0.72; EXPRESSED IN BT474, SIGNAL = 0.64; EXPRESSED IN BONE MARROW, SIGNAL = 0.65; EXPRESSED IN ADULT LIVER, SIGNAL = 0.75; EXPRESSED IN HEART, SIGNAL = 0.99; EXPRESSED IN PLACENTA, SIGNAL = 0.7
aaggggctgcaagctctcagtgctgggcgggaggctggcgcggacagttgggctgtgaatcactgcacgctgctgtgaacacagctcctctctttcctgcggcagcctcgttgcttcccccttcaaagcctcatagtctcagcaaccaacagattcaacctttgccaagtctgcatttcctacctccctacctgaaggaaaacttttttttttttaatgaaaatttaaagagacagaaaaaagagaaaacacgcctttagctatattctagtactactacaactccaagtgcaggccaggggccttggcatcactggagagcttgtcagacatgcagtacacctcaggccccaccccagacctgcccagcccaggtctgcagttttacaaggagcccatgtgattcttgcgcactatcaagtttgagaagctctgttcagccctggccaattagaatgg

SEQ ID NO: 3465 - DNA, 487 bp, Homo sapiens
  MAP TO AP000111.1; EXPRESSED IN HBL100, SIGNAL = 0.91; EXPRESSED IN FETAL LIVER, SIGNAL = 0.73; EXPRESSED IN LUNG, SIGNAL =   1; EXPRESSED IN ADULT LIVER, SIGNAL = 1.4; EXPRESSED IN BRAIN, SIGNAL = 0.71; EXPRESSED IN PLACENTA, SIGNAL = 0.72; EXPRESSED IN HEART, SIGNAL =   1; EXPRESSED IN HELA, SIGNAL = 0.62; EXPRESSED IN BT474, SIGNAL = 0.61
ggcaattcctcaaacaattaaacatagagttgccagcaattctactcctagaaatatattcaagagaaatgagaacataggtccacacagaatcaccatccaaagcccagacctcccaattcttacattggggattaaatttcaacatgaattttagaggagacgaaaacattcaaaccataataggacataaacttgatttctcattgataggatggatgcaactaaacagctcaacagtgttgattaaaaatgcttattatgatagaggaaaatggcagataggaggcaggactaacttgcagctcccactcggatggacagagcagtgcatgaagacccacatcgtcaaattttactccaagaactaacacaggatcataccaggaaaaccaaaagaaaccacagaccctttgaaggcggtgaattgctgctgcaggctctgtgtcccctacaaaatgcatatggtgaaatcctagcccccaat

SEQ ID NO: 3466 - DNA, 420 bp, Homo sapiens
  MAP TO AF196779.1; EXPRESSED IN LUNG, SIGNAL =   6; EXPRESSED IN BRAIN, SIGNAL = 5.7; EXPRESSED IN HEART, SIGNAL = 5.6; EXPRESSED IN FETAL LIVER, SIGNAL = 5.9; EXPRESSED IN ADULT LIVER, SIGNAL = 6.1; EXPRESSED IN BONE MARROW, SIGNAL = 5.7; EXPRESSED IN PLACENTA, SIGNAL = 5.5; EXPRESSED IN HELA, SIGNAL = 5.9; EXPRESSED IN HBL100, SIGNAL =   5; EXPRESSED IN BT474, SIGNAL = 4.5
gcagtgtctaccttcagggcctttacatttcctgttccctttgctgcacacctcattcagataatcctaggattcaagtacgtttttagcatccagatacccagattcatttggtaatgcttccaaaatgatgacagaaggggcaggtggcgggcctctagcacacacacagactttccctgctacgtgcagggacacagcctggcggacagggcaaagaaaggctggggcaggagggggacaaggggccagctcactgtctctgcccggggttcgctgtctgccccttccccgctgggggtgcatcctttctggatcatggggatagcgagcgtggggtcgacacccgcattctctctctcttccagagacttcttggattctaaaggaagaataggagggagcaatgaagtcccactc

SEQ ID NO: 3467 - DNA, 427 bp, Homo sapiens
  MAP TO AC011153.2; EXPRESSED IN BONE MARROW, SIGNAL = 5.5; EXPRESSED IN LUNG, SIGNAL = 5.1; EXPRESSED IN BRAIN, SIGNAL = 4.7; EXPRESSED IN HELA, SIGNAL = 4.9; EXPRESSED IN PLACENTA, SIGNAL = 4.6; EXPRESSED IN HBL100, SIGNAL = 4.8; EXPRESSED IN HEART, SIGNAL = 4.2; EXPRESSED IN FETAL LIVER, SIGNAL = 4.3; EXPRESSED IN BT474, SIGNAL = 4.3; EXPRESSED IN ADULT LIVER, SIGNAL = 5.9
tcttcatttcctccctcctgggggcagcccttactgcaagcacatactctcctgtgctcttttatgccatcgtttttacaggtgcccacccacactcagggtgggtggaagtgtctgcagtgcctggagggtaagtgctgcctgtgcctggaggggtaaattcagctctgaaactaggtttagagaatctgtgagggcaacatatgtaagccatgccctctgatccagctttcatcaataataaagctgatgttttaatctccatttgcctgacttatttcccagatgattcagaactcagatggggagaggaggaaaaggaacagaatccagcttcaggcagtaagactctcaaaagttatacatgatagtagggtgggattcagttcttaagaaaggacatcagtgcagaaatccagcccttgta

SEQ ID NO: 3468 - DNA, 414 bp, Homo sapiens
  MAP TO AC011897.2; EXPRESSED IN BT474, SIGNAL =   1; EXPRESSED IN ADULT LIVER, SIGNAL = 1.4; EXPRESSED IN BONE MARROW, SIGNAL = 1.3; EXPRESSED IN LUNG, SIGNAL = 1.1; EXPRESSED IN BRAIN, SIGNAL = 1.2; EXPRESSED IN HELA, SIGNAL = 1.1; EXPRESSED IN HBL100, SIGNAL = 0.99; EXPRESSED IN HEART, SIGNAL = 0.98; EXPRESSED IN FETAL LIVER, SIGNAL =   1
atttctgaggatggtggtgcactgtgagtccacgcaggcctcctgggcataggatggagcaattctatctcacctcaggcctagcacaaagggcttcagtaaaccactggagtttccttcattaggattccatcccaggatatccagaggacaagaggctggccaactgcaggattagcctatgctcccgtgctggatataggctacacgcaagagaaagcttgggtgggatctcctgatatttcacccggcagagcttctaggcagaggaattgcttctcaccttacctggcaacaggagggaggatatggttgctgaaaagagtacattcacccaggtcgagggggtccagttgcaatacaaggagttggtggttggtgggtctcctaagagcatccatgagacaaagatcc

SEQ ID NO: 3469 - DNA, 475 bp, Homo sapiens
  MAP TO AL031283.15; EXPRESSED IN BONE MARROW, SIGNAL =   1; EXPRESSED IN FETAL LIVER, SIGNAL = 1.1; EXPRESSED IN ADULT LIVER, SIGNAL = 1.1; EXPRESSED IN HBL100, SIGNAL = 1.1; EXPRESSED IN HEART, SIGNAL = 0.96
gaacagaaagtgtctggggctactcctgataggtagtcagggagggcctctcagaggacgtgatgctggagctgagccctgagagtcaagaaggagttggccatgcaaggagctggggaagaagtgcacagggcagagggaactgcatgtgctaaggccctggggtggggcccagtttagcacctatgtgtgtgcccagggggcatattattgttgccgtcatacacagctcccaagacctcactgagtgactctctgtttcccagatcatggtggaagagcggctaatcctgcagcagaagatggtaaaggccctccaggatgagcaggaatcacagagacacgggtttgaagaagagatcatggaatataaggagcaaatcaaacagcacgcccagacaattgtgagcctcgaagagaaactccagaaagtcactcagcaccataaaaaaatagaaggcgagattgcaacatt

SEQ ID NO: 3470 - DNA, 474 bp, Homo sapiens
  MAP TO AL033392.5; EXPRESSED IN ADULT LIVER, SIGNAL = 0.75; EXPRESSED IN HEART, SIGNAL = 0.92; EXPRESSED IN BONE MARROW, SIGNAL = 0.88; EXPRESSED IN FETAL LIVER, SIGNAL = 0.93; EXPRESSED IN BRAIN, SIGNAL = 0.89; EXPRESSED IN PLACENTA, SIGNAL = 0.89; EXPRESSED IN BT474, SIGNAL = 0.62; EXPRESSED IN HBL100, SIGNAL = 0.83; EXPRESSED IN LUNG, SIGNAL =   1; EXPRESSED IN HELA, SIGNAL = 0.74
aagctcaaagctctgggaaacacatctgattttttcatggttatatttgaaataggtctggaaaggtgaatgtatgtatctggtgttccaatgaatgaattaatgagtggatgaatggctgatgggcacacttacccagatacaaggccctatctgcttgtaaggtagctggatctttcagacaaatataagacttaactcttcattgtttttgaacttccttttctctgtatttcttctttcactggtttgtattctggaagttaatgccttgtttctgacttggtcatgaggactgaaattaagtttctatggctttgtcttttccatagctcctacagaagaatggtcagctgtccaccatcaatggcgtagctgagcaagatgagctcagcctccaggagggtgacctaaatggccagaaaggagccctgaacggtcaaggagccctaaacagccaggaggaagaagaag

SEQ ID NO: 3471 - DNA, 1973 bp, Homo sapiens
  MAP TO AC006547.9; EXPRESSED IN LUNG, SIGNAL =  17; EXPRESSED IN PLACENTA, SIGNAL =  11; EXPRESSED IN HELA, SIGNAL = 8.6; EXPRESSED IN HEART, SIGNAL =   9; EXPRESSED IN HBL100, SIGNAL =  12; EXPRESSED IN BT474, SIGNAL =  11; EXPRESSED IN FETAL LIVER, SIGNAL =  10; EXPRESSED IN ADULT LIVER, SIGNAL = 8.4; EXPRESSED IN BONE MARROW, SIGNAL =  10; EXPRESSED IN BRAIN, SIGNAL =  12
tctctgcgagctcaagatactgactgccctgtcaggctcagtccacgctctgctcttcctgcctctggggaccaaccccaggcagggagggaccaggcagccctggagaagcacagaaattgtttttccaggaaactctgggtggataatccacttacatcatcaccactgtcaccatgagcatggccataaccaccatcatggtcagctccaccagcatcaccaccaccaccaccaccatcaccatcactgccaccaccaccgccaccatgactaccaccaccatcaccaccaccaccaccatcactaccaccaccaccatcactaccaccaccaccaccacgatcactaccaccaccaccaccatcaccatcactaccaccaccaccaccatcaccatcaccaccaccatcactaccaccaccaccaccaccaccatcaccatcactaccaccaccatcactaccaccaccaccaccaccaccaccatcactacaaccactaccaccaccaccaccatcactacgaccaccaccataaccatcactaccaccatcaccaccaccaccatcaccatcaccaccaccatcaccatcactaccaccaccaccaccaccaccatcactaccaccaccaccatcactaccaccatcaccatcactaccaccaccaccaccaccaccatcactaccaccaccaccaccaccatcatcaccaccaccaccaccaccaccaccatcactaccaccaccaccaccatcactaccactaccaccaccatcactgccaccaccaccaccaccaccatcactaccaccaccaccaccatcactgccaccaccaccaccaccaccatcactaccaccaccaccatcaccaccaccaccaccatcactaccaccaccaccaccaccatcactaccaccaccaccaccaccatcactaccaccaccaccatcaccaccaccaccaccatcactaccaccaccaccaccaccaccatcactaccaccaccaccaccaccatcactaccaccaccaccaccatcactaccaccaccaccaccaccaccatcactaccaccaccaccaccatcaccatcactaccaccatcaccaccaccaccaccatcaccaccaccaccatcaccatcactaccaccaccaccatcaccaccaccaccaccatcactaccaccaccaccaccaccaccaccatcactaccaccaccaccaccaccatcactaccaccaccaccaccatcactaccaccaccaccaccaccatcactaccaccaccaccaccatcaccatcactaccaccatcaccaccaccaccaccatcaccaccaccaccatcaccatcactaccaccaccaccaccaccatcactaccaccatcaccaccatcaccaccaccatcactacaaccaccatcactaccaccatcaccactaccaccatcactaccaccaccaccaccaccatcaccatcacttccaccaccaccaccaccaccatcactaccaccaccaccaccaccatcaccatcacttccaccaccaccaccaccaccatcactaccaccaccaccaccaccatcaccatcacttccaccaccaccaccaccaccatcactaccaccactaccaccaggaccaccatcactaccaccaccaccaccaccatcactaccaccatcaccaccaccaccaccaccatcactaccaccaccaccaccaccatcactaccaccaccaccatcaccatcaccaccaccaccaccaccaccatcactaccaccaccaccaccatcaccatcaccaccaccaccaccatcactaccaccaccaccaccaccatcactaccaccaccaccatcaccatcacttccaccaccaccactgccatcactaccaccaccaccaccatcaccatcactaccaccaccccaccactaccaccatcacca

SEQ ID NO: 3472 - DNA, 463 bp, Homo sapiens
  MAP TO AC011994.2; EXPRESSED IN HELA, SIGNAL = 2.7; EXPRESSED IN HBL100, SIGNAL = 2.9; EXPRESSED IN HEART, SIGNAL = 2.8; EXPRESSED IN FETAL LIVER, SIGNAL = 2.3; EXPRESSED IN ADULT LIVER, SIGNAL = 3.2; EXPRESSED IN LUNG, SIGNAL = 2.8; EXPRESSED IN PLACENTA, SIGNAL = 3.6; EXPRESSED IN BT474, SIGNAL = 2.8; EXPRESSED IN BRAIN, SIGNAL =   3; EXPRESSED IN BONE MARROW, SIGNAL =   3
caagttccagggttctgcacatttgcattataagattttcaagtagatttttttttgggtgttaacattaattctaaatatgaatgagtcccaggagaacaattaaacccatttatgcctagtgttccattattggaacactaagtatgtaggaattatttatatcctactgctcaatgtcattgccaaggtctgatttttcacacacgtctgcaattcaaaaaattgcaacctccagcataaatgggttaaagtagagtgtttttgcagctaatgctttttaagcctctgtatttgaaagaggcttacttaggaagttgaacttggctgggtctgtcacaactgtcgcctgaatactggtttttgtgctggaccctgcacactgctgcaggactcgcagcaggaacctacaaatcatggtccctgccctcccggagcttttggctttgaagaggacagccac

SEQ ID NO: 3473 - DNA, 1976 bp, Homo sapiens
  MAP TO AL023280.1; EXPRESSED IN BRAIN, SIGNAL = 1.1; EXPRESSED IN BONE MARROW, SIGNAL = 1.1; EXPRESSED IN LUNG, SIGNAL = 2.2; EXPRESSED IN HBL100, SIGNAL = 1.1; EXPRESSED IN HEART, SIGNAL = 0.96; EXPRESSED IN BT474, SIGNAL = 1.2; EXPRESSED IN FETAL LIVER, SIGNAL = 1.5; EXPRESSED IN ADULT LIVER, SIGNAL = 1.1
tagcagcaaagagccatgctctgtaaaatagatagtggctctcagtttgctaagcaagtcccttcccaacaagggcaagggacaatcaggcatgtacaaaaactgatgaatcactttatgtcctcctacagtacaagtccggggcaagcagaaagcttgttttgctgaaactcctgtggctccaattatgtcaatagtctttttggataaggggctgaccggggtggttactaccgaatgttcagcaccggtatctacaagaaaatcaatgtctttacccccaactgtcatcctgaccataggctctttgggggtccttgagcccggtccccctcagtccaataacctttctgccaggttgagcagggccccttcctccttgtctggatcctcctgctccgagtcaccttgttttccttttagctgagggcatttgttcttccaatgtcctatttctttacaataagcacactgattacgctgcaagctctgacaaccaggctgaatttctttcccggggccccccttcccttgcctctttggggggacccctgtgattgctgcagctaacaggtcggcatttcgccggacctgatgttcattctctctgcggttttccttagggcttactgcatccctgtttacaaacacctggttagctatttctaataactgtgatgtgttcatccctgcaaacccagcctgtttctgcagttttcttctaatgtcttctgcactttgactaactaaagccatgttaatcatgcgctgattttcaggactattgggatcaaagggagtatacatacaataggcctcacacagcctctcgtagaattgtgctggactttcttcttttccctgaatggccacgtttgtggccttctgggctcccctctttaatccttccaagagagcttccctgtatcggtttagcctttgcatatcctctctttcatttgggtcccactgggggtcggttcccggtaactgggtccttacatactcttgggggttttggtaatcagccggtgcatgttcctctagccacttagttgctgcttggagcactctccgcctttcatctgtgttaaagaggaacatgagcaactggtggcaatcagcccaagtggggttatgggtctggataatagtttggagcaaatcaattagagcttgcggcttttcagtataggatggggtattgtttttccagttgaggaggtcggcagagaagaagggctggtacacaaaaacacgcctctccaccatgtgcccatcctcatctattccagtataccactgctctctcaggggcatttgtatccccgttttgggtcttaaaccagctgccaagggaggggtttctcccgaggcttcacctcctctcttgcctactctgggtggcctagggatgtttgtcttgtggaggtgcaagccccgtggactcaaaagtggtgagcctctctccctggtaacgggagggcaccactgggatcactggtgccatctcctgcaatggatcttctgatgttgggtcgaacagaacttcaggagttgatttccctcggcgggtggagcgggatccttccttggctatctgtccctttgctactagcactgctgctgcctgccctcttagccactgcggggggtctaccagatgtaaccaagtgtctatgtatggaaactggtctgagtgtcctgacttaccagttaccttgtgccataccttagaaacaagggacctgtccaggcttccttctgatggccaatccacttctaatgttggccaatctatttcacacaaagttctaagttttcctggtgtcatagtaaccccatagtctccattaaatcccttcttaaaatttttcaacatagttcctagcggagtaagcttactttgtgtctgacccatgtttccttaagacaaaacaccgagctcacaccacacgcacaccacagaacaaaga

SEQ ID NO: 3474 - DNA, 474 bp, Homo sapiens
  MAP TO AC008177.1; EXPRESSED IN LUNG, SIGNAL =  12; EXPRESSED IN HELA, SIGNAL = 1.1; EXPRESSED IN PLACENTA, SIGNAL = 1.1; EXPRESSED IN BT474, SIGNAL = 1.1; EXPRESSED IN BONE MARROW, SIGNAL = 1.7; EXPRESSED IN HBL100, SIGNAL =   1; EXPRESSED IN FETAL LIVER, SIGNAL = 0.9; EXPRESSED IN ADULT LIVER, SIGNAL = 0.9; EXPRESSED IN BRAIN, SIGNAL = 1.2; EXPRESSED IN HEART, SIGNAL = 1.2
gcaaagcctaaatacagggcaggacttgcctatgtgatgtaccattccagccctccttttcaaagaaaacttgagcagggaccctgggataccaccagcgatggtgggactcccttttgcaatccaaataagcacgatctaaatgagtccaggttggagcagataaggaatggggttgaaaaggagatgtgttcttgaaatcggccaatttcatagcctggaggagacatttgtggttagctgagtcacactgccttgggattagccagctctgctttctgtttcaacaataaaaagtcttgcaaagctgctggcatgtgagacagaggtatccagaaaattttggcatcttttccagcggcataatgagtcttagggaagagacttgttagagcgtggtccatgcactctaccaccggagagaggtccatgttcacataggatttattgcctttcagtttgtctagacctaaa

SEQ ID NO: 3475 - DNA, 485 bp, Homo sapiens
  MAP TO AC011235.2; EXPRESSED IN BRAIN, SIGNAL = 1.1; EXPRESSED IN HELA, SIGNAL = 1.1; EXPRESSED IN HBL100, SIGNAL = 1.1; EXPRESSED IN HEART, SIGNAL = 1.1; EXPRESSED IN FETAL LIVER, SIGNAL =   1; EXPRESSED IN LUNG, SIGNAL = 1.1; EXPRESSED IN BONE MARROW, SIGNAL = 1.3; EXPRESSED IN PLACENTA, SIGNAL = 0.9; EXPRESSED IN ADULT LIVER, SIGNAL = 1.4; EXPRESSED IN BT474, SIGNAL =   1
ctggaagggcaaatgagaagatatctgcacagatcatgcctgttaaactgcgaaggaattaacacagtgcagtggatgcatcagagccaccttaatcaaagcttgtgttcccctagatgctacaaatgtttgctgactactcttcagcacttgcccttgccttttaggccttttttcccccaaagccatgcctccctcccaaggatagcccatgttttattttccttattttggacttgaggtctctctctagagagtgactgtaaattctagccctgctttgatggagctccaaaggaggtggctgtggatgttgacaatgtgcctttcatggaatactttttcatcctggatgacagcctaatgcctaagtgtctaaccctgaagtttcctctcccaggaaacttgtttatactggcagatgcccttgtggctcttgtctgacctatgtccagtttatttctaccaagacagcccctctctag

SEQ ID NO: 3476 - DNA, 480 bp, Homo sapiens
  MAP TO AL049562.7; EXPRESSED IN BT474, SIGNAL = 1.2; EXPRESSED IN HELA, SIGNAL = 0.59; EXPRESSED IN PLACENTA, SIGNAL = 0.75; EXPRESSED IN FETAL LIVER, SIGNAL = 0.68; EXPRESSED IN LUNG, SIGNAL = 0.6; EXPRESSED IN ADULT LIVER, SIGNAL = 0.95; EXPRESSED IN HEART, SIGNAL = 0.98
tgttaccttggctggaataagagacagacagatagctggtaaagtgttacttgtgggggagtctttgagggtgtttctggaaaagactggcattttcactcagtggaccgagtaagaaagatctgttctcacacaatgtgtgtggaaaccatccaatcagttgagggcctggatagaataaaaaggcagggaaaggcaaagtgcttctctctttcagagctggaacaaccttcttcttctgcccttgggaaacagatcttcaggttctctgagccatttactgagtcaccccaaaatattgcttgagtgaggactagaacaggagaaggctctgcaacaggacaaggatgttgtgtatgctgctctgcaaattgagcctaataatccagcagatccaatgctatgtgaaatgtcagtggtggatggggatactgtttggagctttacacaggaccttataggtaattgcagcacaggcta

SEQ ID NO: 3477 - DNA, 468 bp, Homo sapiens
  MAP TO AP000121.1; EXPRESSED IN FETAL LIVER, SIGNAL = 0.82; EXPRESSED IN HEART, SIGNAL = 1.1; EXPRESSED IN BRAIN, SIGNAL = 0.82; EXPRESSED IN ADULT LIVER, SIGNAL = 0.95; EXPRESSED IN HELA, SIGNAL = 0.8; EXPRESSED IN LUNG, SIGNAL = 0.85; EXPRESSED IN HBL100, SIGNAL = 0.67; EXPRESSED IN BONE MARROW, SIGNAL = 0.86; EXPRESSED IN BT474, SIGNAL = 1.2; EXPRESSED IN PLACENTA, SIGNAL = 1.1
agaagcaccccttgtcagtgatgcacccccagtccccctcaagggctccaagtaaacccaaagctgctcccctccaagaagtctggggccaccctagggaaggcctcctggccttgactctcagggggtctctggggttgcggtttggggcccgctgcttccgccctttgcccccaggtgggcctggcagggctgcagcacagctctgttgctgatagacagggtggagcacttggcgaccttgccctgcagccctgtcattttgagttcagaggtcagatttgagtaataaacatcttctaaggacttgtcattctttctgaggatgttgctggccagccggaagacgaaaatcaccgcgtagatgccgatgatggtgagtatataccaggcagcgctggttccgtctggcaccttcagagccctggtggagttggtgtcattcctcccctctgtgtggtcacccag

SEQ ID NO: 3478 - DNA, 406 bp, Homo sapiens
  MAP TO AC007094.2; EXPRESSED IN FETAL LIVER, SIGNAL = 2.9; EXPRESSED IN ADULT LIVER, SIGNAL = 2.6; EXPRESSED IN BT474, SIGNAL = 2.3; EXPRESSED IN BRAIN, SIGNAL =   3; EXPRESSED IN BONE MARROW, SIGNAL = 2.7; EXPRESSED IN LUNG, SIGNAL =   3; EXPRESSED IN HELA, SIGNAL = 3.1; EXPRESSED IN PLACENTA, SIGNAL = 3.6; EXPRESSED IN HBL100, SIGNAL = 3.1; EXPRESSED IN HEART, SIGNAL = 2.5
tcaaatggggagacttttggagggatgcttttacaaatttccttcagagatggatactttattctaataattccacctaaagggactgcctttgctaattctctccaaggagctatatagaaggggcacagctgaattgacctttctcagtaaaatgaatcttcacacacctatatgataaactcttttctttttaatttttggaggtggcatgcttgtccccagctccagtgtttctgcatctcctctgcagctaccagagtggtagatattccctaacgtcacagattccctgacctggagctgaagaacttgagccaaatgctcatccatgagtttgactttctaaagaaattaagcatgaagaacaaggtaggaggcttcttctggctgtctaggttctgcc

SEQ ID NO: 3479 - DNA, 470 bp, Homo sapiens
  MAP TO AC008268.1; EXPRESSED IN PLACENTA, SIGNAL = 1.2; EXPRESSED IN HBL100, SIGNAL = 0.71; EXPRESSED IN FETAL LIVER, SIGNAL = 1.2; EXPRESSED IN LUNG, SIGNAL = 1.1; EXPRESSED IN HELA, SIGNAL = 0.84; EXPRESSED IN BRAIN, SIGNAL = 0.99; EXPRESSED IN HEART, SIGNAL = 0.81; EXPRESSED IN BT474, SIGNAL = 0.9; EXPRESSED IN BONE MARROW, SIGNAL = 0.88; EXPRESSED IN ADULT LIVER, SIGNAL = 0.92
gactgggctctctgttcctgcccccatggaatgagcccgcctgacatgccagaggattccacagttccagagcatgtgacacacgtgtgccggagcaaagccacacatgagcctggcggggcccaagacagcacagaacgtgttcacatcctccctcgtctctgactcaccagccctgatgtgactcccacaccctgcccctccgggatgtagcctttctctccctttgtgccatttcgtgtctatccaggctgtgtgtgcatccactcaccttcattgggatttgcaacgtcctcccggtacctgcagaatccattttgtaccccatcttaccgttcttttgtatcagggtgcctgtccacatcgagatcctgagactctgacgctgaaaaacgaaaaatatagactttcacttcgaagttgtaagttgcctcctaagagtgcagacttgaatttaccgaaggctgacg

SEQ ID NO: 3480 - DNA, 472 bp, Homo sapiens
  MAP TO AC008074.1; EXPRESSED IN HBL100, SIGNAL = 0.75; EXPRESSED IN FETAL LIVER, SIGNAL = 0.91; EXPRESSED IN LUNG, SIGNAL = 0.82; EXPRESSED IN BRAIN, SIGNAL = 0.88; EXPRESSED IN BT474, SIGNAL = 1.1; EXPRESSED IN HELA, SIGNAL = 0.65; EXPRESSED IN ADULT LIVER, SIGNAL = 1.1; EXPRESSED IN HEART, SIGNAL = 0.84
tttcccctggtcaatttctgtggctgtttttgagaattccgaagtggaattctctaattttagtcattttcaacaccaaagttttcaccagagcttgctttaggtaacaaaataagctggtttgacttacttctccataatctaacctctcttgaagagtagtggcctcttaaaaatggacaaacccagaggaggaagaagaaatataagcacttgggtcattttgaaatgtttttatatccaacccttaatcagtgggatgattttcttttcagctttgcaatcagcttgacctgtggggactcagaagaccctcctgccgatgtggcaatcgaactcaaagctgtgttcacagatcggcagctactcagaaattcttgtatatctggggagaggggtgaagaacagtcagcaatcccttactttccattcattccagaccagccattcagggtgagtacctcgagtgcct

SEQ ID NO: 3481 - DNA, 376 bp, Homo sapiens
  MAP TO AC007460.1; EXPRESSED IN HELA, SIGNAL = 5.7; EXPRESSED IN PLACENTA, SIGNAL = 5.3; EXPRESSED IN HBL100, SIGNAL = 5.1; EXPRESSED IN HEART, SIGNAL = 3.8; EXPRESSED IN ADULT LIVER, SIGNAL = 6.8; EXPRESSED IN BT474, SIGNAL = 4.4; EXPRESSED IN BONE MARROW, SIGNAL = 4.5; EXPRESSED IN BRAIN, SIGNAL = 5.9; EXPRESSED IN FETAL LIVER, SIGNAL = 5.6; EXPRESSED IN LUNG, SIGNAL = 5.8
ttcctctacaaccccaccacacagattaaaccctcaatttattattacaataacccaactgatctctagaagtcagtctcagatctattttccatattaccctcagataacccacctaaaaagcaaatccaaccatataattcccttgcttaaaactagcacctgaaagataaaaggtaacacccattagcattagaagtcccttcatgatcatctccagacacattcctcccacaaaactttatgctgagcttcctccagcagcagcagtggcagcagcaagcagcaacagcagcagcaagaagacacgagtttgctgtgcaccaggcatcttttttcagagcagcatcaagctaccttgagtttgcttcacacc

SEQ ID NO: 3482 - DNA, 453 bp, Homo sapiens
  MAP TO AP000260.1; EXPRESSED IN BONE MARROW, SIGNAL = 0.76; EXPRESSED IN HBL100, SIGNAL = 0.78; EXPRESSED IN FETAL LIVER, SIGNAL = 0.82; EXPRESSED IN LUNG, SIGNAL = 0.86; EXPRESSED IN ADULT LIVER, SIGNAL = 0.66; EXPRESSED IN BRAIN, SIGNAL = 0.99; EXPRESSED IN PLACENTA, SIGNAL = 1.2; EXPRESSED IN HEART, SIGNAL = 0.87; EXPRESSED IN HELA, SIGNAL = 0.67; EXPRESSED IN BT474, SIGNAL = 1.1
gcacactcaagggttaaggggtaaaatgtcatgatgtttgtaatttaaaatacttcagcaaaaaaaaaatgcaaggatggcaaagtgatcactggtatatctagatgatggtatacataaagtgattgtactattccctccgcttttctgaatacgagaacattttcaaaataaaaactcaagtcagtgaatgaatgagtgaatgaatgaagctgattgtgcccagggggtctgtgtggggctctccgtgaagtgcaggggtgactggtcctctctctctgcacctcgcaggatttctctggaagatctgagcccgagcgtcgtgctgcacatgaccgagaagctgggttacaagaacagcgacgtgatcaacactgtgctctccaaccgcgcctgccacatcctggccatctacttcctcttaaacaagaaactggagcgctatttgtcagg

SEQ ID NO: 3483 - DNA, 467 bp, Homo sapiens
  MAP TO AJ010598.1; EXPRESSED IN PLACENTA, SIGNAL = 1.1; EXPRESSED IN HBL100, SIGNAL = 0.81; EXPRESSED IN FETAL LIVER, SIGNAL = 1.1; EXPRESSED IN LUNG, SIGNAL = 1.2; EXPRESSED IN HELA, SIGNAL = 1.5; EXPRESSED IN BRAIN, SIGNAL = 0.82; EXPRESSED IN HEART, SIGNAL = 0.93; EXPRESSED IN BT474, SIGNAL = 0.83; EXPRESSED IN ADULT LIVER, SIGNAL = 0.87
gcttttgttatttctcatggcagaaaaatttactgtgaattccttaccataaactataatgagagctttctttcataattattggagtactcttagttctgggtttttgttttttaataaattctgggaagaagtgctatacgtggaaagatatattttactttgaatggaagactaaaattggttcttacataacttcagacatagaaatgaataaaagatttatcttagtatagactctgtggtttatattagatatataattgattcttttctcatgaagcacaagcagcaggagacccagaatatctagagcagccatcaagaagtgatttctcaaagcacttgaaagaagaaactattcaaataattaccaaggcatcacatgagcatgaagataaaagtcctgaaacagttttgcagtcggtaagaacttttcttttggctctctgaacatagccatggtc

SEQ ID NO: 3484 - DNA, 435 bp, Homo sapiens
  MAP TO AC007097.2; EXPRESSED IN HELA, SIGNAL = 1.9; EXPRESSED IN HEART, SIGNAL = 1.1; EXPRESSED IN BT474, SIGNAL = 1.3; EXPRESSED IN ADULT LIVER, SIGNAL = 1.6; EXPRESSED IN BRAIN, SIGNAL = 1.1; EXPRESSED IN PLACENTA, SIGNAL = 1.2; EXPRESSED IN HBL100, SIGNAL = 1.1; EXPRESSED IN FETAL LIVER, SIGNAL = 1.4; EXPRESSED IN LUNG, SIGNAL = 1.4; EXPRESSED IN BONE MARROW, SIGNAL =   1
tggcaaatgctatttaatccacacaacagtactgcaaagtaggtgagaactctgttttacatacacagaaagtgaatatttgtttctccatctcttctggactcaagttaatcatgggtccagaatttgaacccagatcaccctaactcatcagttctcactcattctaccacagcaaaagacaaagagatcaataagggcagggaagaaagatgagggagactagtcagactcctcctcaggtgaccctcttccccatgcccctcccttaactgtatcaccactttatacgaacccactgaccttcaggaagaggatttctgtatgcatccccaggatacagaaaccacccgtgactcggaaaacccaaacccctcgcacgtgctgtgccagctgccccaaaagcaggtaagatgctcctgggcatctaccata

SEQ ID NO: 3485 - DNA, 413 bp, Homo sapiens
  MAP TO AC010903.1; EXPRESSED IN HEART, SIGNAL = 0.94
tgtccatatcagcacacaaatcatataaacaaaatttactgaggggaaataaaggcaatctcaatagtaccacgtttgctttccccaacatattcattgtttcctcaaaaaacttcttactaaacatgatattgattttttcttttctgttcatatgaattattcattcacttaagtaacaattatatattgagtttttttaatgcattgaatacttactaaactctagggatatgcacatggactgaacctaatccttcagctgaaggaaagtcatgatctactggtggcggagttgaacattaatcatgacatttcgttgaaggtcaagatgaaagaaagagaggtgattattgaaacaatgaagtaaagactgagcaaacagatgtagagaacatccttttgatggaggg

SEQ ID NO: 3486 - DNA, 456 bp, Homo sapiens
  MAP TO AC009237.1; EXPRESSED IN HELA, SIGNAL = 0.96; EXPRESSED IN ADULT LIVER, SIGNAL = 0.99; EXPRESSED IN BRAIN, SIGNAL = 1.1; EXPRESSED IN PLACENTA, SIGNAL = 0.74; EXPRESSED IN HEART, SIGNAL = 0.99; EXPRESSED IN FETAL LIVER, SIGNAL = 0.84; EXPRESSED IN LUNG, SIGNAL = 0.82; EXPRESSED IN HBL100, SIGNAL = 0.9; EXPRESSED IN BONE MARROW, SIGNAL = 0.8; EXPRESSED IN BT474, SIGNAL = 0.66
agcagaaccaggatacacccccaggcttcctgaggccacatgtcctccctgtggctgcctggtcattccccttcacctagcagctgtcttgctcccatgtagaacagcagggcccagcggccacctgcacctcgccatttcctccagctctgtgctagaaatgatgcaagcaggaaaaccatttgcttgtggacctactatgtgtcaggcacctgctgaacagtagcatttgatgctctcgacggccttaacaggtcggcactgatctgttgatgctgcagttgaggagctttagcttagagaggttaaatagcatcctcaaagtcacccaggtcatgctctgcttctggagaggctgggatgcagcatgggagtgtgacctcctgagcacggactgcacgggccgcctcgcagccggcatggtgaggtgagatgagttgaggtaagctcgcagct

SEQ ID NO: 3487 - DNA, 467 bp, Homo sapiens
  MAP TO AL049696.8; EXPRESSED IN BT474, SIGNAL = 0.74; EXPRESSED IN BONE MARROW, SIGNAL = 0.8; EXPRESSED IN LUNG, SIGNAL = 0.78; EXPRESSED IN HBL100, SIGNAL = 0.92; EXPRESSED IN HELA, SIGNAL = 0.96; EXPRESSED IN ADULT LIVER, SIGNAL = 0.93; EXPRESSED IN PLACENTA, SIGNAL = 0.83; EXPRESSED IN HEART, SIGNAL = 0.94; EXPRESSED IN BRAIN, SIGNAL = 0.97; EXPRESSED IN FETAL LIVER, SIGNAL = 0.85
ttgctttttcaatttatggactcatcttgaattctttcttgcaagagatccaaaaaccctctcttggggtctgaattgggaccactttctggtaacaaattcttgtgctggatttcaaaggagcatatagtagtgggataaatttttggtgctgtagtctcaatgcaatccattagatggtgcttaggagtaatggccattaattaggtaagttaataccccaccatgaggctctttcgttcttcctcatgttcccaggcatgctccgcagtgggcgggggagagacatggccccctcaccaggtctgctcctgggccttgggggagcctccttccagtcactgatgctgtgcccatgtttcttttgttaggtgtttcaggctctggggccttcttgatcaggggctgcaggaggaagatatgcctcactatctctggatcaactctgtggaggtaggcataccctg

SEQ ID NO: 3488 - DNA, 492 bp, Homo sapiens
  MAP TO AC007100.2; EXPRESSED IN BONE MARROW, SIGNAL = 3.4; EXPRESSED IN BRAIN, SIGNAL = 3.5; EXPRESSED IN LUNG, SIGNAL = 6.6; EXPRESSED IN PLACENTA, SIGNAL = 4.5; EXPRESSED IN HELA, SIGNAL = 4.9; EXPRESSED IN HEART, SIGNAL = 3.5; EXPRESSED IN BT474, SIGNAL = 5.4; EXPRESSED IN HBL100, SIGNAL = 4.4; EXPRESSED IN FETAL LIVER, SIGNAL = 4.8; EXPRESSED IN ADULT LIVER, SIGNAL =   5
ctaggaagcctgcctgtggaagggctcatgcaattggattagagtgtttgcatctctttaaggtatattattgtaaatacagtttcatgccacaggaaaccttttctctaacaaagtgcttgcctcatttccccctggcctctgttttcttaactttacactgaagtatcagtgtgcctaggacacatccatctcccttcgcctctcttcgactcatcttctcaaaggcaaggactccctgtttcccacaggggcggggagagggaaggaagtacacaaactgatttatctcaccctgtcagttgttttgaggacatcagcaatggagggtgcctgctcctcctcagtcatcagcaggctctgaggaacagctcttccctttgttaaatgactgccaagtgtgtattctctgctttctaaggcagcctcagggtagggtctggagcctctgctctcaggtagcctcctatcagagctgagcagagaggtggt

SEQ ID NO: 3489 - DNA, 412 bp, Homo sapiens
  MAP TO AC008854.2; EXPRESSED IN LUNG, SIGNAL = 1.5; EXPRESSED IN HELA, SIGNAL = 1.1; EXPRESSED IN PLACENTA, SIGNAL = 1.3; EXPRESSED IN HEART, SIGNAL = 1.1; EXPRESSED IN ADULT LIVER, SIGNAL = 1.8; EXPRESSED IN BT474, SIGNAL = 1.1; EXPRESSED IN BONE MARROW, SIGNAL = 1.2; EXPRESSED IN HBL100, SIGNAL = 1.3; EXPRESSED IN FETAL LIVER, SIGNAL = 1.3; EXPRESSED IN BRAIN, SIGNAL = 1.6
gtctttcccggaatgttgtgaaaacatgctatacacacaaacacacatactcatacatgtatatacctaattattttattactcagaaagctattagggttaatggaacatttgactcaaagcatagccaaccttagcactgacatcctgcatatagaacctgcctttatgatttctttttcctcttctctttaccaacaccctccctcccttaggaaaggaacctggcgggggaaccaagagtttggattgcaaaattgaggagagtgctgaaacacctgccctagaagactcctcatcatcccccgtagatagtcagcaacattcctggcaggtttccacagacattgagaacactgaaaggtaagtgggaagttaccctgaatagactgccaatcctcctcccgttaat

SEQ ID NO: 3490 - DNA, 456 bp, Homo sapiens
  MAP TO AC008064.1; EXPRESSED IN LUNG, SIGNAL = 0.77; EXPRESSED IN BONE MARROW, SIGNAL = 0.87; EXPRESSED IN HBL100, SIGNAL = 1.1; EXPRESSED IN FETAL LIVER, SIGNAL = 0.84; EXPRESSED IN BRAIN, SIGNAL = 1.2; EXPRESSED IN BT474, SIGNAL = 1.2; EXPRESSED IN HELA, SIGNAL = 0.77; EXPRESSED IN HEART, SIGNAL = 0.86
ctagactggattccatgggcccatcacttcaattattttatcctcagttcctttatccctgttctgacaatacccaggatcaatctaaccattttgcttctgcaccccaatacaaagaaaactaagcaatgctggaaaatacaactacatgaactggttccacttccaacctctaccagacctgcagggttttgctctgcaaatctttcaatggttctcaattggtttcccacagcaaccattccaaaacaccaagtcccctacccaattctcacttcaatctcctcctcagcaagactttactcccaacttcacagtaaaaactggtcttatgggctttttttttctgagcttccaatccccaagctacaaatttatctctgtccagcccatcctcatctttcttctccatctcaaagaaatgggtctacctgaggctaatcccgtctccaactg

SEQ ID NO: 3491 - DNA, 466 bp, Homo sapiens
  MAP TO AP000049.1; EXPRESSED IN FETAL LIVER, SIGNAL = 0.76; EXPRESSED IN HELA, SIGNAL = 0.66; EXPRESSED IN HEART, SIGNAL = 0.91; EXPRESSED IN ADULT LIVER, SIGNAL = 0.82; EXPRESSED IN LUNG, SIGNAL = 0.67; EXPRESSED IN HBL100, SIGNAL = 0.7; EXPRESSED IN BT474, SIGNAL = 0.87; EXPRESSED IN PLACENTA, SIGNAL = 0.75
ttcacagagttgtgcgacagtcactattagctaattttagaatgttttcatcacttcagaaagaaaccccttttgatgtctaaagtacaaatcctcacactgaggctgaaaattacctgctaaagtggcagagtgaaagatattttatgtttatataaaacttggccagtatttacaggctattccccatagtttggtaaacagttatgttttctgttgttgtctctaggggtaagagtgctaattattttgttttcgtgttggtgggagtggtggttttggaaaggttcttttatggtcacagttgttctcaggccatgctgttggtttgcagggcactagctgacatgaataatgatggaagaatggatcaagtggagttttccatagctatgaaacttatcaaactgaagctacaaggatatcagctaccctctgcacttccccctgtcatgaaacagcaacc

SEQ ID NO: 3492 - DNA, 454 bp, Homo sapiens
  MAP TO AL031735.9; EXPRESSED IN PLACENTA, SIGNAL = 1.2; EXPRESSED IN HBL100, SIGNAL = 0.84; EXPRESSED IN FETAL LIVER, SIGNAL = 0.94; EXPRESSED IN LUNG, SIGNAL = 1.2; EXPRESSED IN HELA, SIGNAL =   1; EXPRESSED IN ADULT LIVER, SIGNAL = 1.2; EXPRESSED IN BRAIN, SIGNAL = 1.2; EXPRESSED IN HEART, SIGNAL = 1.1; EXPRESSED IN BONE MARROW, SIGNAL = 0.84; EXPRESSED IN BT474, SIGNAL =   1
cctccagggcagagtctaggatttcctacctggcccaaagctgtcatgttcaccaactattagcactgatcaagcaaagcgtacttccatttgtcagagagactgcaaggatgtacttggttctgccccaatttggaaagaaagacttccaaaggaaaagattatagggaaagggatatggggtttaagagtaagaggcaattggaaatcaaaaatgggcatgcacacacaggatgcagctggacttcctacctggtagactgcttggccagcatggccacgtaggtgaccacgaagctctgaaacttagcccgttgttcctcccagcggtcatctactgagtagtagttgggcaggggtgctccaaacaggatctcactgcgcaggagggagctcttcagattgtctgcagagaggccctcatccacataccagtagaactcagggtgagtca

SEQ ID NO: 3493 - DNA, 463 bp, Homo sapiens
  MAP TO AC007554.1; EXPRESSED IN FETAL LIVER, SIGNAL = 0.62; EXPRESSED IN LUNG, SIGNAL = 0.68; EXPRESSED IN HELA, SIGNAL = 0.63; EXPRESSED IN BRAIN, SIGNAL = 0.88; EXPRESSED IN PLACENTA, SIGNAL = 0.93; EXPRESSED IN BONE MARROW, SIGNAL = 1.2; EXPRESSED IN HEART, SIGNAL = 0.98
ccttcgtacatgagccacagtaaggtcagtgcttagtttgtccccaagaaaaatacatacgataatattccttttattggctggatgtctttaaattcagctcagtttgcctgcctgcaattccaatctatcagctaaacaaccataatcaagtcaacactatgattcagatgttttgagctatccctgaataaggaaacctaaggaaatgtgaatttccactgcaggaagagattatgcattgaggccaaaattgctaaaaaaaaatcaataatgttcatcatacaaatgttgcaatagctcttaccttgctcacaaagtgcaccaacataacttggaaggcagaggcacctgaatgtgttaaaaccatcaacacaagtggctccattacgacagggattagagtgacattcatcaaaatctgaaaaaaaatagtaaaagctcacaaaataccttcaaaaag

SEQ ID NO: 3494 - DNA, 471 bp, Homo sapiens
  MAP TO AL049565.3; EXPRESSED IN FETAL LIVER, SIGNAL = 0.59; EXPRESSED IN ADULT LIVER, SIGNAL = 0.69; EXPRESSED IN BRAIN, SIGNAL = 0.79; EXPRESSED IN HEART, SIGNAL = 0.79; EXPRESSED IN PLACENTA, SIGNAL = 1.1; EXPRESSED IN HELA, SIGNAL = 0.75; EXPRESSED IN LUNG, SIGNAL = 0.62; EXPRESSED IN HBL100, SIGNAL = 0.77; EXPRESSED IN BONE MARROW, SIGNAL = 0.75
atttagagcctactatatgccaatgacttttctaggcaatgggaatacaaaagtgaacaaaacacagcccatgcacttatagagctctgacactttccaaggagagagacagtgaacaaatccatagatacaaaatagagaatcattagtcatatgaaaaataaaatatcacatagtgataagtgatataaagaaaataaagcagggcaaacatatccagaatggtcataaaggccattctgaagaggtgaaatttgagcatggctttaaatgaaatgaagacttgtcttgatttttctttgtattcaaaggaaacccaggaagaggtcactaaaattactgtgtcctgagttggaagtaaaaacagtcatggagttgagacatttgaaaaataccatcaagatattcaaggatgtcataatcaagctgaagatcatctactaacgtcaactaaatgattgaagggatgaa

SEQ ID NO: 3495 - DNA, 469 bp, Homo sapiens
  MAP TO AL049767.9; EXPRESSED IN BT474, SIGNAL = 0.87; EXPRESSED IN HELA, SIGNAL = 5.3; EXPRESSED IN FETAL LIVER, SIGNAL = 0.73; EXPRESSED IN LUNG, SIGNAL = 0.77; EXPRESSED IN ADULT LIVER, SIGNAL = 1.2; EXPRESSED IN PLACENTA, SIGNAL = 4.5; EXPRESSED IN BONE MARROW, SIGNAL = 0.92; EXPRESSED IN HBL100, SIGNAL = 1.1; EXPRESSED IN BRAIN, SIGNAL = 0.85; EXPRESSED IN HEART, SIGNAL = 0.82
ccagaggctgaagcttgttctttacttagtccatgaacccatagccttttttctgtgtttgaacattgactggataatccctttccagatgggctattcccctgatcttgagaaggattttgtgtcccatgatgagcttggcctcctttatgatgtataactatcatgtgaaaatgaccttttgatttatcatggtctctgccttcttgtttataattgagcagttgttgacttccacctaggtgttgttttgattttgtcgccttatgtagggcattcaaatcatattgctgactttttcgggtccagtcatgatcattgatgtctacatgatatgtgtgttgaatagaaaaactgcctttggatttagtatgttgttggtctttttgtccaaaatagtgctggcccttttgtccatgtggaaattgggaagatccgcttggcaattggccttttgatccacctggta

SEQ ID NO: 3496 - DNA, 473 bp, Homo sapiens
  MAP TO AC009237.1; EXPRESSED IN PLACENTA, SIGNAL = 0.94; EXPRESSED IN BONE MARROW, SIGNAL = 0.92; EXPRESSED IN HEART, SIGNAL = 0.79; EXPRESSED IN BT474, SIGNAL = 0.8; EXPRESSED IN HBL100, SIGNAL = 0.76; EXPRESSED IN FETAL LIVER, SIGNAL = 0.65; EXPRESSED IN LUNG, SIGNAL = 0.68
tcttttaatccaatcttggaaacagatcatttattcactcacccattctttaatcccagccacttggaattcccttgtgagtctcttccctcacctgtagtttatttccaaacatattcgggaaacatgcacagagaacactacattaccctaatcctattaataaaacaatcactttaataggaaggaagaagcctgtacgaatcaaaaaggatgatcaagacaaatttctgtgatttttttttgtagcatcgtgcatggaggatccacatggtttccacagagctggagtcattcagggaagcttcttatatcgagagtggtccagaagaattctaccaaagatttaagaagtgtttttctacaactcatatcttcataagtatgaagggtaaagattctcagaatacagttcatggatatctgattcttaacaggtaagacagatactgtccaagagcatttccaacagg

SEQ ID NO: 3497 - DNA, 391 bp, Homo sapiens
  MAP TO AL021878.1; EXPRESSED IN PLACENTA, SIGNAL = 1.2; EXPRESSED IN HELA, SIGNAL = 2.2; EXPRESSED IN HEART, SIGNAL = 1.3; EXPRESSED IN FETAL LIVER, SIGNAL = 1.5; EXPRESSED IN BT474, SIGNAL = 2.2; EXPRESSED IN BRAIN, SIGNAL = 1.7; EXPRESSED IN LUNG, SIGNAL = 1.7; EXPRESSED IN HBL100, SIGNAL = 2.8; EXPRESSED IN BONE MARROW, SIGNAL =   1
gaacttgcatttcattggggggagagggtacacagtattttaattttaaaacaaaaataatttgtttgtcaaagattcccatctccccaactttatttgtcccattggttttcagaaattttaatttttaaaaaatcagatgccttttggaagttgtatgtttatctgagcagtaactaaattttatttcttcttcagttgttaaggtgtgttaaatttgaagaagataatatctccatcttcaacaatataatttctgccttgttgtctgtactttccagcagccttgactgcattttcagaaccttcctctttaaaatcttcatatttcattacttcagccataatgaatcccttttcaaaatctgtgtgaatctttcctgcagcctga

SEQ ID NO: 3498 - DNA, 467 bp, Homo sapiens; identical to SEQ ID NO: 1034
  MAP TO AC012143.1; EXPRESSED IN PLACENTA, SIGNAL = 1.6; EXPRESSED IN HELA, SIGNAL = 1.6; EXPRESSED IN HBL100, SIGNAL = 1.7; EXPRESSED IN HEART, SIGNAL = 1.4; EXPRESSED IN FETAL LIVER, SIGNAL =   1; EXPRESSED IN BT474, SIGNAL = 1.6; EXPRESSED IN ADULT LIVER, SIGNAL = 1.2; EXPRESSED IN LUNG, SIGNAL = 1.7; EXPRESSED IN BONE MARROW, SIGNAL = 2.1; EXPRESSED IN BRAIN, SIGNAL = 1.5

SEQ ID NO: 3499 - DNA, 450 bp, Homo sapiens
  MAP TO AF031078.1; EXPRESSED IN LUNG, SIGNAL = 1.5; EXPRESSED IN ADULT LIVER, SIGNAL = 1.4; EXPRESSED IN FETAL LIVER, SIGNAL = 1.1; EXPRESSED IN BT474, SIGNAL = 1.1; EXPRESSED IN BRAIN, SIGNAL = 1.2; EXPRESSED IN BONE MARROW, SIGNAL = 1.3; EXPRESSED IN PLACENTA, SIGNAL = 1.1; EXPRESSED IN HEART, SIGNAL = 1.1; EXPRESSED IN HELA, SIGNAL = 1.3; EXPRESSED IN HBL100, SIGNAL = 1.1
ccaggcactgttctaggagcttgagctacatctgtgaatcaaggagacaatcctgtcctgtggagcttctgctccagcaggggtgacagctaagataagcacagtcagtcatgtattcagctagaaagagacaaaagctgtggtttgcactgagaaggtgcacatcagtgcagagactcaagggagggaaaggattgtctcgtatgggtattggggttaactgacgacgacagctctgggaaaagaagtgacaagcagctcccagatttaacaacatgaaggtcatcactggagacctcatggagcagcttggcagagctgtggcagcaaaggaacaactggagaaggttgaagagggtgtggagacagggactggagtcttgctggtaaaggaaaacagagatgctagacaggtggggggttgggagcagcttttgtcaaggtgggaga

SEQ ID NO: 3500 - DNA, 458 bp, Homo sapiens
  MAP TO AC009227.1; EXPRESSED IN BT474, SIGNAL = 0.83; EXPRESSED IN LUNG, SIGNAL = 0.68; EXPRESSED IN HELA, SIGNAL = 0.73; EXPRESSED IN ADULT LIVER, SIGNAL = 0.81; EXPRESSED IN PLACENTA, SIGNAL = 0.96; EXPRESSED IN BONE MARROW, SIGNAL = 0.95; EXPRESSED IN HBL100, SIGNAL = 0.75; EXPRESSED IN FETAL LIVER, SIGNAL = 0.72; EXPRESSED IN BRAIN, SIGNAL = 0.71; EXPRESSED IN HEART, SIGNAL = 0.92
tcaggaaaccaaccatcaggccacccagatagtatcaaggaactgaaacttaccagatcaccacatatggacaatgagattacagaccactgacccatcatgattgccttacttaccacctgcttcctttggatcaactccacttctttactcctcccttattctgttttcccacacatggttacatttttttcccctgctatataaacccctaattttagtcagttgaggagatgaatttgagactatctcccatctcctcagctgcatcactgatttcaagtcttcttccctggcaatactcatcgtcttggtgattgaatttctgtgcagcaaccagcaggacctaagactgaatttctggtgtcttggtaagatattgagagtcagtacaaaaaaaaatagtgacaccaaacttgttattgtaccagcattttgtgttatgctgaggcctttga

SEQ ID NO: 3501 - DNA, 451 bp, Homo sapiens
  MAP TO AC012267.1; EXPRESSED IN BT474, SIGNAL = 8.8; EXPRESSED IN ADULT LIVER, SIGNAL = 1.8; EXPRESSED IN BRAIN, SIGNAL = 3.2; EXPRESSED IN HELA, SIGNAL = 6.7; EXPRESSED IN HBL100, SIGNAL = 7.3; EXPRESSED IN HEART, SIGNAL = 4.1; EXPRESSED IN FETAL LIVER, SIGNAL = 5.1; EXPRESSED IN LUNG, SIGNAL =   5; EXPRESSED IN BONE MARROW, SIGNAL = 5.4; EXPRESSED IN PLACENTA, SIGNAL = 6.1
gcgtaccattccgacgttacaatggtggagttggcaggtgtgcccaggccaagcagtggggctagacacaaggttggtggcccaaaaagagtgctgaatttttgctgcacatgcttaaaaatgcagacagtaatggtgaacttaagggtttagatgtagactctctggccattgagcatatccaaatgaataaagcatctaagatgtgctgccagacctacagagctcatagtcggattaacccatacatgagctctccctgccacattgagatgagccttactgaaaaggaacagattgctcctaaaccagaagaagaagttgcccagaagaaaaagatatcccagaagaaactgatgaaacaaaaacttatggcatgggagtaaattcagcattaaaataaatgcaattaaaaggaaaaagaaaagacacagaatggcagaatggttga

SEQ ID NO: 3502 - DNA, 407 bp, Homo sapiens
  MAP TO AC007502.2; EXPRESSED IN BRAIN, SIGNAL = 7.5; EXPRESSED IN LUNG, SIGNAL = 7.9; EXPRESSED IN HELA, SIGNAL = 8.8; EXPRESSED IN PLACENTA, SIGNAL = 7.2; EXPRESSED IN HEART, SIGNAL = 7.9; EXPRESSED IN ADULT LIVER, SIGNAL = 8.3; EXPRESSED IN BT474, SIGNAL = 6.5; EXPRESSED IN BONE MARROW, SIGNAL = 7.9; EXPRESSED IN HBL100, SIGNAL = 6.3; EXPRESSED IN FETAL LIVER, SIGNAL =   8
tatcttccctttcccatccctcttccctctaccccagtattttggctgtgcaaagtgccaagacattacaaagcccctggaatctcaagcactgaaggatttctgttggggagtccatcatcccagccctcatggtccctggagctggttctctgtcccttccctcccaagcctgggatgcatggccctcactctttgctgaggctgggatgggagcctctgcatttcctccctgttaccctaaagacacttctctcacctgcttctttcacaccagaactaggtagcccttcaaactgaaatccagaaacatcagcaattaaattttttacaatatgtgtgaagatgggcattgctgtctccttgagtgcaaattgggcatgatctgcctcaaggtgagagtctgg

SEQ ID NO: 3503 - DNA, 449 bp, Homo sapiens
  MAP TO AL035697.18; EXPRESSED IN PLACENTA, SIGNAL = 0.68; EXPRESSED IN LUNG, SIGNAL = 0.76; EXPRESSED IN HELA, SIGNAL = 0.94; EXPRESSED IN BT474, SIGNAL = 0.63; EXPRESSED IN FETAL LIVER, SIGNAL = 0.68; EXPRESSED IN BRAIN, SIGNAL = 0.91; EXPRESSED IN BONE MARROW, SIGNAL = 0.77; EXPRESSED IN ADULT LIVER, SIGNAL = 0.73; EXPRESSED IN HEART, SIGNAL = 0.96
gctgagtgctgggagaaaagtttaaaagtctggcctagtggctcacagcatcttaaagtaaatacttccataagcaaccaaagcagaaaatcttcatataactgttttcaccaaaataaatacataaattttcaaatctggagtcctataaaggaatttaaaatctattttcttatatgtaagttcaaagatgtctaagtccaaagggaaaatgaaaataaaataaaaatataatcccagcccatgtgcaaaagcaaacaaggacaggaacacaccgctccaggggtgtgggcagtactcaccccacagcccaggccattgcccccttcgcaggtgactttcctctggtcaggctccggcagcagccccgctccacagccagggcgggggcataacacgccccccatctgcaggacacactcctctgcaccatactgctggtaccggtt

SEQ ID NO: 3504 - DNA, 476 bp, Homo sapiens
  MAP TO Z84476.6; EXPRESSED IN BONE MARROW, SIGNAL = 0.65; EXPRESSED IN HBL100, SIGNAL = 0.68; EXPRESSED IN FETAL LIVER, SIGNAL = 0.71; EXPRESSED IN LUNG, SIGNAL = 0.61; EXPRESSED IN BT474, SIGNAL = 0.7; EXPRESSED IN HEART, SIGNAL = 0.84; EXPRESSED IN PLACENTA, SIGNAL = 0.72; EXPRESSED IN ADULT LIVER, SIGNAL = 0.67
ggccctggatttctcatctcatttctgggccaggaacgaggagtctttccctctatgattagggctttcgtagatgtaccgcctctgaaacgaagacaagacaaataataatgagttcactcttttcctcccttgtgaagttccgtggagacactcggtcccctgaagtggatgaagggcgaggggaggaggtctcaggatttttcctcgcttttcttagaagcaacaggctcaaaccaaacggttggccttgcttactcctgaagtcgagaggcttactccctggaatccaagtggatgtggagcccatggcgtcctctggcgctctcggtctcttcgacccctttttactgtgttgatgataaatggggcaggattcccctcctgcaccacctgcagcatcctgtccaggatccatctgggagctgagaagaagcaaagtgtcagggatcgggggttctcgggctatgctgaga

SEQ ID NO: 3505 - DNA, 487 bp, Homo sapiens
  MAP TO AL023799.5; EXPRESSED IN ADULT LIVER, SIGNAL = 1.3; EXPRESSED IN BRAIN, SIGNAL = 1.5; EXPRESSED IN BT474, SIGNAL = 0.95; EXPRESSED IN PLACENTA, SIGNAL = 1.3; EXPRESSED IN HEART, SIGNAL = 1.4; EXPRESSED IN HELA, SIGNAL = 1.7; EXPRESSED IN LUNG, SIGNAL = 1.4; EXPRESSED IN FETAL LIVER, SIGNAL = 1.1; EXPRESSED IN HBL100, SIGNAL = 1.1; EXPRESSED IN BONE MARROW, SIGNAL = 0.82
gaataaaagggatcaaataaaccaattaatctatcataagataaaagcacaaaatataagtttagtgtaaaagatgaaaattagagaataaacacaatgactcaagttctgctcagcagttgtaaaaagtacctttttctcatttgcttggtctttatgccagataagtgattatcatgtaaatgtgtaagagggttttatgatatgataaattatatacataagattaaatttgtattgtatatcaggaataaaagatattaccttatgttcttcaaagcaaggctcattttattttttctgttgcgctgtcgcttttgcttgtaagagggttttgctttggacttagctatacgtccccttggcttacttgtattaactttacttgcagtggatgtagttgcatgaagcttacttgtcttagatctactggcattagattttctaggatttctagcagttgtattttgagatgtcggaggtgtga

SEQ ID NO: 3506 - DNA, 471 bp, Homo sapiens; identical to SEQ ID NO: 3494
  MAP TO AL049565.3; EXPRESSED IN BT474, SIGNAL = 0.92; EXPRESSED IN FETAL LIVER, SIGNAL = 0.75; EXPRESSED IN LUNG, SIGNAL = 0.7; EXPRESSED IN HELA, SIGNAL = 0.66; EXPRESSED IN ADULT LIVER, SIGNAL = 1.2; EXPRESSED IN PLACENTA, SIGNAL = 0.97; EXPRESSED IN BONE MARROW, SIGNAL = 0.97; EXPRESSED IN BRAIN, SIGNAL = 1.2; EXPRESSED IN HEART, SIGNAL = 0.91

SEQ ID NO: 3507 - DNA, 384 bp, Homo sapiens
  MAP TO AC008277.1; EXPRESSED IN BT474, SIGNAL = 1.2; EXPRESSED IN HELA, SIGNAL = 0.84; EXPRESSED IN FETAL LIVER, SIGNAL = 0.89; EXPRESSED IN LUNG, SIGNAL =   1; EXPRESSED IN ADULT LIVER, SIGNAL = 1.2; EXPRESSED IN PLACENTA, SIGNAL = 1.2; EXPRESSED IN BONE MARROW, SIGNAL = 1.2; EXPRESSED IN HBL100, SIGNAL = 0.77; EXPRESSED IN BRAIN, SIGNAL = 1.2; EXPRESSED IN HEART, SIGNAL = 0.96
ttgggaaacaaataagaacatggaatttaacatttttgttgctaatgtattttgttttcctgtaattgtaataaatgaaagaatattttttggaatttgaaaaataatttcatattccaaacatttttcctaacttcttagagtaatctacttttcattaataaatgttttctttttgcaggtgaaaggtggagtatctatgatgggacttcagttttgtggatggcccactggtgtggttacttctaatattccatttacatcatctgtacctagtctaggatcggggttagggttatcagaaggaaatggtaattcattcttgacttccaatgttgcttcaagtaaaagtgaatctccagtaccacagaatgaaaaggccac

SEQ ID NO: 3508 - DNA, 360 bp, Homo sapiens
  MAP TO AL009029.1; EXPRESSED IN PLACENTA, SIGNAL = 3.6; EXPRESSED IN HELA, SIGNAL = 3.7; EXPRESSED IN HEART, SIGNAL = 3.9; EXPRESSED IN FETAL LIVER, SIGNAL = 4.6; EXPRESSED IN BT474, SIGNAL = 3.4; EXPRESSED IN BRAIN, SIGNAL = 3.5; EXPRESSED IN LUNG, SIGNAL = 3.6; EXPRESSED IN HBL100, SIGNAL = 3.5; EXPRESSED IN ADULT LIVER, SIGNAL = 4.1; EXPRESSED IN BONE MARROW, SIGNAL = 3.9
ttttataattagtgttcacagagcaagctcaattacagcttcttcataggttcaatggtcctctaggacagaatcaaaagtgaaattactgggcgacaaagtttgagtctcagattccttaagtatcatcataatgtttttctccaaaatgtaatgtaatcttatttgtttatttttattttatttttacctatttttattctttttttggctcagggtgttgatctttcacccaggttaaagtgcagtggcatgctcatgtctcactgcagtcttgaaattctgggcttaagtgatcctcctgtctcagtgtctcaagcaactggggctactggcacatgccaccatgactggattttt

SEQ ID NO: 3509 - DNA, 463 bp, Homo sapiens
  MAP TO AL035086.12; EXPRESSED IN FETAL LIVER, SIGNAL = 0.78; EXPRESSED IN BRAIN, SIGNAL = 0.82; EXPRESSED IN HEART, SIGNAL = 0.83; EXPRESSED IN BONE MARROW, SIGNAL = 0.7; EXPRESSED IN ADULT LIVER, SIGNAL = 0.73; EXPRESSED IN HELA, SIGNAL = 0.75; EXPRESSED IN LUNG, SIGNAL = 1.1; EXPRESSED IN PLACENTA, SIGNAL = 0.73
ggggatcctggagactaagcaagtacatattcttggatgtcatgttcatgtcatattgtggaagaaaagatgtcattgccccaccagggcaaataggtttcttctctgagccaggaggatggagagagagagaatatggaatacatgtgagactcataaggaaataaggatacttccaagcagaaagcttcttggcacaacagcccacaaaaatatatgaagctgagtcaggggttacaggtaaagtttcttaggctgcattcatttgagaaattttcataatgctcgtatgtgagaacaatcttttgaatattaacttacctattgaagtggtagatatcctgtatgtttccaaaaagggctgatctttcttcggtccccaggggaagttttgtttggtccctgatgcagtcaaggtaatcctgtgagatcaatgagaaggatgccttaaacactcctgtcc

SEQ ID NO: 3510 - DNA, 475 bp, Homo sapiens
  MAP TO AL079306.2; EXPRESSED IN HBL100, SIGNAL = 2.4; EXPRESSED IN HEART, SIGNAL = 1.3; EXPRESSED IN LUNG, SIGNAL = 1.9
ccttcttgttgcatcatcccatggtggaagggtggacaggcaaaaaagcatgtgtgagagagagtggaaggggactgaactcatcgttttatcaggaacccactccttcgataacaaacccatgcctgagatattggcattaatccattcatgaaggcagagccctcttgatctaattgcctctgaatagtcccacttctcaacactattgcgttggggatttttttccaatacgtgaactttagggatgcattcaaaccctaccacaccctcaccaccatcctttaattttcctgacttagatagaatagtccacaatgacagctacaccctggtcaacatccacaattcatttcctggttggcttcagtgcaaccatctggcatcagaagctactctggaacaagccacctatctacttccctatgactatgaccaatcctagtgttgccatagaaaatcgcccaactctgaa

SEQ ID NO: 3511 - DNA, 489 bp, Homo sapiens
  MAP TO AC008266.1; EXPRESSED IN BT474, SIGNAL =   1; EXPRESSED IN LUNG, SIGNAL = 0.88; EXPRESSED IN HELA, SIGNAL = 1.1; EXPRESSED IN BRAIN, SIGNAL = 0.94; EXPRESSED IN PLACENTA, SIGNAL = 0.77; EXPRESSED IN HBL100, SIGNAL = 0.84; EXPRESSED IN FETAL LIVER, SIGNAL = 0.85; EXPRESSED IN ADULT LIVER, SIGNAL = 0.94; EXPRESSED IN BONE MARROW, SIGNAL = 1.1; EXPRESSED IN HEART, SIGNAL = 0.88
ggaaggtgggataatcatatttctaagactcatatatttaaaattaccagtctctatagtgaggaaagaattgttattttaataacggggaggatgtgtgaggagaaggaattcttaagggtctagtctgcataccatcctggcacttcccaagacctgacattttatgtaatgaagatagttaaataaaaataaaaataaatgttggcaaactagaatatttttaatacaggactgattcctacagtaaatggaatgggttgatatctacttagtaatttttctgaacatcagaaagtaaacactattctggttcctccagggtgttttagtaaagaccaggtatacttggatggaattcttcaaatcctccgatacagagataccatagacttccatctgctgactgctctcgggaaggtgagtagaagccatggcacatagtccccgaacacaccagatcagcattcccctcactcaagcttagca

SEQ ID NO: 3512 - DNA, 494 bp, Homo sapiens
  MAP TO AC008275.1; EXPRESSED IN FETAL LIVER, SIGNAL = 0.67; EXPRESSED IN BRAIN, SIGNAL = 0.71; EXPRESSED IN HEART, SIGNAL = 0.93; EXPRESSED IN PLACENTA, SIGNAL = 0.96; EXPRESSED IN LUNG, SIGNAL = 0.6; EXPRESSED IN HELA, SIGNAL = 0.66
gccccattcaaaactagcaggttttttggtgcatttgtagatgggccatggcagcacactccaatgaggaatatgttgcctccaaaatccaaaatagttcaccagatgttgtatagttttttggttgtaggagaggccagaagcaacaacttatccttcaacatagaacaaatatcttgacatatcccaaaccactgtatcctcagaaatttcactgtgatggaaggcccctaggtttttatggcatttattctccaccttctgacaggtaagtaaataaatatcttaccaatatgtctagactacctgctactgctcaccaggttcaatcagcatgtcatcatcaacatgatgggtcggcacaatgtcttgtggaagggaaaagccatcaagctccctgtggaccgaatgttgatagagtctgaagagttagtacaccctgactgcagaaaagaggaaaaatataattaaaatgggagacactggaacatgaa

SEQ ID NO: 3513 - DNA, 495 bp, Homo sapiens
  MAP TO AC006229.14; EXPRESSED IN BONE MARROW, SIGNAL = 0.85; EXPRESSED IN HEART, SIGNAL = 0.87; EXPRESSED IN PLACENTA, SIGNAL = 0.84; EXPRESSED IN BRAIN, SIGNAL =   1; EXPRESSED IN ADULT LIVER, SIGNAL = 0.8; EXPRESSED IN HELA, SIGNAL = 0.67; EXPRESSED IN LUNG, SIGNAL = 0.83; EXPRESSED IN FETAL LIVER, SIGNAL = 0.8; EXPRESSED IN HBL100, SIGNAL = 1.4; EXPRESSED IN BT474, SIGNAL = 0.74
gctggattggaacaggtagcataggaaaactgatctgatgatgtcgtacctaatgcaaagatacctagtcagtgtgtagcccaggaaatgaatcaagtattggatgtctattggttggttatcatgttgtcctcaaaatagacagaaattcagttgttcaaactggagaagcatactgtatatgtatactgtcttcaggatgggatgtggagatatcctggctattgtggaacagtgacagtgctatgttgtggccaaatggttggttagatattgagagtgtcaatagcatttaaatgaaagctatgaaatgatacagtgaaatgacactggacatgatgatgatggtgatgatgatcatgttgatggtggtggtggtggtggcagcagtggctgtggctacgtttctatcgagtgcttacgtatgcttaacactaagcattttggagaacatacttctataagcaactctaggagttgttctccatttgtggc

SEQ ID NO: 3514 - DNA, 418 bp, Homo sapiens
  MAP TO AC009650.2; EXPRESSED IN BRAIN, SIGNAL = 1.7; EXPRESSED IN HELA, SIGNAL = 2.6; EXPRESSED IN PLACENTA, SIGNAL =   1; EXPRESSED IN HBL100, SIGNAL = 1.7; EXPRESSED IN HEART, SIGNAL = 1.1; EXPRESSED IN FETAL LIVER, SIGNAL = 0.93
  unsure 304
tgtgctgaacaggaaggtcctccgcactggtaccctttatatcgctgagagccacctgtcttggttagatagctctggattaggattctcactggaataccccaccattagtttacttgcattatccagggaccaaagtgactgtctaggagaacatttgtatgctatggtgaatgacaaatttgaagaatccaaagaatctgttgctgatgaagaagaggaagacagtgatgatgttgaacttattactgaatttatatttgtacctagtgataaatcagcactgggggcaatgttcactgcnaatgtgtgaatgccaggccttgcatccagatcctgaggatgaggatgaggatgactacgatggagaagaatatgatgtggaagcacatgaacgaggaaaaggggacatccctaa

SEQ ID NO: 3515 - DNA, 475 bp, Homo sapiens
  MAP TO AC008179.1; EXPRESSED IN ADULT LIVER, SIGNAL = 3.8; EXPRESSED IN BT474, SIGNAL = 0.75; EXPRESSED IN PLACENTA, SIGNAL = 0.92; EXPRESSED IN HEART, SIGNAL = 0.95; EXPRESSED IN HELA, SIGNAL = 0.91; EXPRESSED IN LUNG, SIGNAL = 1.1; EXPRESSED IN FETAL LIVER, SIGNAL = 1.2; EXPRESSED IN HBL100, SIGNAL = 0.82; EXPRESSED IN BONE MARROW, SIGNAL = 2.5
ttccaaaacaaacagaggggagtgccatgcaatttccattacacacacttcaccattagtatcagggtttattagcttgacaatgctccaggagtaatggtttcattcctcagtgaaatgaaataatgtgccacataactcagcaatgcagaacttctgaaaaatgttgtcacattaaacggtcatatttttcagtttccattatgccaaaacaaaggccatttgctgtaaagaactcactctgcatatggagaattcccacatgggcctcagacttacctcattgctatgtcatatgattctggatgaatacaagtttggtccaaaggatttggcttcagtaaaacattcactgcagttttgctcttctttttgccctgcttctcatttgtgacctcaacgtctgctgaagatgtcacagcaactccttgaatttggcctgaagtttcagtttgctgactatataaaaccagaa

SEQ ID NO: 3516 - DNA, 476 bp, Homo sapiens
  MAP TO AL034406.1; EXPRESSED IN FETAL LIVER, SIGNAL =   1; EXPRESSED IN LUNG, SIGNAL = 0.78; EXPRESSED IN ADULT LIVER, SIGNAL = 0.87; EXPRESSED IN BRAIN, SIGNAL = 0.92; EXPRESSED IN HEART, SIGNAL = 0.85; EXPRESSED IN PLACENTA, SIGNAL = 0.85; EXPRESSED IN BT474, SIGNAL = 1.4; EXPRESSED IN HELA, SIGNAL = 0.76; EXPRESSED IN BONE MARROW, SIGNAL = 0.78
caccaaaacccattggaaacctactctcaagtgcatatggatggaacattctccaggataaaccacatgctagacaataaaacaaatctcaataaatttaaagaatttaaatcaagcaaagtatatcctctgaccacagtagaactaatttgaaattaataacaaaaagaaatttaggaaatataaggaaattgaaatacacacttctaaataaccaaaggatgaaagatgagatcacaaggaaaattagaaagtagtttgagattaataaaaatgaagacatgaaacaccaaaatgcattgaatgcagctaaagaagtgcttaagggagaaattacagttgtaaaatactacactaaaaatgaagacagaaagacatcctgtgttcatgatttggaaaacaatattgttaagatgtcagtgctcaccacagcaattaacagactcaatgcaattcgaatcaatatcgcaattgcc

SEQ ID NO: 3517 - DNA, 440 bp, Homo sapiens
  MAP TO AF051976.2; EXPRESSED IN PLACENTA, SIGNAL = 3.6; EXPRESSED IN HELA, SIGNAL =   3; EXPRESSED IN HBL100, SIGNAL = 2.8; EXPRESSED IN HEART, SIGNAL = 2.8; EXPRESSED IN FETAL LIVER, SIGNAL =   3; EXPRESSED IN ADULT LIVER, SIGNAL = 4.2; EXPRESSED IN BT474, SIGNAL = 2.8; EXPRESSED IN BRAIN, SIGNAL = 3.1; EXPRESSED IN BONE MARROW, SIGNAL = 2.9; EXPRESSED IN LUNG, SIGNAL = 3.3
ctagagactgccatcccaggagcaacccagatgagcttgggatatggaatgctaactacctgattcaccagcatcctctcttcaacctctccaagtccaccccatccctccagccccgctccaggaggctgccctgcctattctgtctccacggacttctagagagggaggggcccttagtccagcctcctggctcctatctgcctcagtgccttcctcctgtccttagctgttccttaaggaacacctataccagctgctggagagtatgcgagagcatgtcctgaatctggcagccctcactctgcagcgctgcctccgtggcttcttcattaagcggcgattccgctctctgcgccacaagatcatcctgctgcaaagccgggcccgtggctaccttgccaggtgaggcacagaaaaggcaggattcctaggagacc

SEQ ID NO: 3518 - DNA, 382 bp, Homo sapiens
  MAP TO AL022097.1; EXPRESSED IN HEART, SIGNAL = 1.1; EXPRESSED IN BT474, SIGNAL = 1.1; EXPRESSED IN FETAL LIVER, SIGNAL = 1.2; EXPRESSED IN ADULT LIVER, SIGNAL = 1.2; EXPRESSED IN BONE MARROW, SIGNAL = 0.91; EXPRESSED IN LUNG, SIGNAL = 1.1; EXPRESSED IN HBL100, SIGNAL = 0.95; EXPRESSED IN HELA, SIGNAL = 1.2
tagcaggtggctgaacacacagcagctaaatccctggctaagggtctgtggaaggagtgtttccacgtggcaggcatggggacaggcacctccagtcctgttccatactccttcacccttcctgacattgattcccaggtccctcacctagttgggagttctcttctgacatcgctgagtattttttgggtggaagggaaagaaacttgagggcatgtaggcctaggatcttttctttgcagggatggggacccttcagtgtagggcatagtacttggagagtgttttcttgttgagtatcacaagaggagagggagctggtacctttgaagttcccctcgatgagcagaggattcgtgcctgaagcacctttgtcattccc

SEQ ID NO: 3519 - DNA, 493 bp, Homo sapiens
  MAP TO AL035466.3; EXPRESSED IN PLACENTA, SIGNAL =   1; EXPRESSED IN HBL100, SIGNAL = 1.1; EXPRESSED IN HEART, SIGNAL =   1; EXPRESSED IN BT474, SIGNAL = 0.99; EXPRESSED IN HELA, SIGNAL = 0.83; EXPRESSED IN BONE MARROW, SIGNAL = 1.1; EXPRESSED IN FETAL LIVER, SIGNAL = 0.89; EXPRESSED IN LUNG, SIGNAL = 1.3; EXPRESSED IN ADULT LIVER, SIGNAL = 1.2; EXPRESSED IN BRAIN, SIGNAL = 1.3
tcctttaggtgcatcattaaattgtgtatttgaaatctttctacttttttgatgtaggtgtttattgctataaacttccctcttagtactgcttttgcaatatcccgtaggttttttgtatgctgtgtttttatttcagttcgcttcaagaaaattttttatttacttcttaatttttttccttgacctaatggatattcaacagcatgttgttaaatttccatgtacttgtacagtttgcaaagttcttgttattgatttctagctttattccattgcagtttgagaagatatttaatatgatttcaatttttaaatatttgtccatgtcccttgagacccaggtggtcgtactggtggtggtggtgtctacagagggctgggtgcaccagtcctcaggcccacaggtgctgcacatgagtggtttgcaagctgtggtggtagtgaaaggtggcatggacctgatctcaaatgctgaaaggaatgctcaggt

SEQ ID NO: 3520 - DNA, 462 bp, Homo sapiens
  MAP TO AC008166.1; EXPRESSED IN BT474, SIGNAL = 0.84; EXPRESSED IN HELA, SIGNAL = 0.7; EXPRESSED IN BRAIN, SIGNAL = 0.71; EXPRESSED IN BONE MARROW, SIGNAL = 0.82; EXPRESSED IN HBL100, SIGNAL = 0.67; EXPRESSED IN FETAL LIVER, SIGNAL = 0.82; EXPRESSED IN LUNG, SIGNAL = 0.83; EXPRESSED IN ADULT LIVER, SIGNAL = 1.2; EXPRESSED IN PLACENTA, SIGNAL = 0.91; EXPRESSED IN HEART, SIGNAL = 0.89
ttgaactcacagccaaaagcactataattcacgctaaacaaagcttgtctaacactcatattttctcattgtaaggcacatcatagtcttcttgtgcttcttgtctatttcatcataaacagcacttcaccactggttgggttaagatggttagaccatcttaaaagtaaaatcaccaagtaaaaggatgaaaattcaaagctcttggcactaactaggctgcaaaaaggacactcgtttataacatgagagctgaaacaagaaggcagactgctgttttgccttcttctcacatgactggaatatgtggtttgaacaattcacatttttcaatgttctgtacatgtccgtgaattacagcaaacacaccatgagtattggcctggggattatcaacatatttcatagtgagtagtaaaattcacaaatatgaaatccataaataatgaggactaactgtgc

SEQ ID NO: 3521 - DNA, 487 bp, Homo sapiens
  MAP TO AC007967.2; EXPRESSED IN BT474, SIGNAL = 0.65; EXPRESSED IN BONE MARROW, SIGNAL = 0.78; EXPRESSED IN LUNG, SIGNAL = 0.67; EXPRESSED IN ADULT LIVER, SIGNAL = 0.95; EXPRESSED IN PLACENTA, SIGNAL = 0.86; EXPRESSED IN FETAL LIVER, SIGNAL = 0.67; EXPRESSED IN HEART, SIGNAL = 0.93
aaattcctcttcctttgaatacctcaaaaaattaatggaggaagttagtatctacctctctccacaaaaccaacaggtttcttttagcaagacacaggtaacgatgcagaaataacatgtcaattttcgatttgaaaacaaggtttggtatgcaataactattattttgaatacttgctttaatatctgcttctggctcttttttccagatcaactttccccaccatctcctgtagatgccacataacttgagctaccacatgtttcacgaggagcagggtgcaccctacctagagaaggtggattccttaggtcttttctgccaacatgctcatgaccacaggaataaaaatcaccacatctccttgcgtaactctcttgacttctgccgtatctatctcatgtattgttataatcatggcggcttcttccaccgtaagacaactgaggccctcatgctggtggtgcaccatgagaggtacctgca

SEQ ID NO: 3522 - DNA, 489 bp, Homo sapiens
  MAP TO AL022397.1; EXPRESSED IN HBL100, SIGNAL = 2.6; EXPRESSED IN LUNG, SIGNAL = 0.84; EXPRESSED IN BRAIN, SIGNAL = 0.69; EXPRESSED IN PLACENTA, SIGNAL = 0.85; EXPRESSED IN BONE MARROW, SIGNAL = 0.7; EXPRESSED IN HEART, SIGNAL = 0.87; EXPRESSED IN ADULT LIVER, SIGNAL = 0.72; EXPRESSED IN HELA, SIGNAL = 0.76; EXPRESSED IN FETAL LIVER, SIGNAL = 0.63
tggaagctactggaagataggctttataccaaaatgagaaagtaaaaaaacaaacaaaaaagactgttgagtttgtaatatacttacatacataaattaatagaaaattaaaggtgctgtgatgataagaccagagttaggataacagttaacggctctagatttcaatgagattggtaccagaagttgaacatgtaagcactcaaactatagacacaatccacaaaattacctaatgaatgctaggaattgttacatttacctatttgacaagctacctattactgttcaactaaaccaaacaattttcctgcctcaacagttaactcatcttcctgcctctcatttccaccagctccaatccattcttcatagacttaatagggttatcttcctaaagcaaaagtcaggtcatgtaaagcttttagtttaaaatcttctaatggccttcactgcctaaaaagcagtcctaattgcttggcccatcag

SEQ ID NO: 3523 - DNA, 454 bp, Homo sapiens
  MAP TO AL034406.1; EXPRESSED IN BT474, SIGNAL = 0.6; EXPRESSED IN HELA, SIGNAL = 0.65; EXPRESSED IN PLACENTA, SIGNAL = 0.74; EXPRESSED IN FETAL LIVER, SIGNAL = 0.64; EXPRESSED IN LUNG, SIGNAL = 0.7; EXPRESSED IN ADULT LIVER, SIGNAL = 0.87; EXPRESSED IN BONE MARROW, SIGNAL = 0.73; EXPRESSED IN BRAIN, SIGNAL = 0.79; EXPRESSED IN HEART, SIGNAL = 0.84
tgtcattagtctgcccatgcctcccccacactgtgcacatgattgcaagacaggaaatagaattaaaagtgagatctgtggtcatagaatgaaaacaaacaaacaacaacaaacctggcaggcctagtcacaaactaaacccatcaatactgtatgctaactaactgagtcaatgagctgagttactactgaagatccagtgggattgtaaatattttatcaaaatttgcatgaaattgacacctttgtccttttctaaatcacgattcttacctttataacagaggtaccagctctggagagtggactgtgaatctgtgctgcagcagccatgttggcaatagtattgagatggttcatctgattcattgccatggcaactgatgcaggaggtaagctgactggaagtaggggatgaggcatcatcataaatggcagatccagtcctaaaaga

SEQ ID NO: 3524 - DNA, 378 bp, Homo sapiens
  MAP TO AC007480.1; EXPRESSED IN BT474, SIGNAL = 1.1; EXPRESSED IN FETAL LIVER, SIGNAL = 1.3; EXPRESSED IN BRAIN, SIGNAL = 1.3; EXPRESSED IN LUNG, SIGNAL = 1.4; EXPRESSED IN HBL100, SIGNAL = 1.3; EXPRESSED IN HELA, SIGNAL = 1.5; EXPRESSED IN PLACENTA, SIGNAL = 1.2; EXPRESSED IN HEART, SIGNAL =   1; EXPRESSED IN ADULT LIVER, SIGNAL = 1.6; EXPRESSED IN BONE MARROW, SIGNAL = 1.3
tgtctccattccttcactgctaaaattatagtggctatctcatagggttatgatgaaattaaattaattaacacatgtaaaatgcttggaagcatttaatgtggtatttaatatgtactaaatatataccagtctttggtgactgaagtaatagtagtgccacaaaagtgagcatagcaagtatattttaaaacatgttcatttcagtcgtcacagagtttaaaaagtaaaagacagctttacctctcctccacattcctgggagattggctgccatggttgctgttcccaatgaaatttcgaatttctgtgaagtaagcatcttctttgtcatccagaatcgcacctgtactttccagttcagaatgaggcgacgat

SEQ ID NO: 3525 - DNA, 349 bp, Homo sapiens
  MAP TO AJ010597.1; EXPRESSED IN HBL100, SIGNAL = 0.7; EXPRESSED IN FETAL LIVER, SIGNAL = 0.75; EXPRESSED IN LUNG, SIGNAL = 0.95; EXPRESSED IN ADULT LIVER, SIGNAL = 0.92; EXPRESSED IN BRAIN, SIGNAL = 0.97; EXPRESSED IN HEART, SIGNAL = 0.96; EXPRESSED IN PLACENTA, SIGNAL = 0.9; EXPRESSED IN BT474, SIGNAL = 0.71; EXPRESSED IN HELA, SIGNAL = 0.94; EXPRESSED IN BONE MARROW, SIGNAL = 0.92
ttggtagaaagggggaacagaatgtaagaaagggaatataaacaaagagaagattgtacagataatggcttaaataatcttttggctgctggcaacattagcctgtctttaggttagacatcaaccccacagctagtcaggattatttttgtcctattcacttggtacttttatgtagaaagtactgattgcagctgttccccactagggtgtcactgaatgagttagctatttggaggtgtatgttcttctctgtagctctgggacatgtcgttgaagtggtatgggtgctcatgatgatccttagccccttagcacctttccatttggatgccgagaagtaaggtgc

SEQ ID NO: 3526 - DNA, 495 bp, Homo sapiens
  MAP TO AC006009.2; EXPRESSED IN BRAIN, SIGNAL = 1.2; EXPRESSED IN HEART, SIGNAL = 0.81; EXPRESSED IN BT474, SIGNAL = 0.72; EXPRESSED IN PLACENTA, SIGNAL = 0.69; EXPRESSED IN FETAL LIVER, SIGNAL = 0.68; EXPRESSED IN LUNG, SIGNAL = 0.93; EXPRESSED IN ADULT LIVER, SIGNAL = 0.79
tcaccaagagcaagttggccagcaccattcacattcaatggccagtggagcacatgtgtgagaatgactgagttggtgacaaggaatttgtatttaccccttacacaaccaaatcctatcacaatactttctgtgttatagacaattagatttaataaattagaggtgtatactgggcttgtgggaaataacaaattattttatgtaatttatgaacataaagttcacatatggcatactgatctaccttaatcatgaatccaaagaagttaaaactgttctaccctggacacacaggctgaccacaactcacccttcccagttctttatcttccagggccagaactccagtgctttctgtgaagagtttcactttgaccacaggccgaggatgggtggtggtgaaatctccttgagtcccccatctgtaatgaagtaaaaaaaatgtttcttaaaatgcagcattatttttttccccaaggagatgtgtctcca

SEQ ID NO: 3527 - DNA, 369 bp, Homo sapiens
  MAP TO AC008009.4; EXPRESSED IN HBL100, SIGNAL = 1.7; EXPRESSED IN ADULT LIVER, SIGNAL = 0.84; EXPRESSED IN HEART, SIGNAL = 0.98; EXPRESSED IN BT474, SIGNAL = 1.4; EXPRESSED IN FETAL LIVER, SIGNAL = 1.1; EXPRESSED IN LUNG, SIGNAL = 0.74; EXPRESSED IN HELA, SIGNAL = 1.1; EXPRESSED IN BRAIN, SIGNAL = 0.69
ctccctgagagcaaggactgtcatcttcactttgccttgaaaagtagacataggtcccaaattatctgctaaatgagtaatgaacaatatttctattcagaaggtgtgtgcttgcccataattaatacgcaaatattctaaactataatctgatttaaaatccccaaatttaaacaagaaaattataccaaggctttgagatttagcttgtgctaaatcattttttaaaattgtagctctgaggcattttattataaaaacttagtactcatatacataaactaatacgaacttaaaattcatcatacatttacttcattttttagcttgaccttctagtaaatctttagcttcattgattttggctgc

SEQ ID NO: 3528 - DNA, 254 bp, Homo sapiens
  MAP TO AC007539.8; EXPRESSED IN HELA, SIGNAL = 1.3; EXPRESSED IN BRAIN, SIGNAL = 1.1; EXPRESSED IN PLACENTA, SIGNAL = 0.88; EXPRESSED IN HBL100, SIGNAL = 0.7; EXPRESSED IN LUNG, SIGNAL = 1.2; EXPRESSED IN ADULT LIVER, SIGNAL = 1.3; EXPRESSED IN HEART, SIGNAL = 1.1; EXPRESSED IN BT474, SIGNAL = 0.7; EXPRESSED IN BONE MARROW, SIGNAL = 0.7; EXPRESSED IN FETAL LIVER, SIGNAL = 0.7
gtcaattttcaaagggcgtgggtgtgggtagttaacacagggacatataaagcataacggaagaaaacaaaaaaataactacctgctgaaggcatgtagtaacgcttccggaaagagagcgtggcactgtgtgatctggagagtgtggcacactgtgatccggagagtgtggtacagtgtgatcttgaggttgtgatacagtgttatctggagagtgcggtacgacgtaatctggagaaggtggcacactgtga

SEQ ID NO: 3529 - DNA, 398 bp, Homo sapiens
  MAP TO AL021917.1; EXPRESSED IN BT474, SIGNAL = 1.1; EXPRESSED IN BONE MARROW, SIGNAL = 1.1; EXPRESSED IN HBL100, SIGNAL =   1; EXPRESSED IN HELA, SIGNAL = 1.1; EXPRESSED IN FETAL LIVER, SIGNAL = 1.3; EXPRESSED IN BRAIN, SIGNAL =   1; EXPRESSED IN LUNG, SIGNAL = 2.4; EXPRESSED IN PLACENTA, SIGNAL = 1.1; EXPRESSED IN HEART, SIGNAL = 1.3
aatgtttttccccaattcccactgcctgtcacactttctgtttctgtcagacaggaagtgatcagtaaatgtttgtggcatgaacagctttgtggcgtggggaagctcccctaaagcagtgagtagccttcaggtccctgctttgagccttacatgcattgtagagacccaggttgaccgcagagactcacacagtagagactcacacatcccccttcatcacctgccacagctcagctcagtaaagctgaggccaagcagggtactgacctgcgatggatatgctggctgtcttttccaggccgaggagggaatttctgatgatgcaggatacacccccaccagagctgcctctcatgatcacagatgctgctactgcatacaggcccactccatct

SEQ ID NO: 3530 - DNA, 480 bp, Homo sapiens
  MAP TO AC008177.1; EXPRESSED IN PLACENTA, SIGNAL =   1; EXPRESSED IN FETAL LIVER, SIGNAL = 0.96; EXPRESSED IN LUNG, SIGNAL = 1.3; EXPRESSED IN HELA, SIGNAL = 1.1; EXPRESSED IN BRAIN, SIGNAL = 1.1; EXPRESSED IN HEART, SIGNAL = 1.1; EXPRESSED IN BT474, SIGNAL = 0.8; EXPRESSED IN BONE MARROW, SIGNAL = 1.3; EXPRESSED IN ADULT LIVER, SIGNAL = 0.87; EXPRESSED IN HBL100, SIGNAL = 0.78
ggataaatgcttgaggtgatggatactccacttaccttgatgtaattactatgcattgtatacttatatcaaaatatctcatataaccataaatatatatacctactatgtacccacaaaaattagagataaatatggtagactttttgaaaggtactaaataggatgtcttgtacataagcattcagtaaacgtttgcagctattgtttcctaataagttgattaatttgatttaccttaagctgtcattgaaaccttccactgcatatttggatggagtatagccccctccaacgattgcaaggcgacctccaacactggagacattaataactctcccttgagctttcttgaccaaaggaagcatatttagtgtcacactgatgagtccaaacaggttcacttcaataggttctctgtagtcctctagtgtcagccagtcagtgggagccagcacgccgggaacaccagcattattg

SEQ ID NO: 3531 - DNA, 377 bp, Homo sapiens
  MAP TO AC007717.1; EXPRESSED IN HBL100, SIGNAL = 0.93; EXPRESSED IN LUNG, SIGNAL = 1.2; EXPRESSED IN BRAIN, SIGNAL =   1; EXPRESSED IN PLACENTA, SIGNAL = 0.99; EXPRESSED IN BT474, SIGNAL = 0.92; EXPRESSED IN BONE MARROW, SIGNAL = 3.3; EXPRESSED IN HEART, SIGNAL = 0.99; EXPRESSED IN ADULT LIVER, SIGNAL =   1; EXPRESSED IN HELA, SIGNAL = 1.2; EXPRESSED IN FETAL LIVER, SIGNAL = 1.1
aaccatatttaaatgaccattgtgaatttctatttcaaaacagttaaatacacggtccaattagaatgactcgttctgaaagtacaaggaagcataaaatgaaaatagacatactgtatgtagttttgggtctcaaaacatgtacagccatctctttttcttccacatgtatatgtgtatatctatttattgcatattacatgtatgtatatacctatacattacatatatatgtatacatgtatatttatgtaaatataaaatatcctttatacctcttcatacctctgacaacttttggaagcacgtaattgattacctcctgaaatctctgggtagaatagttacatgttaggcggcacttttcatgatttggg

SEQ ID NO: 3532 - DNA, 477 bp, Homo sapiens
  MAP TO AC007630.3; EXPRESSED IN FETAL LIVER, SIGNAL = 0.86; EXPRESSED IN HEART, SIGNAL = 1.1; EXPRESSED IN BONE MARROW, SIGNAL =   1; EXPRESSED IN PLACENTA, SIGNAL = 0.84; EXPRESSED IN BT474, SIGNAL = 0.82; EXPRESSED IN LUNG, SIGNAL = 1.2; EXPRESSED IN HELA, SIGNAL =   1; EXPRESSED IN ADULT LIVER, SIGNAL =   1; EXPRESSED IN BRAIN, SIGNAL =   9
tgaggctttagtgcaatcccaatgtattagcattttatgattctttgtattcattaaaatgtttttcacaaaaatattggaaagtttcccaaagtcctcctcatgttcctcctggtgtatatcaaacagaatattggactcatctactcaaatcatagttagaattgtattttgtaagaggctatttccttggaagttattcaaaagatacatgtagggaaatattctgatttataaggtcaatctttctctgtcacaaatcaattataagtaaactgttttcagaactgtcttttttgctatttataatagtcaacttgtgaagcacttaacacacagaaatgtgtctgacaccaagattattgttaagggctgttctttcctttttattcagcattgtacgcatgtaccatttacatttattacgtggataatgggaattcatggtcttgaaggcatagagtgaagaaattactt

SEQ ID NO: 3533 - DNA, 452 bp, Homo sapiens
  MAP TO AL008730.1; EXPRESSED IN BONE MARROW, SIGNAL = 4.7; EXPRESSED IN HBL100, SIGNAL = 4.6; EXPRESSED IN BT474, SIGNAL = 4.5; EXPRESSED IN ADULT LIVER, SIGNAL = 5.1; EXPRESSED IN FETAL LIVER, SIGNAL = 5.4; EXPRESSED IN BRAIN, SIGNAL = 4.2; EXPRESSED IN LUNG, SIGNAL = 5.3; EXPRESSED IN PLACENTA, SIGNAL = 4.3; EXPRESSED IN HEART, SIGNAL = 4.5; EXPRESSED IN HELA, SIGNAL = 5.3
gagcaaatggctcagagaggggctctctcaaatagatgtgcttttgcctaccattttccacaaccatcactaataaacctctaatgaaagcccgaatcactgagtgagtctgtgtcgtggcaaaaaggcactgcaacaccaacagtaagaagcaccctccctccctccagctggttctgagctgccagtcactgcactcgactgccctgtcttctgcgtgtacacattagcacagtcagtaggaacagacccttcagcacaaagcaaacatcaggctgcagacaaaaggaaaagtgcaacaccccagcctgctgagactcccgtcccccactggctccctccaaaagaagcagccgacacggacacgctggcagcaatcaatttcgatcttgttaaagcacaacgtgtcccagtggccggtatagattctgtcagtggagaacaaatcacgg

SEQ ID NO: 3534 - DNA, 474 bp, Homo sapiens
  MAP TO AL035667.12; EXPRESSED IN PLACENTA, SIGNAL = 0.7; EXPRESSED IN FETAL LIVER, SIGNAL = 0.8; EXPRESSED IN LUNG, SIGNAL = 0.98; EXPRESSED IN HELA, SIGNAL = 0.94; EXPRESSED IN BRAIN, SIGNAL = 0.77; EXPRESSED IN HEART, SIGNAL = 0.94; EXPRESSED IN BT474, SIGNAL = 0.78; EXPRESSED IN ADULT LIVER, SIGNAL = 0.96; EXPRESSED IN HBL100, SIGNAL = 0.8; EXPRESSED IN BONE MARROW, SIGNAL = 0.8
ttgtcatttatttctttgaccccatgtagatttttttccactccaaaaacacagcattgaatccagacagttccttaggagggcattgccagccctcacagcaagtaacagttctaacggtccaaatttctttgcagaaattattttctttttgttttctccttccttttttttttttttcttcttgcttacacaggcactggtctggccccttctggaaggaagctggataagcctgtcccctgtttcccctgcagcttttctcttgagaaagagaaataggactgttctgggcaccatatgtttttttctcaccgtcatccttctcagcatgaaggaagaggttgggcaggagctgtgcaaagaaggagaataagttcagggggcaggggaaaggcacttgaaaaggcaagagatgggtgcggctcttctggaaaacaggcagatctttcttctgcctcttcagctcagctt

SEQ ID NO: 3535 - DNA, 439 bp, Homo sapiens
  MAP TO AJ009614.1; EXPRESSED IN BONE MARROW, SIGNAL = 0.98; EXPRESSED IN LUNG, SIGNAL = 1.1; EXPRESSED IN PLACENTA, SIGNAL =   1; EXPRESSED IN HELA, SIGNAL =   1; EXPRESSED IN HBL100, SIGNAL = 0.94; EXPRESSED IN HEART, SIGNAL = 1.2; EXPRESSED IN FETAL LIVER, SIGNAL = 1.5; EXPRESSED IN ADULT LIVER, SIGNAL = 1.3; EXPRESSED IN BT474, SIGNAL = 1.2; EXPRESSED IN BRAIN, SIGNAL =   1
caagagctgagcattaggggtgctttttgctactgggatgccatttcttttagcccctctcagctgacagagcaaggaaatgtctaccaaaccctgcagattcacgtacacttatgtatacatacgtttctagacctatatatccatatccatgtgaagctaagcatgagttctgtatctatgtagctgtatctatttgaagctaagcatgagttcatactgatgtctccaaccctaatccagggccacaagcaccatgccggcctcctgctgctcctacctcagcagtgagaagctgctgccaggatctgtcatccgcgcatctgattgtccagttccagcgcacctgcatcctgatttcagagctgctaacctgtacacccatgagaaacaacctcatcagctactatgccatgcttggacgcagttacccatgtct

SEQ ID NO: 3536 - DNA, 468 bp, Homo sapiens
  MAP TO AC008167.1; EXPRESSED IN BONE MARROW, SIGNAL = 1.4; EXPRESSED IN HBL100, SIGNAL = 1.5; EXPRESSED IN PLACENTA, SIGNAL = 1.1; EXPRESSED IN BRAIN, SIGNAL = 1.3; EXPRESSED IN HELA, SIGNAL = 1.4; EXPRESSED IN LUNG, SIGNAL = 1.4; EXPRESSED IN BT474, SIGNAL = 1.2; EXPRESSED IN HEART, SIGNAL = 1.3; EXPRESSED IN ADULT LIVER, SIGNAL = 1.1; EXPRESSED IN FETAL LIVER, SIGNAL = 1.1
tgtgtgtggtctgctaagccatttgcccttccgccactttcagtctttgtggattgtgatttgggctaatagaggtcctttagtgatatcaaagatgtactggatttttgtttcatggtttccatgatttaagtgtgatttctcagagatgaacaggcagagagatccttgctatgttgtctcaggatctatgtttttaaccactgacgctttttatttttctataaatggtattgatttttttttctttgccttttcgcctttttctagttggagctcagctgcatggaaggcagctgcacgtgttcgttcccaaccagtgagctggagaaggtgctcccccagaccatcctgtataagtactatgagcgaaaagccgaggaggaggttgcggcagcctacgccgacgagcttgtcaggttcgttctcaggcagagcgtgccatctgccaactcttccccattgtga

SEQ ID NO: 3537 - DNA, 447 bp, Homo sapiens
  MAP TO AL035417.15; EXPRESSED IN FETAL LIVER, SIGNAL = 1.2; EXPRESSED IN HELA, SIGNAL = 1.5; EXPRESSED IN ADULT LIVER, SIGNAL = 1.2; EXPRESSED IN HEART, SIGNAL = 1.1; EXPRESSED IN PLACENTA, SIGNAL = 1.1; EXPRESSED IN BT474, SIGNAL = 1.1; EXPRESSED IN LUNG, SIGNAL = 1.3; EXPRESSED IN BRAIN, SIGNAL = 1.3; EXPRESSED IN BONE MARROW, SIGNAL = 1.3; EXPRESSED IN HBL100, SIGNAL = 1.1
ttcttcctctccccttctcctctcgcttctccttttctcagtggagaccactcagagacagcaaatacaaccccccaaccccctcaggaacctctcagcataatgggagacaaaatccatgttacaggtgccattcacagtatgggggatttaaaggagggatgagccaggaaagactataaaggaaggtactttttgaattgaatgttgaaagaggagtgtgtgttcaaattaggacaaaatgtgggagaaggcagagggcgttctaggcaggctgaaggaactgcttcatcaaaggcttgaaggcatgaaacagcaatcccaggacttggtgggcagtaaggaagaggaaggaatcaagattgactcccacatttctggcctggtagaccaggtagatggtaatagctttcactgcaatttgggagcccaggagaagaagcagtt

SEQ ID NO: 3538 - DNA, 396 bp, Homo sapiens
  MAP TO AL009048.1; EXPRESSED IN BT474, SIGNAL = 1.9; EXPRESSED IN BONE MARROW, SIGNAL = 2.1; EXPRESSED IN HBL100, SIGNAL = 2.6; EXPRESSED IN HELA, SIGNAL = 2.8; EXPRESSED IN ADULT LIVER, SIGNAL = 2.1; EXPRESSED IN FETAL LIVER, SIGNAL = 2.6; EXPRESSED IN BRAIN, SIGNAL =   2; EXPRESSED IN LUNG, SIGNAL = 2.3; EXPRESSED IN PLACENTA, SIGNAL =   2; EXPRESSED IN HEART, SIGNAL = 2.1
cacctggtagcagctatgccaaattgcatatactgcccctcacaacaggggttatccccaaaatctatgttcaagaagaacaatgcctactggtaatgaaagacagtcctttcccagatgctggattcagagctaaatcagaggtgaagtgattgacccagagtattttgccaccaacttactgttctatttttttgatgcatatttgcattataatgtggaatatggggcatctccatgctcttccataggtacccagtgtacaaacagatgtggttcacacacagccaatcgtttttgtgtgtttcctacagcatgggcatctatgatgacatttcccacaaatgttttttcccgatgctgagaatacctaacaggtgaggggtcctgtacaga

SEQ ID NO: 3539 - DNA, 479 bp, Homo sapiens
  MAP TO AC007952.1; EXPRESSED IN BT474, SIGNAL = 0.76; EXPRESSED IN BONE MARROW, SIGNAL = 0.83; EXPRESSED IN HELA, SIGNAL = 1.2; EXPRESSED IN ADULT LIVER, SIGNAL = 0.85; EXPRESSED IN HEART, SIGNAL = 1.2; EXPRESSED IN PLACENTA, SIGNAL = 1.2; EXPRESSED IN FETAL LIVER, SIGNAL = 0.65; EXPRESSED IN LUNG, SIGNAL = 1.1; EXPRESSED IN BRAIN, SIGNAL = 1.1; EXPRESSED IN HBL100, SIGNAL = 0.83
  unsure 136
  unsure 145
  unsure 262
gtgggagaagatggagcaacatgagcaaagggtgaggaatgagaagaactaagcaaatgtgcaggagaaataaatggagcttctagaaatttaacacctggtaacatattaaaaactcaatggagagtttaaacgnacagtttangacaaagctgaatagagaattcatgatctggaagatggatttgaagaaattatccagaattcaacccagaaagaaaaataaatggaaaatgggggcaggggggaaagaagaattcanacctgagaaagctgaaggaggaggaggaggaggaggaggaggaggaggtggcagcagtagcaaggagaaggagaagaagaaggaggaggagaaggagaaggatgaggaggagggagaggagaagaagaagaagacgaagaagaagaggaggaggagaaagaggaggaggagaaaacaaagaaaaaaagtggttaggagccagggagaatacaacagg

SEQ ID NO: 3540 - DNA, 456 bp, Homo sapiens
  MAP TO AL033397.7; EXPRESSED IN PLACENTA, SIGNAL = 1.3; EXPRESSED IN BONE MARROW, SIGNAL = 1.4; EXPRESSED IN HBL100, SIGNAL = 5.8; EXPRESSED IN ADULT LIVER, SIGNAL = 0.85; EXPRESSED IN BRAIN, SIGNAL = 0.78; EXPRESSED IN BT474, SIGNAL = 0.92; EXPRESSED IN FETAL LIVER, SIGNAL = 1.7; EXPRESSED IN LUNG, SIGNAL = 0.94; EXPRESSED IN HELA, SIGNAL = 0.6; EXPRESSED IN HEART, SIGNAL = 0.95
cttttgtgagtttggtgggggaaagaaaggggatatagatggtatttcaaaaggtatatatgtcaatgtctacatataacatgacacagaaataaatctatgagaagtctatctacaaaaaaaaaaggtgatatgtctgaagcactgaaataactgatcaggttattttttgtgcagtgtatgtttgaatttttcaccactaggcaaataagaaaatactgaacaataaaaaaaaaaattagaatcagtgagataaacagtaagaatcgtaaaataagagtacttgaaaccgattttttatttgtccaagttctttactgcactgggtaaatgaaagtcttatgaaatttcttttgtgttctccacaggtacagaaaactgcctccccatgttggtttgtgaagtgaaatgcatataaaacagaggattccagactctcagaagtcaatacataaa

SEQ ID NO: 3541 - DNA, 406 bp, Homo sapiens
  MAP TO AL021997.1; EXPRESSED IN PLACENTA, SIGNAL = 7.6; EXPRESSED IN HELA, SIGNAL = 8.3; EXPRESSED IN HEART, SIGNAL = 7.4; EXPRESSED IN BONE MARROW, SIGNAL =  11; EXPRESSED IN HBL100, SIGNAL = 7.8; EXPRESSED IN BT474, SIGNAL = 6.8; EXPRESSED IN ADULT LIVER, SIGNAL =   9; EXPRESSED IN FETAL LIVER, SIGNAL = 8.3; EXPRESSED IN BRAIN, SIGNAL = 6.5; EXPRESSED IN LUNG, SIGNAL = 9.5
acatggctatagggaagggggaagaattgaggccattaacatactctgccatagccttttcccagttgctaaacatatgtaagtcagtaactatatatacattttattaacataaatgatagaataccattcatgtttccatactttgcttttttccccactactttatgatttatttccattaatatataatgctctatcatcaggtgtcttctcctaaggaagattaaatcagaaaattttaaatcacagttatccctttacttaaagccagagtaagccttccaaattaaccccaggaatggcttcaacagaggaacagtacgatcttaagattgtgaaagtggaggaagaccctatctgggaccaagaaacccaccttcgagggaacaacttttctggccaa

SEQ ID NO: 3542 - DNA, 489 bp, Homo sapiens
  MAP TO AB026898.1; EXPRESSED IN HBL100, SIGNAL = 0.97; EXPRESSED IN HELA, SIGNAL = 1.1; EXPRESSED IN HEART, SIGNAL = 1.2; EXPRESSED IN LUNG, SIGNAL = 0.97; EXPRESSED IN BONE MARROW, SIGNAL = 1.1; EXPRESSED IN BRAIN, SIGNAL = 1.1
gtctgtgcaagccagatgtctgggcccaatcataggaggaaactgcctctgcttctcctctccacctctccctttccctctcttctcagagcccagtgaggtcggggattttgagttgaactttactgggggtgtccctggccccacaagccaggacctgctgtgtgaaatcgaagactcgccctcgccagtggtgttacacattgaggctgtctttaaggtgctgcaggtggagctgggcagtggggtgggcccagagaggtggcagggctgggacactgagccatccccaggtggcccagtgacaggccctctgggtgtctcaggggcctgccctcatcatcaacgtctcagcccttcagtttggtctgctccgcctggggcagaaagccacaaactccatccagatccggaacgtcagccagctcccagccacatggcgcatgaaggagagcccagtctccctccaggaaaggcctgaggatgtaa

SEQ ID NO: 3543 - DNA, 457 bp, Homo sapiens
  MAP TO AC007966.2; EXPRESSED IN BT474, SIGNAL = 0.61; EXPRESSED IN BONE MARROW, SIGNAL = 0.96; EXPRESSED IN HBL100, SIGNAL = 0.71; EXPRESSED IN ADULT LIVER, SIGNAL = 0.88; EXPRESSED IN PLACENTA, SIGNAL = 0.78; EXPRESSED IN FETAL LIVER, SIGNAL = 0.91; EXPRESSED IN LUNG, SIGNAL =   1; EXPRESSED IN HELA, SIGNAL = 1.1; EXPRESSED IN BRAIN, SIGNAL = 0.99; EXPRESSED IN HEART, SIGNAL = 1.2
acatagcatttgcattgtattaggtgttataagcaatgtagaggtgattcaaagtatacaggaggatgtgcaaaggtgatatgcaaatactacttcattttatatcaggaatttgagcatctatagatgttggtgtctctgtgaggtcctggaaccaatcccccatgaatagcagagagcaactgtatatcttttatttggctgcttttataatttactatacaccttttgattttcagaagctttttgtacattgtgactagttgtgtctttctgtatgtttatcttgcttgattttcatgagattttactttgatgtttgtctttatatttagaagattcttatccttttcctctttagaaggttgtttctctgttccattctcttcctcttctgggatcctaataatatatatatttagtaatttaaatcaagccccatgtgtttaatatcctc

SEQ ID NO: 3544 - DNA, 437 bp, Homo sapiens
  MAP TO AL021154.1; EXPRESSED IN BT474, SIGNAL =   7; EXPRESSED IN FETAL LIVER, SIGNAL =   9; EXPRESSED IN LUNG, SIGNAL = 7.6; EXPRESSED IN HELA, SIGNAL = 6.4; EXPRESSED IN HEART, SIGNAL = 6.2; EXPRESSED IN HBL100, SIGNAL = 5.8; EXPRESSED IN ADULT LIVER, SIGNAL = 8.4; EXPRESSED IN BRAIN, SIGNAL = 6.9; EXPRESSED IN BONE MARROW, SIGNAL = 6.1; EXPRESSED IN PLACENTA, SIGNAL = 7.8
gcattcattccacaaacgcgggccaaatctccgaaccagccgcaagcgggagggggcctctctgcagccggggggaagaaagttcaggactgaggcgggaagcctgcctctcagaaggggagtgactcggggggcacacttgtggggctccgaagatgaaaacgcaaactgaggctggaaggcgctaggcaaacacatatgtgatgaggcggtcacgcggggcacttggggtacgtcccccgacctgtggagtttgtcatcgaagagacctcgaggccccccaaaacggtccctcgggccttcccccgcctcgacggtgaggacgcagctgttggagatgcgctcggtcctcccagacctagggagggggcaggtttcggggcgcggtgaagggccatcgcagctcgggtgcgacacgcctgtggaggtcaaggcca

SEQ ID NO: 3545 - DNA, 410 bp, Homo sapiens
  MAP TO AC006034.2; EXPRESSED IN PLACENTA, SIGNAL = 1.2; EXPRESSED IN BT474, SIGNAL =   1; EXPRESSED IN HBL100, SIGNAL = 0.77; EXPRESSED IN LUNG, SIGNAL = 0.79; EXPRESSED IN BRAIN, SIGNAL = 0.86; EXPRESSED IN BONE MARROW, SIGNAL = 0.78; EXPRESSED IN FETAL LIVER, SIGNAL = 0.84; EXPRESSED IN HELA, SIGNAL = 0.77; EXPRESSED IN ADULT LIVER, SIGNAL = 0.81; EXPRESSED IN HEART, SIGNAL = 0.89
aacgtacttaacattgaaaagtcagaatttctttaataacagacttaaagtcactaacttagagttatattaaatatattacatatagttttatatcctcatccttcatcgtattatcttatttattcgtttattattatgatcctttagcaagatgataaaaaacggatatcaaatttccattagcaactttaggcatagtcgtcctaaataaatactacagaaaaactggcattgaagacagtaggtgtgcaagccacttacctccttgccttcagcgtcgatttctgtcctgtgttcttcttttatgtgttgtaggtttctgataccgcacagattacctttccaaatttttattgccagccgtattttagttagatcttgccagtgagaggtcctggaaagggaag

SEQ ID NO: 3546 - DNA, 433 bp, Homo sapiens
  MAP TO AC010092.2; EXPRESSED IN BONE MARROW, SIGNAL = 5.1; EXPRESSED IN LUNG, SIGNAL = 7.2; EXPRESSED IN ADULT LIVER, SIGNAL = 8.7; EXPRESSED IN BT474, SIGNAL = 5.8; EXPRESSED IN BRAIN, SIGNAL = 5.9; EXPRESSED IN HEART, SIGNAL = 4.7; EXPRESSED IN HELA, SIGNAL = 7.3; EXPRESSED IN HBL100, SIGNAL = 5.3; EXPRESSED IN PLACENTA, SIGNAL = 6.6; EXPRESSED IN FETAL LIVER, SIGNAL = 6.2
tgtcagagaaagaagctcggtctattgtaatgcagattgtaaatgcactaagatatctcaatgagatcaaaccccctattatacattatgatcttaagccaggtaattatgaaatttgtctaattttttttaaacttgagtatagtttttaaaagtcattcattaagttatctgaaaacatgttttttggtttctcttgtaagacatcagtaaaatactagtaaaattaaaagttattaaagttatgtttttcatgtatgtatcattaaaagaatcttatattttattcttaggaaacatcctactggtagatggaacagcatgtggtgaaatcaaaatcactgattttggtctgtccaagattatggatgatgatagctatggtgtagatggaatggatctaacttcccagggggcaggcacttactggtaa

SEQ ID NO: 3547 - DNA, 458 bp, Homo sapiens
  MAP TO AL031657.2; EXPRESSED IN LUNG, SIGNAL = 1.1; EXPRESSED IN PLACENTA, SIGNAL = 1.1; EXPRESSED IN BT474, SIGNAL = 0.82; EXPRESSED IN BONE MARROW, SIGNAL =   1; EXPRESSED IN HBL100, SIGNAL = 0.68; EXPRESSED IN FETAL LIVER, SIGNAL = 0.91; EXPRESSED IN HELA, SIGNAL = 0.65; EXPRESSED IN ADULT LIVER, SIGNAL = 0.68; EXPRESSED IN BRAIN, SIGNAL = 0.89; EXPRESSED IN HEART, SIGNAL =   1
acggtgctaaaccaaacagcctgtcttctaaagaagcttatgtaatagctaagcttggggaaacgggagtcaaattacaaacagtttctccaggcttgagggagtgtggtccaccccctcccttcacagggagataaaaactccctttgcagctggagggatcattttccaaaggaggccacctgtggctaccgaacacactcctgggttacacagttattaaattggggatggcccttcacatcgggtaggctgggggtggcctctaatccctgcctttctctcccagcacaacactcatgaccaaactttcctctcttgtgccaccacttaggttggtggtggctacttggtgcactgtgaggagagggattacgaagccatgtgtgataacagggagaacgtgtgttgtgatcaattagcaaagcctgccatggctgaagaggtgggaagtggct

SEQ ID NO: 3548 - DNA, 396 bp, Homo sapiens
  MAP TO AC007033.3; EXPRESSED IN HBL100, SIGNAL = 0.92; EXPRESSED IN HEART, SIGNAL = 1.2; EXPRESSED IN PLACENTA, SIGNAL = 0.75; EXPRESSED IN BT474, SIGNAL = 0.73; EXPRESSED IN BONE MARROW, SIGNAL = 0.93; EXPRESSED IN LUNG, SIGNAL = 0.97; EXPRESSED IN HELA, SIGNAL = 1.2; EXPRESSED IN ADULT LIVER, SIGNAL = 0.98; EXPRESSED IN BRAIN, SIGNAL = 1.2; EXPRESSED IN FETAL LIVER, SIGNAL = 0.78
gtcaagagctcagcaccctcaccacctccagcaccaaagcacttttagctcccagtggcatgttctaggtattgcacaggacaattcagaagcataatccaagtccttcaggaagtccaaatttaaaaagctcaagcgctggcaaaaattttaatttaaaattattactctagcagtgcgaggacaaaactaggtggttggtctaatttgtattttttcaagtcagttgctatggttttaaaaattcatgtagaagaatctctctgttaaacacacagagagagagacagaagaagaagaaggaggaggaggaggagaaggaggagaaagaggaggagcagcaaaatcatttacatggttattcagttcagtgtaactgacttgggtgagcaatga

SEQ ID NO: 3549 - DNA, 473 bp, Homo sapiens
  MAP TO AL024509.1; EXPRESSED IN BONE MARROW, SIGNAL = 3.8; EXPRESSED IN LUNG, SIGNAL = 4.2; EXPRESSED IN BRAIN, SIGNAL =   4; EXPRESSED IN HBL100, SIGNAL = 3.7; EXPRESSED IN PLACENTA, SIGNAL = 3.9; EXPRESSED IN HELA, SIGNAL = 4.2; EXPRESSED IN HEART, SIGNAL = 4.5; EXPRESSED IN ADULT LIVER, SIGNAL = 4.6; EXPRESSED IN BT474, SIGNAL = 3.7; EXPRESSED IN FETAL LIVER, SIGNAL = 4.8
tcttcagccattcaccttccttagtaggggtcaagtgggatccctgtgatgctactcctggcaaggaacctctgtactcccagcctctccaccaatctctacttgaccctcagaagcaatctcatcacacgtcttattcccgtttatgtcagtcaccataggaagcctggactcccgtgtcatctctcactcctgtgtcctgatcctcatttgcctctttacttcagcttttccaatcctgcttccctcccctagggaactcatgaagccccttcactgtgcagtttgtgtgctcaccatcagtcatcagcaaaccccccacttcctcaccttgtctgggagcatgaccttcatctccttgctttattggacacttgggtctctcctggcagtactgcccctccttcagctgtctcaagtggccaccctttttcatctttcccgtacaccatgggtagagctggggtagcctc

SEQ ID NO: 3550 - DNA, 460 bp, Homo sapiens
  MAP TO AC006160.9; EXPRESSED IN BONE MARROW, SIGNAL = 0.9; EXPRESSED IN LUNG, SIGNAL = 0.62; EXPRESSED IN HELA, SIGNAL = 0.91; EXPRESSED IN ADULT LIVER, SIGNAL = 0.85; EXPRESSED IN BRAIN, SIGNAL = 0.79; EXPRESSED IN PLACENTA, SIGNAL = 0.65; EXPRESSED IN FETAL LIVER, SIGNAL = 0.63; EXPRESSED IN HEART, SIGNAL = 0.99
cacccctcttttcctccttcctggcatttgtggccctagctggaaggactggccacccccaggtccttaaagcttgcagcttccatcccttcagagtctctacagacagaggaggctcagctgcatggaggtaacatttagaaagcttttatttgaagaaaacatcccaggaaaggcaaggggcttagactgagggcaggatgccttgtgcgcaggtctcacagatgcagcaggctctggagcagtgcaccagcaactacagggaggacctgcaggcactcaagcagctctcggacctggagagggagaagctgcagcgtgagctccaggagaccactcagcagaaccacgccatgaaagcccagctcgaggcttcccaccagagagccctgcgcatgctggagaaggccagacatcaggaactcaaggtgagggaatgactgtgccgtctactctgtgc

SEQ ID NO: 3551 - DNA, 486 bp, Homo sapiens
  MAP TO AC007320.2; EXPRESSED IN BT474, SIGNAL = 1.2; EXPRESSED IN BONE MARROW, SIGNAL = 1.2; EXPRESSED IN HBL100, SIGNAL = 1.1; EXPRESSED IN HELA, SIGNAL = 4.5; EXPRESSED IN BRAIN, SIGNAL = 1.3; EXPRESSED IN PLACENTA, SIGNAL =   1; EXPRESSED IN FETAL LIVER, SIGNAL = 1.2; EXPRESSED IN LUNG, SIGNAL =   1; EXPRESSED IN ADULT LIVER, SIGNAL = 1.7; EXPRESSED IN HEART, SIGNAL = 0.95
ccttggaatacctcaacagattgatggaggaagttagtatctacatctctccccaatactaacatgtttctttcagtaatatgcaggtaacaatgtagaaataacacgtcaattttcaatttgcaaacaagctttggtatgcaatagctactatttggaatacttgctttaatatctgcttcagtctcctttttcagatctactttcccgaccatctattgtagatgccacataacttgagctaccatatgcttcacgacgagcagggtgcaccctatccagagaaagtggattcctttggtcttttctgccaacgtgctcatgaccacaaaaataaaaatcaccgcagcttcttgagtaactctcctgacttctgccatatctatctagtgtattgttataatcagggcggctgcttccaccataagacatccgaggccctcgtgcaggtggtgcaccatgagaggtccctgcaggctgataaaa

SEQ ID NO: 3552 - DNA, 415 bp, Homo sapiens
  MAP TO AC010885.2; EXPRESSED IN BONE MARROW, SIGNAL = 2.8; EXPRESSED IN LUNG, SIGNAL =   3; EXPRESSED IN ADULT LIVER, SIGNAL = 2.9; EXPRESSED IN BT474, SIGNAL = 2.1; EXPRESSED IN BRAIN, SIGNAL = 2.4; EXPRESSED IN HEART, SIGNAL = 2.1; EXPRESSED IN HELA, SIGNAL = 2.9; EXPRESSED IN HBL100, SIGNAL = 2.6; EXPRESSED IN PLACENTA, SIGNAL = 2.3; EXPRESSED IN FETAL LIVER, SIGNAL = 2.4
ttttaaagggattggggagggaggtcttataagtatatggtgtttcacagatacaacactctgggattccatttcaagttttaatgatagtataagcagtacattgaaagacagccaataacattcatctcttgaaataagtatgctgcagggctgaaataactttggctttattgctttgaaacttcgtgaagcttgggttaagctcttggctatgttacatctgagaaatacagacctcgtttcacctgttccacactacagctgcagttttatttggaaaattgatgagggcattaagttctgaagtcatgttgattctaatgtaaataaatggtgtcattacttcatagttgggagtgccactaatgcagaccttaaaattaagggttatcttgttgattgggggaaaatt

SEQ ID NO: 3553 - DNA, 475 bp, Homo sapiens
  MAP TO AC007377.3; EXPRESSED IN PLACENTA, SIGNAL =   1; EXPRESSED IN BT474, SIGNAL = 8.6; EXPRESSED IN BONE MARROW, SIGNAL = 1.1; EXPRESSED IN HEART, SIGNAL = 1.2; EXPRESSED IN BRAIN, SIGNAL = 0.97; EXPRESSED IN HELA, SIGNAL = 1.1; EXPRESSED IN LUNG, SIGNAL = 1.3; EXPRESSED IN FETAL LIVER, SIGNAL = 0.94; EXPRESSED IN HBL100, SIGNAL = 0.82; EXPRESSED IN ADULT LIVER, SIGNAL = 0.95
gaccctagaacctgggtttttcatctacctctttgctgaatccagccccttaaggatgactgattttgtccaagtccagatttccagaagttcttttttggccctgatagtccaaaccatttgaaataccttcaggatccattcatttcacttccataacttcacagggtctgctgctctgcttttctcattgtccctgagggattcttttctggcttgtgtttctcttcccaccacctaaacatgaaaatcttccaagatgcctttttcaaccacttagcatgcctccaagtatctttcctttgctaaatttccacataatgactatcacttcagcattgatgactttcccatctatacctttagctctaatcatttttgtaaacttcaggtctacatttttagctgtctattggaaaagcccaacattttgaagtcctactggcttctcaaaaagacaaataaaatgtcaaaa

SEQ ID NO: 3554 - DNA, 319 bp, Homo sapiens; identical to SEQ ID NO: 3433
  MAP TO AC007463.3; EXPRESSED IN HBL100, SIGNAL = 0.71; EXPRESSED IN HELA, SIGNAL = 0.76; EXPRESSED IN BRAIN, SIGNAL = 1.5; EXPRESSED IN BT474, SIGNAL = 0.84; EXPRESSED IN BONE MARROW, SIGNAL =   1; EXPRESSED IN FETAL LIVER, SIGNAL = 1.1; EXPRESSED IN LUNG, SIGNAL = 0.99; EXPRESSED IN ADULT LIVER, SIGNAL = 1.1; EXPRESSED IN PLACENTA, SIGNAL = 1.2; EXPRESSED IN HEART, SIGNAL = 1.2

SEQ ID NO: 3555 - DNA, 383 bp, Homo sapiens
  MAP TO AC010896.2; EXPRESSED IN BT474, SIGNAL = 1.8; EXPRESSED IN FETAL LIVER, SIGNAL = 1.9; EXPRESSED IN BONE MARROW, SIGNAL = 1.9; EXPRESSED IN HELA, SIGNAL = 2.2; EXPRESSED IN ADULT LIVER, SIGNAL = 2.5; EXPRESSED IN BRAIN, SIGNAL = 1.7; EXPRESSED IN LUNG, SIGNAL =   2; EXPRESSED IN PLACENTA, SIGNAL =   2; EXPRESSED IN HEART, SIGNAL = 1.7; EXPRESSED IN HBL100, SIGNAL = 1.6
caaaaatctgcagtaaagaagcctaattcattgggtttactaagggtgtaaatgaccatataaaatcaacacatttccttactctttcatttcatattaactaaacaactttctgttattaactagttcctaatcacttctatttcaggaatgggccctcttgcacatgggagaagaagatattcatcaatagagaagcatttcacaaattgcaaatttaaagttaacttttggttccatagcaggtctcaagagcatttgtatgccattcacctccaggacggacagcaagaggataaataaactgaccaacgaggtttatggaacctccatgactccagcaggttcaaatcccagaaaacagcctcccattaacatcctca

SEQ ID NO: 3556 - DNA, 479 bp, Homo sapiens
  MAP TO AC007617.10; EXPRESSED IN BONE MARROW, SIGNAL = 0.79; EXPRESSED IN FETAL LIVER, SIGNAL = 0.78; EXPRESSED IN PLACENTA, SIGNAL = 0.76; EXPRESSED IN LUNG, SIGNAL = 0.77; EXPRESSED IN HELA, SIGNAL = 0.67; EXPRESSED IN ADULT LIVER, SIGNAL =   1; EXPRESSED IN BRAIN, SIGNAL = 0.77; EXPRESSED IN HEART, SIGNAL = 0.96
ggaagaaaacacagcactaaggaagagaaaagagacacttcattctctgccacgaacaacatgtgaatcaagccctgaaacaggttttcacaaaaaagtaatttttggagagaattgcctttgagtaagtaagtgtcctggattcagacttcctgagagaaaatgtaatcacagctgtttggtcaacaccacccatccacgtgcctttcaggagaaatcaccactgcaggggtccagccttgctgggttcccctgttcacatgaaccttgatgcccacggtctacctggtgctggtgaaccagcacacagcacacctggcctcatggagctggtattctgggtgcaagaccaacaatcaacaaacacataagcaccgtcatgtaatgttaggtggtgccaagtgcctggtgaaaacaatgaaacacatcatggggcagtggattatggtggaggaccaaggatgggagagggtgaaata

SEQ ID NO: 3557 - DNA, 445 bp, Homo sapiens
  MAP TO AC010361.2; EXPRESSED IN HBL100, SIGNAL = 1.2; EXPRESSED IN HEART, SIGNAL =   1; EXPRESSED IN ADULT LIVER, SIGNAL = 1.1; EXPRESSED IN BRAIN, SIGNAL =   1
ttcacatttttcttgccagctattatgacatgaatataaattgttaggctacttgtataagaaaaaataaaacatatctgttccaggtttatactcccgtataacaaactaccccaaaacttagtgactcaaggaaacaatttactattttctcttacaattctgggggctaatgggctcagttgggcagttcttgtttaacaagcttcataaagttgcaggcaaatatagctgtggctaaagtcacctgaaggcacctttacaaatatatctgatgcctgggctgggatggcaagaatagctgggtgctggtaagtctgtccctttccctgtctccctctccctacttaccctctccttctccttgtccttcttccctcttcttccctctccccttctgcacatagcctacccccaacccctgcccctggtaatgtggcttctc

SEQ ID NO: 3558 - DNA, 427 bp, Homo sapiens
  MAP TO AL031055.1; EXPRESSED IN BT474, SIGNAL = 4.2; EXPRESSED IN FETAL LIVER, SIGNAL = 4.9; EXPRESSED IN BONE MARROW, SIGNAL = 4.4; EXPRESSED IN LUNG, SIGNAL = 4.5; EXPRESSED IN HBL100, SIGNAL = 3.8; EXPRESSED IN HELA, SIGNAL = 5.3; EXPRESSED IN HEART, SIGNAL = 4.8; EXPRESSED IN ADULT LIVER, SIGNAL = 6.2; EXPRESSED IN BRAIN, SIGNAL = 4.4; EXPRESSED IN PLACENTA, SIGNAL = 4.1
gcctacagccacctgtcttctggtcttctgctacctcttcacggctctccccatgctctggacacagtgctgtgctccggatgtctccaggcacactcacacctctgtctgcttttcatcacccgccactaccaccaccccactccaagccatcgttgtcccctctctgggccatgacagtggcctcctgcctggtctttctaatcacaacctgctctccatggttcccaaggtctattagccctgggcagccataataatcctttaaaaatggaagtcatctctgccactcctctgctctttaacccctcacccctctacagtcagcatcccatctgcaatcagcatcaatggcttcccatctccaatcagcatcaatcctaaggtctttgccatgacttctagggctccaaataaaccaaagcgc

SEQ ID NO: 3559 - DNA, 443 bp, Homo sapiens
  MAP TO AL031075.1; EXPRESSED IN HEART, SIGNAL = 2.9; EXPRESSED IN FETAL LIVER, SIGNAL = 3.4; EXPRESSED IN BT474, SIGNAL = 3.2; EXPRESSED IN BONE MARROW, SIGNAL = 2.8; EXPRESSED IN PLACENTA, SIGNAL = 2.6; EXPRESSED IN HBL100, SIGNAL = 2.6; EXPRESSED IN HELA, SIGNAL = 3.6; EXPRESSED IN ADULT LIVER, SIGNAL = 2.8; EXPRESSED IN BRAIN, SIGNAL = 2.8; EXPRESSED IN LUNG, SIGNAL = 3.3
ttcagggacagcacagagagataaacaaggtaaggtcaacgtcaagaatatagggatttcatgcactctgctgacctctaaatatgcttttgtacttggcaaatataatattaaacctggacttattttttctatgcatcattgcctatccttagaaaacaaatatcatcacggattcacggggtgcagtatagaaatggctggttgtaacttaaacctaaaccagattatatttttatctttcaataggaaacataatatgaagctgtatttatgtcatagactgagaatgacaacatgaaggaagatattgaaactgtactgcagcctcacacacagtatgacccaaggcagagtagacttctatacaaggtgttgcatcttgaatcttgtcactataaaggtgcaaaccaaaaataaaattcgaaggccccaaatcatcc

SEQ ID NO: 3560 - DNA, 473 bp, Homo sapiens
  MAP TO AC007280.2; EXPRESSED IN BT474, SIGNAL = 1.1; EXPRESSED IN BONE MARROW, SIGNAL = 1.4; EXPRESSED IN FETAL LIVER, SIGNAL = 1.1; EXPRESSED IN HELA, SIGNAL = 1.1; EXPRESSED IN PLACENTA, SIGNAL = 1.1; EXPRESSED IN HBL100, SIGNAL = 0.91; EXPRESSED IN LUNG, SIGNAL = 1.5; EXPRESSED IN ADULT LIVER, SIGNAL =   1; EXPRESSED IN BRAIN, SIGNAL = 1.2; EXPRESSED IN HEART, SIGNAL = 1.2
gcctttctcttcaggcattgtctagcaacactttaaatgaaacaaaagcaacatgaaacaagaaagaaaatcaatagcacgctcaaacctctccctataggactgtccccactgtggggcctgaagggtgaagggcacagaaatccaaggttacccagagggcactgatgaggcagatgtgaaagaagctcagctctcagggcacccgtctagtcagcccagcctgcaccagcatgcggccatgcagctggtcttgccaatagccctcaccatctgtgccaacagcaggaaagaacgacattgaacgtcataaagtccaccgagccttccaggtccactgcttgacaattgcttttatctaagccaaacaggccaagcctggcactgtcagtcacggaaattttgtgtgcctggaacacaaaagtatattgttactttgaatgtaagtcaatggtgaggagggagtggtcttg

SEQ ID NO: 3561 - DNA, 410 bp, Homo sapiens
  MAP TO AC010903.2; EXPRESSED IN LUNG, SIGNAL =   2; EXPRESSED IN HBL100, SIGNAL = 1.4; EXPRESSED IN HELA, SIGNAL = 2.1; EXPRESSED IN PLACENTA, SIGNAL = 3.2; EXPRESSED IN HEART, SIGNAL =   2; EXPRESSED IN ADULT LIVER, SIGNAL = 2.5; EXPRESSED IN BT474, SIGNAL = 1.6; EXPRESSED IN FETAL LIVER, SIGNAL = 1.1; EXPRESSED IN BONE MARROW, SIGNAL = 1.3; EXPRESSED IN BRAIN, SIGNAL = 1.5
gcattgcatgcaggatacacaaacccatatctggaataagtgtctattccagtgaggacaaacctctgccctttccatgatggaagaggtctaatataatcaatttgccaccaggtggctggctgattgccccaaggaatggagctatattgaaggctcagtcttggtctctgctgctggctaattaggcactcagcagtggtcatagccaggtcagccttggtgatcagaagtccatgttgctgagcccaggtataacctgaatccctgccaccatggccactttgttcatgggcccattggtgatgacaggggtggctaggaaaagaagctgagtggtgtccacagaacaggtcattctatccacttgattattaaaatcttcctctgctgaggtcacctgttggtga

SEQ ID NO: 3562 - DNA, 488 bp, Homo sapiens
  MAP TO AP000178.1; EXPRESSED IN PLACENTA, SIGNAL =   1; EXPRESSED IN ADULT LIVER, SIGNAL = 0.91; EXPRESSED IN BONE MARROW, SIGNAL = 1.2; EXPRESSED IN HBL100, SIGNAL = 1.2; EXPRESSED IN FETAL LIVER, SIGNAL = 1.1; EXPRESSED IN LUNG, SIGNAL = 0.89; EXPRESSED IN HELA, SIGNAL = 1.3; EXPRESSED IN BRAIN, SIGNAL = 2.6; EXPRESSED IN BT474, SIGNAL = 1.2; EXPRESSED IN HEART, SIGNAL =   1
ggattcatcctctacatcaacgtatcaagaataaatgttgacgaaaaaacatcaacgttacagaggctgtctgggcagccaggcaaacacattatttcagactcacgctcaaatgaccaatttcccaaaagcctagccagccccaagatccctcccactgtgctcctagctctgctggctgggtagctatcactctgggggttctgacctcctattgccctggattctcagcaattgatcccagagcccctggaatcccacctcccaccctgcacagactagccggccaggtgcagccaagacatcctgactatacataggtacctgcttcattgcctgtcccaaggagcaacttattcctggcttccagggccgcagggactaccgcactgaatgggaacgtgagcaggatcatgtcttcactcaacgtgaaccctatttcctcatccaagccttcactgccctccaccaggacatccaccatgtcg

SEQ ID NO: 3563 - DNA, 468 bp, Homo sapiens
  MAP TO AC006512.12; EXPRESSED IN PLACENTA, SIGNAL = 1.3; EXPRESSED IN LUNG, SIGNAL =   1; EXPRESSED IN ADULT LIVER, SIGNAL = 1.1; EXPRESSED IN BONE MARROW, SIGNAL = 1.4; EXPRESSED IN HBL100, SIGNAL = 1.7; EXPRESSED IN FETAL LIVER, SIGNAL =   1; EXPRESSED IN HELA, SIGNAL = 1.1; EXPRESSED IN BRAIN, SIGNAL = 1.1; EXPRESSED IN HEART, SIGNAL = 0.96
atcctagggggcatctatcgcatcagttaagtttaatatctggcaatcatggaaaaggagtttctgagcaggtaatacttgggccatctcttggagattcctgctgtaaggactaagtttctccagagaaagcacttgcctgggtatgactcagggccgggcaaaaattcacactatgaatctggtggaagggggagaagtatgcctggtgggaccacattcccataattctctaacctcacatctctgtagagttccctctgaacaaggtccaggtatctccattcctcttgagtaaggtgcacagccacatcctcagatgtcacaaactgctgatacctggctgtcaggagcgcagctgcctgatctcctgggctgtcctcatggggaaaggcaggcacctggggaacaggtggaaccctagtgagtccctgttccatgtcggtgtcctgcacaaaatgaggcttt

SEQ ID NO: 3564 - DNA, 480 bp, Homo sapiens
  MAP TO AC007406.1; EXPRESSED IN BRAIN, SIGNAL = 0.95; EXPRESSED IN HBL100, SIGNAL = 1.1; EXPRESSED IN LUNG, SIGNAL = 1.2; EXPRESSED IN HELA, SIGNAL = 1.2; EXPRESSED IN ADULT LIVER, SIGNAL = 1.2; EXPRESSED IN PLACENTA, SIGNAL = 0.99; EXPRESSED IN BT474, SIGNAL = 1.3; EXPRESSED IN BONE MARROW, SIGNAL = 0.84; EXPRESSED IN FETAL LIVER, SIGNAL = 1.3; EXPRESSED IN HEART, SIGNAL = 1.1
aatctcccggtttccttcaggccctggatcatcaggaaatacctttcccacctacacaacttaactaatgctacttatacattaaaatcctaaacgcaaaaaaaaaaaaagtcatttaatgaaataagcttttaagttccttcttcccactctaccttctgacttagttgttaaagaggcaactgtcaccaaaatgtgttcaccttgcctgtaggcagaccttagccttttcttcccatcgttcagagactgtaaggagctcctgtagttcagccattgctttctccacagcatggtggggtgccaaccctaccccagagtctatcagcttcttcatgacatccaaagtgacttgttgcggatctgataaggtcagtcttacttcgtccaaccaccgagcctgttgtagctcttgcttcagtcgtggtaattcagggagttccacatagagactagagcccatatctatcaacatctgga

SEQ ID NO: 3565 - DNA, 477 bp, Homo sapiens
  MAP TO AC007566.1; EXPRESSED IN BT474, SIGNAL = 2.2; EXPRESSED IN BONE MARROW, SIGNAL = 0.93; EXPRESSED IN FETAL LIVER, SIGNAL = 0.72; EXPRESSED IN HELA, SIGNAL = 1.3; EXPRESSED IN PLACENTA, SIGNAL = 0.81; EXPRESSED IN HBL100, SIGNAL = 1.2; EXPRESSED IN LUNG, SIGNAL = 0.82; EXPRESSED IN ADULT LIVER, SIGNAL = 1.3; EXPRESSED IN BRAIN, SIGNAL = 1.3; EXPRESSED IN HEART, SIGNAL = 0.96
aaatgcctatcaaatgagcgcttttttaaaaattcacatgattttatatacagtcctttctctttcataatctagaaaacatgtacaaaatagaaaatatattacataggaagttatttcaaaattttaactagtttcttacttcaaaagagttagatttaactgagaaaccacatagaccctggatttgctattgattaacctatgaagcctgtgattttttttttttctctgcttactatagacagacctagaaatggtcactgaagaccttgcccagaaagtcaataggccttaccttcgcacaccccgccacaagatcatcaaagcagcatgccttgtacagcagaagaggcaagaattcctggcatctgtggctcggggagtagctcctgcagactcaccagaagctccaaggcgcaggtaaaaaggacgtacactgtggaaatcatcctagctccagccacaaataccagc

SEQ ID NO: 3566 - DNA, 475 bp, Homo sapiens
  MAP TO AP000168.1; EXPRESSED IN BONE MARROW, SIGNAL = 0.84; EXPRESSED IN HEART, SIGNAL = 0.98; EXPRESSED IN BRAIN, SIGNAL = 1.1; EXPRESSED IN ADULT LIVER, SIGNAL = 0.97; EXPRESSED IN HELA, SIGNAL = 0.7; EXPRESSED IN LUNG, SIGNAL = 0.8; EXPRESSED IN FETAL LIVER, SIGNAL = 0.96; EXPRESSED IN HBL100, SIGNAL = 0.75; EXPRESSED IN BT474, SIGNAL = 0.72; EXPRESSED IN PLACENTA, SIGNAL = 0.76
ctgcttgttggaggaaccacccttaagaaaatttcccaagatagtagttttcccatctccgtactttgctagttaatgttctccacttgcttgcgtttatcctttcaattcctttgctaattaaattgctgaaaagtatacattggtaagaatagccactgtcaatggactgcaaacaaaactcgtttctgttattgatgataaaccatttcagagaagaccaggctgagtctaaagggttcagataattacaaggggaaggcagagagagtagttcatggccacaggacttggccacctctgggcaacacataatgcttgctaagctaatgactgtagggatatagaactggccctcagcctctctgtcttcctttggcctctgctcttcctgctgccttctctctttgaccacgatgacacactttccataggccttcctcaccacatcacagaactcagagaagaggctgtc

SEQ ID NO: 3567 - DNA, 476 bp, Homo sapiens
  MAP TO AC006840.13; EXPRESSED IN HELA, SIGNAL = 0.67; EXPRESSED IN ADULT LIVER, SIGNAL = 0.82; EXPRESSED IN BRAIN, SIGNAL = 0.83; EXPRESSED IN HEART, SIGNAL = 0.88; EXPRESSED IN PLACENTA, SIGNAL = 0.75; EXPRESSED IN LUNG, SIGNAL = 2.3; EXPRESSED IN FETAL LIVER, SIGNAL = 0.68; EXPRESSED IN BONE MARROW, SIGNAL = 0.66
ccaactgaaggcatttcctctaaacaccaaaaataaagtgaaatacaaataatagacaacttgttccagtcatcaactcttaatcctgtttgcttatcacctggatatgtattttaaatcatctatttcatcttaatggaattttgtccactctgttttgttaaataacaacagctgacttttctgtttggggattgttttcttatgcctgtctcaatccactcttactgtgtttagcctgagagactaatgctaaatgctgttgtcattcaccttcatcacaggcaggggttgtggaggtgggaatctcagtccagttcattctcaaccagcaaatagtggaaatgaactggattcccagccatgaacccttgttttctgactctaggactggcttttgttgtttacaagtgtttttcaaagaatttaaagggctacctgctaccaaggtcagctgggcgcttgtaaattgcaga

SEQ ID NO: 3568 - DNA, 468 bp, Homo sapiens
  MAP TO AC007387.2; EXPRESSED IN HELA, SIGNAL = 1.1; EXPRESSED IN ADULT LIVER, SIGNAL = 0.9; EXPRESSED IN HEART, SIGNAL = 0.81; EXPRESSED IN PLACENTA, SIGNAL = 0.85; EXPRESSED IN BRAIN, SIGNAL = 0.85; EXPRESSED IN HBL100, SIGNAL = 0.72; EXPRESSED IN LUNG, SIGNAL = 0.92; EXPRESSED IN FETAL LIVER, SIGNAL = 0.78; EXPRESSED IN BONE MARROW, SIGNAL = 0.87; EXPRESSED IN BT474, SIGNAL = 0.66
tggctggtttttcataagctgttttaactagatgctaaatatccccctcaaagttgatttgatttggaaaaaaaaaaagacaaaaagatgggctcaggacataaatacaatgtgcagttctaccctcagtagaatgaacaaacctaaattctcagaggtatcttacatgactttttgtgactccacagatctgaaaccactatctcaaactgcagagctcttggctccctcagataacctgtggcaaaatctcccctcattactgatgaagtttgagattttcctggactctggctaccgtggcctgaccattagtcaagagatagtcagtcagggcctcttgtgctccctgggggtattcatggtggaggaggatattagcagcatggctgtctacaccagcaattcttacagcaggtcatggtggagttcacgggcgtgcacatgtgagaaagaaaaggcctgcct

SEQ ID NO: 3569 - DNA, 452 bp, Homo sapiens
  MAP TO AC006230.11; EXPRESSED IN HEART, SIGNAL = 1.1; EXPRESSED IN BRAIN, SIGNAL = 1.4; EXPRESSED IN BT474, SIGNAL = 0.71; EXPRESSED IN LUNG, SIGNAL = 1.2; EXPRESSED IN PLACENTA, SIGNAL = 0.89; EXPRESSED IN BONE MARROW, SIGNAL = 0.83; EXPRESSED IN FETAL LIVER, SIGNAL = 0.8
ggaacctctcgaccttttggatctcagggaaggggtccctgatgaggcggtcgccgtccacaatgtggatgtggcgcagcgggaaaaagcgcagccagttctgcatgtgcacgtggtagaggctgcggttgagggccttgtagtccacattgagcctgccatcgcgcaccaggaactcctcgatggacgggtagggcttgtgcttctgcatgtggttgtagaacacttgggtgtagtcagatagcacgcgctccgacgggtctcgcaggatgagcagcagccggatggacgggttcatgctgtagactcgctcaggcactttgggcgacgtgaaatacgcgggggtcttctccactgtgagctggtgtggccaggagaagggcatctggctgaggtaccagcccaagccgtggctgtaatgctcctcccagtcgaagaagtggacctcgttc

SEQ ID NO: 3570 - DNA, 437 bp, Homo sapiens
  MAP TO AC006516.10; EXPRESSED IN HBL100, SIGNAL = 0.78; EXPRESSED IN ADULT LIVER, SIGNAL = 0.86; EXPRESSED IN BRAIN, SIGNAL = 0.88; EXPRESSED IN HEART, SIGNAL = 1.1; EXPRESSED IN PLACENTA, SIGNAL = 0.87; EXPRESSED IN BT474, SIGNAL = 0.78; EXPRESSED IN HELA, SIGNAL = 0.97; EXPRESSED IN LUNG, SIGNAL =   1; EXPRESSED IN FETAL LIVER, SIGNAL = 0.79; EXPRESSED IN BONE MARROW, SIGNAL = 1.7
ttttacagatagaatagttggggggaaaagtcactgtacttgtcgcttaggcctgtgggtgtatatggggaggtcatttacaaacaattactaaagaggtagatgattttgatggcatatcactcaactgtcctccagttttttttgtttttttttttttttcataaaaacttggcccattattttgccaattgaaaacattcgcaatccagtctaccttgattttctgggtcaactccccatggctgattagctctttagactgcaaactcattcatttgtttattcaacgaatgtttacagagtcctgactctatgtcaggcatgatatcaggtgctggtactacagcagtgaacacaacagacaccttctgtatcctcatggaatgtaagctgtgtgtcttttctgttgtggctgcccaaatgcctagcatagt

SEQ ID NO: 3571 - DNA, 451 bp, Homo sapiens
  MAP TO AC006286.12; EXPRESSED IN BONE MARROW, SIGNAL =   1; EXPRESSED IN LUNG, SIGNAL = 1.1; EXPRESSED IN PLACENTA, SIGNAL = 0.93; EXPRESSED IN BT474, SIGNAL = 1.1; EXPRESSED IN HBL100, SIGNAL = 0.72; EXPRESSED IN FETAL LIVER, SIGNAL = 0.91; EXPRESSED IN HELA, SIGNAL = 0.82; EXPRESSED IN ADULT LIVER, SIGNAL = 0.77; EXPRESSED IN BRAIN, SIGNAL = 0.93; EXPRESSED IN HEART, SIGNAL = 0.98
agagaccataagtgggcagactgactaatccaaaaatcccacccacttgataagttatcacaactcaaaagacaataacagtaagagtcctacttaaatgtcagatttagtctaattctctcaagtgattcaaaactgaacatgaaaaatccttctaaactaaaaaaaatcaaggagcataattccttaccatttacagtcagtttggctttctgagaataattagaaccaaagtgattagtaacaatacactgatattttccttcatctgtgaaattcacattgaaaagatgtaagatactagtatattccagagcttctccagcttgctgccaataacgaacaaaattctcagtatccacgtcatacaggatttcactgtctttgcgccacacagtggacatgggtgaatcactgctgctcactgcagtgcacgtcagagtcacattca

SEQ ID NO: 3572 - DNA, 448 bp, Homo sapiens
  MAP TO AL050339.4; EXPRESSED IN PLACENTA, SIGNAL = 0.64; EXPRESSED IN BONE MARROW, SIGNAL = 0.64; EXPRESSED IN FETAL LIVER, SIGNAL = 0.63; EXPRESSED IN ADULT LIVER, SIGNAL = 0.68; EXPRESSED IN BRAIN, SIGNAL = 0.73; EXPRESSED IN LUNG, SIGNAL = 0.77; EXPRESSED IN HELA, SIGNAL = 0.69; EXPRESSED IN HEART, SIGNAL = 0.8
tccaaacttcaacccaaagagaaaaaagaaaaagcatccaagttatgtaggataatattatctcctctgacacatgagtacttggagctccagaatataagaaaaagaaataaacagaaaaaaatcttaagagataatggttgagaattttccaaaattaatgacaccaccataaatccgagaagttcaccaaacccaatgcaaaataaataagaaaatcacaccgttgccctttaccaaaatgatgacatggatttcccttaagaaaaaacagaatgatcaatgatagccacttcagtggttttatactccttggattcacagggcagcctcagcttcagatgatgatctctggggttgtctttttcttctacactattgccttcatgggaaatatggccatcatcctattgtctttcctagatgaccatctccaagtccccatgta

SEQ ID NO: 3573 - DNA, 456 bp, Homo sapiens
  MAP TO AC006427.10; EXPRESSED IN PLACENTA, SIGNAL = 0.83; EXPRESSED IN BRAIN, SIGNAL = 0.73; EXPRESSED IN HELA, SIGNAL = 0.6; EXPRESSED IN ADULT LIVER, SIGNAL = 0.72; EXPRESSED IN HEART, SIGNAL = 0.88; EXPRESSED IN FETAL LIVER, SIGNAL = 0.65; EXPRESSED IN LUNG, SIGNAL = 0.82
gtgaccagggcatgttgtcagaagtatccagaatccaatgtcaagctggtgaattccactctgatcacaaataagagacccagccacaatgacatggaactcatgcccacggtgtgggataaggtcgaagagtccacttgtagggacccaaccaaggtcaaaccatgcttccccaagcagaagacccagatccaagagttattctccacagagtcattgaggatagaagagatcacccccacagggccaatcaagaccaaaaagaccatccctacagtgccaatcaagatctcaaacaccacccccacagagccaatcaccaccaagataccaccaccatagagcaaactgaagagtccactcccactgagacaatcaagacagaaaagatcactaccacagagcaggtggaagtggaaaagaccatccctacagagctaatggaggtcccagaga

SEQ ID NO: 3574 - DNA, 487 bp, Homo sapiens
  MAP TO AJ006998.1; EXPRESSED IN BT474, SIGNAL =   1; EXPRESSED IN BONE MARROW, SIGNAL = 0.99; EXPRESSED IN HELA, SIGNAL = 1.2; EXPRESSED IN HEART, SIGNAL = 1.1; EXPRESSED IN PLACENTA, SIGNAL =   1; EXPRESSED IN FETAL LIVER, SIGNAL = 1.7; EXPRESSED IN LUNG, SIGNAL = 1.4; EXPRESSED IN ADULT LIVER, SIGNAL =   1; EXPRESSED IN BRAIN, SIGNAL = 1.3; EXPRESSED IN HBL100, SIGNAL = 0.89
gggacaagctaggagcacagaaactatagtaaagagaattctagtatgtagccttacctaaaaatgtataaaaattacatataaaatattactattaaaaggtcattatatttcatacttttgggaatgtattagctatccagcagtgtctaacatattacccccaaaactcaccagctttaaaaaagaaacacttataattgcatagcttctgtgaactagaaatctagacacagcttagctggatacccctgggttgatgtctctcaaaaggtttcagtaaagatgtctgcctggggtataagcttctcaaatcggggaggatccacttccaagctcacttgtgtcactttggcagccctcaaatgctcaaggttatctccagattttactgccatgttatgtggttcctccatagggctattcacaacttgatagcttgtttttcctaagaaagagaagacagagagaaggaaaaagagaaaga

SEQ ID NO: 3575 - DNA, 475 bp, Homo sapiens
  MAP TO AC006314.2; EXPRESSED IN ADULT LIVER, SIGNAL =   1; EXPRESSED IN HBL100, SIGNAL = 1.5; EXPRESSED IN HEART, SIGNAL = 1.1; EXPRESSED IN BONE MARROW, SIGNAL =   1; EXPRESSED IN LUNG, SIGNAL = 2.4; EXPRESSED IN BRAIN, SIGNAL =   1
tttcactttcttgatcttttgtgtgatatcttcagcctcaatttcatttatttctgctctgatctttattatttcttttcttatactaatttttggtttgggtttctcttgcttttctattttttaaagattcaatgttaggattattgactattttttttttaccttttgatgtagatgttcattgctataaacgtgccttttagtactgtttttgctgtatcccatagattttggcattttgtattttcattttcatttgctttaataatatttaaattttcttcttaatttcctcattgacccagtggtcattcaggagtttattatttaatttccatgtgtttgtgaagtttacagtgttcctcttgtaactaatttctagtttcattccattgtatcagaaatgataattaatgttttcaatttttttaatctgttgagacttgttttgtggcctaacatatggcctatc

SEQ ID NO: 3576 - DNA, 479 bp, Homo sapiens
  MAP TO AC007382.2; EXPRESSED IN BT474, SIGNAL = 0.99; EXPRESSED IN BONE MARROW, SIGNAL = 0.89; EXPRESSED IN ADULT LIVER, SIGNAL = 0.71; EXPRESSED IN PLACENTA, SIGNAL = 0.89; EXPRESSED IN BRAIN, SIGNAL = 0.98; EXPRESSED IN HBL100, SIGNAL = 0.78; EXPRESSED IN HEART, SIGNAL = 1.2; EXPRESSED IN LUNG, SIGNAL = 0.76; EXPRESSED IN FETAL LIVER, SIGNAL = 0.98
aattatgggaaccttgtaaatcgtatatctgtcatttcagtacatgtcttatatttcagtatgtggttccgttagtttacttaaaacaagccataataccgttgagcaaagtttaaattactgctttaaaatttataatgtacatattttttaaaactatgtgattttcactgagttaggtagtacagttatttaacacaacaaacgtatactttctgaagaaaataattgaattttcttattcagtggtaaagggaaactatctcctttatttaatttagcatgttttttcattagattgttaggaaaaaagcattgcctgacagcggtgaagatcgagatacaaaagaagctctaaaggagtttgacttcttggttacatcagaggaaggagacaatgaatctagaagtgcaggcgatggaacagactggggtaaggaagcatactggatccaaccagagatgttaagtaaataaaa

SEQ ID NO: 3577 - DNA, 457 bp, Homo sapiens
  MAP TO AL049831.2; EXPRESSED IN BT474, SIGNAL = 1.2; EXPRESSED IN HBL100, SIGNAL = 0.75; EXPRESSED IN PLACENTA, SIGNAL = 0.87; EXPRESSED IN HEART, SIGNAL = 1.2; EXPRESSED IN BRAIN, SIGNAL = 1.1; EXPRESSED IN ADULT LIVER, SIGNAL = 1.6; EXPRESSED IN HELA, SIGNAL = 0.94; EXPRESSED IN LUNG, SIGNAL = 0.97; EXPRESSED IN FETAL LIVER, SIGNAL = 0.98; EXPRESSED IN BONE MARROW, SIGNAL = 0.75
tgaaagaggaaagggaaatggacatattaaaattattatttcaggtgaagttttctctcagtcaaagtagttaacattggcttttttttctcctttgtccaaagcagtcttttctttcatgggcttctgagatatggccatgtagaggtgatatctcagggctacggtgagtgctgagatggccgggatcacccaattagtccactaactagagtgagaatcaacagtagtaaaaagggtttctgaaagatttgtgattgatctgtcatctggataaagcccccccaatgatatatgttttggacaattctctagcatccgtagagtgcatgatatcctcagttttcaggagcatcacctacagcttgttccctgaagacttcttccccacagaaatgctcatcaaaaaatctggtcacatcatataccttgtggtgcaagatcacccaggtgcttt

SEQ ID NO: 3578 - DNA, 496 bp, Homo sapiens
  MAP TO AC008008.2; EXPRESSED IN HEART, SIGNAL = 0.79; EXPRESSED IN BONE MARROW, SIGNAL = 0.67; EXPRESSED IN PLACENTA, SIGNAL = 0.74; EXPRESSED IN BT474, SIGNAL = 1.2; EXPRESSED IN FETAL LIVER, SIGNAL = 0.72; EXPRESSED IN LUNG, SIGNAL = 0.93; EXPRESSED IN HELA, SIGNAL = 1.1; EXPRESSED IN BRAIN, SIGNAL = 0.82; EXPRESSED IN HBL100, SIGNAL = 2.1
tccacccactactttccacccactttccatgtttgggagggaaggagatgaggaacacagatgttggggttcttgccaagctttcacttaaagaaaatgaacagggacaacaaatgatcatgtttttataacccctgaggaccacagaacggatttaacgtgcatgtgcaacatggctcattgtttttgttgttgctgttttgtttccgcaggtatgccattggtcttgcttacaaatcagccccgaagcatgaatggattgggaagaactctgcttcctgggcgctctgccgctgcaacaataactgggtggtgagacacaatagcaaggaaatccccattgagcctgccccccacctccggcgcgtgggcatcctgctggactatgataacggctctatcgccttttatgatgctttgaactccatccacctctacaccttcgacgtcgcatttgcgcagcctgtttgccccaccttcaccgtgtggaacaagt

SEQ ID NO: 3579 - DNA, 478 bp, Homo sapiens
  MAP TO AP000159.1; EXPRESSED IN PLACENTA, SIGNAL = 0.9; EXPRESSED IN BONE MARROW, SIGNAL = 0.75; EXPRESSED IN ADULT LIVER, SIGNAL = 1.2; EXPRESSED IN BRAIN, SIGNAL = 0.75; EXPRESSED IN BT474, SIGNAL = 0.7; EXPRESSED IN FETAL LIVER, SIGNAL = 0.76; EXPRESSED IN LUNG, SIGNAL = 1.1; EXPRESSED IN HELA, SIGNAL = 0.78; EXPRESSED IN HEART, SIGNAL = 0.88
gagatggacttatgggcaggatgcttgatatttatatacagcagaggtaagtggctggtatcctagtcaaaacattgtagctgtcaatctaccctaaaattacagaactaacccagttgctgggctcattattaataatggcagaaagcaacataagcaaattgagaggataaaattgctttattggtttggcttccaaatcatggagagcaaaacatcacaacaattcagtgagcaaacacacagaggtgcttctaaaccatgaggcagaaaaccatttatgtttattttcataattggttttctggataggccaaaaatataacagcaccattcccttctatagcatgagggaaaatcaagatttcttttttttcctcttctatgttcatttccttcttcctccagtcactctttttgattgctatgattgtatccttggatggctcaattgcagtctgttgaaattaaagaaaaa

SEQ ID NO: 3580 - DNA, 454 bp, Homo sapiens
  MAP TO AC007263.3; EXPRESSED IN BT474, SIGNAL = 1.3; EXPRESSED IN BONE MARROW, SIGNAL =   1; EXPRESSED IN HBL100, SIGNAL = 0.79; EXPRESSED IN HELA, SIGNAL = 0.6; EXPRESSED IN ADULT LIVER, SIGNAL =   1; EXPRESSED IN BRAIN, SIGNAL = 0.76; EXPRESSED IN PLACENTA, SIGNAL = 0.77; EXPRESSED IN HEART, SIGNAL = 1.1; EXPRESSED IN LUNG, SIGNAL = 0.88; EXPRESSED IN FETAL LIVER, SIGNAL = 0.92
gcctagcaacactttgaggccccatctgaggggtaaactagtagtctgaaagactaaacagatgtcttgccctgaagttccagaagaaagataccatctgtaaatagcctcatcaactttcatagggcttttggcgggtagaggtgccttttaccattatccttctgtccacttgtggatttgtataaatccattaggttaaaattatccattccttttgctcttgaagctgtaggtcagtttcctgcccagtttaaaccttgtcgcatacttgtcacttttaaattctgtaagcaccatcctcagcattccagggctggtaaccccaaagatggcagcagccaagctcctagcaaggggcacccagtcagggataagatctgtagtcgttaagcacatcatataataatggtagataaatatttggagcattcttctctccttagtgtacttc

SEQ ID NO: 3581 - DNA, 449 bp, Homo sapiens
  MAP TO AC007465.2; EXPRESSED IN PLACENTA, SIGNAL = 1.2; EXPRESSED IN BT474, SIGNAL =   1; EXPRESSED IN BONE MARROW, SIGNAL = 1.2; EXPRESSED IN HBL100, SIGNAL = 1.2; EXPRESSED IN LUNG, SIGNAL = 1.1; EXPRESSED IN HELA, SIGNAL = 1.2; EXPRESSED IN BRAIN, SIGNAL = 1.2; EXPRESSED IN FETAL LIVER, SIGNAL = 1.3; EXPRESSED IN ADULT LIVER, SIGNAL = 1.1; EXPRESSED IN HEART, SIGNAL = 1.3
aaaacacggcaacaaactcctctccattctcactgaagccatctacccatgtactttctttccttcaggacacccatcaatttacagctgttcccccagaccctccacctcacccataatgctgtagccacctacatacaacctccaatttattttctcttgcctcaggactgctcagtaatgattttacttattcctccacagctttcgtttacatctcccatggcagtgattccggattttatgctgctatcaaactgcatgtcctacagcaccccactctcagttgcatgcagtacttgaacacatcagccatgattttgcttaaagtccccaccattacccctagatttcttgacagaaaccagcagactaaagcttcatccctccccaacttctcccaatacctcacgtcattagatcactttactgtttgtttgcttgggctt

SEQ ID NO: 3582 - DNA, 472 bp, Homo sapiens
  MAP TO AC007091.3; EXPRESSED IN LUNG, SIGNAL = 0.61; EXPRESSED IN PLACENTA, SIGNAL = 0.87; EXPRESSED IN HEART, SIGNAL = 1.1
gaagtcaacataagagattttcaaggaaagcttggttttaacaacattaaattttttagagaatatgggactatgtggaccgaaaacagtttgtaagtaagacattattgcaagtttttgcaaggtggcttaaattttttccttagcttgctagacagaaaccactgcaagaataagtaatggaaaaacagaaatagtaaaaatacaaggatagacgttttaaggtgaattgtagcgtggaaacaccaagaaaatccttttgccattctccattaatatacttaaatatccccttttatagaagagcatgttaaacccccacaacaattataagctaaatctgtttgccacagactgtgtaggattcttcaataacaagtgagcacatgcctctataagtgattttaaaataaaaagcgcaatttcaatctgtgaattagtactgtcatcatcctcacaacaaactgaccca

SEQ ID NO: 3583 - DNA, 469 bp, Homo sapiens
  MAP TO AL031121.5; EXPRESSED IN PLACENTA, SIGNAL = 0.76; EXPRESSED IN HBL100, SIGNAL = 2.9; EXPRESSED IN FETAL LIVER, SIGNAL =   1; EXPRESSED IN LUNG, SIGNAL = 0.62; EXPRESSED IN HELA, SIGNAL =   1; EXPRESSED IN ADULT LIVER, SIGNAL = 1.2; EXPRESSED IN BRAIN, SIGNAL = 0.72; EXPRESSED IN HEART, SIGNAL = 0.9
taaagggtctagacggtgcccaacgggggtggcatgtggtatataaaggggtgaagaaaggaatgcagcttgctagattcatttcccttttcgattttcggcaggctgactctcatttccccaaaggacatgcagagttggcatggaggctcccagcctggccggcccctggcaggagctgtggacaaaactctgaaatgtggggctaaatgttcagaaacagcaaatgctgataactcctccagacctgctggcattctgcctcctggccactcactccaacagcgtgggaggaccgggtaggggacagactgagggaagcctgtgcaggcattcatgtgtgcagaagtactggtttgcacacgcatctgcgtgtggctgtgtaggctgtgctgtgttagcaagaagaaagaagatcacggagagcattcagacgcccttcagctggacattcagctttttcttcttc

SEQ ID NO: 3584 - DNA, 450 bp, Homo sapiens
  MAP TO AC009241.1; EXPRESSED IN FETAL LIVER, SIGNAL = 0.83; EXPRESSED IN PLACENTA, SIGNAL = 0.77; EXPRESSED IN BT474, SIGNAL = 1.3; EXPRESSED IN BONE MARROW, SIGNAL = 0.83; EXPRESSED IN HBL100, SIGNAL =  14; EXPRESSED IN LUNG, SIGNAL = 0.67; EXPRESSED IN ADULT LIVER, SIGNAL = 1.2; EXPRESSED IN BRAIN, SIGNAL = 0.85; EXPRESSED IN HEART, SIGNAL = 0.85; EXPRESSED IN HELA, SIGNAL = 0.97
tttcaaaatgttactgcacattgacaatgctcccatgaatacttacccaaaagctctggtggagattaatgttgttttcatgcctgctaacatgacatccattctgcagcccgtggatcaaggaataattttgactttcaagttttattatttaagaaatacatttcatagagctatagctgctatacgtagtgactcctctgatgaatctgggcaaagtaaattaaaaaccttctgaaaggattcaccattccagatgccattaagaacattcgtgatttatgtgaggaggtcaaaacagcaacattaacaagagtttggaagaaactgattccaatcctcatggatgactttgatgggttaaagacttcagtggaggaagtaactgagtatgtaacagcaagagaactagaattagaaatagagcctggtgttgtgactgaattgctg

SEQ ID NO: 3585 - DNA, 493 bp, Homo sapiens
  MAP TO AC007879.2; EXPRESSED IN HEART, SIGNAL = 1.1; EXPRESSED IN BONE MARROW, SIGNAL =   1; EXPRESSED IN FETAL LIVER, SIGNAL =   1; EXPRESSED IN PLACENTA, SIGNAL = 1.1; EXPRESSED IN BT474, SIGNAL = 0.97; EXPRESSED IN HBL100, SIGNAL = 2.9; EXPRESSED IN LUNG, SIGNAL =   1; EXPRESSED IN HELA, SIGNAL =   1; EXPRESSED IN ADULT LIVER, SIGNAL = 1.1; EXPRESSED IN BRAIN, SIGNAL = 1.4
ttgaagaggggtcgtcaggatctgtctacaagggggtaaatatttttgcactgtagttttatgatactttttttacttatctcccagaattaactacttctctaatgggagtttaaacatttgattggttctactctccgagatgagaattagactttattgttatcaaattattactctattttattgattctaaattgcacaattttttcacattctgtcaattctgaaatcatgaggcatatcaaaatcaccatcagccaagcagcagtcatgatgtaccacacatggacgttgaaactttcaaaatgggagccagctactgcaaaggaaaactgtaggcaatggaagcagggcatcaacaatgctcttaatggcacagagcatgatgttgggtggaaaaatgtggatgttgatggcaatgggtcagataaactgtacaaaccatgacatgcatagcaaactaaacataaggggttttgataccagctgg

SEQ ID NO: 3586 - DNA, 469 bp, Homo sapiens
  MAP TO AL049733.3; EXPRESSED IN BONE MARROW, SIGNAL = 0.97; EXPRESSED IN HELA, SIGNAL = 1.2; EXPRESSED IN ADULT LIVER, SIGNAL = 0.93; EXPRESSED IN HEART, SIGNAL = 0.92; EXPRESSED IN PLACENTA, SIGNAL = 0.91; EXPRESSED IN BT474, SIGNAL = 2.1; EXPRESSED IN HBL100, SIGNAL = 1.1; EXPRESSED IN FETAL LIVER, SIGNAL = 0.98; EXPRESSED IN LUNG, SIGNAL = 0.95; EXPRESSED IN BRAIN, SIGNAL = 1.2
tgtgcttcagaccacactctgtctctgccaccatcagcacatgcggcagttacgaaaagaaaagactgcagatgatggtgttgagcaatctgtatgcttccttctttactaacacacttgaattccttaccagatggcattagaaacatgtatcatttgtactgcaacctgcacacaaaagtctactgttgtgtgcataaaattcaaccctgcctagcaagagaaaattttcctgtcttctgttctctaggtgaagctttcgtacaaacatctatgaagcccttgggtattcttttgagaaagaagaaagctttcttgtacactaaaatattgtgtcttgtgtggagaaaaaagcagaatattacttggatttggagggaagagcgtgcagcttttacagtgtatgatctcttttactactggcatatctggaggaattggtggaggtactattcccaaaccaggcatc

SEQ ID NO: 3587 - DNA, 460 bp, Homo sapiens
  MAP TO AL049844.6; EXPRESSED IN PLACENTA, SIGNAL = 0.59; EXPRESSED IN BONE MARROW, SIGNAL = 1.9; EXPRESSED IN HBL100, SIGNAL = 1.2; EXPRESSED IN ADULT LIVER, SIGNAL = 0.84; EXPRESSED IN BRAIN, SIGNAL = 0.71; EXPRESSED IN HEART, SIGNAL = 0.91; EXPRESSED IN BT474, SIGNAL = 0.81; EXPRESSED IN HELA, SIGNAL = 0.66; EXPRESSED IN FETAL LIVER, SIGNAL = 0.98
tttcttcaccggaaattatcttgattttcttgctaagaacagggactttatctgactttcccacttctgtattctcagttcccataacaaggtctggcacaaagtaggtgctcaaggaatgtttgttgaaggaaggttaagtatggattctgcagaacacagctgatgttgcctgccctagaagtgtagatttttaaaaagtatctttaacatgactactaaagatgcatgtgtggactatggaattattctccgtctttttgttctgttttaattaattgttgtgattttgttcctttgaagcctcacaggaagaaaaagccctttatagagaagaagaaagctgtgtcttttcacttggtccaccggagccaacgagatcctttagcagcagatgagagtgcaccccagagggttctattgcccacacaaaaagtaggtcctgttctttagccagtca

SEQ ID NO: 3588 - DNA, 437 bp, Homo sapiens
  MAP TO AC010978.2; EXPRESSED IN HEART, SIGNAL = 1.9; EXPRESSED IN ADULT LIVER, SIGNAL =   2; EXPRESSED IN LUNG, SIGNAL = 1.7; EXPRESSED IN BRAIN, SIGNAL =   2; EXPRESSED IN HELA, SIGNAL = 1.8; EXPRESSED IN HBL100, SIGNAL = 1.8; EXPRESSED IN PLACENTA, SIGNAL = 1.7; EXPRESSED IN BT474, SIGNAL =   2; EXPRESSED IN FETAL LIVER, SIGNAL = 1.5; EXPRESSED IN BONE MARROW, SIGNAL =   2
tctgccagcaggacacttagaagagaaaggtcagttgacgaatatttttgctttgctcgacacgtttctgccagcctcagctggagagctctatgctcctgccctgcccagatccctctctgcagctacgggatcagctgaaggtgcctgctgctgcttgcacgctgtcacccgctaccttccccccgccaccaggcctgccctgtgcccttgctgttcacagtgtggccctaacacctccttcacatcactgaatggctctgagtccttctgctcacagccgtggtgtagcctgtcttccttgccacgggtacttcctgtcctcacctgagcgcctccgtgtcctgcgggaccgaaagagacatgctcagggaggtcctccctgacctcctcctctttattgcgattgtcaccgttggtcatctgcaacttgggtt

SEQ ID NO: 3589 - DNA, 419 bp, Homo sapiens
  MAP TO AC011743.2; EXPRESSED IN BONE MARROW, SIGNAL = 7.3; EXPRESSED IN HEART, SIGNAL =   6; EXPRESSED IN PLACENTA, SIGNAL = 7.5; EXPRESSED IN ADULT LIVER, SIGNAL =  11; EXPRESSED IN BRAIN, SIGNAL = 6.4; EXPRESSED IN HELA, SIGNAL =   8; EXPRESSED IN HBL100, SIGNAL = 8.2; EXPRESSED IN BT474, SIGNAL = 6.4; EXPRESSED IN FETAL LIVER, SIGNAL = 7.6; EXPRESSED IN LUNG, SIGNAL =  10
aactttttatccccaaccccatggcactttctttctttagtcaaaactgtaaacctgtgatgtgtgatcttccaacaggcaagcatcatgtcctgttgcatttttgtatatagaacttcaaccactatatccaaccatttaatctttctatcattaccacaaagacaaagataaaagaacaaaggataatctttcatcaaagaagagagcttctttaaagggcgcattatttttgttcttacctttctgtgcgattagacaaaattcttcttgcagctttgtataatctgttgaactttccagagggtcagtgaggtggctagggggagtctgaaattcaatatctgcacaaaggttggggttggaggaatgcaagcgaactggtgacatggtagcactgaaaggaacctgaaagggga

SEQ ID NO: 3590 - DNA, 460 bp, Homo sapiens
  MAP TO AC011036.2; EXPRESSED IN FETAL LIVER, SIGNAL = 1.2; EXPRESSED IN LUNG, SIGNAL = 1.3; EXPRESSED IN BONE MARROW, SIGNAL = 1.3; EXPRESSED IN HELA, SIGNAL = 1.2; EXPRESSED IN HEART, SIGNAL = 1.1; EXPRESSED IN PLACENTA, SIGNAL = 1.9; EXPRESSED IN BT474, SIGNAL = 1.2; EXPRESSED IN ADULT LIVER, SIGNAL = 1.4; EXPRESSED IN BRAIN, SIGNAL = 1.3; EXPRESSED IN HBL100, SIGNAL = 1.4
tgggttcttcactgcatctgttttgaccagaattttcttcaatcagcagggtattggctagaaaacaagtcctgctagccttctatctcatccctccccttagaaattacacactcttccttaatctttaggaggtttcagaagaacagaggtccatcttctgtaaatgcttcttgctgatttcatgggcaaaggccctcctaggttggaggagcaacaattcctggatacctgatctaaggggtccaaaagcataatgttttcattttccaggtcagaagatgggatgggttcgaaacattttgccagctttgtctttacatggaattgttgtaagctggaagacaccaactttacaaagaggttaaacaagcaagggccaaaaattagtagcaacacaacagataacaaaggtcctaggaaaggtcaaaaccaggtaagacttggaaaggccattttg

SEQ ID NO: 3591 - DNA, 379 bp, Homo sapiens
  MAP TO AC011186.2; EXPRESSED IN LUNG, SIGNAL = 2.1; EXPRESSED IN BONE MARROW, SIGNAL = 2.1; EXPRESSED IN HEART, SIGNAL = 1.7; EXPRESSED IN PLACENTA, SIGNAL = 1.7; EXPRESSED IN ADULT LIVER, SIGNAL = 2.2; EXPRESSED IN BRAIN, SIGNAL =   2; EXPRESSED IN HELA, SIGNAL = 1.9; EXPRESSED IN HBL100, SIGNAL = 2.2; EXPRESSED IN BT474, SIGNAL = 2.1; EXPRESSED IN FETAL LIVER, SIGNAL = 2.1
tcttcaaaaatgccatggtggaacaaacattgaataggcattctaattccaaaaggaaaaaaaaaagggaagggataaagaggttactggtcccaagcaagtttgaaatccagcaaggaatgttccactaggttacaagacatgagaataatcctctgtggctcaaggctctaccctctgggctcacagcagctctgtcctctgcctctgtgcctgctgtctcttcctcagccccactggcttctgctccttccatgtcagactcggcctctgcactggctacatcagacccacaaacccaggtggcctctgttcacagcagttctgtcattggagttattctttctgtttcttgaaggacagcttaggtttgtagcca

SEQ ID NO: 3592 - DNA, 477 bp, Homo sapiens
  MAP TO AL049798.7; EXPRESSED IN HEART, SIGNAL = 1.3; EXPRESSED IN LUNG, SIGNAL = 0.64; EXPRESSED IN ADULT LIVER, SIGNAL =   1
tggcccaaactgagagtaggtagaacagcttctggaaggaacagagccacagaggagtctgtctcccacagacactccccatcccaggtttttgtcctgtcatgtagtccgctcagcagcagccctgctccacccagagcatgcagtggtgaggtttggggtgggatttgcccaggctttggttactgatattccttgagagtctagcagcccccaggaggagggatatgcagagatgttcccagccccagtgcagtgcagggactggcccttaccattccatgccagccctgttgatctcctcccaccagcactccgtgggttccccgaggctctgtggcgtgggcatgcaggcgtagttccattgtctgtcagaaccttccttcttgctgaagatgctcctcacggccactatcacctgcccctggggacactggtagctgaagccttgccggttcaaattcacccacccatcat

SEQ ID NO: 3593 - DNA, 422 bp, Homo sapiens
  MAP TO AC011257.2; EXPRESSED IN FETAL LIVER, SIGNAL =   4; EXPRESSED IN LUNG, SIGNAL = 4.1; EXPRESSED IN BONE MARROW, SIGNAL = 4.4; EXPRESSED IN HELA, SIGNAL = 3.3; EXPRESSED IN HEART, SIGNAL = 3.1; EXPRESSED IN PLACENTA, SIGNAL = 3.7; EXPRESSED IN BT474, SIGNAL = 3.7; EXPRESSED IN ADULT LIVER, SIGNAL = 5.4; EXPRESSED IN BRAIN, SIGNAL = 3.8; EXPRESSED IN HBL100, SIGNAL =   4
caggcttgcagcttcttttcatgatgtgctgttgatccaaaagaagcctcttttgatggcacatataaaacaggctaataatgtagattaaagtataaggaagaggtatacttttctaagtctattcagtttattataaaatttaactaagattgcaccaatcccctactttctagcctcaccattagcagctggagagattttcacaggcaatctccagtgaaaatatcccagttaccaacttatgaattttcttcttttagttcaaatatagataatgatgatgatgttgatgtagatagagagagagagaaagagtattagatagccagactcattactaagcagttgccatggccaagcgctgttctttgtaatgaaatggataacaaacgtggatatgacattgcccctaacttcca

SEQ ID NO: 3594 - DNA, 370 bp, Homo sapiens
  MAP TO AC012061.2; EXPRESSED IN HBL100, SIGNAL = 1.4; EXPRESSED IN ADULT LIVER, SIGNAL = 2.2; EXPRESSED IN FETAL LIVER, SIGNAL = 1.4; EXPRESSED IN LUNG, SIGNAL = 1.3; EXPRESSED IN HEART, SIGNAL = 1.3; EXPRESSED IN HELA, SIGNAL = 1.2; EXPRESSED IN PLACENTA, SIGNAL = 1.3; EXPRESSED IN BT474, SIGNAL = 1.3; EXPRESSED IN BRAIN, SIGNAL = 1.2; EXPRESSED IN BONE MARROW, SIGNAL = 1.2
tgagtcctcttttccctcccccacatgccctgtttctggcccagcgcccactgaactctgtacttgttcttgatccttgtattttcctgtctctctacacagaatcggctgttgagtgtgctctcagtggagctttggttttagctgttctctgacaaagagcttgttctgagctgcacatctcgtcctctttgttcagcctcaggcttcaagcattgaatcctaaatattctccagctgggaatcagacaagggcagaaatgaagaacccagaagcccagcaggatgtttcagtttcccagggatttcgcatgttgttttacacgatgaaacccagtgaaacttcattccaaacattagaagaggtgcc

SEQ ID NO: 3595 - DNA, 437 bp, Homo sapiens
  MAP TO AC011012.2; EXPRESSED IN BT474, SIGNAL = 4.1; EXPRESSED IN FETAL LIVER, SIGNAL = 3.6; EXPRESSED IN LUNG, SIGNAL = 3.8; EXPRESSED IN BONE MARROW, SIGNAL = 3.5; EXPRESSED IN PLACENTA, SIGNAL = 4.1; EXPRESSED IN HEART, SIGNAL = 3.3; EXPRESSED IN ADULT LIVER, SIGNAL = 4.5; EXPRESSED IN BRAIN, SIGNAL =   4; EXPRESSED IN HELA, SIGNAL = 3.4; EXPRESSED IN HBL100, SIGNAL = 3.6
gaacttccactgggatgtggttagccagcaacggttgtatctgggtgcctgcagttgtggcttattgcaaattaacccctggccactggatgccactcttatgtcagaattttggtttgcccatctcctgttgttaaactcctaccagcaaatgtttatttggaaggttgggatagaagaaaatgtgaggccttgaaatcagactgtagtggattatctgaatagctccaattcttcatccctttgccataggactttgcagttctcccactaagagaggtggaatatattcccctgcccctgaagtttgtctgtgtagctttctttggccaattgaatgttagcataaatgatgtgaccaagaatttcaaagacgcttgcacaattggagttgctcttctgggcctctgccttggccttgaggacaacatgcctga

SEQ ID NO: 3596 - DNA, 474 bp, Homo sapiens
  MAP TO AP000014.2; EXPRESSED IN PLACENTA, SIGNAL = 2.4; EXPRESSED IN ADULT LIVER, SIGNAL = 2.5; EXPRESSED IN LUNG, SIGNAL = 2.6; EXPRESSED IN HBL100, SIGNAL = 2.3; EXPRESSED IN HEART, SIGNAL = 1.5; EXPRESSED IN FETAL LIVER, SIGNAL = 1.5; EXPRESSED IN BT474, SIGNAL = 2.9; EXPRESSED IN BRAIN, SIGNAL = 2.7; EXPRESSED IN BONE MARROW, SIGNAL = 3.1; EXPRESSED IN HELA, SIGNAL = 1.9
tgaagcaaggggatgttgtcaatattgagtgaggttcagtattctagatcttgtaatagataagaacatcaggtccagtttaaaatgagcatctatcccacagccatcccaggatagaacacatcttacctgtggcttccaccattccttctaggatgaccacaatttccagttcctctttgggcagctgggctttggagatctcccagaaaggactctgttggttaatttcatggctaatgatcagcggtgacaccagaaacagacggtcatcccccgtgtaataccctacgttgatatccgtctggttcaacgggatgaactccccctccgaggtctgtttggatttgatcaacttggctctgatggaagcctccacaatgtgggaattcctaaggtcccctacccggaacatcaggcacagtttcccatcccgcatggagatcactgcatgggtggaaaagaccagggtct

SEQ ID NO: 3597 - DNA, 467 bp, Homo sapiens
  MAP TO AC007785.1; EXPRESSED IN PLACENTA, SIGNAL = 0.9; EXPRESSED IN LUNG, SIGNAL = 0.78; EXPRESSED IN HELA, SIGNAL = 0.89; EXPRESSED IN HEART, SIGNAL = 0.94; EXPRESSED IN BT474, SIGNAL = 0.83; EXPRESSED IN BONE MARROW, SIGNAL = 1.2; EXPRESSED IN HBL100, SIGNAL = 0.73; EXPRESSED IN FETAL LIVER, SIGNAL = 0.95; EXPRESSED IN BRAIN, SIGNAL = 0.98; EXPRESSED IN ADULT LIVER, SIGNAL = 0.9
ctgcactgcttgcatttttctaccagctgagtgtctggtgatagctgggtgcaagaagattgtgagttatttatgcaggaggactgtttgtcctcgaccatgaagaaaggcagacttatagcttatctgcttcttctttttgctttcccctgctgccaccagcctgactcttttgccgttagaactccacaaacaggagttcctcttcaagccctctgtatccctcatccctccctcattcctttagttaagagcaaggtagggacctttacctggtacagctccgggagatgggagataagtgacactgagacttcatacccagaaccctcaacttcacaagaaacttctgctgggggccaaaagactcgggacagcagagctcaaagcagggccagaaggtgcaggtggagccacagcggcgggtctcctttaaggataagatggcatcatcataacagcactgc

SEQ ID NO: 3598 - DNA, 404 bp, Homo sapiens
  MAP TO AC010197.7; EXPRESSED IN PLACENTA, SIGNAL = 1.2; EXPRESSED IN HBL100, SIGNAL = 1.2; EXPRESSED IN BRAIN, SIGNAL = 1.5; EXPRESSED IN HELA, SIGNAL = 3.4; EXPRESSED IN HEART, SIGNAL =   3
aaacggcatgattttgacaacatggagaattttaaatgttaatagtgtatactggatgatagtattgcatcagtgttaaattctctaagtgtagtaactatttatggtcacatagggagaatataattcttttaggagatacatgcttaaatatttgaaagtgaagtgggattacatctacaacttcaaattgctcaggaaaaaaagaaatcttttaaagatataataaaattccaaggtgcccaaagaaactgtgtatacatgctgaacttctctatcatctatggtgttcttgaaatgtacctttcccagaatgctgatagcacacgccataccaacttgtccaacacccactacagtgatcttattgtttggaactgttgcctcttcttccgcaactggtg

SEQ ID NO: 3599 - DNA, 404 bp, Homo sapiens
  MAP TO AC011174.2; EXPRESSED IN BT474, SIGNAL = 1.8; EXPRESSED IN HEART, SIGNAL = 1.7; EXPRESSED IN ADULT LIVER, SIGNAL = 2.1; EXPRESSED IN BRAIN, SIGNAL = 1.9; EXPRESSED IN LUNG, SIGNAL = 1.9; EXPRESSED IN BONE MARROW, SIGNAL = 1.9; EXPRESSED IN PLACENTA, SIGNAL = 1.7; EXPRESSED IN HELA, SIGNAL =   2; EXPRESSED IN HBL100, SIGNAL =   2; EXPRESSED IN FETAL LIVER, SIGNAL = 1.9
gaacaggctgagaacaactgcaatacagaatagaatttgctaattagctactacgacttaaaacttcaaatttttctgttaatttgattcacagagtggagtaggatgggatttgtggatgtccaatgcctcggaatgttgggatggcttttcaagaaaccatcattactatctaaataatatgggaaccatagtatatgtcaaattctccaaatgagtattgtccactcttcctgagtgctgtcttcatacactcttgattcaggggtcaacaaaacaacagcagcagcagcagcagtaataacaacaactacaaaagcagcatcaaaaactatccacttctcagttacctttctgccaataaacaaatgtaaaatattgatcgcaatggaaaccttttgtaa

SEQ ID NO: 3600 - DNA, 441 bp, Homo sapiens
  MAP TO AL121782.4; EXPRESSED IN BT474, SIGNAL =  40; EXPRESSED IN HBL100, SIGNAL =  14; EXPRESSED IN HELA, SIGNAL =  31; EXPRESSED IN PLACENTA, SIGNAL = 6.3; EXPRESSED IN ADULT LIVER, SIGNAL = 2.8; EXPRESSED IN FETAL LIVER, SIGNAL =  20; EXPRESSED IN BRAIN, SIGNAL =  33; EXPRESSED IN LUNG, SIGNAL = 6.8; EXPRESSED IN BONE MARROW, SIGNAL =  11; EXPRESSED IN HEART, SIGNAL =  29
agctgagggcctctctcttcctttcatgctgtcgctggggctggtggtccaggggtcttattccttggaggccatgtgggccatgaggtccaccaccatattgctgtagccaaattcgttgtcacaccaggaaatgagcttgacaaggtggttgttgagggcattgccagccccagcatggaagatggaagagtgggtatcactgttggaggagacaatctggtgctcagtgtagtccaggatgcccttgagggggccctctgacacctgcttcaccaccttcttgatatcatcatatttggcaggtttctccagacggtaggtcaggtccataactgacacattggcaatggggacatggaaggccatgccattgagcttcctgttcagctcggggatgaccttgcccacagccttggcagtgccagtagatgcagggat

SEQ ID NO: 3601 - DNA, 383 bp, Homo sapiens
  MAP TO AC011208.2; EXPRESSED IN PLACENTA, SIGNAL =  12; EXPRESSED IN HEART, SIGNAL =   6; EXPRESSED IN HBL100, SIGNAL =  20; EXPRESSED IN FETAL LIVER, SIGNAL = 8.7; EXPRESSED IN BT474, SIGNAL = 9.7; EXPRESSED IN ADULT LIVER, SIGNAL =   3; EXPRESSED IN LUNG, SIGNAL =   7; EXPRESSED IN BONE MARROW, SIGNAL = 9.2; EXPRESSED IN BRAIN, SIGNAL = 7.4; EXPRESSED IN HELA, SIGNAL =  16
cagtccttgagattttgcccatacacatgagtatttgtcaaaaacatggcttctttgtagcagctaggccctgccaccactgtgcttggctgagttcacaattctgttgtaacctgtagcttccccgtcacttctctggctctcctctcctgctaagctttgtttcctgactgtaattaaaatcttctgccactgccatagctactgctgctactggaaccaccccagccaccttggttttgtggtttggcaaagtactggcttccaccaccataggggccagagcttctgcctccaaaatttactctcttcatgggtccaaaatttgaagactgttgcaattgccaaaatcactgtagcttccaccacctccaaaattgctt

SEQ ID NO: 3602 - DNA, 430 bp, Homo sapiens
  MAP TO AL121838.2; EXPRESSED IN HELA, SIGNAL = 1.3; EXPRESSED IN HBL100, SIGNAL = 1.4; EXPRESSED IN HEART, SIGNAL =   2; EXPRESSED IN LUNG, SIGNAL = 1.6; EXPRESSED IN BRAIN, SIGNAL = 1.1
tgctccccagcaaagataagaaacttgccaaccactcccctggtccagcatttggccaaggcagacactgaggctctgaggacaagtggctttcccaaggaaggtcctgctgcccagaagagcttggcccagagccctgtgcccagtgaccccactagcttttccctctactttccccgcctggctgtgctccccttgattcgtgcctattggccgtgcccatagtctctcccaagctcaaagttcacctctttctccagatcccctggggtccccaagcctgactcagtgtatctgggggggtcccttctgagcccacgcaccgacccagctcctcttccctgcagttgtggctgtgcccatggtgctcagtgccatgggcttcactgcggcgggaatcgcctcgtcctccatagcagccaagatgatg

SEQ ID NO: 3603 - DNA, 436 bp, Homo sapiens
  MAP TO AC011235.2; EXPRESSED IN BONE MARROW, SIGNAL = 2.8; EXPRESSED IN LUNG, SIGNAL = 3.1; EXPRESSED IN HELA, SIGNAL = 2.8; EXPRESSED IN PLACENTA, SIGNAL = 2.8; EXPRESSED IN HBL100, SIGNAL = 2.9; EXPRESSED IN HEART, SIGNAL = 2.6; EXPRESSED IN FETAL LIVER, SIGNAL = 3.1; EXPRESSED IN ADULT LIVER, SIGNAL = 3.2; EXPRESSED IN BT474, SIGNAL = 2.5; EXPRESSED IN BRAIN, SIGNAL = 2.8
gtagcagcccaggacagaagagcagctgggcgcagccaacaaagggattcagactgaatttcccttacccctcattgggcagaaaagacttctaatcaacacctcttggctacatcctggcttgtcagtgacctgtcccccctaacttggcagctctctatgtttgctcctcagcttggatgggaggtgggagggaccaaagccagcttccctcccttcccaggcctctaagagcattcggacaccggcatcatcctcctctctggcaagcaccactgctctcttatctgcttctgcagggagggagccatcagcactctccctgttccattgccaggcgccaccaaggcccctctggcttggtgcctcctcacaggcggagtagcagaggccggagtcccgacttctggccccagcttcacccctaaccctggat

SEQ ID NO: 3604 - DNA, 459 bp, Homo sapiens
  MAP TO AC006549.20; EXPRESSED IN HELA, SIGNAL = 0.78; EXPRESSED IN HEART, SIGNAL = 0.85; EXPRESSED IN PLACENTA, SIGNAL = 0.82; EXPRESSED IN BT474, SIGNAL = 0.77; EXPRESSED IN BONE MARROW, SIGNAL =   1; EXPRESSED IN HBL100, SIGNAL = 0.8; EXPRESSED IN FETAL LIVER, SIGNAL = 0.82; EXPRESSED IN LUNG, SIGNAL = 0.91; EXPRESSED IN BRAIN, SIGNAL = 1.4; EXPRESSED IN ADULT LIVER, SIGNAL = 0.88
gcggcacactattatcagccatcgtccatgcagtgttcacatttccttcgtccttaccgatgtctttttctccataccaggatctgattttggtcattgaaattgccaaaaacaaggggacacaggagtgtgtttggccaggtgggccacctgctgctgccgcccccagatgttcatcccagccccccacacactcgggggattttcaaagggtctcacgtgttgggtgccagagacaccctcctgggcctcggattcctcctctgtgatgaaggcgggggctgctggctcctccataccatgctcggcccccagcagacaggcaacaggggccttgtcccactgtagctgtggtcaggtggtccagggctagacggtcctacggggagctgaggcccccacctcgagatctccctgcccaagacaccagtggggttggggtgggtcaaaggcctgttc

SEQ ID NO: 3605 - DNA, 364 bp, Homo sapiens
  MAP TO AL096801.16; EXPRESSED IN LUNG, SIGNAL = 2.6; EXPRESSED IN BRAIN, SIGNAL = 1.6; EXPRESSED IN HELA, SIGNAL = 1.4; EXPRESSED IN PLACENTA, SIGNAL = 2.5; EXPRESSED IN HEART, SIGNAL =   2; EXPRESSED IN FETAL LIVER, SIGNAL =   2; EXPRESSED IN ADULT LIVER, SIGNAL = 2.6; EXPRESSED IN BT474, SIGNAL = 2.3; EXPRESSED IN BONE MARROW, SIGNAL = 2.1; EXPRESSED IN HBL100, SIGNAL =   2
acaagatgagctgcttgtgccaagtgcttaagggaggcaatgcattcctttgacatacagcgataggaaagcgtgcctcttctagttcattcattaaagcagagctgccttatgtaagaagcttcccttacaagccctcatttgttttttattttttctctggtgtaggtatcgatatcctgaagcttgtagcagcccaagtgggaagccagtggaaagatatctatcagtttctttgcaatgccagtgagagggaggttgctgctttctccaatgggtacacagccgaccacgagcgggcctacgcagctctgcagcactggaccatccggggccccgaggccagcctcgcccagctaattag

SEQ ID NO: 3606 - DNA, 416 bp, Homo sapiens
  MAP TO AL096814.11; EXPRESSED IN BT474, SIGNAL = 7.7; EXPRESSED IN BRAIN, SIGNAL = 8.6; EXPRESSED IN HEART, SIGNAL = 6.2; EXPRESSED IN ADULT LIVER, SIGNAL = 6.3; EXPRESSED IN FETAL LIVER, SIGNAL = 6.3; EXPRESSED IN LUNG, SIGNAL = 8.3; EXPRESSED IN BONE MARROW, SIGNAL = 6.7; EXPRESSED IN HELA, SIGNAL = 7.9; EXPRESSED IN PLACENTA, SIGNAL =  12; EXPRESSED IN HBL100, SIGNAL =  10
agattcccactgtctggtgctttgtatgtggacggtgggagggatgatgaaggttggcttctggttactgagaggcctcaggggataaagaggggtcctgccctttctgggtttgctcctcctctggcaatcttcatgctcccctgggaagcccccaaacctgtctggacttgctcaaggcagatatcctgttggtcactggcccccattatctcacagtcccaatttcttgccaaaacaacttccctttgctgctaggggacccctgcagctgaaccaagaagacagaaatgcggccccggagcctgggctgcagggagagtgtgaggaccaaatcctagctaaaggttttacaggcccagacacgcatacttctgtttgttggaaacattaccccaccaagctcagtcacctca

SEQ ID NO: 3607 - DNA, 489 bp, Homo sapiens
  MAP TO AC011997.2; EXPRESSED IN ADULT LIVER, SIGNAL = 1.2; EXPRESSED IN BT474, SIGNAL = 0.93; EXPRESSED IN BRAIN, SIGNAL = 1.7; EXPRESSED IN HELA, SIGNAL = 0.97; EXPRESSED IN HEART, SIGNAL = 0.99; EXPRESSED IN PLACENTA, SIGNAL = 0.98; EXPRESSED IN HBL100, SIGNAL = 1.2; EXPRESSED IN FETAL LIVER, SIGNAL = 0.97
tgctttcctttcattggtggcttttttccagatagaatttgttttgtgtccacagagtgattggtctctgttttacatgaaaatgttatctctaagaatggttccatgtggccactgatgattctccagttgtgcttttctgtcttaaaattaccctctgtattttagagcagatagaaagaagataaaaacccctaaatttgagatttggggtttatgacagacatgtcattttcattagaaaactatatactgcttttagtattttgtgattaagccaaacagtatagttgaacatttccataatgatacctttggggatagaagtatgactccttcttcttcttcttcttcttcttcttcttcttcttcttcttcttcttcttcttcttcttcttcttcttcttcttcttcttcttcttcttctccttctccttcttctttcttcttcctcttcttcctcttcttcttcctccttcttcctcttcc

SEQ ID NO: 3608 - DNA, 464 bp, Homo sapiens
  MAP TO AC007092.3; EXPRESSED IN PLACENTA, SIGNAL = 4.6; EXPRESSED IN FETAL LIVER, SIGNAL = 3.4; EXPRESSED IN HELA, SIGNAL =   4; EXPRESSED IN ADULT LIVER, SIGNAL = 2.9; EXPRESSED IN BRAIN, SIGNAL = 4.6; EXPRESSED IN BT474, SIGNAL = 3.8; EXPRESSED IN HEART, SIGNAL = 3.1; EXPRESSED IN LUNG, SIGNAL = 3.9; EXPRESSED IN HBL100, SIGNAL = 3.5; EXPRESSED IN BONE MARROW, SIGNAL = 4.4
aggcgggttcaggttatgtgaaacatggtctggaagtgagggcatttgcttgaacccactcctgtagccccgcaaaggcagggcggagggcagagggctgccttctaaaacatatctgaggcctttcttgtcctggtttaaaggggtgcactgctactatggtcattaacaaatgttttctgggcactaagctgtggacaccaatcatgctaggatgaaaaatatgaacagaagtgcaagggagacacaaagtggggcaattgactctcagacctcacaaatctctacccctcccaggtgctttgtctcaagaaatggcaccaccatggagacccatgaccatcagaacctgggaatcactctaaacttcttctactcctttgccactgtatggtgatccatcattccacccccaaatgcctcttcacctacattgttgagtgtgatctgtgttaggacatttt

SEQ ID NO: 3609 - DNA, 418 bp, Homo sapiens
  MAP TO AC011242.2; EXPRESSED IN HBL100, SIGNAL = 1.2; EXPRESSED IN FETAL LIVER, SIGNAL = 1.1; EXPRESSED IN BT474, SIGNAL =   1; EXPRESSED IN LUNG, SIGNAL = 1.2; EXPRESSED IN PLACENTA, SIGNAL = 1.2; EXPRESSED IN HELA, SIGNAL =   1; EXPRESSED IN HEART, SIGNAL = 1.1; EXPRESSED IN ADULT LIVER, SIGNAL = 1.3; EXPRESSED IN BRAIN, SIGNAL = 1.4; EXPRESSED IN BONE MARROW, SIGNAL = 1.3
agcttgcagtctagttggggaactagcacacatgaggaaataatgaaccatgtaaaaaagtgtataaataaacctgtaaatgccataatctgtaaagtagactatacagttagtaatcatgtattaatcgaattgctttttaaatggagattatgctcatttgtattcataagaaaaagaccaatgtgctaattagaagttttttaaaatgttgtttcctgtttttctgtttcagattctgctgcaaccctttcctatactacatcaggactttatacatctctgatatacaagaacatgaccaccccagtgtatacaactttgaagggggtaactcattattgttattgttaaaacatgtgcttctcttcatgatggatcaaggaaattgttaattcaagctccagattccattctt

SEQ ID NO: 3610 - DNA, 371 bp, Homo sapiens
  MAP TO AL121752.2; EXPRESSED IN PLACENTA, SIGNAL = 3.7; EXPRESSED IN HEART, SIGNAL = 3.6; EXPRESSED IN BT474, SIGNAL = 4.1; EXPRESSED IN LUNG, SIGNAL =   3; EXPRESSED IN HELA, SIGNAL = 2.2; EXPRESSED IN HBL100, SIGNAL = 5.1; EXPRESSED IN ADULT LIVER, SIGNAL = 2.5; EXPRESSED IN FETAL LIVER, SIGNAL = 2.6; EXPRESSED IN BRAIN, SIGNAL = 3.7; EXPRESSED IN BONE MARROW, SIGNAL = 4.5
cagttagccagaccagcacctgaatttcctctccaccacattctaactacttctttgggaaagttctctgacttctctaagcccctgatccctcatatgtaaaatgagaataaagtagttgtgagcatgtgtgaaataatgtatgtaaataaataaatgataatatacataaaacacctagtagtaattgtatttatgaaatacctgactttaaaataatctttaaaaacagactacattttactccctctccatcgtacctccatcataggtatgttccaataatatttgttccattccattttgtaaaattaatttctgcactgagaacatagttttgctttttcttgcagagaagggagtagtgatgg

SEQ ID NO: 3611 - DNA, 367 bp, Homo sapiens
  MAP TO AL121755.4; EXPRESSED IN BONE MARROW, SIGNAL =   5; EXPRESSED IN LUNG, SIGNAL = 3.3; EXPRESSED IN BRAIN, SIGNAL = 5.4; EXPRESSED IN HELA, SIGNAL = 5.5; EXPRESSED IN HBL100, SIGNAL = 7.2; EXPRESSED IN PLACENTA, SIGNAL = 3.5; EXPRESSED IN HEART, SIGNAL = 5.6; EXPRESSED IN ADULT LIVER, SIGNAL = 2.7; EXPRESSED IN BT474, SIGNAL = 5.8; EXPRESSED IN FETAL LIVER, SIGNAL = 2.6
ctcttgccctccaaagattggtgagcattcctatctggagcaatgtcagcctgtcagagcctaaatgaggaaagagacagcctggcccagccccaccactcaccccacccaccatcctcacctgtcaatggcaatggccagcaaggcattggtggagacgtagagggagacggtgcgcaggtagttgacggaggcacagagcacgtggccatgctcccaggagagctgccgtaccacgtagtagtccatctcgaaggggcagcagatgatggccaccaggaagtcggagatggccaggttggcaatgagcagattggtgaggttgcgcaacttcttatagcgggtgagggcagcgataaagacaaag

SEQ ID NO: 3612 - DNA, 480 bp, Homo sapiens
  MAP TO AC007313.3; EXPRESSED IN PLACENTA, SIGNAL = 0.9; EXPRESSED IN HELA, SIGNAL = 0.84; EXPRESSED IN BRAIN, SIGNAL = 0.88; EXPRESSED IN HEART, SIGNAL = 0.8; EXPRESSED IN BT474, SIGNAL = 0.65; EXPRESSED IN ADULT LIVER, SIGNAL = 0.88; EXPRESSED IN LUNG, SIGNAL = 0.95; EXPRESSED IN FETAL LIVER, SIGNAL = 0.87; EXPRESSED IN HBL100, SIGNAL = 0.73; EXPRESSED IN BONE MARROW, SIGNAL = 0.75
cctggcatagcttaaaaggcacccatttcataacaacacatgtgcaaagaattacaataattgcagcgcacacatcaggaacagacagagtgaacaatgaatattaaaaacacattcctagagctggccctgtggcttggcagccgcgcacagcatggagacctgcgagggagtcaaaggaagcctctttgcttttccagagctgtcagggcttggcaggagctgaggtgggaaccttcggtgtatgaggaaagtggaaggaggaaggtggcggtgactatgcccagcggtgtgactcctgtctcctcctggcagagcctagggtggcttcaggagggtttcatagaagaagtcagtctcagccgtttggtgctccaattcagagctgaagcggagccagactgagaaggaggagggatggggatagaaaaacaaacaccagagaacaaacagacagaaggtagtgctgggaacagccag

SEQ ID NO: 3613 - DNA, 360 bp, Homo sapiens
  MAP TO AC012143.1; EXPRESSED IN BONE MARROW, SIGNAL = 1.3; EXPRESSED IN HELA, SIGNAL =  14; EXPRESSED IN PLACENTA, SIGNAL = 1.7; EXPRESSED IN HEART, SIGNAL = 1.4; EXPRESSED IN HBL100, SIGNAL = 1.8; EXPRESSED IN FETAL LIVER, SIGNAL = 1.4; EXPRESSED IN BT474, SIGNAL = 1.7; EXPRESSED IN ADULT LIVER, SIGNAL = 1.4; EXPRESSED IN LUNG, SIGNAL = 1.8
ggttgagaattatgtgccaatgtctacaatacctgtctttccatatgttatctcatttaactcttaccaccatcttgaaattattcctttctccaatttacagatgaaaatactgaagctctaagaagtgaaatgagaagctcaaaaagccacagtaaacaagtgtagatgattttatagctccaaggtttttacattgagcatgattcttcttattttcctctttcctcatagacatgactccaagattagaatggtccgatggcaccatttacctcttatggtcctcactgctacacgtacagatagatgtcttcccactgaaagtcaaaaatctgctgatgggcaggaaaatgtcag

SEQ ID NO: 3614 - DNA, 423 bp, Homo sapiens
  MAP TO AC012271.1; EXPRESSED IN FETAL LIVER, SIGNAL = 1.3; EXPRESSED IN ADULT LIVER, SIGNAL = 1.7; EXPRESSED IN BT474, SIGNAL = 1.5; EXPRESSED IN BRAIN, SIGNAL = 1.7; EXPRESSED IN BONE MARROW, SIGNAL = 1.5; EXPRESSED IN LUNG, SIGNAL = 1.3; EXPRESSED IN HELA, SIGNAL = 1.3; EXPRESSED IN PLACENTA, SIGNAL = 1.4; EXPRESSED IN HBL100, SIGNAL = 1.5; EXPRESSED IN HEART, SIGNAL = 1.2
ctatgtgatgtgtccaccgcagagatgtagagcagtgcatagggaaagacacttaggcagaacccgcctcggtcttttttttttcagaagctcttcctgggctattttgcttgctgttaggaggcagctaataaacagaatctcttaggttgcaggtttttcatttctgtttttgtttttgttttgctttgcttttcatttaaactgtgaagacaagatctgttcaccaagaaagatcactaaggaaaaccaaattcagtgagtatatgtaaacttcagaccaagatctgcccgtttgtataggcattgttggtgatgatgatgatgatgatggtaatgatgatccccaggcaacctgctaagtgcttttcataatgatctcttttaacccttacaaaaacctggggcataggtaaagccatt

SEQ ID NO: 3615 - DNA, 380 bp, Homo sapiens
  MAP TO AC012277.1; EXPRESSED IN HBL100, SIGNAL = 5.6; EXPRESSED IN FETAL LIVER, SIGNAL = 5.9; EXPRESSED IN BT474, SIGNAL = 5.5; EXPRESSED IN LUNG, SIGNAL = 5.6; EXPRESSED IN PLACENTA, SIGNAL = 5.5; EXPRESSED IN HEART, SIGNAL = 4.9; EXPRESSED IN HELA, SIGNAL = 5.6; EXPRESSED IN ADULT LIVER, SIGNAL =   7; EXPRESSED IN BRAIN, SIGNAL = 6.6; EXPRESSED IN BONE MARROW, SIGNAL = 6.1
attccttgacattcctcccctggagaggtaggctatgtcccctccccccgaatctgggctccaccaaagagcctagggacgtgacctggacacttcagccttcatctcctctaataatctctcttgagactctctcctgggcccctatcgattactgtttcttaaactgaactaatagggtgtgtgtgtgtgtgtgtgtgtgtgtgtgtgtgtgtgtgtgtgtgtacagagagatctaccttaaggaatccactcccacaattgtggataccagcaagtacaacatctgcaaaacaggctgtcaggctgcagatctaggaaacagctggtgctgcaacttgaacccaaacacagtcgggaggcagaattccctcttcctc

SEQ ID NO: 3616 - DNA, 474 bp, Homo sapiens; identical to SEQ ID NO: 1685
  MAP TO AL096774.8; EXPRESSED IN LUNG, SIGNAL = 9.4; EXPRESSED IN BRAIN, SIGNAL = 2.6; EXPRESSED IN HBL100, SIGNAL = 3.4; EXPRESSED IN HELA, SIGNAL = 2.3; EXPRESSED IN PLACENTA, SIGNAL =   4; EXPRESSED IN ADULT LIVER, SIGNAL = 2.1; EXPRESSED IN BONE MARROW, SIGNAL =  16; EXPRESSED IN HEART, SIGNAL = 4.3; EXPRESSED IN BT474, SIGNAL = 4.7; EXPRESSED IN FETAL LIVER, SIGNAL = 2.5

SEQ ID NO: 3617 - DNA, 466 bp, Homo sapiens
  MAP TO AC008170.1; EXPRESSED IN BRAIN, SIGNAL = 1.2; EXPRESSED IN PLACENTA, SIGNAL = 0.66; EXPRESSED IN HELA, SIGNAL = 1.1; EXPRESSED IN ADULT LIVER, SIGNAL = 0.83; EXPRESSED IN HEART, SIGNAL = 0.92; EXPRESSED IN BT474, SIGNAL = 0.62; EXPRESSED IN FETAL LIVER, SIGNAL = 0.8; EXPRESSED IN LUNG, SIGNAL = 1.1; EXPRESSED IN BONE MARROW, SIGNAL = 0.87
gataaagaaattgagactcagagaggttaagctgcacacagctattcagttaaacatgcaggacatgaaccataaagcgtttgcttttttttcttttttactttttttctttttttctttttgatagagggtcttgctttgttgcctaggctggagtgcagtggtgcaatcatagctcactgcagccttgaactcctgacctcaaagaatcctctggagtagctgggattatagatatgcaccaccacacccggttgatttattttaattttttttttgtagacatgagtcttgccatattacccaagcttaaagcctttgctttcaactgctatgctgtctctgcccttgttgtcctcatcgtaacacaacaggatgctgaaacggaattaaaccccaaaggccaacagcaaaataatatgtgccaagatactaaatctgaaccacttaccaggatcaagcctgg

SEQ ID NO: 3618 - DNA, 416 bp, Homo sapiens
  MAP TO AF001549.1; EXPRESSED IN BT474, SIGNAL = 0.94; EXPRESSED IN FETAL LIVER, SIGNAL = 0.95; EXPRESSED IN ADULT LIVER, SIGNAL = 1.4; EXPRESSED IN BONE MARROW, SIGNAL = 0.96; EXPRESSED IN LUNG, SIGNAL = 0.99; EXPRESSED IN PLACENTA, SIGNAL = 0.97; EXPRESSED IN HEART, SIGNAL = 1.1; EXPRESSED IN HBL100, SIGNAL = 0.93
gagaagcaattgccaagaggtcaagtcaaatcatgcagcacatttaaaacttctgctgggggaaaatgtgtctgctcacattccaatgaccaaagcccaaagttagaagggcaaggaattagactctacctattgagatgtactacaaagtcacatggcaaaaagcttataattctaataaaggaactaagcagaatcactaggagcaatcacctagtccgccacacatggagatgtgccacagggactcagagactggaaggaattccccagggccagagttctcctgggaaactacagcctccaccattgcctcccagatttcatcagcatctctgtagtctggctcatcagaggccacaacggagataaaggcaaataaagacttcagctgctggcaagctgcagatatctcc

SEQ ID NO: 3619 - DNA, 407 bp, Homo sapiens
  MAP TO AL109613.11; EXPRESSED IN BT474, SIGNAL = 4.1; EXPRESSED IN BRAIN, SIGNAL = 3.4; EXPRESSED IN HBL100, SIGNAL = 4.2; EXPRESSED IN HELA, SIGNAL = 3.6; EXPRESSED IN PLACENTA, SIGNAL = 5.2; EXPRESSED IN FETAL LIVER, SIGNAL = 2.6; EXPRESSED IN LUNG, SIGNAL = 4.1; EXPRESSED IN BONE MARROW, SIGNAL =   4; EXPRESSED IN HEART, SIGNAL = 3.3; EXPRESSED IN ADULT LIVER, SIGNAL = 3.7
aaaggttgtcccagcttgtggttcccaccccttaaataaattcccatgctggtgttatcttcagactttcctatgggcaaagcatttaatgggtgaggcagagtgaggccagatggatcccctccttccaaacctacaaaagccagaggagcaccgggacccctagctcttaccaaaccttgaaaagccagaggagcaccaggacccccagcgcttaccctgcagtccatgctcagtacgtgctgggcgatgaccttggggtcgttgttggtgaacagttcttttgcacgtttcaacattgctgtttccaggggcttattctcagggggaaggaactttgactcaaactcgttgggcctgaaggaggagacagtctccaggaggggcgtcacaaactcgcccttgtc

SEQ ID NO: 3620 - DNA, 363 bp, Homo sapiens
  MAP TO AC007126.5; EXPRESSED IN BONE MARROW, SIGNAL = 1.3; EXPRESSED IN HBL100, SIGNAL = 1.3; EXPRESSED IN HEART, SIGNAL = 1.5; EXPRESSED IN BT474, SIGNAL = 1.5; EXPRESSED IN ADULT LIVER, SIGNAL = 1.6; EXPRESSED IN LUNG, SIGNAL = 1.7; EXPRESSED IN BRAIN, SIGNAL = 1.5; EXPRESSED IN PLACENTA, SIGNAL = 1.6; EXPRESSED IN HELA, SIGNAL = 1.4; EXPRESSED IN FETAL LIVER, SIGNAL = 1.4
tagggccatcctgctttatgcagcctccaaaatagtgccctgcatcccagctgtttcagctccagctatggctaaaaggggccaagtatagctcagtccattgcttcagagggtacaagtcccaaaccttagtgggttacatgtggtgttacacttgtgggtacacagaagtcaagaatggaggtttgggaccctccacctagattttagaggatgtgtggaaatgcctggatgtccaggcagaattttgctgcaagggcagggatctcatcaagaaactctactagggcagtggggaagggaaatgtggggttggagcccctacacagagtctccactgtggcagtgcctagcagagctgtg

SEQ ID NO: 3621 - DNA, 460 bp, Homo sapiens
  MAP TO AF001905.1; EXPRESSED IN PLACENTA, SIGNAL = 2.5; EXPRESSED IN FETAL LIVER, SIGNAL = 1.2; EXPRESSED IN HEART, SIGNAL = 1.5; EXPRESSED IN HELA, SIGNAL = 1.4; EXPRESSED IN HBL100, SIGNAL = 1.3; EXPRESSED IN ADULT LIVER, SIGNAL = 1.9; EXPRESSED IN BT474, SIGNAL = 1.4; EXPRESSED IN BRAIN, SIGNAL = 1.3; EXPRESSED IN LUNG, SIGNAL = 1.3; EXPRESSED IN BONE MARROW, SIGNAL = 1.3
aaccacatctggtacagcagctgcaattggagtcaccacttggtcaagcttatgataatccactgttattgtccaagatccatctgtcttccaaacaggccaaatgggagagttgaatggggatgtggtgggaatcaccacccctgtgtctttcgagtccttgatggtggcactaatctccgcaattcctccacggatgtgatattgctttgatttactatttttctaggtagaggaagttctgatggcttccatttggcctttctcaccagagtagccctcaccctaccagtcagggagccaatgggggggttctgctagctgctaagtatttctatgccaattatgcattctggcactggggaaatgaccataagaggagtctggggacccactggatccactgtaagtcagacctgagctaaaactccaataactacctgatccccataaaccccta

SEQ ID NO: 3622 - DNA, 416 bp, Homo sapiens
  MAP TO AC012140.1; EXPRESSED IN BONE MARROW, SIGNAL = 2.1; EXPRESSED IN FETAL LIVER, SIGNAL = 1.7; EXPRESSED IN PLACENTA, SIGNAL = 1.8; EXPRESSED IN HEART, SIGNAL = 1.8; EXPRESSED IN HELA, SIGNAL = 1.8; EXPRESSED IN HBL100, SIGNAL = 2.3; EXPRESSED IN BT474, SIGNAL = 1.8; EXPRESSED IN ADULT LIVER, SIGNAL = 1.7; EXPRESSED IN BRAIN, SIGNAL = 2.1; EXPRESSED IN LUNG, SIGNAL = 2.3
gtgactctgaagtccctccggaatgcccagagcttccgtcccccccacccccccccaacacacacacatcactcatcgtttatctgttgaagaaacctggtcctttgtttgtcctgtagaatttccgacactctgggttctgctggctgtctctgtagtgtcgtctaccatgttcctctgtcccccaaatcctgtggctctgacgatgatggtgaggtggtggagacgccctcacagctgggccaccctcccgtcgggagacacgttttgtcagttgcttcctctggagtccttgtgagtcagactcctgagtcaggaccaccaccgtcaaggttgccaccgccgcctcctgacacgcgccaccaggctccgcgctcatggcctggcctggcatctcaccaggcttttcaatggac

SEQ ID NO: 3623 - DNA, 358 bp, Homo sapiens
  MAP TO AC012668.1; EXPRESSED IN ADULT LIVER, SIGNAL = 1.6; EXPRESSED IN LUNG, SIGNAL = 4.1; EXPRESSED IN PLACENTA, SIGNAL =  32; EXPRESSED IN HBL100, SIGNAL =   1; EXPRESSED IN HEART, SIGNAL = 1.5; EXPRESSED IN FETAL LIVER, SIGNAL = 2.6
agcagcaaacaattaacgggccagcagccagtctatggagcacatttttagtatcactgatttaaattatgtactaattttttaatgttttttttgttttgttttgttttgttttaaagcatgaagaatagagaatgtaaatatagttaagaaaaggcacttaattttcagcttacgtgtggtaaagactccagtggctttggggctctcttggttgccctttatggccacgagggatacggtgtactcagatgcaggctgcagattcctcagtgggtacttggagacagagggacccacattgtactgcctgggctgtcctcttcgggtaaggcccacggtcagtcggtatcctgtt

SEQ ID NO: 3624 - DNA, 405 bp, Homo sapiens
  MAP TO AC012678.1; EXPRESSED IN PLACENTA, SIGNAL = 8.2; EXPRESSED IN HEART, SIGNAL = 6.6; EXPRESSED IN ADULT LIVER, SIGNAL = 9.9; EXPRESSED IN LUNG, SIGNAL = 9.3; EXPRESSED IN HELA, SIGNAL = 8.8; EXPRESSED IN HBL100, SIGNAL =   8; EXPRESSED IN BT474, SIGNAL = 7.9; EXPRESSED IN FETAL LIVER, SIGNAL = 8.8; EXPRESSED IN BRAIN, SIGNAL = 7.4; EXPRESSED IN BONE MARROW, SIGNAL = 8.6
ctgggctacagagaacacctgactcaagttgagccaactgcattttctctttcaggaatataaaaagctgtgtcattagtggttctggagctgggaaatgatggtgagtaagaactggggaagccacttttcactatacatatagacgacagccaggagcttttatagagccagttttttttgtacagacagatgacaaagattcttacaggaatagaaccgattacttaccaggttgattgtactttctgatcctagaccaacaaataatgatgatgccagcagctgcttttctttctcctctttagattgggtaagaacttgagattgatcctttttagttatagcttgatctacattctccattatactctcttgaggaacaggcagagctccactttcatc

SEQ ID NO: 3625 - DNA, 465 bp, Homo sapiens
  MAP TO AL109654.16; EXPRESSED IN BT474, SIGNAL = 2.3; EXPRESSED IN FETAL LIVER, SIGNAL = 2.3; EXPRESSED IN BONE MARROW, SIGNAL = 3.1; EXPRESSED IN LUNG, SIGNAL = 3.4; EXPRESSED IN BRAIN, SIGNAL = 2.7; EXPRESSED IN HBL100, SIGNAL = 2.5; EXPRESSED IN HELA, SIGNAL = 2.6; EXPRESSED IN PLACENTA, SIGNAL = 3.4; EXPRESSED IN ADULT LIVER, SIGNAL = 3.2; EXPRESSED IN HEART, SIGNAL = 2.8
tttgggagtgccagtgttagatgcatatataggtagaattgtaatgttttcctattagactagtcctttcatcattatataatgttcctctttatcttttttaactgctgttgctttaaagtttgttttgtctgatataagaacagctactcctgctcattttaggcatctatttgcctggaatatcttttcccacccctttaatttaaggcccatgatatggaccttcgggtttcccagtgttttgtttggggacagacatttaccttcttaaactttgggcactcacagtttttgtctgtcttacagagcctgcaatggcaagctgcctcctgcatagggtgtgtggattctctgggcttttctgatatgttcctgtagtagttcttggaacaaaagttcgtgatgtgagtctccgcatgctgctctgtctgtccaagcaggagctgcaagttagccttgctt

SEQ ID NO: 3626 - DNA, 427 bp, Homo sapiens
  MAP TO AL109748.2; EXPRESSED IN PLACENTA, SIGNAL = 1.9; EXPRESSED IN HEART, SIGNAL = 2.2; EXPRESSED IN BT474, SIGNAL = 1.6; EXPRESSED IN LUNG, SIGNAL = 1.5; EXPRESSED IN BRAIN, SIGNAL = 1.9; EXPRESSED IN HELA, SIGNAL = 1.6; EXPRESSED IN HBL100, SIGNAL = 1.8; EXPRESSED IN FETAL LIVER, SIGNAL = 1.7; EXPRESSED IN BONE MARROW, SIGNAL = 1.6
atgtgtcccgaggagttgtggcatgcccgctgccctggtcagagctggccaccatcttccagctgcatctgccgggccagcgtctgcccaatggctaacagggggctggctctgtaggccggactggccagcagctcctgaaaccgggtcctttcttcctcgagaaactgctgtctctgggctgcactcatccggctgagctctgagggccagggcttgttgctctccctgctgcaggcctggcgccggctgccagcctcaagccccagtagctcaggcagggcatccctgagcgggtgcaggtcccccaccaccatcctggccctctacctccgctcctccctgtgcttctgctcagccagttttatggcttcgattttctgcaaccattgctcacgcctcagcttcattttctccttgggcaaaa

SEQ ID NO: 3627 - DNA, 412 bp, Homo sapiens
  MAP TO AL079338.13; EXPRESSED IN BONE MARROW, SIGNAL = 1.3; EXPRESSED IN HBL100, SIGNAL = 1.7; EXPRESSED IN PLACENTA, SIGNAL = 1.6; EXPRESSED IN HEART, SIGNAL = 1.4; EXPRESSED IN LUNG, SIGNAL = 1.5; EXPRESSED IN HELA, SIGNAL = 1.8; EXPRESSED IN ADULT LIVER, SIGNAL =   2; EXPRESSED IN BT474, SIGNAL = 1.4; EXPRESSED IN FETAL LIVER, SIGNAL = 1.6; EXPRESSED IN BRAIN, SIGNAL =   1
attccagctgccttttctccacagaaatatgtttggtaaaaaatatatcaggcagccttgtgatctatgaaaagagagatctctgcaagtgactgcactcattgaaaatgagaatcggtctgtctaatgcctcatccctctcattggttccagggtcagtcatttaatatgcagagcacctcattgtttctggggtcagttatttaacatgcagagcccctcattggttctaggatcagtcatttaatatgcagagccccttcctccctaaacaggtggagccccatgaggaggcagtggatgtagcaggcagcagtagacagaaacagtccgatggtggagggatgatagagcacactacccgtaaggcagactgcaggagaacaatcttacagcaacagcttgagaaagg

SEQ ID NO: 3628 - DNA, 400 bp, Homo sapiens
  MAP TO AC007158.5; EXPRESSED IN HBL100, SIGNAL = 5.4; EXPRESSED IN HELA, SIGNAL = 7.2; EXPRESSED IN LUNG, SIGNAL = 8.2; EXPRESSED IN BRAIN, SIGNAL = 6.2; EXPRESSED IN PLACENTA, SIGNAL =   7; EXPRESSED IN HEART, SIGNAL = 4.8; EXPRESSED IN BT474, SIGNAL = 5.2; EXPRESSED IN ADULT LIVER, SIGNAL = 5.6; EXPRESSED IN FETAL LIVER, SIGNAL = 6.2; EXPRESSED IN BONE MARROW, SIGNAL = 4.2
tccatggtacacagaccctgattctaaaattcagtgagtccgatgctagcttccactgtctgctttttagttagagaattcctgactttttctattatgtttattacctaaaggtgaagtgttggattgcttgtttttttcctcccctactaagcaggttttcactccacttcccacatcccaccccagacctctcacaaaaagagtctcatctgatatgtgaatgcagcttatctccccataggtagccaggaacagggtgcacagtcaaggcaaccccaaaaatggcctctctcccggccgcgcctgcaaagtcgtcctgagcgtcctgaacgttcctcagctggaggggcttttccctactcagtgtctggaccattgccaagaagatctgtccagc

SEQ ID NO: 3629 - DNA, 403 bp, Homo sapiens
  MAP TO AL132719.1; EXPRESSED IN BT474, SIGNAL = 9.1; EXPRESSED IN FETAL LIVER, SIGNAL = 5.6; EXPRESSED IN BONE MARROW, SIGNAL =  14; EXPRESSED IN LUNG, SIGNAL = 5.6; EXPRESSED IN BRAIN, SIGNAL = 5.8; EXPRESSED IN HBL100, SIGNAL = 7.1; EXPRESSED IN HELA, SIGNAL = 4.5; EXPRESSED IN PLACENTA, SIGNAL = 5.9; EXPRESSED IN ADULT LIVER, SIGNAL = 6.1; EXPRESSED IN HEART, SIGNAL = 5.5
ctgaggctcaaaaacgttccactccccctccaagtcacagaggctgcacatggcaaaactggaactcaacctcattccgtttcaagtctttttcaactcagcctggccccgttccaagatgctccagaggggaatgcatttgagttgagccttgaagaataagtaggactttgtcatgctgccacctgtgaagtggcagggatgttgaggaaaccaagccaagagaggaggcagagggactctcacctggggatgagcagcccctggcttccaccctcagggggtgtctcagtgtttctgcgatgaggactcaagtgccccagggtggtttctgtggcagcatggaacccctgggtgccctgaaccatctttgcctgatttttcttcataattggaccggctg

SEQ ID NO: 3630 - DNA, 405 bp, Homo sapiens
  MAP TO AL121752.2; EXPRESSED IN BONE MARROW, SIGNAL = 2.9; EXPRESSED IN HELA, SIGNAL = 1.6; EXPRESSED IN PLACENTA, SIGNAL = 2.4; EXPRESSED IN HEART, SIGNAL = 1.8; EXPRESSED IN ADULT LIVER, SIGNAL = 2.1; EXPRESSED IN LUNG, SIGNAL = 2.1; EXPRESSED IN BRAIN, SIGNAL = 1.5; EXPRESSED IN HBL100, SIGNAL = 1.9; EXPRESSED IN BT474, SIGNAL = 2.2; EXPRESSED IN FETAL LIVER, SIGNAL = 1.4
ttcttcaatccctgaggcagctaagcagaattctagggttcaaaatcagatcactgagccacattgtctcaggtatctattttagctctgctagtctctgactctctgatcttgcctaatgatcctcccctctctcaccagcattcacaactataccccaaaagtgggtgagctagacacgcggaaagctattcgccaggctttcgatgtgtggcagaaggtgaccccactgacctttgaagaggtgccataccatgagatcaaaagtgaccggaaggaggcagacatcatgatcttttttgcttctggtttccatggcgacagctccccatttgatggagaagggggattcctggcccatgcctacttccctggcccagggattggaggagacacccactttga

SEQ ID NO: 3631 - DNA, 487 bp, Homo sapiens
  MAP TO AL035451.5; EXPRESSED IN BRAIN, SIGNAL = 5.6; EXPRESSED IN BONE MARROW, SIGNAL = 5.3; EXPRESSED IN HBL100, SIGNAL = 5.9; EXPRESSED IN PLACENTA, SIGNAL =   7; EXPRESSED IN LUNG, SIGNAL = 5.5; EXPRESSED IN HEART, SIGNAL =   5; EXPRESSED IN HELA, SIGNAL = 5.1; EXPRESSED IN ADULT LIVER, SIGNAL = 7.7; EXPRESSED IN BT474, SIGNAL =   6; EXPRESSED IN FETAL LIVER, SIGNAL = 6.1
aagggcagctgtgaagagaccatgtatgtgctgagagggcccagaggcagcggcagcacgaacagcgcaggtacaaatctccgtgttttccctgggcttacgtataaatacagagaggtgaggccttctctccccctgctctcccttccgctccgtgctgcttgccgcggtccccgctcctctttccgcatgagggcgaagggaagcggggatggacaagtcattgtcgaattgcaatcagacccacatccatcagcttctggatcttctttgcgattacaggattctttaagtgttcgctgagtgcctggggggtccttctgcatctgctccaggataaggtgcatggctatgtcactcatgatctgctgcacctcggggtcggccatggctcgtcgcttcacatcttcggggctgtggtgccggttgtactgcgccatcatacagcgctggtagccgtctgccgcctccttacagctggagtccg

SEQ ID NO: 3632 - DNA, 429 bp, Homo sapiens
  MAP TO AL078582.7; EXPRESSED IN BT474, SIGNAL = 1.1; EXPRESSED IN BRAIN, SIGNAL = 1.8; EXPRESSED IN BONE MARROW, SIGNAL = 1.4; EXPRESSED IN HBL100, SIGNAL = 1.1; EXPRESSED IN HEART, SIGNAL = 1.3; EXPRESSED IN PLACENTA, SIGNAL = 1.1; EXPRESSED IN FETAL LIVER, SIGNAL = 1.2; EXPRESSED IN LUNG, SIGNAL = 1.7; EXPRESSED IN HELA, SIGNAL = 1.5; EXPRESSED IN ADULT LIVER, SIGNAL = 1.8
acgtggaataaatcaacggccacaccaaattttgcattttataatcacattcatatctaagtgttcacttaggtacaatttccccgcatgaaagaaggaagcaaatgattctggatagctgtcatgtttccagggcaatattaattccctctgactttcctttaagctggcaaactggagaggctctttcctacctgataagccaacagctccccggaggtagaaatctttgtcatcctgaccttcttcatcctcagagggcagagctctggacattgcagactccaggtcccgactgaggtcatagtcgtgatcccactccagggggatggagtccacactagccggggtgtctcgtcctgaccgctcgctccggaggggctgagcgagcgagagggagagattggaggaaggctgtggagaaagcag

SEQ ID NO: 3633 - DNA, 374 bp, Homo sapiens
  MAP TO AL078594.14; EXPRESSED IN PLACENTA, SIGNAL =  22; EXPRESSED IN ADULT LIVER, SIGNAL =  26; EXPRESSED IN LUNG, SIGNAL =  24; EXPRESSED IN BRAIN, SIGNAL =  16; EXPRESSED IN BONE MARROW, SIGNAL =  18; EXPRESSED IN HEART, SIGNAL =  15; EXPRESSED IN HELA, SIGNAL =  22; EXPRESSED IN HBL100, SIGNAL =  20; EXPRESSED IN BT474, SIGNAL =  18; EXPRESSED IN FETAL LIVER, SIGNAL =  22
ttgaattgtctcctgggctcagatgttaactggatgaacagaaagctcatcgagttaacatccaggcccaggaggcaattggtaaataatgtttaccaattttcttaatgacatgcctgcatttcctttaaattataagagaacgtggcagaatggacatgttgggaaagtaataaagtttttggagcagtatcctattgcaacagtgatagtgtataaaagtaatttaaaattagtgtattagtttcttaggggagccatgacaaagtaccagaagctggtggctttaaacatgtattttctcactttctggaagctagatgttcaaaatcaaggtgtcagcagggccgtgttcccgctgaaactggtagaag

SEQ ID NO: 3634 - DNA, 451 bp, Homo sapiens
  MAP TO AL121755.4; EXPRESSED IN PLACENTA, SIGNAL = 1.3; EXPRESSED IN ADULT LIVER, SIGNAL = 1.2; EXPRESSED IN HEART, SIGNAL = 1.3; EXPRESSED IN BT474, SIGNAL = 2.1; EXPRESSED IN FETAL LIVER, SIGNAL = 0.97; EXPRESSED IN BONE MARROW, SIGNAL = 2.2; EXPRESSED IN LUNG, SIGNAL = 1.3; EXPRESSED IN BRAIN, SIGNAL = 1.7; EXPRESSED IN HBL100, SIGNAL = 1.4; EXPRESSED IN HELA, SIGNAL = 1.2
aaagtggtgtgagggaggtgcgaggggtgagggtccagaccttctgctctttcagggtcagtgagcctagcaccctgcccacatccttggggagagttgactcaccgtcctggatcctggaaggaggcacaaccagtgggcaacatgcaggagaacatctggtcacattccctgagttccccaagtataggccaaccagacccactgcctaaccagatggaactacccgggatgcggggagaggagacctgagatctgtaagttgggaaaccctccgtggctgcccagctgtcaggaaggacagcataggatggatcagactgtccagaactctcaagaagaatgtgcacctttgccctttgcccaggggccagggcctctttgtctgcccagtcacatcctccagcccccaacacatcagctcccacaggggcttctggaacatttccaa

SEQ ID NO: 3635 - DNA, 348 bp, Homo sapiens
  MAP TO AC011308.2; EXPRESSED IN BONE MARROW, SIGNAL = 1.1; EXPRESSED IN HBL100, SIGNAL = 0.93; EXPRESSED IN HEART, SIGNAL =   1; EXPRESSED IN PLACENTA, SIGNAL =   1; EXPRESSED IN ADULT LIVER, SIGNAL = 1.1; EXPRESSED IN BT474, SIGNAL = 1.1; EXPRESSED IN BRAIN, SIGNAL = 1.1
aaccttggagcacagctttcacttgcaaattcaccaatccaaagcccacaactcccccacacctcttctatttggctcttaaactccaggccaatattcccctatcctaatcactgcaaggccagttaccaaacaactcaggacagcctcctaccccaaaacccactgaaattattcaaacaaactcatcatcataaacctgcttaccctgcctcacccattctttcttgcagaaaccacaataatgcctcttgcccatgctttcctcccactccgtctgcctcctgactgccctggtgcttccccttgaggacctgcatggagttctgtgccccattctcttgagaa

SEQ ID NO: 3636 - DNA, 395 bp, Homo sapiens
  MAP TO AL035467.21; EXPRESSED IN BONE MARROW, SIGNAL = 3.8; EXPRESSED IN PLACENTA, SIGNAL = 4.2; EXPRESSED IN BRAIN, SIGNAL = 3.7; EXPRESSED IN LUNG, SIGNAL = 3.9; EXPRESSED IN HEART, SIGNAL =   3; EXPRESSED IN HELA, SIGNAL =   5; EXPRESSED IN HBL100, SIGNAL = 4.6; EXPRESSED IN ADULT LIVER, SIGNAL = 4.7; EXPRESSED IN BT474, SIGNAL = 4.2; EXPRESSED IN FETAL LIVER, SIGNAL = 3.9
aggctgagagagctcaggtgctagatccagacttggttgggaaggatcacttccctggctcactggctgacagaggagttgctgtggtgtcctgtgggcagaacttgttggcaatcctccctcgagagagccgggaaagctgttcatggggagctagttcacaggaggagctccataacaaaccatataaagggacagtgggcgaggaagctgagtgcgctgactaccataccctgcaggaactgaacgcaggagatgccgcacatgccacaggagttggaagcgctctgctacaaattcactgcgtgggaggggagggttgctggaaagagctactggctgctgagtgctactgactactgtagactgcagaaactggacattggtgatgctgt

SEQ ID NO: 3637 - DNA, 453 bp, Homo sapiens
  MAP TO AL078623.24; EXPRESSED IN BT474, SIGNAL =   2; EXPRESSED IN FETAL LIVER, SIGNAL = 2.2; EXPRESSED IN BRAIN, SIGNAL =   2; EXPRESSED IN BONE MARROW, SIGNAL = 2.3; EXPRESSED IN HBL100, SIGNAL = 2.7; EXPRESSED IN PLACENTA, SIGNAL = 1.9; EXPRESSED IN LUNG, SIGNAL = 2.2; EXPRESSED IN HEART, SIGNAL = 1.6; EXPRESSED IN HELA, SIGNAL = 2.2; EXPRESSED IN ADULT LIVER, SIGNAL = 2.5
ctgctggaaccattttctctgacctgttttagagaaatgctcattcaagatatgataatgttcaaatgtccagataacaaatatcaaacacatctctaaaatccttgagctgatgatagccagatttgttcccagaatctttggagactgttattaattataaatatctccacgttattgcattgttttcttcccatattcaaagtgctgatcttccttacctgttcaggtccaccgaacatgcagacttaataaatgatgtcttgtcaatgccatgcattaattggctattgccataataatgctgtataatcaaccatctcaaaactgggtgtcttacaacaactagcatttcccaagtctgcaggtctgtatctggggtggctttggctgggctcagcaggcagttctgctttaagctaaacatcaggtagacttgacatggcttgggtt

SEQ ID NO: 3638 - DNA, 420 bp, Homo sapiens
  MAP TO AL035554.1; EXPRESSED IN ADULT LIVER, SIGNAL = 1.3; EXPRESSED IN BT474, SIGNAL = 1.8; EXPRESSED IN BRAIN, SIGNAL = 2.2; EXPRESSED IN BONE MARROW, SIGNAL = 1.2; EXPRESSED IN HBL100, SIGNAL = 1.6; EXPRESSED IN HEART, SIGNAL = 1.1; EXPRESSED IN PLACENTA, SIGNAL = 1.5; EXPRESSED IN FETAL LIVER, SIGNAL = 1.4; EXPRESSED IN LUNG, SIGNAL = 1.4; EXPRESSED IN HELA, SIGNAL = 1.9
gctactctttcggttgtgccaggaatggcataaccaatattgtgtttgattctcacagcaaccccagaaaatgaatgttactctaaatctcaaaattaagaaactgcctcaaagaggttaggtcattttgcatagggccccacagtaaaaacagcatttagcaaataagtgggggcaaagctctgccctttttgttacttcagtgtttccaaaacacactctggggatttgaggtgaagaaatgccacaatatcctaatccctttgaacaaggtgatctttacataaagtttgatgtgaagtgtcctgaaaacaactggaacaacccagacaaacgttctcaactagaagatccgctgccatctagatcagaagtttcaaacacaattggagaaaaagtggcggtagagcttcaggaatg

SEQ ID NO: 3639 - DNA, 441 bp, Homo sapiens
  MAP TO AL078634.20; EXPRESSED IN PLACENTA, SIGNAL =  51; EXPRESSED IN HELA, SIGNAL =  43; EXPRESSED IN ADULT LIVER, SIGNAL =  87; EXPRESSED IN BT474, SIGNAL =  81; EXPRESSED IN LUNG, SIGNAL =  41; EXPRESSED IN BRAIN, SIGNAL =  62; EXPRESSED IN BONE MARROW, SIGNAL =  26; EXPRESSED IN HEART, SIGNAL = 1.2e+02; EXPRESSED IN HBL100, SIGNAL =  31; EXPRESSED IN FETAL LIVER, SIGNAL =  60
tcaccctgaattccttccactccatgcttgacaactgcctgttctacaggagcaatcagggcatctgacaaggggtcccttgatttttcctctccacctcaaaatgtctccatatctacactatccccttatctgctcctccttacatagaaaggtcacctgtacgctcctctccatgtctcttctttttccttgacctgtctcaactcacttcccccaacacctgcaccattagttatctccccctccagctgacccactcctcaatctgcaaacaggccaatgcattcctcaataaccttcccgtgaccagggtgagatacaatctgtgtcttcacatcaaactttctgaaaggatattctcatgggtcaccttcaacagctcaccgccctgtgactccatgtccatctgtttggcttccgacctgctcctcacctaga

SEQ ID NO: 3640 - DNA, 403 bp, Homo sapiens
  MAP TO AL109741.3; EXPRESSED IN HBL100, SIGNAL = 8.1; EXPRESSED IN BT474, SIGNAL =  15; EXPRESSED IN FETAL LIVER, SIGNAL = 5.7; EXPRESSED IN ADULT LIVER, SIGNAL = 2.2; EXPRESSED IN BRAIN, SIGNAL = 5.4; EXPRESSED IN BONE MARROW, SIGNAL = 3.5; EXPRESSED IN LUNG, SIGNAL = 8.8; EXPRESSED IN PLACENTA, SIGNAL = 4.2; EXPRESSED IN HELA, SIGNAL =  15; EXPRESSED IN HEART, SIGNAL = 1.9
caccatggtcaattccactgtgttctttgacatcgccatcaacagccagtccttgggcctcatctttttcaagctgtttgcagacaaatttccaaaaacaacgaaaactttcatgctctgagcactgtagagaaaggatttggttataagggttcctgctttcacagaattatttcagagtttatgtgtcagggtggtgacttcccatgccataatggcactgatggcaagttcatctacggggagaaatttgatgatgagaacttcattctgaagcatacaggtcctggcatcttgtccatagcaaatgctagacccaactcaaacggttctcagtttttcatctgcactgccaagactgagtggttggatggcaagcatgtggtctttggcaaggtgaaag

SEQ ID NO: 3641 - DNA, 423 bp, Homo sapiens
  MAP TO AC007114.7; EXPRESSED IN BONE MARROW, SIGNAL =   4; EXPRESSED IN HBL100, SIGNAL = 3.7; EXPRESSED IN HELA, SIGNAL = 4.2; EXPRESSED IN BRAIN, SIGNAL =   4; EXPRESSED IN LUNG, SIGNAL = 4.6; EXPRESSED IN PLACENTA, SIGNAL = 5.3; EXPRESSED IN HEART, SIGNAL = 4.2; EXPRESSED IN BT474, SIGNAL = 3.6; EXPRESSED IN ADULT LIVER, SIGNAL = 6.5; EXPRESSED IN FETAL LIVER, SIGNAL = 4.9
aatttgggaaggacttagcagttacaagagcttgtaaggctactagttgccagaattaatagctttttgtgaacggtgttccttgatcagtaactaacagatactgttgcaccaggtccagcagcctagatttcactggagacaaatctaaacacgaagtaacgcgcactacagtaggggaaagatacccaggttaacctcactaattgccctgcgcatacaccctacccagcttgagaggcctcgactcgcacctggagcgaagtccaccgggtttgtgttaacggcggcaggaaggcgccgccacccaggacatcccccaggagaggaagatcccgaaacgcccagggctcccatgccgttccgagtcgccacagcaccgcctaccacgatcagcacctttcttctcctatccctccctgg

SEQ ID NO: 3642 - DNA, 494 bp, Homo sapiens
  MAP TO AL110502.1; EXPRESSED IN HELA, SIGNAL = 0.93; EXPRESSED IN HEART, SIGNAL = 1.2; EXPRESSED IN BT474, SIGNAL = 1.1
ggcagaaagggagattcaactttatctgcaaccttttatttcctttttaaaaaatctgaagcaaagttgtcaaaatgttaggattaataaagtaatactttaaatattgaaatattgaatttaaaattaatttaaaagaaaggctatatatccattataagtctcatgtagcagtcactttttaatcatccaaattagatagtagtctattggcataatggcctctctttgtgtctaggtgtgtatgtttctgtttctcatctaggagccaccatcgccttcccacaacttcttcaaaatgggaatgaagctagaagctgtggacaggaagaaccctcatttcatttgcccagccactattggggaggttcggggctcagaggtgcttgtcacttttgatgggtggcgaggggcctttgactactggtgccgcttcgactcccgagacatcttccctgtgggctggtgttccttgactggagacaacctgcagc

SEQ ID NO: 3643 - DNA, 383 bp, Homo sapiens
  MAP TO AP000014.2; EXPRESSED IN ADULT LIVER, SIGNAL = 0.98; EXPRESSED IN HEART, SIGNAL = 1.8; EXPRESSED IN BT474, SIGNAL = 1.6; EXPRESSED IN FETAL LIVER, SIGNAL = 1.1; EXPRESSED IN BONE MARROW, SIGNAL = 2.4; EXPRESSED IN BRAIN, SIGNAL = 1.5; EXPRESSED IN HBL100, SIGNAL = 1.2
aacaggggatttatgaattgagtacttgtaggctgtttgggtgagaacatttccaggctttcttagacccagctgaacctagggggcccaggttgcaagtgtttgaactaccagataccaagccctctcagtgaccccctcatatataaattttaaaggcttgaatatccaagtgccaaagtcgatcatttgagataagggcctcagctctgcatttcactctttcttcttgcagctgctgttcctgttggaggtagcaaggacattggtgctgatgctggcggcagttgtggtggtgctgggctgggtgtgggttgatggtctcaagtgtgggatggggaaggggtgtgggatggtgggggtggagacacgcatcacatgac

SEQ ID NO: 3644 - DNA, 473 bp, Homo sapiens
  MAP TO AL035692.10; EXPRESSED IN BT474, SIGNAL = 9.1; EXPRESSED IN FETAL LIVER, SIGNAL = 6.8; EXPRESSED IN BRAIN, SIGNAL = 9.6; EXPRESSED IN BONE MARROW, SIGNAL = 8.2; EXPRESSED IN HBL100, SIGNAL = 8.8; EXPRESSED IN PLACENTA, SIGNAL = 8.1; EXPRESSED IN LUNG, SIGNAL = 7.6; EXPRESSED IN HEART, SIGNAL = 5.8; EXPRESSED IN HELA, SIGNAL = 8.9; EXPRESSED IN ADULT LIVER, SIGNAL = 5.5
cagcaatgcatgagtgttccaatttctccccatgctagcccacacttgatactttctgggtttgctgtattttttgttttgttttgttaataatagccatcctaatggatataaaatggtttgtactatttttcacataaggcctcggattgaaataaacactgatggctacttacccaacatgcatttcttctttcctcttttctaaagaacccatttcattttgttatcaattgcattaccagctctcggtggtgatgctacttagcaaattggctcatagtattccccattactgattttggtccaggatggagtcaatcagacaaaaggaaagatgtttaaggacttgaaagatgtccttttttccttccacctcatcctccactactataaatagagaatgtgctgtcctagttttctgcttgagtagtcttataactaaaagaggaaggagcctgaggacaagactg

SEQ ID NO: 3645 - DNA, 391 bp, Homo sapiens
  MAP TO AL096776.12; EXPRESSED IN ADULT LIVER, SIGNAL = 5.1; EXPRESSED IN BRAIN, SIGNAL = 4.4; EXPRESSED IN BONE MARROW, SIGNAL = 4.6; EXPRESSED IN PLACENTA, SIGNAL = 5.4; EXPRESSED IN HELA, SIGNAL =   5; EXPRESSED IN HBL100, SIGNAL = 4.5; EXPRESSED IN BT474, SIGNAL = 4.6; EXPRESSED IN FETAL LIVER, SIGNAL = 4.7; EXPRESSED IN LUNG, SIGNAL = 5.8; EXPRESSED IN HEART, SIGNAL = 3.5
ttctatcacctgccagaccctttcatgaaaaatgtgaaggtgatctttttactgatgagaattcatgaaaacataacttttgggtactttgcttggttgcaggatgaatttgacaagctgaggcctctctgctacaccaacacagacatcttcctgctctgcttcagtgtcgtgagcccctcatccttccagaacgtcagtgagaaatgggtgccggagattcgatgccactgtcccaaagcccccatcatcctagttggaacgcagtcggatctcagagaagatgtcaaagtcctcattgagttggacaaatgcaaagaaaagccagtgcctgaagaggcggctaagctgtgcgccgaggaaatcaaagccgcctcctacatcgagtgtt

SEQ ID NO: 3646 - DNA, 466 bp, Homo sapiens
  MAP TO AP000051.1; EXPRESSED IN PLACENTA, SIGNAL = 0.86; EXPRESSED IN BT474, SIGNAL = 0.64; EXPRESSED IN BONE MARROW, SIGNAL = 0.79; EXPRESSED IN HBL100, SIGNAL = 0.7; EXPRESSED IN LUNG, SIGNAL =   1; EXPRESSED IN HEART, SIGNAL = 0.81; EXPRESSED IN FETAL LIVER, SIGNAL = 0.8; EXPRESSED IN HELA, SIGNAL = 0.99; EXPRESSED IN ADULT LIVER, SIGNAL = 0.84; EXPRESSED IN BRAIN, SIGNAL = 0.89
tggtggatgggaagctaaacaagaaaatgtgtgtgtttcaggaaacctgatgattccagtttcagataagtccttccagtccatccccctagtcctgcatctgctaatgtgcagatgaaaggctctgtgtaacttggatctacagaaactgtcaattctgaaaggctgccttttggtcttaaaaggtgtccttgaaattactcccaggttttggccctgactgactttccagtgaaatctaattggccgggtttaaaacacagctgtgaggattttgaagccgcctttgaaagtgaactgctggtgcactattgcaatgaggacatgcacagagatcccaaccagagctcaagagtaataatgctgtggtaccttttggaaaatgctgttgtcaggcagccccggtgcggtgggaaccatgagttggttttcaggtagtttatcttcctctccccagttctcatca

SEQ ID NO: 3647 - DNA, 401 bp, Homo sapiens
  MAP TO AL049539.19; EXPRESSED IN BT474, SIGNAL = 2.3; EXPRESSED IN FETAL LIVER, SIGNAL = 2.9; EXPRESSED IN BONE MARROW, SIGNAL = 2.4; EXPRESSED IN LUNG, SIGNAL = 2.5; EXPRESSED IN BRAIN, SIGNAL = 2.6; EXPRESSED IN PLACENTA, SIGNAL = 3.3; EXPRESSED IN HBL100, SIGNAL = 2.3; EXPRESSED IN HELA, SIGNAL = 2.2; EXPRESSED IN HEART, SIGNAL = 2.2; EXPRESSED IN ADULT LIVER, SIGNAL = 2.4
cttttcaccaggagcaaacccaagtcttagttgctacaagaaaatcccctggaagtactgggggccaggttccccagacagcaggaattgcccctgttcagagcagccggagtttgctggaccacaaggaagaagagaagagacttgcagtgaactgtttttgtgccaagaaaccctggacctggggccaagtatttcccaagccaagcatccacttgtctgtgtctgggaagggatggccaaggccgctagggtccttacccctcaggatcactccccagccctttcctcaggaggtaccgctctccaaggtgtgctagcagtgggccctgcccaacttcaggcagaacagggaggcccagagattacagatcccctcctgtaagtggccaggcattctc

SEQ ID NO: 3648 - DNA, 466 bp, Homo sapiens
  MAP TO AL109755.14; EXPRESSED IN PLACENTA, SIGNAL = 1.3; EXPRESSED IN HELA, SIGNAL = 1.9; EXPRESSED IN FETAL LIVER, SIGNAL = 1.6; EXPRESSED IN ADULT LIVER, SIGNAL = 1.8; EXPRESSED IN BT474, SIGNAL = 1.3; EXPRESSED IN BRAIN, SIGNAL = 1.5; EXPRESSED IN HEART, SIGNAL = 1.2; EXPRESSED IN HBL100, SIGNAL = 1.4; EXPRESSED IN LUNG, SIGNAL = 1.3; EXPRESSED IN BONE MARROW, SIGNAL = 1.2
agcatagggcaatgtggaacacgtggtgcagcctggctgggatgggcaggagaggggcctgtgtcagaaaaccaataacagggatagtgcacctggcaggggacactgggtttatcctacagggaactgggagccagtgaaagtgaggatgtcccatctacagatgaattgcagagaggaaaaagttacatataatcacttatccctcccccatgggtaactcagttacctggagagaacagcagattgaaaggtactgttctgaaatgctaactggttctttttacatgagatgaacccaagaccaaatcggattaccctagacacaaatttgatgggcagttttaaagtaacgtgcagtaacttttcaagctcgatgtagaaatatccagaacttatagtaaactgtgtacatgcatggttatgtgagaaaagtgaagctgctgcacctgttcccaagctcact

SEQ ID NO: 3649 - DNA, 383 bp, Homo sapiens
  MAP TO AL109614.15; EXPRESSED IN PLACENTA, SIGNAL = 5.2; EXPRESSED IN HELA, SIGNAL =  17; EXPRESSED IN HEART, SIGNAL = 3.2; EXPRESSED IN HBL100, SIGNAL =  13; EXPRESSED IN BT474, SIGNAL =  13; EXPRESSED IN FETAL LIVER, SIGNAL = 6.1; EXPRESSED IN ADULT LIVER, SIGNAL = 3.6; EXPRESSED IN BRAIN, SIGNAL = 6.2; EXPRESSED IN BONE MARROW, SIGNAL = 4.1; EXPRESSED IN LUNG, SIGNAL = 8.4
tggaagggaacaaggaaaacatgaaacccaaagggaactgcagcgagagcacaaagattctaggatactgggagcaaatggggtggaagggtgctctcctgagctacagaaggaatggtctggtggtgaagataaaacacaagtcaaacttattggagttgtctacagtcagcaatggtgatcttcttgctggtcttgccattcctggacccaaagcgctccatggcctccacgatcttcatgccttctttcttctttcaccttgccaaagactacatgcttgccatccaaccactcagtcttggcagtgcagatgacaaactgggaaccgtttgtgttgggtccagcatttaccacggacaagatgccaggacctgtatgct

SEQ ID NO: 3650 - DNA, 409 bp, Homo sapiens
  MAP TO AC007198.6; EXPRESSED IN BT474, SIGNAL = 7.1; EXPRESSED IN ADULT LIVER, SIGNAL =  10; EXPRESSED IN PLACENTA, SIGNAL = 9.2; EXPRESSED IN HBL100, SIGNAL = 8.4; EXPRESSED IN HELA, SIGNAL = 7.6; EXPRESSED IN FETAL LIVER, SIGNAL = 8.7; EXPRESSED IN BRAIN, SIGNAL = 6.7; EXPRESSED IN LUNG, SIGNAL = 9.7; EXPRESSED IN BONE MARROW, SIGNAL = 8.5; EXPRESSED IN HEART, SIGNAL = 7.3
caaaggaggagaagctggtgtggggagttcctggctggcaagggacaaccccaatgtgagcctcgggtggggagttccccagctggcttcttctgggcttggaataagaatgcggagttgcagttttagctgtgtgttgtttcaccccttggagcttcagggtttggtttgttgttgttgttgttttcccccagcattaaaatgtatatagaatatagaactaattagcacagttcctagcacaaaataaatgcacattaacacctggtagtgcagagagagaaactatgttgtagaaaagttgaccatctaggttctctggggtccacaggtctgcttctagttcccctggtctggacacagttccttgtccctggggtgaatctaatctctttggaggtcaaggcaa

SEQ ID NO: 3651 - DNA, 487 bp, Homo sapiens
  MAP TO AF178220.1; EXPRESSED IN HEART, SIGNAL = 0.9
tccgcccacataagtaaaggtacttactggagcagaaagagcagtggatgaaggaggggagagagatacttttccctcaaggcaagtgagggctgcaccaagacacctgggaaagctgtgtgccagcaggcagtcctgtgtcttacttcctgcctggaggcttgctgagctacccattgtgtatttctgatgctcccatttgtactactaccaaagcagaggactagagaactctttatagatccagatgtgagctccctcaggtgtggtaggcacagcaactagtgactgcctttgtctgggagaggtgtgaaggctagaggtggctggagctgccatcactgctgggcagaataagacagtggaaattcccctggatcaggggagccaaaataagccatctctaaataatcccacccaagagcattccacgggaattgagggtctccagcagaaagatgctgtgtgtggttaattgctggaggga

SEQ ID NO: 3652 - DNA, 395 bp, Homo sapiens
  MAP TO AC007321.1; EXPRESSED IN LUNG, SIGNAL = 1.6; EXPRESSED IN HBL100, SIGNAL = 1.4; EXPRESSED IN HEART, SIGNAL = 2.6; EXPRESSED IN BONE MARROW, SIGNAL = 1.3; EXPRESSED IN PLACENTA, SIGNAL = 1.2; EXPRESSED IN HELA, SIGNAL = 1.6; EXPRESSED IN BT474, SIGNAL = 1.4; EXPRESSED IN ADULT LIVER, SIGNAL = 1.4; EXPRESSED IN FETAL LIVER, SIGNAL = 1.6; EXPRESSED IN BRAIN, SIGNAL = 1.3
ggaaacagcttactaatgtccatattctgaagctatacattttgttttttttaaatactgaattatgtttttattcttggcatattacatacatagtactcgtgcataaaaccaaataattggtttaattttctttgacattttggtattactttctttttcttaataaatgaagcatagctacagctgaagttactttaattttaaatacatatttgtatatttttagctaacttgtaaattttctgtgtcctttttttgtagaacacactaaatataacaaacaataactattactctgtcgaagttgaaaacatcactgcccaagttcaattttcaaaaacagttattggaaaggcacgcttaaacaacataaccattattggtccacttga

SEQ ID NO: 3653 - DNA, 470 bp, Homo sapiens
  MAP TO AC008109.1; EXPRESSED IN PLACENTA, SIGNAL = 0.94; EXPRESSED IN BT474, SIGNAL = 1.2; EXPRESSED IN HBL100, SIGNAL = 1.3; EXPRESSED IN HELA, SIGNAL = 1.8; EXPRESSED IN LUNG, SIGNAL = 0.62; EXPRESSED IN FETAL LIVER, SIGNAL = 1.3; EXPRESSED IN ADULT LIVER, SIGNAL = 1.4; EXPRESSED IN BRAIN, SIGNAL = 0.92; EXPRESSED IN HEART, SIGNAL = 1.1
ttcaagcatgtgatgttagagaagaaatgactgaagataagcatcataaactattttgaaaaatattaaagtttttcttaagatgactagctaggaacattggatgccaattctcctcaaaagaacatcaaagttacacatgaatggtcatgatcctaatggaaagctgaggaaagagagccaggacctgtcagcagatgcacaggaagaagctgaagtgcagaaaaggaacacagcaagagtctggcagagattgattccctaggaactcagaaccctgcaaaaagggtatgtgggggtgcttatctgttcccctcacttctgcaacaatctgctcatctccaaagtgttggggagcccctttgcccttgcgaccctgggcaatgctgtcagtggagatttgggagacaatctctgtctgtggagacagagagctgggtggccaatttgtgcagatgtcccacttccct

SEQ ID NO: 3654 - DNA, 447 bp, Homo sapiens
  MAP TO AC007567.1; EXPRESSED IN PLACENTA, SIGNAL = 0.83; EXPRESSED IN HEART, SIGNAL = 0.98; EXPRESSED IN BT474, SIGNAL = 0.72; EXPRESSED IN BONE MARROW, SIGNAL = 0.69; EXPRESSED IN HBL100, SIGNAL = 0.74; EXPRESSED IN BRAIN, SIGNAL = 0.95
ttcattgtggaatggctaaatcaagcaaattaacatgtattatctcacatagctgtcatcgtgtggtgaaaatacttaaaatgtattctcttagtatttttcaagaaaactatattgtttttaattatagtcacgatgttgtacaacagatctcttgaacttgttcctcccatctagctaaaattttgtaaattttgactaacatctgtttataagctttttaagggcagaatctttgactcatctttctcttttcaagactagtagtgtcatcagtgttgggcacatgggaggcactcaagaaatggttgttgaattaaatgccatcaatacctatgtcacagaaattcaggctttatttaaagccttatctagattcctcactagcaagaatcttgacttgtaatagaaaattattctaacccactgggttctgaacatgaggtc

SEQ ID NO: 3655 - DNA, 392 bp, Homo sapiens
  MAP TO AL118499.5; EXPRESSED IN BT474, SIGNAL = 3.7; EXPRESSED IN HELA, SIGNAL = 4.5; EXPRESSED IN FETAL LIVER, SIGNAL = 3.9; EXPRESSED IN BRAIN, SIGNAL = 3.3; EXPRESSED IN LUNG, SIGNAL = 3.5; EXPRESSED IN BONE MARROW, SIGNAL =   3; EXPRESSED IN PLACENTA, SIGNAL = 3.5; EXPRESSED IN HEART, SIGNAL =   3; EXPRESSED IN HBL100, SIGNAL = 4.1; EXPRESSED IN ADULT LIVER, SIGNAL =   6
gctccatctgttggctcttcctttcatgaaagatttctctgtagcaagctgtgctgtttcatagcgttttacccacagtagaacttttttcagaattagagtcagttctcttaaactgtgctgccaatttatcatctaagttcatgtaatattctaaatcctttgttgtcatttcaacaatgtccacagcatcttcactaggagtagagtttatctctagaagccactttctttgcttatccttaggaaacattccattcaagtctgatcatgagattgcagcaattcagtcacatcttcaggctctgcttcgaattctagttatcttactgtttccaccacatctgcagttagttcttccactgaaatcttgaacccctcaaagacatcca

SEQ ID NO: 3656 - DNA, 372 bp, Homo sapiens
  MAP TO AL118508.9; EXPRESSED IN PLACENTA, SIGNAL = 4.5; EXPRESSED IN FETAL LIVER, SIGNAL = 4.6; EXPRESSED IN ADULT LIVER, SIGNAL =   5; EXPRESSED IN BT474, SIGNAL = 4.2; EXPRESSED IN HEART, SIGNAL = 3.5; EXPRESSED IN HELA, SIGNAL = 5.1; EXPRESSED IN HBL100, SIGNAL = 4.6; EXPRESSED IN BRAIN, SIGNAL = 4.5; EXPRESSED IN LUNG, SIGNAL = 4.9; EXPRESSED IN BONE MARROW, SIGNAL = 4.3
tgcaacagagaccagtggcctgccaagctgagaatatttagtgtataggctcttacaggaagtgctgcagatccctgatgttatgatggtaatggtgttcctttgcttctgtagtgtgttacattttaacagaactttctggagacagcgcctgcagaggactggctattgtgttgacagttccagcatcttcttaggatggtagaggctatagtgcccactgcaccatcaaagccctgctggatggcttcctgcaccttcttggcacaaagcttgtccccacccctcccagggcctgcagctctggccccactgaacacctcagctttgcggggctgggcaatgagcactggcctttggttcatgagatcc

SEQ ID NO: 3657 - DNA, 417 bp, Homo sapiens
  MAP TO AL109837.15; EXPRESSED IN BONE MARROW, SIGNAL = 1.5; EXPRESSED IN FETAL LIVER, SIGNAL = 1.4; EXPRESSED IN ADULT LIVER, SIGNAL = 1.8; EXPRESSED IN BT474, SIGNAL = 1.5; EXPRESSED IN LUNG, SIGNAL = 1.4; EXPRESSED IN PLACENTA, SIGNAL = 1.2; EXPRESSED IN HEART, SIGNAL = 1.2; EXPRESSED IN HELA, SIGNAL = 1.5; EXPRESSED IN HBL100, SIGNAL = 1.3; EXPRESSED IN BRAIN, SIGNAL =   1
cataagatgagctctacagaggaggtagaattctcccttgaattctcattcagagagtgaaaatagaacccattttatatactaaagattgtaagcaataaagttctaaaatagaaaaatgtttgtatacaaaggttaattgtacatctagcatgtcccaggtttaagatacagtgttgctggcagatgctgccagtgctctgctgcttcctattgggccttaccattcttacccaactttccactgttccgcactcctttctctttgcctgaggactttctttggctaccagagcccactttgtccatgcatgtgatgggaagtactgggaaaaaaattcccttcatgatcaactcgcaaccagtaatatctgggattggtaggataaatattccagctcccttacccctggatag

SEQ ID NO: 3658 - DNA, 468 bp, Homo sapiens
  MAP TO AC008085.1; EXPRESSED IN HELA, SIGNAL =   1; EXPRESSED IN FETAL LIVER, SIGNAL = 0.82; EXPRESSED IN LUNG, SIGNAL = 0.81; EXPRESSED IN HEART, SIGNAL =   1; EXPRESSED IN BT474, SIGNAL = 0.92; EXPRESSED IN ADULT LIVER, SIGNAL = 0.98; EXPRESSED IN BRAIN, SIGNAL =   1; EXPRESSED IN PLACENTA, SIGNAL = 1.1; EXPRESSED IN BONE MARROW, SIGNAL = 0.68; EXPRESSED IN HBL100, SIGNAL = 0.87
tcatcggacaccttgtaggactttggtgacatcctggtgtgaaagcattagaccgatgtttcaaagcctgagaaaaagaagctagaaaagatctctgaagctctttccacagataatctgccttcctcttcatttctttctttcgatatcttaagaatagaagagcagaacagtgagtggaatatctaattctactcatagccaccatttgttgagtgtttgccatgggctgggcatggtgacaggtactttattttctattttcaatatagcagctcatcacaaccatccaacaaggcaggtactatgttatcaccatggagaaaatggtgcctacagagttacatgaattcatccaaggctattcagagaataagtggcaggagattagctaagtccaatggcaggtgttcttcctcatcttcatcttgacctgtcagcagcattgggcactgctgacttctcctc

SEQ ID NO: 3659 - DNA, 469 bp, Homo sapiens
  MAP TO AC007557.1; EXPRESSED IN BT474, SIGNAL = 0.77; EXPRESSED IN FETAL LIVER, SIGNAL = 0.57; EXPRESSED IN BONE MARROW, SIGNAL = 0.7; EXPRESSED IN LUNG, SIGNAL = 0.61; EXPRESSED IN ADULT LIVER, SIGNAL = 0.66; EXPRESSED IN HEART, SIGNAL = 0.84; EXPRESSED IN PLACENTA, SIGNAL = 0.66
cagttccccttctgctgttcttgttgctgcttggtgctgtgtgaagcgcaccagggcagagcccgctgggggctcacaagtgggagcggtaattgcgattggctgtgggaaaggacaggtttgcaacagagacacgaattagaacattcccatcaagactcttgttgctcaaatctgcatttagttattggaaataatctcaggccaagatttcagggtcctgtgagagctgcctccaagagggagggcctggcagcaatgtgtgcctaagtttggcaatctcctccccatccctcactcaccgtcatcgccccgtttcctacttttcaggttgcccttacggtattttcttttgctgccacctctcttgactcccttgtgaggagatcggctcttgctcctcctcatgccatgactctttaatttgcggctggtcgacatggtaagttctgccaaaatgaggggcttt

SEQ ID NO: 3660 - DNA, 395 bp, Homo sapiens
  MAP TO AC007993.8; EXPRESSED IN HEART, SIGNAL = 0.98; EXPRESSED IN HBL100, SIGNAL = 1.2; EXPRESSED IN BT474, SIGNAL = 1.5; EXPRESSED IN FETAL LIVER, SIGNAL = 1.2; EXPRESSED IN ADULT LIVER, SIGNAL = 1.5; EXPRESSED IN BRAIN, SIGNAL = 0.99; EXPRESSED IN BONE MARROW, SIGNAL = 1.6; EXPRESSED IN LUNG, SIGNAL = 1.8; EXPRESSED IN PLACENTA, SIGNAL = 1.1; EXPRESSED IN HELA, SIGNAL = 1.2
gcagtccctgctcagtcttcagaacccccctatggtgatagaaccctctctgacccagcagatggccccatctttgcctccagagttccctcaggaggtagaaccatctctaactcagcaggagattccagctcagattccagagccccctatggaggcagaaccttctccaacccagcaagaggccacagttcagactccagagccccctaaggaggtagaaccttcaagccagcagatggtcccatctcagcctccagagccacctaaggaggttgcagctcaacctccagctcattatgaggtgacagttccaacacaaggtcaggatcaagctcagcattcaatattgcccagtatcacagttcaacctttggacctgggacttaccatca

SEQ ID NO: 3661 - DNA, 449 bp, Homo sapiens
  MAP TO AC007160.3; EXPRESSED IN BT474, SIGNAL = 1.4; EXPRESSED IN HBL100, SIGNAL = 0.81; EXPRESSED IN FETAL LIVER, SIGNAL = 1.2; EXPRESSED IN HELA, SIGNAL = 0.81; EXPRESSED IN PLACENTA, SIGNAL = 0.85; EXPRESSED IN HEART, SIGNAL = 1.2; EXPRESSED IN ADULT LIVER, SIGNAL = 0.78; EXPRESSED IN LUNG, SIGNAL = 0.75; EXPRESSED IN BONE MARROW, SIGNAL = 0.91
gttttggggaagcttgtctgggtaaaatttagaaaataaaaatgagataggagcatatgcaggaaggacaaggtattagctggagaaggctttgatgatggtgctttccctttaactgcctcgctccttcctgtcattctgatggacactccctgcctgctccttggaggttttccatgctataggtagattgttttcctcccaggtagcactgagcagtttgcctccctctgcttttcctttggttttctcaaggtgtcctctgaggactacctacaggaggggcacctgtgtgactgatggaaaggtagattcctgggcctcctccgctggagccactgaatcaaaatccctaggggtgaggccatgcaatcggattttcatgtcctggaaagtttcagcaccattgttcctcccagccctgcatatgcaacaacaaagggatgctt

SEQ ID NO: 3662 - DNA, 482 bp, Homo sapiens
  MAP TO AC007336.2; EXPRESSED IN PLACENTA, SIGNAL =   5; EXPRESSED IN HELA, SIGNAL = 4.7; EXPRESSED IN HEART, SIGNAL = 3.8; EXPRESSED IN HBL100, SIGNAL = 3.8; EXPRESSED IN BT474, SIGNAL = 4.2; EXPRESSED IN FETAL LIVER, SIGNAL = 3.8; EXPRESSED IN ADULT LIVER, SIGNAL = 5.7; EXPRESSED IN BONE MARROW, SIGNAL = 4.4; EXPRESSED IN BRAIN, SIGNAL = 3.7; EXPRESSED IN LUNG, SIGNAL = 2.8
cccagtcactgtcttccctctatgtaactctgaagtctctgtagtcctcactgagctcacccatgctcactccttgtataggtcaggatgcccaagtagacaaggcccttggatcttctagtcctgcatagaggcctggggcttcgtcccagggaaccctgcagtgccaagcattaacactttagttgctggatctagaggagtttcaaggagtcccaggggaggtgataagaaagccagggcagcagaggcactcaggggatatggtgggtgcaatagtgtgtcccctccaccccacaacagcgttcatatctacctacaacttcagaaaggtgcccatatttagacaaagagtctttgcagatgtaagcagttaaggacttcaagatgcagtcatcctggatttcaggtgggcctaaagaaaatgtatagcgagaaccacagacaagaaggccatggaaagacagaggcagaggttggag

SEQ ID NO: 3663 - DNA, 481 bp, Homo sapiens
  MAP TO AL050327.6; EXPRESSED IN PLACENTA, SIGNAL = 1.1; EXPRESSED IN FETAL LIVER, SIGNAL = 0.96; EXPRESSED IN LUNG, SIGNAL = 0.94; EXPRESSED IN HBL100, SIGNAL = 0.88; EXPRESSED IN ADULT LIVER, SIGNAL = 0.88; EXPRESSED IN HEART, SIGNAL = 0.9; EXPRESSED IN BT474, SIGNAL = 0.9; EXPRESSED IN BONE MARROW, SIGNAL = 1.1; EXPRESSED IN HELA, SIGNAL = 1.1; EXPRESSED IN BRAIN, SIGNAL = 0.98
ggactggaggagctatttgtagcacttttaaaaccttttatagatcagtgtgttaccactgatgacagtggaagaaatgctgctattagaggcaggagctttaagaggtttgggtattggctatttctgattgggaatgccatgctgggaatcaatgctccatgcgtccttgcagtgctgcgtgaggaggccacacgttggcttgagcctccctgccatgcacgctccccttggcttggtaccccccttgactgagaacttggggtgattttctcctctgtagccaagccagagccccccaggctcccagctcaaggctgaccgaagcttggtgttaggtccgggtttcttgggggtgcatgagctgctggcgcgtccgcagtcggaggctgctttgtctctctcgctgtgtcttttcctcttgactctcttgttctcactccctcctgctgtgtctttgcccttgtgtctgctctccctc

SEQ ID NO: 3664 - DNA, 415 bp, Homo sapiens
  MAP TO AC008018.18; EXPRESSED IN LUNG, SIGNAL = 5.3; EXPRESSED IN HBL100, SIGNAL = 4.2; EXPRESSED IN HEART, SIGNAL = 5.1; EXPRESSED IN BONE MARROW, SIGNAL =   3; EXPRESSED IN PLACENTA, SIGNAL =   3; EXPRESSED IN HELA, SIGNAL = 4.7; EXPRESSED IN BT474, SIGNAL = 4.6; EXPRESSED IN ADULT LIVER, SIGNAL = 2.8; EXPRESSED IN FETAL LIVER, SIGNAL = 4.1; EXPRESSED IN BRAIN, SIGNAL = 3.7
gcctcctaaggataacagcgaagccagggagcagagcccacggatgggccctgcagctgctgggctgagaccgacagacaggcgtggtcactccgggccatgctggcgctgtgctgcccctgcccctctccaccccacctcccgaccactggggcagggacaatgggcccggctctgacttcgggcacgctcgtcgtgtgcagagacacggccgcagagtcctggggctcgctcgccatcctctgcccggcacacatcgacttgagcatctggaagacggccacgggggccacgttcaacttcacctggctctgaagctggccgctgtgggctgcatgagaatggtgtttctataaaacatgggaattgctggtcagacacagtgactcatgcccgcaatcctaccattttggga

SEQ ID NO: 3665 - DNA, 398 bp, Homo sapiens
  MAP TO AL031297.4; EXPRESSED IN FETAL LIVER, SIGNAL = 0.93; EXPRESSED IN PLACENTA, SIGNAL = 0.97; EXPRESSED IN BONE MARROW, SIGNAL =  19; EXPRESSED IN HBL100, SIGNAL = 0.87; EXPRESSED IN ADULT LIVER, SIGNAL = 1.4; EXPRESSED IN HEART, SIGNAL = 1.2; EXPRESSED IN BT474, SIGNAL = 1.1; EXPRESSED IN LUNG, SIGNAL = 0.71; EXPRESSED IN HELA, SIGNAL = 0.59
gcattttcttccaaattagcatcatagacacctttgttttttaaagtatatcatcaccatactgggattaactattttcatttatgttaaggtgacatcactcgtaaaaaaatttgggttcttattttactatttaaaaagacaccatcttgtatgcaaatagttgaataattatttcaagtttcattgctcacttctccttttttctctaatatgctttcttacctttgcttctctagtcccaccaccttccacattcatcctgtaacatgtaactcaaatgccatcaattccaactcctatgcctacctgttcccatactgcacctcttcagaaatgactgtctcagctacaaacacccaacaacatttgatttgtgcctcagttttggcattcat

SEQ ID NO: 3666 - DNA, 391 bp, Homo sapiens
  MAP TO AL109855.8; EXPRESSED IN ADULT LIVER, SIGNAL = 9.1; EXPRESSED IN BT474, SIGNAL = 6.3; EXPRESSED IN BRAIN, SIGNAL =   5; EXPRESSED IN HELA, SIGNAL = 6.3; EXPRESSED IN FETAL LIVER, SIGNAL = 6.7; EXPRESSED IN LUNG, SIGNAL = 6.3; EXPRESSED IN BONE MARROW, SIGNAL = 6.8; EXPRESSED IN PLACENTA, SIGNAL = 7.4; EXPRESSED IN HEART, SIGNAL = 5.9; EXPRESSED IN HBL100, SIGNAL = 7.1
ggagtttgtgggtcttgctctaacttttggagttttcgtctgatgtgtagggaagcctgacaaaatggattggccctcagggcttttggagtctaaatttgtatatttatgcatggcctccaccagtctagcttggaaaagggcaggattgtcagatggctcctgagtgatttcttgtaatttagaaaaattaacagattttattacagcctttctcattccttccaagaaacaatttatcatatagtctcatctgcccctgcctctgtttgggctggcatcagcagcctggtattgcaaattgggttgtgtgttggggacagcttctgcaccagctctatcatcattaggattataagcatgagcgtcatctgcccaagctggaactaaa

SEQ ID NO: 3667 - DNA, 464 bp, Homo sapiens
  MAP TO AL031057.10; EXPRESSED IN FETAL LIVER, SIGNAL = 0.8; EXPRESSED IN PLACENTA, SIGNAL = 1.6; EXPRESSED IN BT474, SIGNAL = 0.7; EXPRESSED IN BONE MARROW, SIGNAL = 0.89; EXPRESSED IN HELA, SIGNAL = 0.63; EXPRESSED IN HEART, SIGNAL = 0.78; EXPRESSED IN LUNG, SIGNAL = 0.63
cgcagcccaaatctatcatcactcaacttctctgtgttccagagaggtgccaccatgctgaaaaatcagtggggatattaatattgggacccttctcctttcagcagctggtgtttcagtagaagggatattttcaggttaataagcaatgattggccccttaaaaaccaatttctaacagcaagtggagtagagatggaatggcagggctctctatttgttttcggggtgtcacagcaaaatattaaatcctttgaattagcacgagctctgtaatcctcttagagcgtgtttctgtagggaagagaccttggacagctacagtgcatcaagatgcctttgtgagcattttcaacaggcacaccggccacccgttcctaacgtgaagtctgacctagcgtcaacacggagcaagggaaacagacatgcaagcacattgatcaccaagtaaagaggatgagacg

SEQ ID NO: 3668 - DNA, 452 bp, Homo sapiens
  MAP TO AL118519.5; EXPRESSED IN PLACENTA, SIGNAL =   1; EXPRESSED IN HEART, SIGNAL = 0.99; EXPRESSED IN ADULT LIVER, SIGNAL = 1.4; EXPRESSED IN BT474, SIGNAL =   1; EXPRESSED IN HELA, SIGNAL = 1.3; EXPRESSED IN HBL100, SIGNAL = 1.2; EXPRESSED IN FETAL LIVER, SIGNAL = 1.1; EXPRESSED IN LUNG, SIGNAL = 1.2; EXPRESSED IN BONE MARROW, SIGNAL = 1.5
tacattcaccagaatgccccatttctaaaccatttttgtagtggtgtttgctgttcttttattttaacaaacctggtggacacaagtgtcatctaaaatattttactaagtgcctcagttatactaatatgcatcttgagcttttctttgtgtgctttaataattttgaacattgatttttaaaacatttaaagatactttacatttttgcagatttctatagtagttgatggtggaaagaaggtggtggaatttatgtttcaagccacagagggagatgtgttgaactacatttttagaaatcgagaactccgtcctttgtttgatcgtcagtggcacaaacttggcattagtatacaatcccaggtcatttcactttatatggattgtaatttaattgcgaggaggcagactgatgaaaaggacactgtggatttccatggacggacagt

SEQ ID NO: 3669 - DNA, 482 bp, Homo sapiens
  MAP TO AC007455.7; EXPRESSED IN HBL100, SIGNAL = 0.9; EXPRESSED IN FETAL LIVER, SIGNAL = 0.87; EXPRESSED IN BRAIN, SIGNAL = 1.1; EXPRESSED IN HEART, SIGNAL =   1; EXPRESSED IN BT474, SIGNAL = 0.9; EXPRESSED IN BONE MARROW, SIGNAL = 1.1; EXPRESSED IN LUNG, SIGNAL = 1.2; EXPRESSED IN PLACENTA, SIGNAL = 1.2; EXPRESSED IN ADULT LIVER, SIGNAL = 1.2; EXPRESSED IN HELA, SIGNAL = 1.1
ttaggaaaatggggactctttacagagtctaaatgtcaaacaaattaaagaataatgggtacactaacataaacaagaaccaggaaagaagcctcttggctggaccaactcccagtggagagggtacataagagccccagagaaaggagagatattcacacctcagaagccttatccttcttttcaatcaaacccataaataccacagactctaatagccatggattgctgtgcctctcgaggctgcagtgtccccaccgggcctgccaccaccatctgctcctctgacaaatcctgccgctgtggagtctgcctgcccagcacctgcccacacacagtttggttactggagcccacctgctgtgacaactgtcccccaccctgccacattcctcagccctgcgtgcccacctgcttcctgctcaactcctgccagccaactccaggcctggagaccctcaacctcaccaccttcactcagc

SEQ ID NO: 3670 - DNA, 383 bp, Homo sapiens
  MAP TO AL121572.6; EXPRESSED IN BT474, SIGNAL = 0.99; EXPRESSED IN BONE MARROW, SIGNAL =   1; EXPRESSED IN PLACENTA, SIGNAL = 1.2; EXPRESSED IN HBL100, SIGNAL = 1.9; EXPRESSED IN HELA, SIGNAL = 1.7; EXPRESSED IN HEART, SIGNAL = 1.3; EXPRESSED IN FETAL LIVER, SIGNAL = 1.2; EXPRESSED IN ADULT LIVER, SIGNAL = 1.1
tttatttgcctttggttggctcctgggtttggggcggggtaggggttggcagcagcccgggcttcgtgcgccctctggtggacctcagaggcaagaactggaatcccggccaaacctgaggacttcacagtcaatagtttaggagagttgcatggttcctcaggtctgcagtccagacccaacaacagtggacggggcacgttgggaggaggccctgaacctctggctctcatactcgccagtgttggacacccgcatgttctgccgagccctcatctgtttcacacggtccttgtccacttcctgcttggtgaggatgaagagaaggataccacaagggaagccgatggcccaggccagtcccacagctttcatggggttct

SEQ ID NO: 3671 - DNA, 423 bp, Homo sapiens
  MAP TO AL121749.7; EXPRESSED IN PLACENTA, SIGNAL = 1.2; EXPRESSED IN HEART, SIGNAL = 1.5; EXPRESSED IN BT474, SIGNAL = 1.5; EXPRESSED IN LUNG, SIGNAL = 1.2; EXPRESSED IN BRAIN, SIGNAL = 1.2
cgtatacagggagtaccttggccatataaccactctcttagccctactgttttacttacctgcatttttaatttcagcatttcctggatttgaacgtgatttcacaaatgactttaggtgggggctacagaacaatcttcacaatctcttccgggatatctatcctctattctcccaggagaacgacaacactgaagcttatgccacggtgtccacagggtaacctggtgaggattccctgctccaacctcactccgctgagtaacaggaacgggccctggaccacctcggctggggatgggtgtggccatcctgagggcactcaccagggtgacgatggcacattcagccgtcagctgagcagcactgaacagtgtccgaacgaaccggtaaatctgcttctgctctgggttgtgtttgtca

SEQ ID NO: 3672 - DNA, 344 bp, Homo sapiens
  MAP TO AL109938.4; EXPRESSED IN BT474, SIGNAL = 2.5; EXPRESSED IN BRAIN, SIGNAL = 1.6; EXPRESSED IN BONE MARROW, SIGNAL = 2.5; EXPRESSED IN HELA, SIGNAL = 3.1; EXPRESSED IN ADULT LIVER, SIGNAL = 3.8; EXPRESSED IN FETAL LIVER, SIGNAL = 2.7; EXPRESSED IN LUNG, SIGNAL =   3; EXPRESSED IN PLACENTA, SIGNAL =   3; EXPRESSED IN HEART, SIGNAL = 2.2; EXPRESSED IN HBL100, SIGNAL = 2.9
cccctacagcagaccttcacatctcagcacaagatccacacagtggaaaggatcaaacttggccaaattgatcaaggaacttgagagaacactgattgagaagtacctacaaaatatatatatatatgtttctcctggccagaaaacactgacagtgcatcggtatatttcaagatgtgctgtgggaaaggatgcccaagttcttccttgtgtggcctcacacttaccctcaatcagtttgatcctgaagtaggcgatgaggaggagcagcagcaaagtcacggggaggaagaccccaaagaacaggaaccagccagggagctccctcatgaaagctgacagca

SEQ ID NO: 3673 - DNA, 352 bp, Homo sapiens
  MAP TO AC008045.4; EXPRESSED IN BT474, SIGNAL =   3; EXPRESSED IN ADULT LIVER, SIGNAL =   2; EXPRESSED IN BRAIN, SIGNAL = 2.4; EXPRESSED IN PLACENTA, SIGNAL = 2.3; EXPRESSED IN HBL100, SIGNAL = 2.3; EXPRESSED IN FETAL LIVER, SIGNAL = 2.7; EXPRESSED IN LUNG, SIGNAL =   3; EXPRESSED IN BONE MARROW, SIGNAL =   2; EXPRESSED IN HEART, SIGNAL = 2.5; EXPRESSED IN HELA, SIGNAL = 2.7
tgcagggaaatactgaaggcttgagacccagggaggcagaccagaaaatggaacttggctgcacataccaaaatcaaatcaaattagaaagtatatctcatgaaaatcttaatgaaagtgatgccacaagtaggggaagccactgggttatgataggatcgtaaggtcattgttgggattttttttgtccctatgtccctccaccaggtgacaatctctgtggatggcattcttaccacgacgggctacactcaagaggactataccatgctgggctcggacgacttcttctatgtaggaggaagcccaagtaccgctgacttgcctggctcccctgtcagcaacaacttca

SEQ ID NO: 3674 - DNA, 472 bp, Homo sapiens
  MAP TO AL078600.11; EXPRESSED IN FETAL LIVER, SIGNAL = 2.2; EXPRESSED IN HEART, SIGNAL = 1.3
ggacctgaacatttagattatttccacttttttgtttttattaaaaatgctgagacagacagctttgtccagtaaatttgtgtctcactttttattgcacacaccctggtaagtgggattttctcttaaattcttaagaggggaaataaattggccaacagatagtacattttgagggataactttccagaaaccatttatactcccatgtgtcatataatgaatggagtctgttgattctttgtgaatttcataagtgatgaagcagtatatggcattttcagtttgcttttctttgatcaacactttctcctgtgttgatcatttgcatttcttccttgtgagttgtatagatagaacaaggaaattttgaaaggaggaagatagagaagatggcagagcttggaggcctaaggagtgaaatccaccaggggagatggatctggcaagccggctcaatgaacgtggactc

SEQ ID NO: 3675 - DNA, 455 bp, Homo sapiens
  MAP TO AL049837.3; EXPRESSED IN ADULT LIVER, SIGNAL = 0.9; EXPRESSED IN HEART, SIGNAL = 1.1; EXPRESSED IN BONE MARROW, SIGNAL = 0.93; EXPRESSED IN HBL100, SIGNAL = 0.72; EXPRESSED IN BRAIN, SIGNAL = 0.91; EXPRESSED IN PLACENTA, SIGNAL = 0.86; EXPRESSED IN BT474, SIGNAL = 0.71; EXPRESSED IN FETAL LIVER, SIGNAL = 2.7; EXPRESSED IN LUNG, SIGNAL = 0.88; EXPRESSED IN HELA, SIGNAL = 0.82
cctgctgccatctaagaagtgacttgtactcctcgttctccttctgccatgtttgtgaggcttccccagccatgtggaactgtgagtcaattaaacctctttcttttataaattagccagtcttgggtatgtctttattagcagtgtgagaacagattagtacaatgtggaattttttttatcattattaaaaaatatttttccttccctttcttgcatgttagaccacttaattttgtcccacaattcacttatgttctattactgttttagtcttttatctctgtgtattttatcttgaatatcttctgttactatgtcttcgaattcactgatattttcttctgcagtgtcaaatctgttgttaatttcatccagttcatgttttatgtcagaaatggtttgattcaagtcattttggtatattacctttttctcctcaccgtgctcatttt

SEQ ID NO: 3676 - DNA, 479 bp, Homo sapiens
  MAP TO AC007597.2; EXPRESSED IN BRAIN, SIGNAL = 0.94; EXPRESSED IN HEART, SIGNAL = 0.85; EXPRESSED IN HBL100, SIGNAL = 0.8; EXPRESSED IN FETAL LIVER, SIGNAL = 0.79; EXPRESSED IN HELA, SIGNAL = 1.2; EXPRESSED IN ADULT LIVER, SIGNAL = 0.92; EXPRESSED IN PLACENTA, SIGNAL = 0.93; EXPRESSED IN BT474, SIGNAL = 1.1; EXPRESSED IN BONE MARROW, SIGNAL = 0.69; EXPRESSED IN LUNG, SIGNAL =   1
tgtccatgagttcagttgttttgatttttagatctcacaaatgagtgagaacatgcaatgtttgtctttctgtgtaaattttgacatagggctagagagttcacatataccccccaggcaggacctgaaggtatattgctggcctgcctgctgaaagaaaactgctcttatgggcctcatggacaggaatttgagggaaaggcgtttgccagttcaatagctgcaaaccaggaaccaggggatgtgttaatttgcttaagcaatgaaaccacatctgatacagcagctgcaattggagtcaccacctggttaagcttgtgataatccaccatcatcctccaagatccatctgtcttctgcacaggccaaatgggcaaactgaatgggaatgtggtgggaatcatcacccctgcatccttcatgtccttgatggtggcactaatctctgcagtccctctaggaatgtgttatgctttggg

SEQ ID NO: 3677 - DNA, 401 bp, Homo sapiens
  MAP TO AC008132.26; EXPRESSED IN LUNG, SIGNAL = 7.8; EXPRESSED IN PLACENTA, SIGNAL = 3.2; EXPRESSED IN HELA, SIGNAL = 4.3; EXPRESSED IN HEART, SIGNAL = 3.3; EXPRESSED IN HBL100, SIGNAL = 4.2; EXPRESSED IN BT474, SIGNAL = 3.8; EXPRESSED IN FETAL LIVER, SIGNAL = 4.1; EXPRESSED IN ADULT LIVER, SIGNAL = 4.6; EXPRESSED IN BONE MARROW, SIGNAL = 3.9; EXPRESSED IN BRAIN, SIGNAL = 3.3
tcagccactgcactgagaacatggactctctgtggggcccaggagccgggagtcacccctttggggtccacaacacccggctgtccccagacttgtgtccagggaagatagtgttgagggccctcaaggagagcggggcagggatgcctgagcaggacaaggaccctagagtccaagagaatcctggtgatcagagaagggtccccgaggtcaccggggatgcaccgtctgcatttcggcccctgcgggacaatagaggcctctctccctttgtgcccgggcccgggcctctgcagacagacctccatgcccagaggtcagaaatcagatataaccagacatcccagacctcctggacgagctcctgcaccaaccgaaatgccatctccagctcctacagc

SEQ ID NO: 3678 - DNA, 472 bp, Homo sapiens
  MAP TO AP000409.1; EXPRESSED IN HEART, SIGNAL =  18; EXPRESSED IN ADULT LIVER, SIGNAL =   2
tgtttcctttaagtttgattttatcccagttaatataaaatctctccatcaaagcaggggagatgtgtagcaaaaagctggtaaaagaaacacatgttttctttaaatcccacattttgtctcacatttcttctactataaaattgtccaaaaagttagagagtagtcaatattacattatataagatcaactatcaattaaaaaacacagtgttaataagtgaatgtgaatcctagagaagactgccatttgtaaaaataccagccactcttacatatttcatgatgccagaaaactcaagagcataagtgaactcaaagatatcattcgtcatcctggttacaggacacccatttcctagagacagctcattatgcttaggttgcaggttttccacaagaggtgctcctctaatttcaaccagaagccaagattcagtacactctacaaacactgatggaagaaagagaa

SEQ ID NO: 3679 - DNA, 398 bp, Homo sapiens
  MAP TO AC007426.1; EXPRESSED IN BRAIN, SIGNAL = 2.1; EXPRESSED IN LUNG, SIGNAL = 2.4; EXPRESSED IN HBL100, SIGNAL = 3.2; EXPRESSED IN HEART, SIGNAL = 2.5; EXPRESSED IN BONE MARROW, SIGNAL = 2.8; EXPRESSED IN PLACENTA, SIGNAL = 2.1; EXPRESSED IN HELA, SIGNAL = 2.6; EXPRESSED IN BT474, SIGNAL = 2.6; EXPRESSED IN ADULT LIVER, SIGNAL = 3.3; EXPRESSED IN FETAL LIVER, SIGNAL = 2.5
  unsure 110
  unsure 176
  unsure 253
gccacctcctcttgctattgaattcacagtgaattcaagtgctgtgagtatctgcttgaaaccctgggtgatgctaatcatctccatgtgagcagttccacaggcctgtnaaattgtgtattgcagtaaaaagtgatctctcgcagtctcacatttttttattgtgttgagcacanatattgcccctgaataatgccatgggacccatacaaaaagccactagtgatgctagaaatgctcccaagaagaaaangtcatgacattgcaagaaaacattgaattgcttgatatgtacggaagattgaggtctgcagctgcagttgcccatcacttcaagagaaatgaatccagcataaggaccattgtaaaaaaagaaaaggaaattcatgaagccatgg

SEQ ID NO: 3680 - DNA, 360 bp, Homo sapiens
  MAP TO AC008430.2; EXPRESSED IN BT474, SIGNAL =   1; EXPRESSED IN ADULT LIVER, SIGNAL = 1.1; EXPRESSED IN BRAIN, SIGNAL = 1.3; EXPRESSED IN LUNG, SIGNAL = 1.2; EXPRESSED IN HBL100, SIGNAL = 1.1; EXPRESSED IN FETAL LIVER, SIGNAL = 1.3; EXPRESSED IN BONE MARROW, SIGNAL =   1; EXPRESSED IN PLACENTA, SIGNAL =   1; EXPRESSED IN HEART, SIGNAL = 2.1; EXPRESSED IN HELA, SIGNAL = 1.2
ttttcagaatgggagagtggtttagttccattggcctttcgtctgtattctgaattttatttgaaattgattaaatataatggttattaaattgttggttttaagcagcatttgtattactgactaaacacacacatgcctacacacacacaaaggaatagcattactaagacatttgtatttcaaatgttaaaactttccaatatctaatcattttttaccaataattctcttcctctgtcctttctgtttttcttagacataaatgaatgcgaagttgagccttgcaaaaatggtggaatatgtacagatcttgttgctaactattcctgtgagtgcccaggcgaatttatgggaaga

SEQ ID NO: 3681 - DNA, 402 bp, Homo sapiens
  MAP TO AL132773.1; EXPRESSED IN BRAIN, SIGNAL =   2; EXPRESSED IN BONE MARROW, SIGNAL = 1.6; EXPRESSED IN HEART, SIGNAL = 1.9; EXPRESSED IN BT474, SIGNAL = 2.5; EXPRESSED IN ADULT LIVER, SIGNAL = 2.1; EXPRESSED IN LUNG, SIGNAL =   2; EXPRESSED IN PLACENTA, SIGNAL = 2.2; EXPRESSED IN HELA, SIGNAL = 1.5; EXPRESSED IN HBL100, SIGNAL = 1.7; EXPRESSED IN FETAL LIVER, SIGNAL = 2.1
gcccttgcttataccactgcagaatgtggtcaaaggcttgactctaacatttttggcttgttgctttaaccagctacactgaaaccttggttctttcttccagctcagctgagcttctgaccagtatgatttaataagaaatgtggtatccaaaacaaagtggcttttttcctcctagatattcaagtcaaatagaagtgctgtgttccacaccgatttgccatgagtaaacctgaccaatttgacttacgctgacatttccctccattggtgggatcaccgtagaagccagatatgcaggtctcgcagtgcttgcctgtggtcaggttctcacacttctcacagatgctctgattgatgcatttactgtggccgttgcattggcaagctgcaagaaaaaga

SEQ ID NO: 3682 - DNA, 473 bp, Homo sapiens
  MAP TO AJ010597.1; EXPRESSED IN FETAL LIVER, SIGNAL = 1.2; EXPRESSED IN PLACENTA, SIGNAL = 1.2; EXPRESSED IN BT474, SIGNAL = 1.1; EXPRESSED IN BONE MARROW, SIGNAL = 1.3; EXPRESSED IN HBL100, SIGNAL = 0.91; EXPRESSED IN HELA, SIGNAL = 0.82; EXPRESSED IN ADULT LIVER, SIGNAL = 0.9; EXPRESSED IN BRAIN, SIGNAL = 0.91; EXPRESSED IN HEART, SIGNAL = 1.2; EXPRESSED IN LUNG, SIGNAL = 1.1
tttcattgtttcattttcagtcaagatttatgaaaacatgaaccatactagagatacacctgatttttttctaggatatttgtctgaatttatagtaaaagataaaacagcaaaataacagtttcaaagaccttgctcttctccataatatactcagtattcttattgcactttatcaaaccaccataacaaaccacctcaaaacccagtggcataccaaaatattgtcactcacactcacagatttgctggttggctgggttgacttttttcacatgtgcctcattcttcttaggcaagtgggctaccaagtcatgttcttcttaagcaggttgcagaagttcaactgggctagcccagcgatgcaggtagtttcatgtctgcttgcatgctggctgctaacatgccattggtcaaatcccatcatccatgacaaaaggaaatacatcatgtgtgaggaagtaaaagtggca

SEQ ID NO: 3683 - DNA, 384 bp, Homo sapiens
  MAP TO AL121580.6; EXPRESSED IN PLACENTA, SIGNAL = 1.6; EXPRESSED IN HBL100, SIGNAL = 1.6; EXPRESSED IN HEART, SIGNAL = 1.3; EXPRESSED IN ADULT LIVER, SIGNAL = 2.2; EXPRESSED IN BT474, SIGNAL = 1.5; EXPRESSED IN BRAIN, SIGNAL = 1.6; EXPRESSED IN HELA, SIGNAL = 1.6; EXPRESSED IN FETAL LIVER, SIGNAL = 1.7; EXPRESSED IN LUNG, SIGNAL = 1.5; EXPRESSED IN BONE MARROW, SIGNAL = 1.5
cctggatgacgaaagaatctgtacaacaaaccccatgacaggagttcacccatataacaaacctgcacatgtacccctgaacctaaaatacaagttaaagaataaaaaccaaaaaaacaaaattgtaacagaatttttcacatcagaggacaagttgattctagtatctgaacagactaaatgactagaaaaagccaggtcaaaattaaaaaaataagcataaaaaggaaggagatttgtcctactaaaataaatatttccttacaagtttcaggaaataaacagcatggtatcattgctggtgtggacaacggatccactgatgccgtcatcaaagacgcatcaaacacgcaaagcaacaccacacaccagaggcctgctatt

SEQ ID NO: 3684 - DNA, 377 bp, Homo sapiens; identical to SEQ ID NO: 1086
  MAP TO AC007914.1; EXPRESSED IN FETAL LIVER, SIGNAL = 1.2; EXPRESSED IN LUNG, SIGNAL = 1.2; EXPRESSED IN HELA, SIGNAL = 1.4; EXPRESSED IN HEART, SIGNAL = 1.3; EXPRESSED IN PLACENTA, SIGNAL = 1.2; EXPRESSED IN BT474, SIGNAL = 0.93; EXPRESSED IN BONE MARROW, SIGNAL = 1.2; EXPRESSED IN BRAIN, SIGNAL = 1.3; EXPRESSED IN ADULT LIVER, SIGNAL = 1.1; EXPRESSED IN HBL100, SIGNAL = 3.9
  unsure 102
  unsure 110

SEQ ID NO: 3685 - DNA, 452 bp, Homo sapiens
  MAP TO AC007740.1; EXPRESSED IN HBL100, SIGNAL = 0.72; EXPRESSED IN FETAL LIVER, SIGNAL = 0.79; EXPRESSED IN BRAIN, SIGNAL = 0.74; EXPRESSED IN PLACENTA, SIGNAL = 0.93; EXPRESSED IN BT474, SIGNAL = 0.82; EXPRESSED IN BONE MARROW, SIGNAL = 0.98; EXPRESSED IN HELA, SIGNAL = 0.62; EXPRESSED IN ADULT LIVER, SIGNAL = 0.78; EXPRESSED IN HEART, SIGNAL = 0.96; EXPRESSED IN LUNG, SIGNAL = 0.79
aatgctcaataaatgtgaaataagagaaacagaataaagttttgcacatacttttacacatttccagaaagaattacaagtactggtaaactgcttacatgattataattttgtttaaacacatccttttcatctaagaaggcatatagttgttaatatgcatgaatataattatagtagttataattaactactactataatgtctttctcaggacatgtcatttttgtgaagatgctgaatataaatttagaggctgcatcttcatcaatcctggcatatgtaactaacaactttttggttcttaaccaagaaaacatagatagtcccatcatctttctctgtgaaaagtctataattatcactttaatctatacatgcaaaaatgttaaatattttgccaaattcatgcagaaaattcacgtcaggttagcacaaaacagcagtttccg

SEQ ID NO: 3686 - DNA, 449 bp, Homo sapiens
  MAP TO AL109942.4; EXPRESSED IN HBL100, SIGNAL = 2.6; EXPRESSED IN HELA, SIGNAL = 3.1; EXPRESSED IN PLACENTA, SIGNAL = 2.3; EXPRESSED IN HEART, SIGNAL = 2.2; EXPRESSED IN ADULT LIVER, SIGNAL = 3.3; EXPRESSED IN FETAL LIVER, SIGNAL = 2.9; EXPRESSED IN BT474, SIGNAL = 2.8; EXPRESSED IN BRAIN, SIGNAL = 3.5; EXPRESSED IN BONE MARROW, SIGNAL = 2.6; EXPRESSED IN LUNG, SIGNAL = 2.8
tcttgactcctgccgtctgcgctgagaaccagggtgcccctgccccctgctcccacactggcagggcaagcacaacctggacctctagctgaaaggtggggagggcaccagggtccatggcctcgacagcatgtgttctgggactgtcccgaggcgtctggtgtgaacgtcccctcctctttttctacttcagtctccaacagccccggcaggtggctctgacgtctccttcatgggcacctgggctccttcttctgtttcagggctccaaggtcctggccaagaaagagctggcctatgtcccaattatcggctggatgtggtacttcaccgagatggtcttctgttcgcgcaagtgggagcaggatcgcaagacggttgccaccagtttgcagcacctccgggactaccccgagaagtattttgtatgtaggcaccagagcagctgt

SEQ ID NO: 3687 - DNA, 469 bp, Homo sapiens
  MAP TO AC007404.2; EXPRESSED IN FETAL LIVER, SIGNAL = 0.95; EXPRESSED IN LUNG, SIGNAL = 0.99; EXPRESSED IN HELA, SIGNAL =   1; EXPRESSED IN BRAIN, SIGNAL = 0.82; EXPRESSED IN HEART, SIGNAL = 0.91; EXPRESSED IN ADULT LIVER, SIGNAL = 0.72; EXPRESSED IN PLACENTA, SIGNAL = 0.83; EXPRESSED IN BT474, SIGNAL = 0.92; EXPRESSED IN BONE MARROW, SIGNAL = 0.77
aatctatcttgtggaccaccttcttcaacttatcttcccaataggaatcagaagatgactagtatgcagaggggacagaaaactaagatgaaaggcaagagaacttacaataaataaatggcatattctaaagcacgctatatctgtcgcagtaaaatatctcatagcagcaaaatgtctcaaggtgtaaaaatgctttggggaaaaagtactgattttaaatttacttgtagggtttcgaagtttagcagaacgtgccaaggcaagatcaaagtgagcctggtctgcattctcacacaaattgatgattcgacacaggcaatcggcagcaaatactcgagtggcccagcgaggggccacaaagggctttgatttatcttcttcacctaacgtggtaaacatggtatcatcatccatctcatctttcttttcagcttcttcatcttttccactacttaagagagttgca

SEQ ID NO: 3688 - DNA, 487 bp, Homo sapiens
  MAP TO AC007717.1; EXPRESSED IN LUNG, SIGNAL = 0.7; EXPRESSED IN PLACENTA, SIGNAL = 0.85; EXPRESSED IN BONE MARROW, SIGNAL = 0.8; EXPRESSED IN FETAL LIVER, SIGNAL = 0.65; EXPRESSED IN BT474, SIGNAL = 0.77; EXPRESSED IN HELA, SIGNAL = 0.64; EXPRESSED IN HEART, SIGNAL = 0.84
  unsure 240
  unsure 294
  unsure 299
  unsure 305
  unsure 354
tggcaatctgcttggagtaagacataaacaaacaaacaaacagcaacaacaaaccccatgggatgatagataatcagtttttaaacatttttcagttataatttttaatatttattgtgttggggtatctgttcccactcactaggctatggatcttgggggagcaagatcttctctcttgttcctcaaacaactggcagagtgcctgtgtgcgatagggtttttataaatatgtgttgnaataatttcatttattctaacccactaaataaagttttaccaacttaattttgncacanagaagntaacctacatataactttttggtacttagcaacaactttacaaccaaangagttgaaataactgtaaatattccaactagttatgcccacgacatcacaggtggttgttgctataaagcacctgcaagacaaaattaaagtatcaagagttctagattcaacctttttccctctacacagga

SEQ ID NO: 3689 - DNA, 423 bp, Homo sapiens
  MAP TO AL109798.13; EXPRESSED IN BRAIN, SIGNAL = 5.2; EXPRESSED IN BONE MARROW, SIGNAL = 6.3; EXPRESSED IN FETAL LIVER, SIGNAL = 5.9; EXPRESSED IN ADULT LIVER, SIGNAL = 7.1; EXPRESSED IN BT474, SIGNAL =   6; EXPRESSED IN LUNG, SIGNAL = 4.5; EXPRESSED IN PLACENTA, SIGNAL = 5.5; EXPRESSED IN HEART, SIGNAL = 4.1; EXPRESSED IN HELA, SIGNAL = 5.3; EXPRESSED IN HBL100, SIGNAL = 5.6
tttcttgggaggtggagatgcagggagagggagaatgagatgcaagttaagtataacggaagctggccattcctaggagacaaggctcagactgcagcccagactgcccgagcttggcagggggctctttggatgctggcatcccctcgagagccagcacctgcgggctttttgcagacatgcacagggggagtctctcggtgactcggtatgttctcggcaggtgtgcctggctctccaagttccaggacagtagccagtggttacagatagatctgaaggagatcaaagtgatttcagggatcctcacccaggggcgctgtgacatcgatgagtggatgaccaagtacagcgtgcagtacaggaccgatgagcgcctgaactggatttactacaaggaccagactggaaacaaccgggtaa

SEQ ID NO: 3690 - DNA, 453 bp, Homo sapiens
  MAP TO AL031770.12; EXPRESSED IN HBL100, SIGNAL =   1; EXPRESSED IN ADULT LIVER, SIGNAL = 0.68; EXPRESSED IN BRAIN, SIGNAL = 0.68; EXPRESSED IN HEART, SIGNAL =   1; EXPRESSED IN PLACENTA, SIGNAL = 0.62; EXPRESSED IN BT474, SIGNAL = 3.8; EXPRESSED IN BONE MARROW, SIGNAL = 1.1; EXPRESSED IN LUNG, SIGNAL = 0.68; EXPRESSED IN HELA, SIGNAL = 0.85; EXPRESSED IN FETAL LIVER, SIGNAL = 0.64
tcaagtgaacgaacagattttaagaactgagaagagtagttctcatacgaccgtcatccttaggcttcactgactgttacctcagcacactgccttcccgaaagtaacacaaatattaaccaacatcccaatcctgtcaaaataaacataaactaaatctaagttgagatatgcaagtaggtaggttttacacgaatctaccagctttacagcttaaaagacaaactcatttttactttcttctttagaataaacccatgaaagactttacctattttctcaggtttgagtagcttgaaagagactgttgaggttcctctgccacctgacttagtggtgacaataatgtctcctttgtcatttttggcttgtcccactcgacatactattttacttgcagacatccattctgccgtcaggaggcaattatgtccacaaatggtcaagcctgaa

SEQ ID NO: 3691 - DNA, 405 bp, Homo sapiens
  MAP TO AC007445.1; EXPRESSED IN HELA, SIGNAL =   3; EXPRESSED IN HEART, SIGNAL = 2.1; EXPRESSED IN BT474, SIGNAL = 2.5; EXPRESSED IN ADULT LIVER, SIGNAL = 2.9; EXPRESSED IN BRAIN, SIGNAL = 2.5; EXPRESSED IN PLACENTA, SIGNAL = 2.8; EXPRESSED IN HBL100, SIGNAL = 2.5; EXPRESSED IN FETAL LIVER, SIGNAL = 2.9; EXPRESSED IN LUNG, SIGNAL =   3; EXPRESSED IN BONE MARROW, SIGNAL = 2.5
  unsure 263
  unsure 369
  unsure 378
  unsure 384
gtagcaacggtaaaggctggttcctgggaatatctccattcggacaggctcttccttcggggaccaaagaggcccacttttaagacctcactctcgggcacttgctctgttttgctgaagcgtctgccttccaggccagggaggacggccacatccttctccagctgtggagccttcttgaggtcatcttcttcaggactctgccggcgagactcggcctccttgatgggggccagggattcggacaatttccgctgtgtcgntctggacctctggtcctctcttggatttctcatcagcgagggtttccaggacctcatattctgccaggccgggaatgatcttcatggactctggtatttctttctnccattttcntgaagntgcttctgtagtggagggctg

SEQ ID NO: 3692 - DNA, 395 bp, Homo sapiens
  MAP TO AC008496.2; EXPRESSED IN PLACENTA, SIGNAL = 0.9; EXPRESSED IN HELA, SIGNAL =   1; EXPRESSED IN HEART, SIGNAL = 4.6; EXPRESSED IN FETAL LIVER, SIGNAL = 0.93; EXPRESSED IN BRAIN, SIGNAL = 1.1; EXPRESSED IN LUNG, SIGNAL =   1
tgagagctcaaagccaaatgtgaatctcaattacaatatttgtgttgactattataatatttatgccattttgttttccctgatcttgattcccaaattttgcttctgtagttattatttcattatatggttgttggggttttgttgttgttttgtaaatggctataaatgctttgtgggaagagtcataatacaggtgtatatttaaatacttcacatgaagatgcatgaatatgcatatgcatttgtatttgtgttagcaatcctaccatttacttcttgatcatcttgtggctcctccatgcagtaaacctgaaatgaatcaatgacatcttccttgttcatgctccagtaaactgcaattgttgtgctggtggcagaatttggttcctgag

SEQ ID NO: 3693 - DNA, 441 bp, Homo sapiens
  MAP TO AL031656.10; EXPRESSED IN PLACENTA, SIGNAL = 0.73; EXPRESSED IN BT474, SIGNAL = 0.65; EXPRESSED IN LUNG, SIGNAL = 0.87; EXPRESSED IN HELA, SIGNAL = 0.88; EXPRESSED IN ADULT LIVER, SIGNAL = 0.92; EXPRESSED IN HEART, SIGNAL = 0.94; EXPRESSED IN BONE MARROW, SIGNAL =   1; EXPRESSED IN HBL100, SIGNAL = 0.88; EXPRESSED IN FETAL LIVER, SIGNAL = 0.84; EXPRESSED IN BRAIN, SIGNAL = 0.87
ttcaggttaactgagcagcacagtagactcagcagatacctggatcagctggtgaatgtcagcaacaaacatcctggctttcagtcctctccctgtgatgttgtgctttgatgaagggttcctatacaccacattttattttcttaggtgagaacaaacatcagaagcagttgaggaaccaggaagtggatcctctagggataaagaggcattctgctggatggcttttaaaaatgtttcctccagagtcatctgcctcattaacaatgatttttgtcttagacgtctctgattttataaattgacctggtttcctgttctgctatgaatgcatactgctccagtccttccataagctcatcaccaatgcttgccatgtcatctacaggcactttttctgcagtgttaacaatgtcatcttcattggtggtatcgtgttgg

SEQ ID NO: 3694 - DNA, 440 bp, Homo sapiens
  MAP TO AC010951.3; EXPRESSED IN BRAIN, SIGNAL = 1.6; EXPRESSED IN LUNG, SIGNAL = 1.9; EXPRESSED IN HELA, SIGNAL = 2.7; EXPRESSED IN PLACENTA, SIGNAL =   6; EXPRESSED IN FETAL LIVER, SIGNAL = 1.7; EXPRESSED IN ADULT LIVER, SIGNAL = 4.2; EXPRESSED IN BT474, SIGNAL =   2; EXPRESSED IN BONE MARROW, SIGNAL = 2.1; EXPRESSED IN HEART, SIGNAL = 1.2; EXPRESSED IN HBL100, SIGNAL = 2.4
gcctcatgttctgtgacctgggggttcttggcctcacggattccaaggaatggaatcttgggccatgtggtgagtgttatagctctattagaagccgtgggtcacggaagagaactgtggaacccagtgactagtgttcagctcgattaggacgaacctgggcgcttagtcatgcaggaacaatggcaagcctttagccccatctggagcggcaatgggcgccttgctggatcaagagcacagtggacacccttccagatctggagtgatggaagtctgcgacgcagtggtggatggcgagcgaaagctcagctcaagcgtaacaaacacggaccagaagagtacagttgcaagatttaatagagtgaagatagagctcccatacaaagggaggggacccaaagggggttaccgttgccagctcgaatgcttgggtttat

SEQ ID NO: 3695 - DNA, 428 bp, Homo sapiens
  MAP TO AL109810.4; EXPRESSED IN PLACENTA, SIGNAL = 5.5; EXPRESSED IN HBL100, SIGNAL =   9; EXPRESSED IN HEART, SIGNAL = 2.4; EXPRESSED IN ADULT LIVER, SIGNAL = 1.9; EXPRESSED IN BT474, SIGNAL =  15; EXPRESSED IN BRAIN, SIGNAL = 8.6; EXPRESSED IN HELA, SIGNAL =  25; EXPRESSED IN FETAL LIVER, SIGNAL = 6.8; EXPRESSED IN LUNG, SIGNAL = 5.2; EXPRESSED IN BONE MARROW, SIGNAL = 5.3
aacccatagaacccaaagggaactgcagtgagaacacaaagatgatagaatactgtgagcaaatggggtggggggtgctctcctgagctacagaaggaatggtctggtggttaagataaaacacaagtcaaacttattagcgttgtccacagtcagcaatagtgacctccttgctggtcttgcctttcctggacccaaagcgctccatggcctccacaatattcagtttcttctttcaccttgccagagaccacatgcttgccatccagccactcagtcttggcagtgcagatgaaaaactgggaaccgtttgtgttgggtccagcatttgccgtgaaaaagatgccaggacctgtaggcttcaggatgaagttctcgtcatgaaatttctctccacagatgggctcgccaccagtgtcattatggca

SEQ ID NO: 3696 - DNA, 372 bp, Homo sapiens
  MAP TO AP000013.2; EXPRESSED IN BRAIN, SIGNAL = 2.1; EXPRESSED IN BONE MARROW, SIGNAL = 2.2; EXPRESSED IN HEART, SIGNAL = 1.3; EXPRESSED IN BT474, SIGNAL = 2.5; EXPRESSED IN ADULT LIVER, SIGNAL = 2.5; EXPRESSED IN FETAL LIVER, SIGNAL = 2.1; EXPRESSED IN LUNG, SIGNAL =   2; EXPRESSED IN PLACENTA, SIGNAL = 2.4; EXPRESSED IN HELA, SIGNAL = 1.6; EXPRESSED IN HBL100, SIGNAL =   2
ttgctgcccagtgtagtcagtgggctgacgacattagcatcacctgggtgcttgctagcaatgcaaaatctcaggccccagcccagaccactggatgagaatctgcatttgaacaaggtccccaggtcattcatgcacattcaaagtcagagacactgccccaacacctcactttagagtgagaaaacttaacaggtttaagcaacttgcagaagatgacacaactgaccagcgacagtctgtcttctagtcaggcctctttccagttctccacgctgaccttgactttcgagatcacataccaagaccttcagctggatggtccctgtagctgctgtgaccactagaagcagggttaggggcgagactaat

SEQ ID NO: 3697 - DNA, 464 bp, Homo sapiens
  MAP TO AC007870.3; EXPRESSED IN LUNG, SIGNAL = 0.9; EXPRESSED IN PLACENTA, SIGNAL = 1.1; EXPRESSED IN HBL100, SIGNAL = 0.82; EXPRESSED IN FETAL LIVER, SIGNAL = 0.87; EXPRESSED IN BRAIN, SIGNAL = 0.93; EXPRESSED IN BT474, SIGNAL = 0.93; EXPRESSED IN BONE MARROW, SIGNAL =   1; EXPRESSED IN HELA, SIGNAL = 0.64; EXPRESSED IN ADULT LIVER, SIGNAL = 0.8; EXPRESSED IN HEART, SIGNAL = 0.91
attcatcatgaccaagtgggatttatctcagggatgcaaatatgttttaatatatgcaattcaatcaatgtgctatttcatatcaacatcatgaagaacaaaaaccatgtaatcatttcaattgatgctgaaaaaacatttgataaaattcaacatcctttcatgactaaaataaaaaccttcaaaaaactgggtataaaaataacatacctcaacccagtaatatgtataataagtatacacaacctacccacagctggtatgctgaatgaggaaaacctgaaagcctttcctctaagatatggaacaagacaaggatgctcatcttcaccattgttactcaacaaagtactgaaagtcctatctacagcaatcagacaaaagaaagaaataaaaggcatccaaattggaaaggaagacctaagtatccttgttgtattagttcgtttccatgctgctgataa

SEQ ID NO: 3698 - DNA, 477 bp, Homo sapiens
  MAP TO AC007385.2; EXPRESSED IN BT474, SIGNAL = 0.7; EXPRESSED IN HBL100, SIGNAL = 0.67; EXPRESSED IN FETAL LIVER, SIGNAL = 0.68; EXPRESSED IN LUNG, SIGNAL = 0.7; EXPRESSED IN BRAIN, SIGNAL = 0.85; EXPRESSED IN PLACENTA, SIGNAL = 0.81; EXPRESSED IN BONE MARROW, SIGNAL =   1; EXPRESSED IN HELA, SIGNAL = 0.74; EXPRESSED IN ADULT LIVER, SIGNAL = 0.71; EXPRESSED IN HEART, SIGNAL = 0.83
tttggcacttctacagcaggaatgctttgaacatccatgtcattttaagtagtaatgtgattttgtaatatagtttcaagcaatatcaactgactgtgatattgttataactaaaaaacacatggtggtctagacacccatgctgaatggctttagacaaatattgtggaagatgtctgtgtagttcattggcacatgtcaaccagaatcaatttacatcttgctctcactgatattatgccctatgtcaggatactaagtgtcctgaagcattctgacctgtgttcttggaatgtgatacaacaccaggtattcagtgttctgggaatagtcaagatcatccaattgggcttttttctcaaaatggtacttcttcttgcaaaatatatgctcttctccttgatgctctgccagctgctggaagcctctgccgtgttagcaaggcatgcctgttgaactgacacacacacccctcat

SEQ ID NO: 3699 - DNA, 432 bp, Homo sapiens
  MAP TO AC010130.3; EXPRESSED IN LUNG, SIGNAL = 6.7; EXPRESSED IN HELA, SIGNAL =  11; EXPRESSED IN PLACENTA, SIGNAL = 5.7; EXPRESSED IN HBL100, SIGNAL = 7.9; EXPRESSED IN HEART, SIGNAL = 3.9; EXPRESSED IN ADULT LIVER, SIGNAL =   7; EXPRESSED IN BT474, SIGNAL = 5.5; EXPRESSED IN BONE MARROW, SIGNAL = 5.6; EXPRESSED IN BRAIN, SIGNAL = 4.9; EXPRESSED IN FETAL LIVER, SIGNAL = 7.9
aatcagaaagagcacccagctataattgaaaaagaataaaaatgctaaaacctgaaggatattaattatattttcctgacatggttgagtaattcagttatgaaaatattaattattttccatttaactaaacaattaggggtggctgatgtttctcaacagagtgtttagagagtgtgttttgtgcttcttctgcagtggtgaactatgacaatgtagtggacacaggttctgaaacagatgaggaagacaagcttcatattgctgaggatgacggtattgccaaccctctggaccaggagacgagtccagctagtgtgcccaaccatgagtcctccccacacgtgagccaagctctgttgccaagagaggaagaggaagatgaaataagggagggtggagtggaacacccctggcacaacaacgagattc

SEQ ID NO: 3700 - DNA, 405 bp, Homo sapiens
  MAP TO AL118509.3; EXPRESSED IN BRAIN, SIGNAL = 1.6; EXPRESSED IN BONE MARROW, SIGNAL = 1.6; EXPRESSED IN ADULT LIVER, SIGNAL = 2.2; EXPRESSED IN FETAL LIVER, SIGNAL = 1.9; EXPRESSED IN BT474, SIGNAL = 1.7; EXPRESSED IN LUNG, SIGNAL = 1.8; EXPRESSED IN PLACENTA, SIGNAL = 1.5; EXPRESSED IN HEART, SIGNAL = 1.5; EXPRESSED IN HELA, SIGNAL = 1.2; EXPRESSED IN HBL100, SIGNAL = 1.7
gacaggctgggaagtgtagcctccagctggaagccagaagcagacacattgagggagggggaaagggaacaggaatttatgctgagctgggtggctgaatgtgcatgtttaataagctataggagaagtcatgaatatttatgagtggagaaacatgagcatgcacagttgagcttatgcctctacatgagttgcgtgaacaaaaactggcagggttagcatgatgcaaggatagagtttttggtcctctgatgtcaagagttgaagcagaggacatggaaacattcactgtgcaccctgtagattggccagaaccactccatggtcgatggtttcttatcaggaggcaatgctggtccattgtgtggaaaccacagaaggtaggggcagtgacagttggttgaa

SEQ ID NO: 3701 - DNA, 465 bp, Homo sapiens
  MAP TO AL121778.4; EXPRESSED IN BONE MARROW, SIGNAL =  20; EXPRESSED IN HBL100, SIGNAL =  75; EXPRESSED IN BT474, SIGNAL =  36; EXPRESSED IN ADULT LIVER, SIGNAL = 6.9; EXPRESSED IN BRAIN, SIGNAL = 4.3; EXPRESSED IN LUNG, SIGNAL =  43; EXPRESSED IN PLACENTA, SIGNAL =  18; EXPRESSED IN HEART, SIGNAL = 7.9; EXPRESSED IN HELA, SIGNAL =  34; EXPRESSED IN FETAL LIVER, SIGNAL =  23
aggtgtttgttgctatcggggactacaatggccacgtcggtctgggtgttaagtgctccaaggaggtggccaccgccatccgtggggccatcatcctggccaagctctccattgtccccgtgtgcagaggctactggggcaacaagatcggcaagccccacaccgtcccttgcaaggtgacaggccgctgcggctctgtgctggtgcgcctcatccctgcacccaggggcactggcatcgtctccgcacctgtgcctaagaagctgctcatgatggctggtatcgatgactgctacacctcagcccggggctgcactgccaccctgggcaacttcgccaaggccacctttgatgccatttctaagacctacagctacctgccccccgacctctggaaggagactgtatttaccaagtctccctatgaggaattcactgaccacctcatcaagacccacaccagag

SEQ ID NO: 3702 - DNA, 447 bp, Homo sapiens
  MAP TO AC007790.1; EXPRESSED IN BONE MARROW, SIGNAL = 0.93; EXPRESSED IN HBL100, SIGNAL = 0.92; EXPRESSED IN FETAL LIVER, SIGNAL = 0.91; EXPRESSED IN BRAIN, SIGNAL = 0.8; EXPRESSED IN PLACENTA, SIGNAL = 0.71; EXPRESSED IN BT474, SIGNAL = 0.72; EXPRESSED IN LUNG, SIGNAL = 0.7; EXPRESSED IN HELA, SIGNAL = 0.87; EXPRESSED IN ADULT LIVER, SIGNAL = 0.97; EXPRESSED IN HEART, SIGNAL = 1.3
ttttgttgagaatccttcacttttccagttactccaaaggagacctcagtcagaccaaagtttgatggaggtcaagttaaaatttaaaccatatctggaagcaaggtcagtgcagcaaaggcacattctaaagcattacttcatataccttaattcttccggaaactcgtttgctgggtgttttcattcataagttcatttactcagcactcattcaacaaatattttttatttttttcaacagatatttattgagcatctactgtgtacattatattgttctaggctctggagttatattagtgacaaaacagaaaaaaattttgttcttttggaacttgcagggaaatacagatattaataatatcatatctattattttattaatgaatcataagatacagataatagatcatttggtgacaagcaccatgaaggtaaagtgga

SEQ ID NO: 3703 - DNA, 446 bp, Homo sapiens
  MAP TO AC007336.2; EXPRESSED IN FETAL LIVER, SIGNAL = 5.8; EXPRESSED IN ADULT LIVER, SIGNAL = 6.6; EXPRESSED IN BRAIN, SIGNAL = 5.4; EXPRESSED IN LUNG, SIGNAL = 6.7; EXPRESSED IN HEART, SIGNAL = 4.8; EXPRESSED IN BT474, SIGNAL = 5.5; EXPRESSED IN BONE MARROW, SIGNAL = 4.5; EXPRESSED IN HBL100, SIGNAL = 5.5; EXPRESSED IN PLACENTA, SIGNAL = 6.3; EXPRESSED IN HELA, SIGNAL =   6
tttggaggaggtggtcagagaagagaaggaggaggaagaaatattggagggatagttggaggaattgtgaattttatcagtgaggctgcagcagctcagtatactccagaaccgcctcccactcagcagcatttcaccagtgtggaggcctcagaaagtgaggaagttaggcgatttcggcaacaatttacacagctggctggaccagacatggaggtgggtgccactgatctgatgaatattctcaacaaagtcctttctaagcacaaagatcttaagactgacggttttagtcttgacacctgccggagcattgtgtctgtcatggacagtgacacgactggtaagctgggctttgaagaatttaagtatctgtggaacaacatcaagaaatggcagtgtgtttataagcagtatgacagggaccattctgggtctctgggaag

SEQ ID NO: 3704 - DNA, 470 bp, Homo sapiens
  MAP TO AC006427.10; EXPRESSED IN ADULT LIVER, SIGNAL = 1.2; EXPRESSED IN PLACENTA, SIGNAL = 0.95; EXPRESSED IN BT474, SIGNAL = 0.78; EXPRESSED IN BONE MARROW, SIGNAL = 0.7; EXPRESSED IN FETAL LIVER, SIGNAL = 0.64; EXPRESSED IN HEART, SIGNAL = 0.88
gagtttaggcttcccagcggtgagcagcagaaccactcatctattcccaagcctcttctcactcattgagctgcactttgtgtccatactggcttcagagacaatcatctgtctctgtctctgaggctgtaggaactgaagcagctttcatctaagagcctgactggtttggctcagaggcctcctaaggcagcatcactggtgagccagtatccctaaaaagtagttactactggaggactgtaccactacttgtgttcaccataggacttggtcacttggaccatcttttgggatcataacaggatcatcaatgcctgcttctactcaaacactgtttctttgattcacacatacattgaaatacacctgtgccttgatgatatctaccaccactacccctcaaccaagacatctgtcagcactggggagtcctgaataaaaagcacagcatcagttggcactgggat

SEQ ID NO: 3705 - DNA, 420 bp, Homo sapiens
  MAP TO AP000021.2; EXPRESSED IN BT474, SIGNAL = 1.2; EXPRESSED IN ADULT LIVER, SIGNAL =   1; EXPRESSED IN FETAL LIVER, SIGNAL =   1; EXPRESSED IN BRAIN, SIGNAL = 1.1; EXPRESSED IN BONE MARROW, SIGNAL = 0.97; EXPRESSED IN PLACENTA, SIGNAL = 1.5; EXPRESSED IN HBL100, SIGNAL = 1.4; EXPRESSED IN HEART, SIGNAL =   1
atagagtttgtggcgatgggctggtgaatgcacgctgatgggaaaagcctccgccaggtctttagtagtaagtgcccagatgagaaggcatatggctggtggggagcctagtgttggggtatatacccccagttggtgaattccagtatgggtttggggcagcaaaaaaactggaagatgtcacggggagggctggagggtggggcgccacaaagttcatcttctgtgggtgggcgtgataggagcccatgtacgggaggtctgaggggtacttgtacagagatgactccggggggtggggctggagggcctgggcgatcccgtggaagtcgaacttgtaggcgtagcgcttcccatggaccttggtcatgatgttcttgtcatagtagtaacggagggcgcggctgagcttatcgtagt

SEQ ID NO: 3706 - DNA, 456 bp, Homo sapiens
  MAP TO AC007790.1; EXPRESSED IN HBL100, SIGNAL =   1; EXPRESSED IN FETAL LIVER, SIGNAL = 0.94; EXPRESSED IN LUNG, SIGNAL = 0.98; EXPRESSED IN HELA, SIGNAL = 0.59; EXPRESSED IN BRAIN, SIGNAL = 0.74; EXPRESSED IN PLACENTA, SIGNAL = 0.83; EXPRESSED IN BT474, SIGNAL = 1.3; EXPRESSED IN BONE MARROW, SIGNAL = 0.8; EXPRESSED IN ADULT LIVER, SIGNAL = 0.77; EXPRESSED IN HEART, SIGNAL = 1.9e+02
gattgagccctagtgatgagctcagctatgttatcaacactttgcatgtagtatctaatttagtattcctagcaactctgtgtggtaggaaatagtatcacccccgttttatagctaaggaacctgaggcatggagagatgaagtagcttgacaaagaccaggctattgtaaatgggtggctaggatcaaacctagacagaaggaccctagagccccaactcttacctccaactctatgcctcaggtgtgtgcctccatttaaaacccttaccagaggaggctcaaaggctcgaggactcttccatagtggctctcattaggctgtttgactctgataatccagtcaaacagtttatctacagtcaaacagagagtagataatccactctgataatccacagtcaaacagataatccagtttgactctggattatcaaacagcctaattagagcca

SEQ ID NO: 3707 - DNA, 353 bp, Homo sapiens
  MAP TO AL022320.23; EXPRESSED IN PLACENTA, SIGNAL = 0.8; EXPRESSED IN FETAL LIVER, SIGNAL = 0.75; EXPRESSED IN LUNG, SIGNAL = 0.86; EXPRESSED IN BT474, SIGNAL = 0.8; EXPRESSED IN HEART, SIGNAL = 0.98; EXPRESSED IN BRAIN, SIGNAL = 0.71; EXPRESSED IN ADULT LIVER, SIGNAL = 0.78; EXPRESSED IN HELA, SIGNAL = 0.83; EXPRESSED IN HBL100, SIGNAL = 0.93; EXPRESSED IN BONE MARROW, SIGNAL = 0.88
ttttatgtggtttccgggtcctttgtttgctttcattgaacacataatgtttttgtagttagaaaaaaaaaataacaacaaaaaaagctctggtctctgttattaggagtttataatctgaccacaagaaagctgattatgcttatgatggttacaggaaacccccctgccccaccaacccatttaaaaatgatgatgatcgtgtgctgcaaaagataagtgcggaacaacggcattccccaaagccccttccatacctggagaagttgtcttgcagctcctttagatgcttgtcaaaataattccattcagtccaatgatgctggtacaactgattgaggttgtctttccgc

SEQ ID NO: 3708 - DNA, 445 bp, Homo sapiens
  MAP TO AJ006996.1; EXPRESSED IN PLACENTA, SIGNAL = 0.94; EXPRESSED IN HBL100, SIGNAL = 0.74; EXPRESSED IN FETAL LIVER, SIGNAL = 0.78; EXPRESSED IN LUNG, SIGNAL = 0.94; EXPRESSED IN HELA, SIGNAL = 0.63; EXPRESSED IN BRAIN, SIGNAL = 0.7; EXPRESSED IN BT474, SIGNAL = 0.7; EXPRESSED IN BONE MARROW, SIGNAL = 0.87; EXPRESSED IN ADULT LIVER, SIGNAL = 0.76; EXPRESSED IN HEART, SIGNAL =   1
cactggtgaattctgtcaaacgtgtaaaaaagaataaacaccaattcatcttaaattcttccaaaaaatagaagaaggagcatttctcaagtcattacatgagacaagcattatccttataccaaagtcagatggagaaatccaaagaacagaaagttacagacccatatttcctatgaatacaagtagaaaaaaggtaattaataaagcattccaatgtataatattatctcaaagaataaaatacctaggaacaaatttgaacaaggaagtgaaagacttgtacactgaaaactacaaaacactgctaaaaaagttaaagaagatctacataaatgaaaatattgggagacttagtattgttatgtttccaattctacccaaagtgatctacaagttcaaagcaattcttatcaaaattccaacagcctctttgcagaaatga

SEQ ID NO: 3709 - DNA, 402 bp, Homo sapiens
  MAP TO AC006459.2; EXPRESSED IN BRAIN, SIGNAL = 0.7; EXPRESSED IN HBL100, SIGNAL = 0.7; EXPRESSED IN FETAL LIVER, SIGNAL = 0.68; EXPRESSED IN LUNG, SIGNAL = 0.79; EXPRESSED IN HELA, SIGNAL = 0.78; EXPRESSED IN HEART, SIGNAL = 1.1; EXPRESSED IN PLACENTA, SIGNAL = 0.81; EXPRESSED IN BT474, SIGNAL = 0.85
tctgctccaattgtccactgtgcctttctccatccccccttacttcccattgcttcagattagtgaaatccgtcttacaaagattgacctagattttgcaggaggcttctttctctagcaacgtaaagataccagcctgattagtgtacatttgttgcctctgaagttttgcccttctcccagtgccagcccttgtatagagccctgccctggctcacggaggtcgccccttaaggggcctggagaaggatggagccgtgcttcttggaggaagacaagctgaagctagctttgcagctccaacttggaaaagcccccagtggggatgggccgatgttgtagaggacaagcacttctaggtttaagagaaagttcatgaagattcggctaaagtggagagaa

SEQ ID NO: 3710 - DNA, 459 bp, Homo sapiens
  MAP TO AC010930.2; EXPRESSED IN BONE MARROW, SIGNAL = 1.7; EXPRESSED IN LUNG, SIGNAL = 1.5; EXPRESSED IN HELA, SIGNAL = 1.7; EXPRESSED IN PLACENTA, SIGNAL = 1.7; EXPRESSED IN HBL100, SIGNAL = 1.8; EXPRESSED IN HEART, SIGNAL = 1.5; EXPRESSED IN BT474, SIGNAL = 1.4; EXPRESSED IN BRAIN, SIGNAL = 1.8; EXPRESSED IN ADULT LIVER, SIGNAL = 2.3; EXPRESSED IN FETAL LIVER, SIGNAL = 1.7
aatgaaggccacatcagagcccaccataagagaggaaccaatcagactgtagagactgctgggcacggggtcagcacatgctaacctggccaaagctatgtgctcacagtaggagtggacaaccacattggagccacagaaaggtagatgactcaccatccaactcagtggagttatggctatgatagctctgatggtgatggccatactcattcccagcatcacttgaggcgtgagaattctcttgtagtgtagaggcttgcagatggctacatagcggtcaaaagccatggtcagcagcagccccgtctccacagctgtggctaagtggacaaaaaacatctgagtgaaacaagcactaaagctgattgagctgtctcctgagcagaagatgctcaccatcttgggtaccaccgaggaggccataacaatgtccacagcagccagaacacacagaaa

SEQ ID NO: 3711 - DNA, 474 bp, Homo sapiens
  MAP TO AC007736.3; EXPRESSED IN BT474, SIGNAL = 1.2; EXPRESSED IN BONE MARROW, SIGNAL = 1.2; EXPRESSED IN ADULT LIVER, SIGNAL =   1; EXPRESSED IN HEART, SIGNAL = 1.3; EXPRESSED IN PLACENTA, SIGNAL = 1.3; EXPRESSED IN LUNG, SIGNAL = 1.1; EXPRESSED IN HBL100, SIGNAL = 1.2; EXPRESSED IN FETAL LIVER, SIGNAL = 1.1; EXPRESSED IN HELA, SIGNAL = 1.1; EXPRESSED IN BRAIN, SIGNAL = 1.2
tctatgtgatttatgcaactcactgttttaaaatgattttcccatttgaaaaatagggaagacagtaacaattttactgtcccacctaactagaatcttcaggaggttaaaaggaaaaaaatcaagtgagcatgctttgcaactgctagagtattacacaaataggtatcatgtaatgaatccattataggatcaatctcattccaacaaatctccaccttctcctttacatttcatactgtctacacttactgcctcagcctcaacaccttttactctcttaagctccacacagcccagctggcccattacacatgaacttgtgtaggatttcttcttcctgcatctcatgtcattgagcatgatccacaccatcctgaagcccttgtcttccttaagatcttctgaatttccttctccttgaccattgttcactatggtagtaaagttgtggggcagtcacttacccaacaa

SEQ ID NO: 3712 - DNA, 474 bp, Homo sapiens
  MAP TO AL132780.1; EXPRESSED IN PLACENTA, SIGNAL = 1.4; EXPRESSED IN HBL100, SIGNAL = 1.2; EXPRESSED IN BT474, SIGNAL = 1.2; EXPRESSED IN BRAIN, SIGNAL =   1; EXPRESSED IN LUNG, SIGNAL = 1.3; EXPRESSED IN BONE MARROW, SIGNAL = 1.1; EXPRESSED IN HEART, SIGNAL = 1.2; EXPRESSED IN HELA, SIGNAL = 1.4; EXPRESSED IN ADULT LIVER, SIGNAL = 1.8; EXPRESSED IN FETAL LIVER, SIGNAL = 1.5
tttgagcccagacttgatcccataggcagagggaagccactgtaaacagttgctctggggaggaatgggatgaaagtgattcatctggtgacaggcttctttccccaaccttctctcaatatccatttagtccctgatcccgctcctcagcctcacagtgagacttctcagctgaaagcactttacttaccttctccaaaatcaagtgaccacagacacagcatttctcagctgcctcctgaaaccctgaaaactaaagtaaaagacaagacgaacggaggctgttatcaaactgagaatgatgggtggtactccaatgggccaccaagaagggggtcagtatggaaaccaattccaggtccaggtgacccttactcaccagataatcttcctcacagtacacagagccattgacactgtagaaagccttgcaacgcaaagttcgccctagaaacaatagagaaggggctggaa

SEQ ID NO: 3713 - DNA, 488 bp, Homo sapiens
  MAP TO AC007716.1; EXPRESSED IN HBL100, SIGNAL = 1.6; EXPRESSED IN LUNG, SIGNAL = 1.4; EXPRESSED IN ADULT LIVER, SIGNAL = 1.1; EXPRESSED IN BRAIN, SIGNAL = 1.3; EXPRESSED IN HEART, SIGNAL =   1; EXPRESSED IN PLACENTA, SIGNAL = 1.2; EXPRESSED IN BT474, SIGNAL = 1.2; EXPRESSED IN BONE MARROW, SIGNAL = 1.6; EXPRESSED IN FETAL LIVER, SIGNAL = 1.2; EXPRESSED IN HELA, SIGNAL = 1.4
  unsure 356
tgttatcacaaatgacagaatttccttatttttaaaggctgaatagtattccaagatatatacatgccacattttctttatccctttatccttcaatggatacataggttgattccatatcttgtctattgtgaataatgctgcaatgaacatgggagtgtatatatctctttgaaattttgatttcaattcctttgatttatgctgagtagtgggactgctggatgaaaaaatggtagttctatttttagttttttgaggaaattctatacattttctgtagtggttatactaatttacatcctcaccagcagtgtacaagggttcccttttctccacatcctcagcagcacttngttcactttcatctttttgataaaaactgttctaacagttgtgaagtgatatctcattgtagtttgaactggcatttccctaattagtgatgttgagcattttgttccatcagcttgtggggcatttttatg

SEQ ID NO: 3714 - DNA, 449 bp, Homo sapiens; identical to SEQ ID NO: 3661
  MAP TO AC007160.3; EXPRESSED IN HELA, SIGNAL = 0.66; EXPRESSED IN BONE MARROW, SIGNAL = 0.67; EXPRESSED IN FETAL LIVER, SIGNAL = 0.62; EXPRESSED IN LUNG, SIGNAL = 0.63; EXPRESSED IN HEART, SIGNAL = 0.86

SEQ ID NO: 3715 - DNA, 430 bp, Homo sapiens
  MAP TO AC010947.2; EXPRESSED IN FETAL LIVER, SIGNAL = 1.9; EXPRESSED IN BRAIN, SIGNAL =   2; EXPRESSED IN LUNG, SIGNAL =   2; EXPRESSED IN HELA, SIGNAL = 2.1; EXPRESSED IN PLACENTA, SIGNAL = 2.1; EXPRESSED IN HEART, SIGNAL = 1.6; EXPRESSED IN ADULT LIVER, SIGNAL = 2.5; EXPRESSED IN BT474, SIGNAL = 1.9; EXPRESSED IN BONE MARROW, SIGNAL = 2.4; EXPRESSED IN HBL100, SIGNAL = 2.1
acattgtcaaggggcaagacaatgaagagtctttaacaatgacaaattgaaggaaggctttaagaagagggaggtcaggacctcaaggtgggaagaaacctgtctaaagcgaaatcaagttgaggggaacatcagggctgtcttgctcaacaggaagtcatccaatgcaagggcagctagagggggatgagtttcccacctactggtgtatgtttgcgagggtgtgtgtgtgctttccatttgaaccatgagaggcacagtggtgtctcaacttacaggacaatgaggaggagactcttggccacaggcaaagcccactgctgcttgcgtgcactttctccagctggcaccatccagggcagtttgtgttgaggcatcaggtgacaatgcttcctgcaagagaaaacagtggggatgtcacagagatgct

SEQ ID NO: 3716 - DNA, 416 bp, Homo sapiens
  MAP TO AP000010.2; EXPRESSED IN HBL100, SIGNAL = 1.7; EXPRESSED IN HELA, SIGNAL = 1.4; EXPRESSED IN HEART, SIGNAL = 1.3; EXPRESSED IN FETAL LIVER, SIGNAL = 1.1; EXPRESSED IN BRAIN, SIGNAL = 1.1; EXPRESSED IN PLACENTA, SIGNAL = 1.5; EXPRESSED IN ADULT LIVER, SIGNAL = 1.4; EXPRESSED IN BT474, SIGNAL = 1.4; EXPRESSED IN LUNG, SIGNAL =   1; EXPRESSED IN BONE MARROW, SIGNAL = 1.1
ttgcagcatttaatttccccaagtaccctatgaagaagagattactcttgcctgcattttacagacaaggaaataaacctaaaaggttaagtgatttccccaaggtcatgtaactggaaaatgtcaggatttgcacttgctaagccaactctctcctctagccattctgcttcttcctcttaatacaaaacccacttgtcccccaaggttcagctcaggttcccatgccaaaaccaaaccttcttaggcatgcaggtggcaaaagccttggaacccctgtttactactgctcaccctcacaccacggctgcagtggctttccccttcacgtttgctcatgaggctgatgcagggcaggtgagacccaaaatcggggcttagcccgggagggttcttggcttcaccctggaaagaat

SEQ ID NO: 3717 - DNA, 426 bp, Homo sapiens
  MAP TO AC007546.5; EXPRESSED IN PLACENTA, SIGNAL =   1; EXPRESSED IN BT474, SIGNAL = 0.78; EXPRESSED IN FETAL LIVER, SIGNAL = 0.78; EXPRESSED IN LUNG, SIGNAL = 0.9; EXPRESSED IN HELA, SIGNAL = 0.7; EXPRESSED IN ADULT LIVER, SIGNAL = 0.9; EXPRESSED IN BONE MARROW, SIGNAL = 0.9; EXPRESSED IN HBL100, SIGNAL = 0.88; EXPRESSED IN BRAIN, SIGNAL = 0.83; EXPRESSED IN HEART, SIGNAL = 0.89
ttatttttgcgtattgcgggatataaaagaattaggttataatttgaaagggtcataatagcactttttctataattatttaaatattcttccatgtaaattatgtttcttcattttcattgtaattaacaataaaatatttcaatggccaatcttttattgtactatgctatatattatacagtttgttttcaacaaatatgccgtatccaggtcttatatttaaaatagtatacagaatatcactgtacctactcttttgggctgaatatttatttattttatttttaaaggtttaatgaagaggctagaggaggagataaaatttaatttatatatggtaactgaaaaatttcctaaagaattagaaaataagaaaaaggaattacattttttacaaaaagtagtttcagagccagctatggg

SEQ ID NO: 3718 - DNA, 481 bp, Homo sapiens
  MAP TO AL121760.4; EXPRESSED IN PLACENTA, SIGNAL = 2.1; EXPRESSED IN HEART, SIGNAL = 1.7; EXPRESSED IN HBL100, SIGNAL = 1.8; EXPRESSED IN HELA, SIGNAL = 1.3; EXPRESSED IN FETAL LIVER, SIGNAL = 1.6; EXPRESSED IN BT474, SIGNAL = 1.6; EXPRESSED IN ADULT LIVER, SIGNAL = 1.5; EXPRESSED IN BRAIN, SIGNAL = 1.5; EXPRESSED IN BONE MARROW, SIGNAL = 1.9; EXPRESSED IN LUNG, SIGNAL = 1.4
tgggccagatgagaagagacaagttgtggagaaggcagaccagtgttacagactttacccaccatttacaggccatgggtgcctgagtgaatagcatgatgcatcaggccttaacttaactgatctgtagaagggggtgacaccagttcatgaaaatgcgtacccaccaccacacccgattgttgctcaatgaatggaaggtgttactattgacttattgtcacacactgggggacgaaggaggcccacactgtactcactatgcacagacaactcagtgcctggtccagatttaagctccatgtcagggccccctttccagaacttcacacagttgtaggtgccagtgttggctcttgtgatgctagtgatgcacatggaaaagtctgtattgtttctctttgtgatgtctgaaatgcaagctatcttgggaaagtggcctccttttgaactgtagattagttcctgccctgtttcagtt

SEQ ID NO: 3719 - DNA, 468 bp, Homo sapiens
  MAP TO AC007077.2; EXPRESSED IN PLACENTA, SIGNAL = 0.98; EXPRESSED IN BT474, SIGNAL = 0.65; EXPRESSED IN FETAL LIVER, SIGNAL = 0.63; EXPRESSED IN LUNG, SIGNAL = 0.59; EXPRESSED IN BRAIN, SIGNAL = 0.78; EXPRESSED IN BONE MARROW, SIGNAL = 0.67; EXPRESSED IN HEART, SIGNAL = 1.3
tctcaggcatatggttgcacctaagttgtaataaagaagcaaccatcccctgaggtgggaggaaaaaaaaaagaaagaaagtgaaaacacatgaatttgagttctggccttgtccccactgactggcttctaatttcttgaacttcatccaggctgtgtgtccaacagaccacatggtgattgctaaattgctcaatgaccacaagctacaaccatggggaaaatattcatgaaaattaacatcccatttaatactcaccatgcttccagccaacactttgtgcaggagaaagtcctcgaactggctccaaaacttttcaattcctgacaaatgcactggcccctctccaaggagctgggcagcaatctgtgctttatgctggtgtgtggtggtggcaataccactggtgggagagccaggaggcggaggcgttcttctcaagtaagaaagatctgaagaccagtggc

SEQ ID NO: 3720 - DNA, 428 bp, Homo sapiens
  MAP TO AC005076.2; EXPRESSED IN HEART, SIGNAL = 0.83; EXPRESSED IN ADULT LIVER, SIGNAL = 0.72; EXPRESSED IN PLACENTA, SIGNAL = 0.93; EXPRESSED IN BONE MARROW, SIGNAL = 1.5; EXPRESSED IN LUNG, SIGNAL = 0.95; EXPRESSED IN HELA, SIGNAL = 0.97; EXPRESSED IN BT474, SIGNAL = 2.2; EXPRESSED IN HBL100, SIGNAL = 1.6; EXPRESSED IN FETAL LIVER, SIGNAL = 1.2; EXPRESSED IN BRAIN, SIGNAL = 1.5
aaatcttagatggcaagaataacaatattaagaattaaaatttgttacgatgtttataaaaatctcaggatatgttgttttttaaaatatcttatttttataagctctcacatccagtatgcagttatttattccaaatactttccctccttacctccccccacctcccttgctgcttagatggtggtctgtcggagaatcaatgttctttttgtctacccatctcccttcagtcttaataaaaggtcttaaacagttacatgagaaccaaaaaaacaacccaacgcttttggagaataaatcaggatctggagttccaaacagtaataccaattccagtgtgcagcatgttcagataagagttgcccgcttggaagataatacagccatctcttctagccccatggcagcattgcagattccagtcc

SEQ ID NO: 3721 - DNA, 403 bp, Homo sapiens
  MAP TO AC012064.1; EXPRESSED IN BT474, SIGNAL = 2.2; EXPRESSED IN FETAL LIVER, SIGNAL = 2.2; EXPRESSED IN BONE MARROW, SIGNAL = 2.1; EXPRESSED IN BRAIN, SIGNAL = 2.3; EXPRESSED IN LUNG, SIGNAL = 2.2; EXPRESSED IN HELA, SIGNAL = 1.8; EXPRESSED IN PLACENTA, SIGNAL = 1.9; EXPRESSED IN HBL100, SIGNAL = 2.2; EXPRESSED IN HEART, SIGNAL = 2.1; EXPRESSED IN ADULT LIVER, SIGNAL = 2.7
tttcaatcatatccttcacattttgtaattttgataaggttaagctttagatccatcttgaaaagataagttttctgtttgtctttaaaatatgacccacaatatgcctgtttttaaacagtgaatgatgctctaaaatcacaatataaattcaggcagtgctccttacatggaaagtttaagtacttctaacactgctctttttcacttgttatgaaaacacagaacaattatctaagcatctaattattcaggtcctttgtttctcctccaatctattagttttatagtaattttagggcctgtgaggatgaagctgtctgtgacagctaccacaaaggttactataggtggacaaatttcaaacaagtttatcaccactaccatccccaccataaaactg

SEQ ID NO: 3722 - DNA, 413 bp, Homo sapiens
  MAP TO AP000020.2; EXPRESSED IN HBL100, SIGNAL = 2.5; EXPRESSED IN BT474, SIGNAL =   2; EXPRESSED IN FETAL LIVER, SIGNAL = 1.3; EXPRESSED IN ADULT LIVER, SIGNAL = 1.3; EXPRESSED IN BONE MARROW, SIGNAL = 1.8; EXPRESSED IN LUNG, SIGNAL = 1.3; EXPRESSED IN BRAIN, SIGNAL = 1.7; EXPRESSED IN PLACENTA, SIGNAL = 1.9; EXPRESSED IN HELA, SIGNAL = 1.4; EXPRESSED IN HEART, SIGNAL = 2.3
atgatccaagggctcacttcctatagaaatatcttcatctatgagaatgataatagtgataacagcaaatatccatggggtgccataatttataaaaattatgtgtttttacaagaattatttacttgtcacctcagaggaaactcaaaaggaatatgactattagccctcagcggaagctgaaatgtatcacctatcgtaaggtatctagtctatttcccatgatgtttactttttgtgtccgagaatgttgcatactctcattcaaagtctttcccagaaaggaccagttgataaagccactggctctttccagcatcacgcctgtactgatgccacagtggacagcctttgatgccacaggaccacagctcaatctcctgattgtgaggagaagagtgggggtgttctca

SEQ ID NO: 3723 - DNA, 477 bp, Homo sapiens
  MAP TO AC006387.3; EXPRESSED IN LUNG, SIGNAL = 0.76; EXPRESSED IN FETAL LIVER, SIGNAL = 1.1; EXPRESSED IN ADULT LIVER, SIGNAL = 0.82; EXPRESSED IN BRAIN, SIGNAL = 1.1; EXPRESSED IN HEART, SIGNAL =   1; EXPRESSED IN PLACENTA, SIGNAL = 0.69; EXPRESSED IN BONE MARROW, SIGNAL = 0.9; EXPRESSED IN HBL100, SIGNAL = 1.3; EXPRESSED IN HELA, SIGNAL = 0.85
aaggtatatggtggtttggtggttaaattttcattttaaagtggtgatagttgcaaatattctaaaatagactaattataattactttcattcaaatactgaatgtgagagtatataatcatcttatttgtatgtggtaagaaagactactatgtatttttctgacaacatttagtggtagttatgattatttccatttctttggacttgttcacagaaatataactgtggttacttaagaaaacatgttctagataaacataaagattatatcccatcttttttaaaaataggagcagatgtctcaagtattagatgccatgtttgaaaaattggtcaaagatggggagcatgtaattgatcaaggtgacgatggtgacaacttttatgtaattgataggtaagttttgcccaaccttactattgaaattgaaagaaccttttgtgtaaaatctcaaccattattacggcaactga

SEQ ID NO: 3724 - DNA, 471 bp, Homo sapiens
  MAP TO AC007344.2; EXPRESSED IN FETAL LIVER, SIGNAL = 1.2; EXPRESSED IN HELA, SIGNAL = 1.5; EXPRESSED IN ADULT LIVER, SIGNAL = 1.4; EXPRESSED IN BRAIN, SIGNAL = 1.4; EXPRESSED IN HEART, SIGNAL = 1.4; EXPRESSED IN BT474, SIGNAL = 1.1; EXPRESSED IN PLACENTA, SIGNAL = 1.3; EXPRESSED IN LUNG, SIGNAL = 1.5; EXPRESSED IN HBL100, SIGNAL =   1; EXPRESSED IN BONE MARROW, SIGNAL = 1.4
tctttgaccactgtctccccattttcctcatcccccgaacccctggttaccatccttctcttttgaagccaggcattggtggaattttattaggatcttgaattgtctaatttatcccaaagaatggaagttccagtgattcatacaggtacttattatcagtttttcatctttacagtgtttgttaggagtctgttgtctatctcaatgtaacaaattaccccaaaatattgtgtcttcatgcagcaagcatttataacctcacaattgtgaggtgggggcaccaagaatctggacatacctgagcttgagtctctgcgtcagggtctcaaagtgggactgggggaaaatccccacaggcaggtcccagtccttgctggctgttggtagggctttgggatgtgggcctgacagcatggagctactgacaacatggcaacttgcttctttgagggcaagaactttgagaga

SEQ ID NO: 3725 - DNA, 449 bp, Homo sapiens
  MAP TO AC007374.3; EXPRESSED IN PLACENTA, SIGNAL = 0.9; EXPRESSED IN BT474, SIGNAL = 1.9; EXPRESSED IN LUNG, SIGNAL = 0.96; EXPRESSED IN HELA, SIGNAL = 1.1; EXPRESSED IN HBL100, SIGNAL = 1.2; EXPRESSED IN FETAL LIVER, SIGNAL = 1.2; EXPRESSED IN ADULT LIVER, SIGNAL = 1.3; EXPRESSED IN BRAIN, SIGNAL = 1.2; EXPRESSED IN BONE MARROW, SIGNAL = 1.3; EXPRESSED IN HEART, SIGNAL = 1.2
tctgaaactgctagacacagggacaatgtgagcataggctgccagtggtcatttgtcaccccacagagagagctggctcgagaaggaagccaacagagaagaaagcagagagccaagagtaaaaagaggcagggcttgacgctgtcatccctggccctacaagcaaccctatctaaacacagttctatctctggacaaacaaccttacctaaacacagatctatctctgggcttttctgccagtcacttccccttttctgctcaaatccatttgagacaggatcgcagccattccagagggcagagtctgcagcaagtacgtgtttgaaatgcttgttccccggtgccgtaaagaaatagtacttgaacataaatttaatttcctcagcaaggccatttttacactttctgcagaaagggtacactcgccagtagttgtgccccatgag

SEQ ID NO: 3726 - DNA, 354 bp, Homo sapiens
  MAP TO AC011330.4; EXPRESSED IN BONE MARROW, SIGNAL = 6.4; EXPRESSED IN PLACENTA, SIGNAL = 6.4; EXPRESSED IN HEART, SIGNAL =   5; EXPRESSED IN BT474, SIGNAL = 6.3; EXPRESSED IN LUNG, SIGNAL = 7.7; EXPRESSED IN BRAIN, SIGNAL = 6.9; EXPRESSED IN HELA, SIGNAL = 7.1; EXPRESSED IN HBL100, SIGNAL =   6; EXPRESSED IN ADULT LIVER, SIGNAL =  12; EXPRESSED IN FETAL LIVER, SIGNAL = 7.2
agaatgaccatgacccaaggtgggtggtttggggaaaggtctgcaatgcccccttcaattccagtgctttcccaaagggcctcttcttccaatgcatgcaggaagaatgcacaaagagtcctctaatgcctaaggaaggtctctcctttcccaggggccctcagttcccaccgtgtttctgtgacttacattcatttcccttatctcccagatccgttctggctactttgatgagaggtatgtattgtcctctagagtcagaactggccgaagcatccgaggactcagtctgcctccagcttgcactcgagcagagcgacgagaggtggaacgtgttgtggtggatgcactgag

SEQ ID NO: 3727 - DNA, 435 bp, Homo sapiens
  MAP TO AC012073.1; EXPRESSED IN BONE MARROW, SIGNAL =   4; EXPRESSED IN HELA, SIGNAL = 4.5; EXPRESSED IN PLACENTA, SIGNAL = 3.6; EXPRESSED IN HEART, SIGNAL = 2.8; EXPRESSED IN BRAIN, SIGNAL = 3.8; EXPRESSED IN LUNG, SIGNAL = 3.7; EXPRESSED IN HBL100, SIGNAL = 4.1; EXPRESSED IN BT474, SIGNAL = 3.4; EXPRESSED IN ADULT LIVER, SIGNAL = 4.2; EXPRESSED IN FETAL LIVER, SIGNAL = 3.6
tcatatcctctctcgggctgtctttgaggaggatcctgttttacatcactctccaacctaggaggttgatgatctttgatttcaattgttagctcccctggttttataaattgacagatatctaacaattcagctggccacaaagttctggtaaaaaaaaaaaaagagtcacctgttcttccctgagatgcttcctgttgccacagtgagaaatcctcagcttcttgtaaaattctccttttactctccttaggtgttttagctcacttggaaaggctagagacccaagtgagcagatcccgtaaacagtctgaagagctgcagagcgtgcaggcccaggaaggtgctcttggaaccaagattcataaactaaggcgtctgcgagatgagctgagggctgtggtgcggcaccggcgagccagcgtgagtagaagg

SEQ ID NO: 3728 - DNA, 395 bp, Homo sapiens
  MAP TO AC011440.4; EXPRESSED IN BT474, SIGNAL = 6.6; EXPRESSED IN FETAL LIVER, SIGNAL = 7.2; EXPRESSED IN BONE MARROW, SIGNAL = 7.2; EXPRESSED IN LUNG, SIGNAL = 7.7; EXPRESSED IN BRAIN, SIGNAL = 6.8; EXPRESSED IN HELA, SIGNAL = 7.1; EXPRESSED IN HBL100, SIGNAL = 7.3; EXPRESSED IN PLACENTA, SIGNAL = 7.4; EXPRESSED IN ADULT LIVER, SIGNAL = 8.9; EXPRESSED IN HEART, SIGNAL = 5.2
ttggtaggagaggcaaggagacatttttctaatcacattctttcagtatgtgttgggataaatttcaggggttggaatttccatcaagtgcacatgtacacctcttagaattgtcactttaggttatgacaactaggatgcattttttaaataaaagaagtgtattttgtatatgtattatatactgtattcttacaataaagtgagctaaagaaaagaaaatgttattaagaaaatattaggaaatattaagaaaatgttattaagaaagagaaaatatatttactattattacctgaaagtggatcatcataaaggtcttcatcatcattgtcttcatgttgagcaggttgaggaggaggaagagagaagttagtcttgctgtctcaggcatg

SEQ ID NO: 3729 - DNA, 444 bp, Homo sapiens
  MAP TO AC000105.17; EXPRESSED IN HELA, SIGNAL = 0.88; EXPRESSED IN BRAIN, SIGNAL =   1; EXPRESSED IN HBL100, SIGNAL = 0.78; EXPRESSED IN FETAL LIVER, SIGNAL = 0.82; EXPRESSED IN ADULT LIVER, SIGNAL = 0.81; EXPRESSED IN HEART, SIGNAL =   1; EXPRESSED IN PLACENTA, SIGNAL = 0.82; EXPRESSED IN BT474, SIGNAL = 0.88; EXPRESSED IN BONE MARROW, SIGNAL = 0.89; EXPRESSED IN LUNG, SIGNAL = 1.2
caaatttactgagaggggcgacaccctctcacaaaccatgtagagattaaggaattatatccactcacttcccacaaccccagcccagccaacagacttccttcaaagtttgaaggttagagttcttgtttattttagaccctactggtgtgtgcaaaaaccccgaaatggaggtgcctgtaataaagacaaaaatgcaggagtcccctgggatgagctgacaagtgccagcaatttcctcctgcccagtgtgatcacccagaaaggccaccttcccaaccaacatgccacccagccctgagactggacctacagggataatctctgagatgagatttaagtcaattccaagcatggaaatcggtgaaattaccctccaccgctccaacaacatctctgggcaggcaaggttgggtgggtggaggtgttggttaagggtttggg

SEQ ID NO: 3730 - DNA, 458 bp, Homo sapiens
  MAP TO AC012113.1; EXPRESSED IN PLACENTA, SIGNAL = 1.3; EXPRESSED IN ADULT LIVER, SIGNAL = 1.5; EXPRESSED IN BT474, SIGNAL = 1.3; EXPRESSED IN FETAL LIVER, SIGNAL = 1.4; EXPRESSED IN BONE MARROW, SIGNAL = 1.4; EXPRESSED IN LUNG, SIGNAL = 1.4; EXPRESSED IN BRAIN, SIGNAL = 1.6; EXPRESSED IN HELA, SIGNAL = 1.5; EXPRESSED IN HBL100, SIGNAL =   1; EXPRESSED IN HEART, SIGNAL = 1.3
aaaccagacagtccacccagaacacagcaccgcccctaactctggggggattctgctgccactctgagctcctgctgctgctgctctggaggaaccagctactcccagcttttcttctttggtgaaacagagatggcagcactgtctgcatcatagagtggcaatgaagagcaagcaaaatgacacatggagtgcctagtacgtgggaggcactctgcaaaggggaataattataaccataatacaaggcataaaaaggcacgttctagacagctgttaattacgtcacattcagggcccagaagagaagcatcagggccaggatgacagaggacagtgaaggaaggaacagatccacgctccacacctcctgcttgaccggcaggaagaactctacaagctggccctggtgtgcttttgtaatgcattaccagtcgtccctggacatattgccatct

SEQ ID NO: 3731 - DNA, 384 bp, Homo sapiens
  MAP TO AC011589.2; EXPRESSED IN HBL100, SIGNAL = 2.2; EXPRESSED IN HELA, SIGNAL = 2.3; EXPRESSED IN HEART, SIGNAL = 1.8; EXPRESSED IN PLACENTA, SIGNAL = 2.3; EXPRESSED IN ADULT LIVER, SIGNAL = 3.2; EXPRESSED IN BT474, SIGNAL = 2.1; EXPRESSED IN FETAL LIVER, SIGNAL = 2.4; EXPRESSED IN BRAIN, SIGNAL = 2.4; EXPRESSED IN BONE MARROW, SIGNAL = 2.5; EXPRESSED IN LUNG, SIGNAL = 2.7
ttcctttttgtttgtttgtttcctttaatagagctagagcataattttctattgatagatcctgcacgtttcttactaactttagtcctatcattgtatgttttattgatattactaatgggatggtattttcattatattttctaattgcatattgctcatgcacttgagaatgcttgattttttttacatttgttttgtaactggaaggcaagcatgctgtcttctggtttttccttttgtgggtttgggccaaaggcatgtttgacctattttgaggccatttaatttccttctgggtctgggccacagctcctccccgcaattccttgccattgtgaaaggagtttgggtgaagaatggtgggcacaatcaactccttgt

SEQ ID NO: 3732 - DNA, 464 bp, Homo sapiens
  MAP TO AC007380.3; EXPRESSED IN PLACENTA, SIGNAL = 0.67; EXPRESSED IN FETAL LIVER, SIGNAL = 0.61; EXPRESSED IN LUNG, SIGNAL = 0.61; EXPRESSED IN HEART, SIGNAL = 0.82; EXPRESSED IN HELA, SIGNAL = 0.63
tgccagcattagtcaaaatcccacagtatgtaccatgaaatgctcagagcagtcagctctggattctcatgagaacacagtttgtacaaaagcccagctgtctatagtagacaaagatatggagtagacaaaagttttcattataacattcttaactcaccattcccttcctgcaggtcttctcatcacccagtgctctcaggctctctcgggttgctctggtctttctatttaacctcttattgactcctcctgtgccttcctcctctttcccacccccaccttctaacagcactcacctgtgcttcttaccgtcccttatcaagcgctgttgtgtgggggggataatctgctcaaaggcaccaatttcctccttccaacagacttgctaaggagaaattaaggagaatgtccatgatcccaaaatcagcatttctgaaaaagacactgttctttggcaaaaa

SEQ ID NO: 3733 - DNA, 357 bp, Homo sapiens
  MAP TO AC012123.1; EXPRESSED IN BONE MARROW, SIGNAL = 1.6; EXPRESSED IN LUNG, SIGNAL = 1.5; EXPRESSED IN ADULT LIVER, SIGNAL = 2.1; EXPRESSED IN BT474, SIGNAL = 1.3; EXPRESSED IN BRAIN, SIGNAL = 1.4; EXPRESSED IN HEART, SIGNAL = 1.3; EXPRESSED IN HELA, SIGNAL = 1.7; EXPRESSED IN HBL100, SIGNAL = 1.4; EXPRESSED IN PLACENTA, SIGNAL = 1.3; EXPRESSED IN FETAL LIVER, SIGNAL = 1.7
tcttccaaggctacacaccctagatttctggactctgtttcctttcaatactgctcataaatggggcccaactttttctgagatcatctcttttttgtaaatcttgccaagtccaacccaacagcaaccaacacatacaatcagcattctgttttcaacctcttcccttggaggtggaagttcattaaataactgattagccttccaagtaagagcaaataacagttgtacccagtgatttttctcaccatgatatccatttctgtctttctactcttctatctcagtttccttatcagccactggaccttcttggtaccagcacctgtatcagtcggggtaggcggtgaccacaat

SEQ ID NO: 3734 - DNA, 451 bp, Homo sapiens
  MAP TO AC007540.3; EXPRESSED IN PLACENTA, SIGNAL = 0.66; EXPRESSED IN BT474, SIGNAL = 0.67; EXPRESSED IN BONE MARROW, SIGNAL = 0.74; EXPRESSED IN FETAL LIVER, SIGNAL = 0.74; EXPRESSED IN LUNG, SIGNAL = 0.63; EXPRESSED IN HELA, SIGNAL = 0.89; EXPRESSED IN ADULT LIVER, SIGNAL = 0.67; EXPRESSED IN HEART, SIGNAL = 0.85
aaaggactatatgacttccaatccacatgcttcccagaggatcacactgaacagaatctggaaaactctaagttccactttgtgttttgtgctgactcttgaaaattcaaccaaagaggcatggaaagaatgagataaatggctctgacaaattctgggacatgttctctttgctctccttccctgctcgtgcctctttaaaacttgtcccagaaggtttggaagcattagaaggtcctttttgacttccagccactccaactacactctgagtccagaaggagattcaagagggaaaatggacactgtgtaatagaaagtataatgggagctgggcaactgtgctgagcaggagcagggaggatgtcacatggcgagacttccattttagaagtttcagcctggtagctgtgaggaagatggagctcatcagagggttgtggttgttgtt

SEQ ID NO: 3735 - DNA, 477 bp, Homo sapiens
  MAP TO AC007437.16; EXPRESSED IN PLACENTA, SIGNAL = 1.1; EXPRESSED IN BT474, SIGNAL = 0.77; EXPRESSED IN BONE MARROW, SIGNAL = 0.87; EXPRESSED IN HBL100, SIGNAL = 0.77; EXPRESSED IN FETAL LIVER, SIGNAL = 0.76; EXPRESSED IN LUNG, SIGNAL = 0.75; EXPRESSED IN HELA, SIGNAL = 0.72; EXPRESSED IN ADULT LIVER, SIGNAL = 0.75; EXPRESSED IN HEART, SIGNAL = 0.93
gctgcaaagcatttctaaggaacagagatttcctcactagcaggaccaatgcagacgtaattctgcagagtagtcctggggagggctgtgcaatgaagaaaccaattttcagctctctcttctcagaatggcgtgacaatcaactatctgggtcaatttggttgaagagttctcttatggagtgccattatcccatacttacaaatttcacatggccctggattggtttttaactggctcttgatatcttttttaatggcataacctatttacctgtttttctttaaacttatgcatccttttcacagagtctttctatgtatcaaaagatcctttgaaggagacaaggatagtcatccagtccaactttgtgacccagtgtttcactgtgaacatcattaattgcaataatgttataaaagtaacctttctgcaaataaatcctcctcaggagtatgtgcttggagtggtcaacaa

SEQ ID NO: 3736 - DNA, 380 bp, Homo sapiens
  MAP TO AC011421.2; EXPRESSED IN BT474, SIGNAL = 6.3; EXPRESSED IN FETAL LIVER, SIGNAL = 6.6; EXPRESSED IN BONE MARROW, SIGNAL = 6.5; EXPRESSED IN HELA, SIGNAL = 6.6; EXPRESSED IN PLACENTA, SIGNAL = 5.6; EXPRESSED IN ADULT LIVER, SIGNAL = 7.5; EXPRESSED IN BRAIN, SIGNAL = 6.1; EXPRESSED IN LUNG, SIGNAL = 6.6; EXPRESSED IN HEART, SIGNAL = 5.1; EXPRESSED IN HBL100, SIGNAL = 6.2
atgcctcctagtctgcctccatccaaagatactgcttgatgccaagcaatgcaaagcacagagtaatttaaacagaggggagaaaagttgcgggggttgggggagcaaattatttacaactcaggcaagaaaaaaattgtaaagaaaatataaaacactgaagcacataatatgtaggtaaatttaacttcataaaatgatatgagaaagtttctgtaatcatccttttccttcctcatgttgttgtaaagcttagcaaagaagatgactgtgctattttgaagtctggagatttcaaagagagcattttctttgggaatagagtcactttctctgctttggctgtgcaagtccaagtgagagtcccttgttcttcagga

SEQ ID NO: 3737 - DNA, 383 bp, Homo sapiens
  MAP TO AL080239.11; EXPRESSED IN PLACENTA, SIGNAL = 0.81; EXPRESSED IN FETAL LIVER, SIGNAL = 0.67; EXPRESSED IN LUNG, SIGNAL = 0.86; EXPRESSED IN HEART, SIGNAL = 0.85; EXPRESSED IN BONE MARROW, SIGNAL = 0.69; EXPRESSED IN HELA, SIGNAL = 1.3; EXPRESSED IN ADULT LIVER, SIGNAL = 0.67; EXPRESSED IN BRAIN, SIGNAL = 0.78
tcttccccatagatcactaccctatgattccaccttgttcttctctggcacacaccccttcctcaacctgcattccttctcataaagccccccttgctatccagtctctaccctattcacccaaaataatgactttctggcctctccctgttttcttatcagatgcaggaggcaccgaacagggtcttagcccccaaacagagcttgcaaaagacaaaaacaatagaatatctaacaataatagtgtattactacaggaagcatacgaaaataaattcaaatcaactggagaaggaccagtcccgagagaactccatcaatcccgtccaagaggaggaggacgaaggcctagactcagctgaaggatcttcacaggaggacga

SEQ ID NO: 3738 - DNA, 380 bp, Homo sapiens
  MAP TO AC011561.2; EXPRESSED IN PLACENTA, SIGNAL = 2.7; EXPRESSED IN HBL100, SIGNAL = 1.9; EXPRESSED IN HEART, SIGNAL = 2.2; EXPRESSED IN ADULT LIVER, SIGNAL = 2.5; EXPRESSED IN BT474, SIGNAL = 1.9; EXPRESSED IN FETAL LIVER, SIGNAL = 2.1; EXPRESSED IN BONE MARROW, SIGNAL = 2.2; EXPRESSED IN HELA, SIGNAL = 2.2; EXPRESSED IN BRAIN, SIGNAL = 2.1; EXPRESSED IN LUNG, SIGNAL = 2.8
cttgcaaaaccttccctttgttgcatcatataggcatattgcaggcagtgtgtgtgtgtgtgtgtgtgtgtgtgtgtcattataaattagttaatgagaatctcactcattggaacccatcttcccagaaacaagcctaaatcctctcagtatcattatcctcaatttatcatctcttctcactctgttttcaggctctccatcaagacaacagtgggtcccagcagttacactcacaacatgctctccagacatttgcagtcctgatttttagccttgctcgagtacccaatatctctctccgaacttacctcaaaagcatgtctttagcagtatctgctgactaccccatctgcaaagcagtccccttcccatcatta

SEQ ID NO: 3739 - DNA, 488 bp, Homo sapiens
  MAP TO AP000134.1; EXPRESSED IN BONE MARROW, SIGNAL = 0.83; EXPRESSED IN FETAL LIVER, SIGNAL = 0.66; EXPRESSED IN HELA, SIGNAL = 0.71; EXPRESSED IN ADULT LIVER, SIGNAL = 0.81; EXPRESSED IN BRAIN, SIGNAL = 0.79; EXPRESSED IN PLACENTA, SIGNAL = 0.69; EXPRESSED IN LUNG, SIGNAL = 0.83; EXPRESSED IN HEART, SIGNAL =   1
ccaaggaaactcaccaggctgttggtgtccagagtgtatagtagggcttggtcttgtggacatggctggcttgaccttagtctattccttcaggggtcaagctgatatggtgtggccaaatctcccaccataaatcacattggtctaacatgttgtgtctgtttggcatggcccatggcctccaggtaaacacagtgctattatcaagcaggacatctaagggcttagagatcacctcccaagagccaagggcaaagcccagatctcacttcaagtaagcttaaaattctttactacacaacaccctttccttgttacaggagagtgggggtgccctgctggccctcacagaggaagagctcataactcataacccacaaaactgtaatgaagggcaatcccatccgactgaaaaatgggactggaaacaggcactgaacattccagaaggaaagagaggggcacaggggagcgcgtaagtggattta

SEQ ID NO: 3740 - DNA, 480 bp, Homo sapiens
  MAP TO AL049610.9; EXPRESSED IN BRAIN, SIGNAL = 1.2; EXPRESSED IN HEART, SIGNAL = 0.88; EXPRESSED IN BT474, SIGNAL =   1; EXPRESSED IN BONE MARROW, SIGNAL = 0.81; EXPRESSED IN HBL100, SIGNAL =  17; EXPRESSED IN FETAL LIVER, SIGNAL = 0.75; EXPRESSED IN HELA, SIGNAL = 1.2; EXPRESSED IN ADULT LIVER, SIGNAL = 0.9; EXPRESSED IN PLACENTA, SIGNAL = 0.7; EXPRESSED IN LUNG, SIGNAL = 0.67
aaagcctgctgggaaaatggtgggctttcgggaaggagggggcgaccgggaagcggcggagtcgggagagccggagagcctctgggaaagcgcaaggttgaggacctggcccccgaatcaggaaaaggcaggtattggaacccacggcctgggtgttagtccagccgcttagtattctgactctattctgcctttcttgtctcctaagaataactgtgcttgaagaagaaaattcccaacatggacaaaccacgcaaagaaaatgaagaagagccgcagagcgcgcccaagaccgatgaggagaggcctccggtggagcactctcccgaaaagcagtcccccgaggagcagtcttcggaggagcagtcctcggaggaggagttctttcctgaggagctcttgcctgagctcctgcctgagatgctcctctcggaggagcgccctccgcaggagggtctttccaggaaggacctgtttgag

SEQ ID NO: 3741 - DNA, 534 bp, Homo sapiens
  MAP TO AC005973.2; EXPRESSED IN FETAL LIVER, SIGNAL =   1; EXPRESSED IN PLACENTA, SIGNAL = 1.1; EXPRESSED IN BT474, SIGNAL = 0.86; EXPRESSED IN BONE MARROW, SIGNAL = 1.5; EXPRESSED IN HBL100, SIGNAL = 0.78; EXPRESSED IN LUNG, SIGNAL =   1; EXPRESSED IN HELA, SIGNAL = 0.81; EXPRESSED IN ADULT LIVER, SIGNAL = 0.99; EXPRESSED IN BRAIN, SIGNAL = 1.3; EXPRESSED IN HEART, SIGNAL =   1
cactcccccacaaatcacactccccccaccaaccacactcccccacaaatcacactccccccaccaaccacactcccccacaaatcacactgcccccacccagtagattctgtctccctctgtgggccaaacaggttcttcctcaggctcacatatgactgctgtacagctgaatatcccagctatggtttacctggagccttgccaattctcatgctggtgccttttggttcttgctggtgtggggatgaggcagaggggcaggaacactgcactaactagtggctttctctctgttccttctcactcctgggtctccacatgctgttcatcactctcctcctctttacctggatgcctcgtgcctgtgcctcccgacctccactgagacaatgtcacctccaggaagtgcccctcacaatcctctcctcccacaataccctgtactgactctttcgtgacaccaattacatttttgtgattgattctcttatctgtctcctctgctagactaagttcttggaggtcagggct

SEQ ID NO: 3742 - DNA, 358 bp, Homo sapiens
  MAP TO AB020867.1; EXPRESSED IN HELA, SIGNAL =   1; EXPRESSED IN HEART, SIGNAL = 0.92; EXPRESSED IN ADULT LIVER, SIGNAL = 1.2
ctgaattcatttgtgcccagcagttacatcaaatagggactaaatatagatgaccatatatgttcttcccttgtgtatactctttaagcaggactagcaacattcccacttagtaatatagcagtattctttagtaatactaacaacctatctttccttagtaatcataaacattagttttaagtttttcagtacttaaaagtaatagtattttataattgaagtttactgtctttaaaaattatttggtttatctttgaataggattcactggcaaaatttgctggcagaaaactgaaagactgtggagaagatcttcttgtagagatatctgaagtgttgttcaatgaattggctt

SEQ ID NO: 3743 - DNA, 459 bp, Homo sapiens
  MAP TO AC009315.1; EXPRESSED IN ADULT LIVER, SIGNAL = 1.1; EXPRESSED IN BT474, SIGNAL = 1.5; EXPRESSED IN BONE MARROW, SIGNAL = 0.66; EXPRESSED IN HBL100, SIGNAL = 1.6; EXPRESSED IN FETAL LIVER, SIGNAL = 1.2; EXPRESSED IN HELA, SIGNAL = 1.6; EXPRESSED IN BRAIN, SIGNAL = 1.1; EXPRESSED IN HEART, SIGNAL =   1
atgtttcccctcatcttggggaaaaaaatgctcaatttaaaatctatacttttcaaatgttcttccttttctttccacataaatttttttccttatatattggccctgcctcttccctcaatactttattttctctttatatataagctatgtgctgtctgcttactctgaatctctggaaaatggcctattttttcaccgtgcttatgcctataatttcagatttccttccttaaatctcaaacattgaaaaaaatctaaatagtcactttctctgttttataatagaacccatggatattttggacaaaattgtccagatggtggtagtgacactacacaaaatccattgtctcaaatctcatgtaatggctagacaatgttcagaaatcccactcgagcatttcaccattttcataataatcatttaaaataattccctttctgaaaacttccaca

SEQ ID NO: 3744 - DNA, 401 bp, Homo sapiens
  MAP TO AF111169.2; EXPRESSED IN BRAIN, SIGNAL = 0.92; EXPRESSED IN HBL100, SIGNAL = 0.81; EXPRESSED IN LUNG, SIGNAL = 0.89; EXPRESSED IN HEART, SIGNAL =   1; EXPRESSED IN PLACENTA, SIGNAL = 0.87; EXPRESSED IN BT474, SIGNAL = 0.82; EXPRESSED IN BONE MARROW, SIGNAL = 0.9; EXPRESSED IN FETAL LIVER, SIGNAL = 0.86; EXPRESSED IN HELA, SIGNAL = 0.92; EXPRESSED IN ADULT LIVER, SIGNAL = 0.93
ttgtgcctccaacttgtcagggttttaattgctttcaggatccttttataaattctcccagaatcagcgtattgtcctagcaaaactccacgggttggttcagcccccgttctggtctcctcgcccttgccaggccttcagaattcctagcctgcatctccacgcccattcacatggctggcccagggcgagcagggaactgactgggtcaccaaccacttctgtgtctctctccctccccttgtgctggctgaagtccaacatggctgttaccaaactggagctggaagacaattgcatcatggaggagggcgtcttgagcctggtggagatgctacaagagaactactacctccaggagatggtactgtgcccccctgtgctggctcttaccatcatcc

SEQ ID NO: 3745 - DNA, 455 bp, Homo sapiens
  MAP TO AP000159.1; EXPRESSED IN BT474, SIGNAL = 0.73; EXPRESSED IN BONE MARROW, SIGNAL = 6.6; EXPRESSED IN HBL100, SIGNAL = 0.73; EXPRESSED IN FETAL LIVER, SIGNAL = 0.59; EXPRESSED IN LUNG, SIGNAL = 0.89; EXPRESSED IN HELA, SIGNAL = 0.84; EXPRESSED IN ADULT LIVER, SIGNAL = 0.65; EXPRESSED IN BRAIN, SIGNAL =   1; EXPRESSED IN PLACENTA, SIGNAL = 0.93; EXPRESSED IN HEART, SIGNAL = 0.84
gagccttagagtccttctcagcataaagctgggcagtcccttcctgttgattgtaataaaacccacttgctacctcttggcctagagaatgtaatgatatgatttgaatagctagatactgacctttccaaaacgttggcttacaacagcttcttggattgtagtattttaacagtaacttgtcggtagatattttgtcactgatgtgggcatagtttgttgcagcctactatgctactattactgcttgtattttttctcagcacacactttgtttccatagcagttctcattttccacgtgacaaaggccatggagctggccgtgtgtgtacaacacaggtcagagagctcccgttttgcttctgtgagtgtagatgggatggcccacttcatcctgaggcctttctccagtgttgtgctgtgagacccagtgggtcctcttgccttcaatgt

SEQ ID NO: 3746 - DNA, 422 bp, Homo sapiens
  MAP TO AL121748.2; EXPRESSED IN PLACENTA, SIGNAL =   2; EXPRESSED IN HEART, SIGNAL = 1.1; EXPRESSED IN ADULT LIVER, SIGNAL = 1.1; EXPRESSED IN LUNG, SIGNAL = 1.3
cagagcaggaggaaggtttgagggaggaaagatttactgtaaaataatccagagactgaaaattgtatatgattgggtacaaaatcatgtctttattccatatgttgtattttatttcttagcatggagtcgcccaggaaatcattttacattatctgtttcatttcacttcccagattatccttgctctggaatgttgggtatggtgtctggacttatttctgactcccagatcacatcatccaaccaaggggacagaaactggatgcctgaaaacatccgcctggtaaccagtcgctctggctgggcacttccacccgcacctcattcctacatcaatgagtggctccaaatagacctgggggaggagaagatcgtgaggggcatcatcattcagggtgggaagcaccgagagaacaagg

SEQ ID NO: 3747 - DNA, 458 bp, Homo sapiens
  MAP TO AL049780.2; EXPRESSED IN PLACENTA, SIGNAL = 0.73; EXPRESSED IN HBL100, SIGNAL = 0.98; EXPRESSED IN LUNG, SIGNAL = 0.72; EXPRESSED IN HELA, SIGNAL = 0.68; EXPRESSED IN HEART, SIGNAL =   1; EXPRESSED IN BT474, SIGNAL = 0.95; EXPRESSED IN ADULT LIVER, SIGNAL = 0.66; EXPRESSED IN BRAIN, SIGNAL = 0.71
gcagaagcaagaggacttggtgagcaatcaaacgtgaaaggaataaaggagaaaacaaaagcaacagtgattctgagggttgtagcatggatggctggaaggatggtggtgccattgacagagaagggacacagatgaggaggaacaaacctgcctaggagttccatcgtgaaggtgggtttagacacagtgaatgtgcctgcaggtggaatgcccagtggataggcacacttaaaagatctggtacttggaaaataaatctgggctgtacatatctatctgagagttaacagtatatatatattgatagtatcagaagctggagaagggccttgaggaagtgaggttgtccagggagaatatggagagtgaaaaggaagagacaaaagagtggagcctgtggaacatcagcatccagggtgcgtatgctttggaaaaggtctggaaagctctgctga

SEQ ID NO: 3748 - DNA, 390 bp, Homo sapiens
  MAP TO AE000658.1; EXPRESSED IN LUNG, SIGNAL = 2.5; EXPRESSED IN BRAIN, SIGNAL = 2.9; EXPRESSED IN BONE MARROW, SIGNAL = 3.2; EXPRESSED IN HEART, SIGNAL = 2.3; EXPRESSED IN FETAL LIVER, SIGNAL = 2.7; EXPRESSED IN ADULT LIVER, SIGNAL = 2.9; EXPRESSED IN PLACENTA, SIGNAL = 2.4; EXPRESSED IN HELA, SIGNAL = 2.5; EXPRESSED IN HBL100, SIGNAL = 2.8; EXPRESSED IN BT474, SIGNAL = 2.6
cattcagtcccttgacctgctgttatcctcttcagggcagacttcacttcctggttcctcagtgtatagatgagggggttcagtaatggagtgacaacagtgtaaaacacagccgctgccccatccagggggcctttggagccagccctaaggtagatgaaaatacaggggacatagtagactgtgaccacgattaggtgggagccacaggtggagaaggcccggcgcctcccatcagtggtgcgtatcttcaggatggcatttactatgttggcatacgagagcagaattaacatgaagcaactggcggccactaccccgatgtccacaaaggtcacaagctcattgacagttgtgtcagcacaggccagtctcaatactgcggggatg

SEQ ID NO: 3749 - DNA, 483 bp, Homo sapiens
  MAP TO AL023804.1; EXPRESSED IN HEART, SIGNAL = 0.79; EXPRESSED IN PLACENTA, SIGNAL = 1.1; EXPRESSED IN BT474, SIGNAL = 0.98; EXPRESSED IN FETAL LIVER, SIGNAL = 0.93; EXPRESSED IN LUNG, SIGNAL = 0.68; EXPRESSED IN HELA, SIGNAL = 0.92; EXPRESSED IN ADULT LIVER, SIGNAL = 0.98; EXPRESSED IN BONE MARROW, SIGNAL = 1.2; EXPRESSED IN HBL100, SIGNAL = 2.2
gagccccagacatgagtagcatccaactcacccttgatgatatgcctgacaattttgatggagcttcctcgcatgtttaggatctggtgaaccctctggcgaatctaataagggaaaaaatgggtagagaaagaaagacaaccatttgtcctgacacaccagaatgtatcaccttgaaatgatatacttcaccccatccctgaaacaaaaggctgatgtagagtaaaggaattcaaggagagcgtgacccccttctttccctgagtgagagtccacctaagcagctggcgaggaaggaggcagggatggataagcccatccaggggaagaccctcctacctgggggacattggcattgcagatctcggccatgatgtagcagatgtgctggagaacaaagagccccgcatccaggcgccggaggtagaactcctcctcggtgtcattgtcgatgatctctcctcgccggaccatgtcctagaa

SEQ ID NO: 3750 - DNA, 363 bp, Homo sapiens
  MAP TO AE000661.1; EXPRESSED IN BONE MARROW, SIGNAL = 2.5; EXPRESSED IN HEART, SIGNAL = 2.5; EXPRESSED IN PLACENTA, SIGNAL = 2.5; EXPRESSED IN FETAL LIVER, SIGNAL = 2.7; EXPRESSED IN ADULT LIVER, SIGNAL = 2.5; EXPRESSED IN LUNG, SIGNAL = 2.5; EXPRESSED IN HELA, SIGNAL = 2.1; EXPRESSED IN HBL100, SIGNAL =   3; EXPRESSED IN BT474, SIGNAL = 2.8; EXPRESSED IN BRAIN, SIGNAL = 2.7
tgttggttcagaggagggaccaggcagaaggtggttgagaggcagagctgcccctgagtgagccatgcagaggatctcctccctcatccatctctctctcttctgggcaggtaaggcagaccccagaacttgggccaagcaagactcagcagcaaagaaacatcaaggctcacaggaccttgtactcatggactgtgctccttactcaatgacctcagcccccagccctcactgagcccctctcttgtgtcttttctctcaggagtcatgtcagccattgagttggtgcctgaacaccaaacagtgcctgtgtcaataggggtccctgccaccctcaggtgctccatgaaaggagaagcgatc

SEQ ID NO: 3751 - DNA, 413 bp, Homo sapiens
  MAP TO AC012330.5; EXPRESSED IN BT474, SIGNAL = 2.1; EXPRESSED IN LUNG, SIGNAL = 1.6; EXPRESSED IN BRAIN, SIGNAL = 2.3; EXPRESSED IN BONE MARROW, SIGNAL = 2.8; EXPRESSED IN HEART, SIGNAL = 1.7; EXPRESSED IN FETAL LIVER, SIGNAL = 1.6; EXPRESSED IN ADULT LIVER, SIGNAL = 2.1; EXPRESSED IN PLACENTA, SIGNAL = 2.4; EXPRESSED IN HELA, SIGNAL = 2.3; EXPRESSED IN HBL100, SIGNAL = 2.4
cggatgtggaggagtcattcctgagggcgagtgtctgccctggtgctatatctgctgccttttcacactgggtgtgacctgaagagacagcctgaggcctgtcctcactcactgtctttgaggaactgagggtcagctggcagtgggatgaggctggccccctcctccgctttagccccggcaagcctcccgtggagctgtaggagctggagatggcatttcggttggtgcaggagctcgtccaggaggtctgggatgtctggttatatctgatttctgacctctgggcatggaggtctgtctgcagaggcccgggcccgggcacaaagggagagaggcctccattgtcccgcaggggccgaaatgcagacggtgcatccccggtgacctcggggacccttctctgatcacca

SEQ ID NO: 3752 - DNA, 448 bp, Homo sapiens
  MAP TO AF001548.1; EXPRESSED IN BT474, SIGNAL = 1.3; EXPRESSED IN LUNG, SIGNAL = 1.3; EXPRESSED IN HEART, SIGNAL = 1.4; EXPRESSED IN PLACENTA, SIGNAL = 1.7; EXPRESSED IN HBL100, SIGNAL = 1.2
ccttcatgggtcctctcaacttctctgcgctgagatcccccgcaggcagatcgcggtggagtgttggtgcgatggtgcttgaccccccagcttcccctgctattgggtttctccaacgaggagacatggtcttcgcttctcagagtctgtggggccagggacaggggccactcatggtccccctctcaccctaccctggacgctgtccttgtagctctccgactcgaagaagaagctgcaggactttgccagcaccgtggaagctctggaagaggggaagaagaggttccagaaggagatcgagaacctcacccagcagtacgaggagaaggcggccgcttatgataaactggaaaagaccaagaacaggcttcagcaggagctggacgacctggttgttgatttggacaaccagcggcaactcgtgtccaacctggaaaagaagcag

SEQ ID NO: 3753 - DNA, 461 bp, Homo sapiens
  MAP TO AF001550.1; EXPRESSED IN BONE MARROW, SIGNAL = 1.3; EXPRESSED IN PLACENTA, SIGNAL = 1.2; EXPRESSED IN ADULT LIVER, SIGNAL = 1.3; EXPRESSED IN LUNG, SIGNAL = 1.1; EXPRESSED IN HEART, SIGNAL = 1.2; EXPRESSED IN HELA, SIGNAL = 1.2; EXPRESSED IN HBL100, SIGNAL = 1.3; EXPRESSED IN BT474, SIGNAL = 1.7; EXPRESSED IN FETAL LIVER, SIGNAL = 1.1; EXPRESSED IN BRAIN, SIGNAL = 1.4
aagagctctgggcagtaaataaagtatgagttataccagtccttaagatcttctattctaaaaagttgatacttgctttgaattagactcacagaaacaggaatttgaagtttttacctcgcctgtgcctagaggacacagggcaggtcacagaacacagtggggagtcaggggagagtcgattacagattaaggcactgcagtggaagtagacctggagacagaagagagttacatggaatcgatgcactaacatttaacctgtccctggtgacttctgaatcacttaccaggctagagagcacgtgggcttctgatacaaaggcaaaagccttcatgtcaaacctctgatagtgatcaggatgggtcacagaggagccgactggatggaaggtggtctggtagttgtccaggtcatatgcacagctaggaggtatgcaccagggagggatgtcagtcat

SEQ ID NO: 3754 - DNA, 377 bp, Homo sapiens
  MAP TO AF002223.1; EXPRESSED IN BT474, SIGNAL = 4.4; EXPRESSED IN LUNG, SIGNAL =   5; EXPRESSED IN BRAIN, SIGNAL = 5.1; EXPRESSED IN BONE MARROW, SIGNAL = 4.8; EXPRESSED IN HEART, SIGNAL = 3.9; EXPRESSED IN ADULT LIVER, SIGNAL = 6.5; EXPRESSED IN FETAL LIVER, SIGNAL = 4.7; EXPRESSED IN PLACENTA, SIGNAL = 4.9; EXPRESSED IN HELA, SIGNAL = 4.5; EXPRESSED IN HBL100, SIGNAL = 5.3
ttaaatgcatgtctctgggcacacacacgcagtgagattgcaagtgaacaagtattctattttagcacaatcagattcacttcttgataaccgtcagtgctttactgttttacagttttaattgtttgcttggagatttgctttcttgatagcttaaactttctgacttaaccataggtgctgtcatggattcatccagaaaataagacggtcattgtgcgttgcagtcagcctcttgtcggtatgagtgggaaacgaaataaagatgatgagaaatatctcgatgttatcagggagactaataaacaaatttctaaactcaccatttatgatgcaagacccagcgtaaatgcagtggccaacaaggtgagtggact

SEQ ID NO: 3755 - DNA, 418 bp, Homo sapiens
  MAP TO AF030453.1; EXPRESSED IN PLACENTA, SIGNAL = 3.2; EXPRESSED IN HBL100, SIGNAL = 3.4; EXPRESSED IN LUNG, SIGNAL = 3.3; EXPRESSED IN BRAIN, SIGNAL = 3.4; EXPRESSED IN BONE MARROW, SIGNAL = 3.3; EXPRESSED IN HELA, SIGNAL = 3.3; EXPRESSED IN HEART, SIGNAL = 3.2; EXPRESSED IN BT474, SIGNAL = 3.2; EXPRESSED IN ADULT LIVER, SIGNAL = 4.7; EXPRESSED IN FETAL LIVER, SIGNAL =   3
caagggctctgaatccacacctgtccccatcgccagccagaaggcccccacccatccactctgcagcaaagtcacagcaagttcaagggttaagttaagaccagaagccatgcctactttgccttctgccggggtggtggagtgagctcagatattctgggaggggagagttggggaattccagccacatctggcaggaggccctggttcagagcctaccttgtggggatgtggtctctgcggaggtgagcagtaacacgggcttgaaaaccaacgcccacgtattcagcagtgaagcagagactgcgctgtgtgctgtgttcctgaatctgcaggggagagagagactcatacctagtcagcgggtgggagtcactccaggccggagggatgacctgcccaaagagcatctgtgtcc

SEQ ID NO: 3756 - DNA, 403 bp, Homo sapiens
  MAP TO AF110324.1; EXPRESSED IN BRAIN, SIGNAL =   1; EXPRESSED IN LUNG, SIGNAL =   1; EXPRESSED IN HEART, SIGNAL = 1.1; EXPRESSED IN HELA, SIGNAL = 0.99; EXPRESSED IN ADULT LIVER, SIGNAL =   1
gctcaacttccacgcagacgctgagctagcgggcaagaagaagggcggcctcttccggaggggctcccttcttggaagcatgaaacttcgcaagtccgaatccaagtcttccatctcgagcaagcgcagctctgtccgcagcgacgcggccatgagcagaattagttccagcgatgccaactccacgatcagctttggcgatgtagattgtgatttttgcccggtggaagaccacgtggacgccaccaccacggaaacctacatgggcgagtggaagaacgacaagcgcaacggcttcggcgttagcgagcgctccaatggcatgaagtatgaaggggagtgggcaaataacaagaggcatggatatggctgtaccgtgtttcctgacggctccaaagaagag

SEQ ID NO: 3757 - DNA, 389 bp, Homo sapiens
  MAP TO AL121748.2; EXPRESSED IN PLACENTA, SIGNAL = 1.5; EXPRESSED IN ADULT LIVER, SIGNAL = 1.4; EXPRESSED IN BT474, SIGNAL = 1.9; EXPRESSED IN BONE MARROW, SIGNAL = 3.2; EXPRESSED IN HBL100, SIGNAL = 1.3; EXPRESSED IN HEART, SIGNAL = 1.4; EXPRESSED IN BRAIN, SIGNAL = 1.7; EXPRESSED IN LUNG, SIGNAL = 1.2
tgctccatacaaatggaaagctaaggttaacacaataaatctgaacttgactttccatacccattttactaatatgaaaaggctgactaatacatgattagaacagtggttatactggcgggcttttattagaaagatgttctgtctttacccaggttatttcttggggaagttgtttaagtgggattttcactttactcctttttctcttctactcataggtcctgaatgttcccagaactacacaacacctagtggagtgataaagtcccccggattccctgaaaaatatcccaacagccttgaatgcacttatattgtctttgtgccaaagatgtcagagattatcctggaatttgaaagctttgacctggagcctgactcaaatc

SEQ ID NO: 3758 - DNA, 1945 bp, Homo sapiens
  MAP TO AC004129.1; EXPRESSED IN LUNG, SIGNAL = 1.6; EXPRESSED IN HBL100, SIGNAL = 1.2; EXPRESSED IN HELA, SIGNAL = 1.3; EXPRESSED IN HEART, SIGNAL = 1.1; EXPRESSED IN PLACENTA, SIGNAL = 1.3; EXPRESSED IN ADULT LIVER, SIGNAL = 1.1; EXPRESSED IN FETAL LIVER, SIGNAL = 1.3; EXPRESSED IN BRAIN, SIGNAL =   1; EXPRESSED IN BONE MARROW, SIGNAL =   1
tgaagtttaaaagcagagttcccacacagaaagagttctgtatagccaaataaaaaacatgcccctttcatactctctaaaaccagtaaaggaggaaaatgtatttggacccaaatttcaatgtctttaaattagtatcaaagagcattgcaatgtacactcctatgcccatctcgtgtactcagacaatgaaaatgggtatgacttttgacctaccatttgtggcaatatccctgatcaatttttttctcctttttatcccacaactacagcaagaaaaattccaccctgtcttcaaacctcccagaccgttggaaggacgaattgcccgattaattcagaaccgacgttctctggaggctatagtccagcaaagaccacgttcctgtccagattgtactcctagagttttgtgtaattttcatacctttgtacccagttctaaagaaatggtggcacttagtgataacataccagccggtgtgacccataaaaaccaggatattgaagagaagatcatagaagaacagagcttgctgtctacctatgaactcccatcttgttacccaacaaaagacctaactagcatttatgacataaagccatttccaaaaatcacagatactaaaaagacagaagatttatactggagacagcagtcactaaaaacccaacccacaccttactgtaaaccagaccactggattcactatgaaaatcttaaatctcccctacgtgatcagtataatatgtgtccagaccctgttagccttagtaaacctagtgttttacaaaataaacaagacacggaagctttcactttagaacattttttaagtaagccagaagaagagttgttcttgaatatggaaaacaatgaagaaacaagacctgttcttggttggattcctagagctggagtgaccaaacctcagaccaacctgctggagcttaagaactctttttcaaaaactggtgcacaaaagcgtttccataaatcaattctagaagaccataaagacctcagggataatgagcattcggggatgaagcaccaattctatggccataattcctattatttctataattgagatactcattcttcccttcaaaacccagcctcttgcaagaagctaaaaaatataacagaatttccttcgtattgctggattctgttttctagattaaaccacaaggaccttgttagtgaggtttacattttcaggaatttaagttagtatctggttggaggaacccagaaaaggtgatgttatgacttcttgaaaagtttaacaatttggcaataaaatattagaactagaaaaatttatagtctttaatctctcatcttcagattatacaaggaaattttccaaaatcacaaaaagcaatgtgtacaacaaagtttacatcattgtttcaccaaaaaaaattgaaaagctggaaagaactcaaatgatcaataattaatgaatgactatacaaattatagtatcttaataaaaatgagaacactgtccctttatgtaaatttttgtacatagtagcattaggtagaaaagacaaaacccaaacacctagttaattgagggatggacacctctaaaaactatattgtcttaaaagtatgtggactctgttcctttatgtaaacatgtaaagaaaataagtcagcgaaaaaaatgaaacccaaaactctctgcatgtacacattacaaattgaattgtttgcttacccttaaccttctgattgagaaacataactgtttcttttatgcagataaaattattttactgaagatctagcaatggccttaattagcaactggtgagttctaattatagcaagaaaggatggcttggtatcagttattacagagccccaaatcttcatttctggagtgtgttctctaagagtttggctaactcccatatgcaagtc

SEQ ID NO: 3759 - DNA, 1840 bp, Homo sapiens
  MAP TO AC005754.1; EXPRESSED IN PLACENTA, SIGNAL =   1; EXPRESSED IN HEART, SIGNAL = 1.7; EXPRESSED IN HELA, SIGNAL = 1.2; EXPRESSED IN HBL100, SIGNAL = 1.2; EXPRESSED IN FETAL LIVER, SIGNAL = 1.1; EXPRESSED IN BT474, SIGNAL = 1.3; EXPRESSED IN LUNG, SIGNAL = 2.4; EXPRESSED IN BRAIN, SIGNAL =   2; EXPRESSED IN BONE MARROW, SIGNAL = 1.8
agggcctcgtagtccagcgacctgagggcaaacaggtggccgttgtccgcgttgatggagaccagggaagagaggggcaggtgcgggtcctggggcggcagcagcgagtaggttacctgggcgttggtgcctgagtctctgtctgtggcgctgacactgccgatgtgcagggcggggctgttgttctcgcggacgaacagggtgtaggagatttgggtgaaggcgggggcgttgtcattgacgtcggagaccagcacggttatgttgtacttggttttcagcctgggtgtccccaggtcagtgatagtgatggtaatgttgtactcggatctggtctctctgtccagcgcgccttctgacactagggtgtaaaaattctctacagatggtttcaggaagaaggggagattgttctcaatggaacacatcactcttccgttgtctccagagtctagatcagaaacactgaaaacagccagtacagtctctcccgagttctcaggaatagggctgtttactgaagacaaggtcagttccggtgggttgtcgttgacatcaaccacctggactatgactgtagactttccggataggcctccgccatccttggcctcgatgtcgacttcataactattaatcgcttcaaaattcaaatatttgaccagttgcatatcaccagtaattggatttagctgaaaagttttgcgaatttcttcagaagcatgaaaaaatgcatatgatattgtcccaaaacttcctgtatctaagtcagaagccgagacagtgacaatgacagagttaacgggggtattctctagaactgcaacctcatagagcggctgtgcaaattctggtgcattgtcgtttatatctaagacctggatgtttatctgggctgtcccagaccgagggggagagccgccgtccagcgcggtgagcgttaagctgagttccggctgctcctcccgatcgagcgctttatccagtactagttccgggtacttccttccgtccctacgactgcgagtgagtacgtggaagtgggaattcggagtgatagtgtagttttggaggctgtttcttcccacatccaagtcctcagcatttcccaaaggaattactgttcctggcagagtgctttctaggattttcagatgcatttcattttcaaagaataccggagaatggtcatttacatctatgatacggagctcgtttgtaacgaattgcaaagggttttgcagtaatatctgaaaatgtagtatgcatggttctgtggggccgcatagctcctcccggtccaatttctcattcaggagcaaatcacctgtctgatgactgagctgaaaatgctgtttgttccctttggacacaacttgggcccccctcgcggccagttcctctacccttagtcccagatcctttgctaggttggctattaaaaagcccttctctttttcctcagccacagaatagcgtcttgactcggacccagccagagaccctcccagaaaaacaaagagaagcaagacttgcctttgtctaagaaatcgctctcctcccgcctccattgcactttccgtcacgctcttccagggaatgtcgccaagctgaacctcagacagagctgggaaacagtcttttgccccacaacctttgtagacggcctagtgaataagcctttccagaggctcagacttgctggctcaaaaatctgcctgggctctcaaccgctggtttaccacactggatccgtgcgtcaccgagcatgcacaatgcctgtggtttaattcgccttcttagtcaacagcgccaccatgcgttcgcttgcagttacaaa

SEQ ID NO: 3760 - DNA, 1954 bp, Homo sapiens
  MAP TO AL031058.1; EXPRESSED IN LUNG, SIGNAL = 1.6; EXPRESSED IN BRAIN, SIGNAL = 1.1; EXPRESSED IN HELA, SIGNAL = 3.9; EXPRESSED IN PLACENTA, SIGNAL = 2.6; EXPRESSED IN BT474, SIGNAL = 3.8; EXPRESSED IN ADULT LIVER, SIGNAL = 1.2; EXPRESSED IN BONE MARROW, SIGNAL = 0.97; EXPRESSED IN HEART, SIGNAL = 4.5; EXPRESSED IN HBL100, SIGNAL = 1.3; EXPRESSED IN FETAL LIVER, SIGNAL = 2.3
aacagcagctggaggttgagctgagacaagtcactcagatgcgaacagaggagagcgtaagatataagcaatctcttgatgatgctgccaaaaccatccaggataaaaacaaggagatagaaaggttaaaacaactgatcgacaaagaaacaaatgaccggaaatgcctggaagatgaaaacgcgagattacaaagggtccagtatgacctgcagaaagcaaacagtagtgcgacggagacaataaacaaactgaaggttcaggagcaagaactgacacgcctgaggatcgactatgaaagggtttcccaggagaggactgtgaaggaccaggatatcacgcggttccagaactctctgaaagagctgcagctgcagaagcagaaggtggaagaggagctgaatcggctgaagaggaccgcgtcagaagactcctgcaagaggaagaagctggaggaagagctggaaggcatgaggaggtcgctgaaggagcaagccatcaaaatcaccaacctgacccagcagctggagcaggcatccattgttaagaagaggagtgaggatgacctccggcagcagagggacgtgctggatggccacctgagggaaaagcagaggacccaggaagagctgaggaggctctcttctgaggtcgaggccctgaggcggcagttactccaggaacaggaaagtgtcaaacaagctcacttgaggaatgagcatttccagaaggcgatagaagataaaagcagaagcttaaatgaaagcaaaatagaaattgagaggctgcagtctctcacagagaacctgaccaaggagcacttgatgttagaagaagaactgcggaacctgaggctggagtacgatgacctgaggagaggacgaagcgaagcggacagtgataaaaatgcaaccatcttggaactaaggagccagctgcagatcagcaacaaccggaccctggaactgcaggggctgattaatgatttacagagagagagggaaaatttgagacaggaaattgagaaattccaaaagcaggctttagaggtattcacaaatacttgatcacagcttcactgtttctcaaattattcatcacattattatctcatctgaactgtgctctttctgcttaaatagatgcttatagaaaatctaatttttctttttattgctctactacttcctgtcataatccaggtaactgctttaaaataatttcaatgctgtgtgccctgctgttctttaattgcatcaaatgctgatctctgggtagcctgtgtttggccctgcttttaagaacactaatacatgtataacttcctccgaatgttccattctacttcttagaagttagctcttatttagtgagctatgacatacatttgtaatgaaaattttcttaaatagaagccatactaaagtgtttccctatgcaatttttaaaacactttttcttttgcctgcttagatgatttttttgcatggattatttagtgttcgcttttgatcatggccctagtgtgtttccttttgtttgactttccttctcctaacccttaatttaaaaataacttatttaacttctacagacaatatttgtgtgtggctgggttggtgtgtgtgtgtgtgtgtgtgtgtgtgtatatctatatattatatatataattatataattacataatatatatttatctataatatatattttatataatatatatcttcatatatttgtattgcttcattaagtatgttcatctagctgtaacaggtgagatgtaggtgtagcaggtatgataacctgaaacaaaactccccacattttttcaaagcataattattgttaagagtaagacaggtctgcaacttacagttccttctatagaaaaaaatagtaagtatgaagccatttattgaagtggcaacatatacagaatttttcccacaaa

SEQ ID NO: 3761 - DNA, 371 bp, Homo sapiens
  MAP TO AF055066.1; EXPRESSED IN BT474, SIGNAL = 2.8; EXPRESSED IN BRAIN, SIGNAL = 1.6; EXPRESSED IN BONE MARROW, SIGNAL = 1.7; EXPRESSED IN LUNG, SIGNAL = 2.1; EXPRESSED IN HELA, SIGNAL = 2.3; EXPRESSED IN PLACENTA, SIGNAL = 2.8; EXPRESSED IN HBL100, SIGNAL =   2; EXPRESSED IN HEART, SIGNAL = 1.4; EXPRESSED IN FETAL LIVER, SIGNAL = 2.4; EXPRESSED IN ADULT LIVER, SIGNAL = 1.4
gtaattcagattcctggggccctggataccttatctcactgtttaaaatcctcatggaggatcaggagagtacagagcccagaaacagtcacgagacctgaagctccctggtgtaaaggaccctcccccgcaccctggggcttagagtgaacagcctctactgtcagcctgattgttctcagtcttcctggctgccaagcttctggttcccagcagcctcctctctcacccttcacctcttctgactggggtcattggccacttgacaggctgtgccctccttgtcagtcagcctgtctacctggtttcctctcagggtgtgtggcttgactgggttaaccatccccagccccagcagaaacagggagaag

SEQ ID NO: 3762 - DNA, 402 bp, Homo sapiens
  MAP TO AL121756.6; EXPRESSED IN BONE MARROW, SIGNAL = 2.3; EXPRESSED IN BRAIN, SIGNAL = 1.3; EXPRESSED IN HBL100, SIGNAL =   1; EXPRESSED IN HEART, SIGNAL = 0.96
gagaagtcatcccgttcagcctctgctcttcgctggtgggaaaagtgaggcccagggagctgagcaacactgcgaggtgctgcctgggggctggaggtggaaaaaagggaggaaccctggactgatgcccttgcctctctgcagccatttcaggcatgctgcagcaaagtgatgctctccactcggccctgagagaggtgcccttgggtaaagcccgtggtgatggtggtgggcctctcctgggcggtctgcttggtggaagtggaagtggaggtggtgggggaggtggtctcctggggggcctgcttggtggtgggggtggagggggtggcagtgatctgttgggtggaggcttactgggtggcagtggcagcagtggtggggagttgctgggtggaggag

SEQ ID NO: 3763 - DNA, 423 bp, Homo sapiens
  MAP TO AP000014.2; EXPRESSED IN PLACENTA, SIGNAL =  16; EXPRESSED IN HBL100, SIGNAL =  36; EXPRESSED IN ADULT LIVER, SIGNAL = 4.1; EXPRESSED IN BT474, SIGNAL =  21; EXPRESSED IN BONE MARROW, SIGNAL =  16; EXPRESSED IN BRAIN, SIGNAL =  10; EXPRESSED IN HEART, SIGNAL =  12; EXPRESSED IN FETAL LIVER, SIGNAL =  11; EXPRESSED IN LUNG, SIGNAL =  14; EXPRESSED IN HELA, SIGNAL =  15
tgaataactgagagagggcaggtagatattttacaccttgaagatttgttttctggtcatgtaaaaattaaatataaacaaataaagaacaaagcaagagagacagaaaaagaaagagaatgagagacaaggaaagattgtgttggggggagaagagaagggtttgcccagctagggcactaaactttggattcattctccaggtttgccacatcaccatttctttctgtttgctcttcgaggttcttttcttcctcttcagtctccagttctgcatgttggttgagtttgctggatacagaccaactcaggggcagctctgccctgctggctaactcggccagctctttggcactaagggatggggtgctggtctcataggtctcatggaagctgttgtagtcaacttcgtagaacccgtcc

SEQ ID NO: 3764 - DNA, 412 bp, Homo sapiens
  MAP TO AF031078.1; EXPRESSED IN BRAIN, SIGNAL = 2.2; EXPRESSED IN HELA, SIGNAL = 2.4; EXPRESSED IN HBL100, SIGNAL = 2.7; EXPRESSED IN FETAL LIVER, SIGNAL = 2.2; EXPRESSED IN ADULT LIVER, SIGNAL = 2.4; EXPRESSED IN LUNG, SIGNAL = 2.4; EXPRESSED IN BONE MARROW, SIGNAL = 2.3; EXPRESSED IN PLACENTA, SIGNAL = 2.1; EXPRESSED IN HEART, SIGNAL =   2; EXPRESSED IN BT474, SIGNAL = 2.2
cacggtcatttcaagcacacctggtctcagtgttcattgtttatgttccccccgaccccaccctgggcacatacattttcctgctccatgagggatccttgtccctgccctccctgccctgtagagataggagttgctcttacttacttgatcaaatacacatcatacttcccagcagagcggccagatttcctttgcttaagcttccgtgtccagccttcaggcagggtggggtcatcatacatgggtccccggtcacggatgatggagcgccgctgtttgggggaggcagaagcttccggcacagccggggcggagcctgacccttctgatgtctctgctttgcctgcctctgcgggctcagcagagtggtgggctgatggctgcacgggctcatgcttgccctctttct

SEQ ID NO: 3765 - DNA, 1869 bp, Homo sapiens
  MAP TO AC010130.3; EXPRESSED IN FETAL LIVER, SIGNAL = 2.7; EXPRESSED IN LUNG, SIGNAL = 3.2; EXPRESSED IN BRAIN, SIGNAL =   6; EXPRESSED IN HELA, SIGNAL = 1.7; EXPRESSED IN PLACENTA, SIGNAL = 1.8; EXPRESSED IN BT474, SIGNAL = 0.95; EXPRESSED IN ADULT LIVER, SIGNAL = 1.4; EXPRESSED IN BONE MARROW, SIGNAL = 1.5; EXPRESSED IN HEART, SIGNAL = 2.4; EXPRESSED IN HBL100, SIGNAL = 1.3
tgagacaattagcaatggaaagcttcctgtctgagaattttcctccagcagctttctaagttcttcttgtttattaactacattgcatcagcaagcattagaaaaccaaattgtgggatggaaatgcatcttcctaactctccatcgattagaccggggtgtgttgatctttcaggcataagtacacacgcttatgcctgagtctggactcgcgtacagaattagtggaaagagacttcatgcaaagacactaatcaccctgtcatcttgttctttctcccaggaaaaagaccacatcagtgtcagatttgtaagaaagcgtttaaacacaagcaccaccttatcgagcactcaaggcttcactcgggcgagaagccctatcagtgtgataaatgtggcaagcgcttctcacactcgggctcgtactcgcagcacatgaatcacaggtattcctactgcaagcgggaggcggaggagcgggaagcggcggagcgcgaggcgcgcgagaaagggcacttggaacccaccgagctgctgatgaaccgggcttacttgcagagcattacccctcaggggtactctgactcggaggagagggagagtatgccgagggatggcgagagcgagaaggagcacgagaaagaaggcgaggatggctacgggaagctgggcagacaggatggcgacgaggagttcgaggaggaagaggaagaaagtgaaaataaaagtatggatacggatcccgaaacgatacgagatgaagaagagactggagatcactccatggacgatagttcggaggatgggaaaatggaaaccaaatcagaccacgaggaagacaatatggaagatggcatgtaataaactactgcattttaagcttcctatttttttttccagtagtattgttacctgcttgaaaacactgctgtgttaagctgttcatgcacgtgcctgacgcttccaggaagctgtagagagggacagaaggggcggttcagccaagacagatgtagacggagttggagctgggtattgttaaaaactgcattatgcaaaaattttgtacagtgttaaggcctaaaaactgtgtggttcagagactaattcctgtgtttaatagcatttatactttaagcacaactagaaaattgtaagaattgcactctacttatgtatcactacaaactttaaaaaactatgtctaatcttatattaatacattttaaaaaggtgcccgcactaccatacatcagtatttttattaataataatggaaattcctttttaatttaatgtgctcgcactacaatgcatcagtattatgattcctctgtactttcctttcgctattcatcaatttcccattttttttttcagcttaagtaaccacacaattttaggcctcaatttttttttttttctgtgaaggaacttgaagtgatgcatgtgtgaatttaagataccgaagtcttaaagtgacctggacgtgaaggaaaaagtaagatgagaaataaagaaagcctttgtaaggtggttttaaaagccttatatgcaaaccttttaatctgtgtttctgcaagtgccatccttgtacagtgttaagagggtaacatgggttacctttgcaccagcttcagtgttaagctcaccctgttctttgaagcacccatgtcagtattagaagaataggcagcagttccttagtttacatatgtttgtgcaattattttctgtacttttttgttcattaattttgtcagtattacaccaaactgtttttgcaacaaaaaaattttttttgcattcatttaattttaggtcaaataacattttatttatgtggctcattttatatttcctaatttt

SEQ ID NO: 3766 - DNA, 407 bp, Homo sapiens
  MAP TO AC012330.5; EXPRESSED IN ADULT LIVER, SIGNAL = 0.99; EXPRESSED IN HEART, SIGNAL = 1.1; EXPRESSED IN BT474, SIGNAL =   1; EXPRESSED IN FETAL LIVER, SIGNAL =   1; EXPRESSED IN BONE MARROW, SIGNAL = 1.1; EXPRESSED IN BRAIN, SIGNAL =   1; EXPRESSED IN PLACENTA, SIGNAL = 0.98
gcaggaggcagagtatgaggtggggaagatggatcggccttatcctcaccaccccccatacgagtctcctctggtatggatggtgtctcctctctggtgggaagtatgtgatttctctatttctatttctcttttgttcgggcttcctagaaattcagagctaggtgtgaaattcccaattcccacagacaagcaacatccccagcagtaataaggacgttccacacacccaggacttgggatatttgtgtattttcaagaataaaagtttgccctttagcctcctcagagccccctcccttctcctcgctctccccttaccactgctattcatcatcttactcctacagataccccctcttcgtggtggcaccgggcactagtaactcatggctgtaaaggagagc

SEQ ID NO: 3767 - DNA, 408 bp, Homo sapiens
  MAP TO AL121838.2; EXPRESSED IN HELA, SIGNAL = 1.4; EXPRESSED IN PLACENTA, SIGNAL = 1.3; EXPRESSED IN HBL100, SIGNAL = 2.8; EXPRESSED IN BT474, SIGNAL = 1.3; EXPRESSED IN BONE MARROW, SIGNAL = 2.3; EXPRESSED IN BRAIN, SIGNAL = 2.6; EXPRESSED IN HEART, SIGNAL = 1.5; EXPRESSED IN FETAL LIVER, SIGNAL = 0.93; EXPRESSED IN LUNG, SIGNAL = 1.4
cttggcctaggttcctttcctcttctccctacccagcaccccatcacccctccactcctaccccaaacctaactcagaaggagccagaagaggggacagtgagggagagactgaagacccaggaagctgagggtcacggaacttcagggtgagaagagcttccctcgggctcagcctcagggctggatcttctcgcagctctggtggtcctgtctaggacacttacccacggactgcagagtagccaccaggctccccgcagaaacaccacccccgttggcaatggctgctgcggacatcatcttggctgctatggaggacgcggcgattcctgccccagtgaagcccatggcactgagcaccacgggcacagcccccactgccagggctgtggggagagagaagctg

SEQ ID NO: 3768 - DNA, 454 bp, Homo sapiens
  MAP TO AF042089.1; EXPRESSED IN PLACENTA, SIGNAL = 1.6; EXPRESSED IN HBL100, SIGNAL = 1.1; EXPRESSED IN FETAL LIVER, SIGNAL = 1.1; EXPRESSED IN BT474, SIGNAL = 0.95; EXPRESSED IN BRAIN, SIGNAL = 1.2; EXPRESSED IN LUNG, SIGNAL = 1.3; EXPRESSED IN HEART, SIGNAL = 1.3
cacctctgaccaatgttcccatctataaacacagcctggccagcctcccccctcccctcccgctcccctctaccctccctcagggatttgctctcccctgacgtttctttcttacccagccccttttcctcctgctactttcctttttcccttcactggttgcagggggagtgagcctgccagctgtgagggcctctgtggtggaggagttggtgctgatggtggtggtagtgaccgctatgggtccctgatgcctggctggccagcaagagggcagggttggccagaggaggaagacggcgaggacatgcgaggggtgctgaagaggtgcatggagacgaggcagcacactgaggaggcgatccaccaggaagagatggagcagctggacttccgagacctcctggggaagaaggtgagtaccaagacactatcggaagatgacctgaaggag

SEQ ID NO: 3769 - DNA, 1973 bp, Homo sapiens
  MAP TO AL049576.15; EXPRESSED IN BONE MARROW, SIGNAL = 1.1; EXPRESSED IN HBL100, SIGNAL =   1; EXPRESSED IN HEART, SIGNAL =   2
accacccacagctctttcagaagttaagaaaacaacaggaaaaagaacaattctgttgattgaaccaagactcaagataccatgaattaatccaagtctcagaaaataattaaaaaaaaaaaagacaatcccgatgaggttacaggacacaaaagataacaagagtcatcaccgaataagactaggaggccttccggaaagggacaattttctgaaaagcttgccgaaactcttcattaaacacagtgtagattattggattgatgagggagtttaaatagcctagccaggtgaagaagtcaaagagcgccgggtggatccagcaggagtcccggcagatggggaggaccagagacaccacgaagaagggcagccagcagatgataaaggcccccagaatgatgcccaggattttagtggctttcctttctcgagcagcagaaatcctcttgcgttccagggcactgtcagcaagcttgattttcacgtggttgaaaaagagaggggagccagccgagtgcgagtgcccctcatggaggctggagttgagcgagcagagcgaggacccggcagagcctgtgatgaggtgggccgtggtgaagcgcttcccatagagtgagggtggattcaggatgcggttccgggcagcccggtagatccggccatataggatgatgagcaacaccgagggaatgtagaaggccccacaggtggagtagatggtgtaggagatctgagaggtgttcaccagacagtccgacatctcctcctgggccttggcctgccgccagaagagcggggggatggagatgcagatggagatggcccagacaatggcgatcatggtggccgcgtggccagccgtcctgcgtttactgtattccagggcatctgtgattgcccagtacctgtccagagcaatgacacagagatgcaggatggaggctgtgcagcacgtgatgtcagaggacagccagatgtcacacaagatttggccaaagttccaggtgtgggtgatggtataggcgatgctgatgggcattaccaagatggaaaccaagaggtcggtggtggccagggagccaatcaggtagttggcaggggtgtggagcttcctggtgagtaagatggtggtgagtacaaaggcattggagaggactgtggccagtgtgatgacggaaaggaccacggcaagggagatcttgagcgcctggagggtcctgggatcccaagcctctgaggtttctgtggcattcagggatctgttggaggcctcctggggaaggccttctgctgactggttcagtggggacatgctaggtggctctctcttcccacagacctccacacatttggctccttccttcaaggttgtcctgacaacagagcaaagtcatccttctgcttcacactggtgggagccgtacaccagaacagaccacagtgaaaaggtctcaagaccagactattctctaagtacagttgcaataaaataaaattaaataacaataataataataatattaaacaagaccggactatttgaagaatgctgagacaactaccagctggtagttaaaggtctttcctaaaccacaggaatcccaagatgtctcagggtcctggaacttttcccagcagatggtcatgcccaggggacacatgctgaatttgttagacaattatcaggggatcacacccaggtgggcaatgccctgggattcttgcctttggcatctggctcttttcaaagcttgagacattcgtgtgtttaatgagaacttcagaattcccctcacagtaattgaaacgattctggatttagggttgcttctgaggagcttttaaaactagacacaaaaagaagttccagccgattcagagaagcagtccagtcagcacagcagctcgcggttttcccaggttcatcttgacgcatcctgagctacttaacttcggttcctatcccactg

SEQ ID NO: 3770 - DNA, 469 bp, Homo sapiens
  MAP TO AL035551.6; EXPRESSED IN LUNG, SIGNAL = 0.93; EXPRESSED IN HELA, SIGNAL = 0.98; EXPRESSED IN ADULT LIVER, SIGNAL = 0.99; EXPRESSED IN HEART, SIGNAL = 0.91; EXPRESSED IN PLACENTA, SIGNAL = 0.76; EXPRESSED IN BT474, SIGNAL = 1.1; EXPRESSED IN FETAL LIVER, SIGNAL = 0.89; EXPRESSED IN BRAIN, SIGNAL =   1; EXPRESSED IN BONE MARROW, SIGNAL = 0.94; EXPRESSED IN HBL100, SIGNAL = 1.2
tgtggcctacttaaggtgctgtaaagagaaatgggtctgtttcttactctagcgctctatccaacagattaacatctatttattcttctgaacacctttcctaattagcctccagagaaatcagtaggcattatttttgttgacattcccaatcttcttaaaacaattaaagaatgggggcaaggaaatgagcacatcaatgacatgcaaaaaaaaggaaagagttctgttgttgaggtcctaaatagtaacgatcactctgttattatctaactcttcttccccagaagctattgtctttgaatttgcacaacaacaaagtttgctggctggatgacctgtctaacattataaagaaggccccgaaagtcaagatcctgaacctctccaaaaatgaggtgacaagaaagggccagatcaaatttgggttgagggtaaattatagtgcacatcaggatgataacaagaa

SEQ ID NO: 3771 - DNA, 1986 bp, Homo sapiens
  MAP TO AC010930.2; EXPRESSED IN LUNG, SIGNAL = 2.3; EXPRESSED IN BONE MARROW, SIGNAL =   2; EXPRESSED IN BRAIN, SIGNAL = 1.7; EXPRESSED IN HELA, SIGNAL = 2.3; EXPRESSED IN PLACENTA, SIGNAL =   3; EXPRESSED IN BT474, SIGNAL = 1.8; EXPRESSED IN HEART, SIGNAL = 2.8; EXPRESSED IN HBL100, SIGNAL = 1.9; EXPRESSED IN ADULT LIVER, SIGNAL = 2.5; EXPRESSED IN FETAL LIVER, SIGNAL = 2.4
ggctctgagtttcaggacatcattttttttttttccaagaaaaaactaaacatgaagatcctggcagccgtgcacattctaccatagcctgtctccaactccagcagacaagccaacccattctttctccacctcaccctctacatatcctttcttgggaatactcccaagatgctctcacggatttgcttggtcttgacaccatagattatgggattgaccatgggtgggaagagcagatagaaattggcaaggaggatgtggacatgaggggcagcatggcgggctacacggtgcatgactgaagagatgaccacagttgtgtagaaggctaagatggcacctatatgagagacacatgtcccaaatgccttgtagcgggcctcctgagaggcaagcagtagaactgcctgaagaataaagatataagacaggataacaaggagcaggtccaacaccacaataaacatggccacagcgatgccatagatattgttgaagctagtgtccccacacgccagcctcaccacagccatgtgttcacagtagcagtgagcgatcactgggcctcggcagtagtggaaacatctcagcaggaaggggagtggagtcattagtgtcacagcccgggccacagcagccatgccaatcttggtgatgagggacccagtcaggaccttggtgtagtgcagtggcttgcagatagccacatagcggtcaaaggccatggccagcagcactgctgactccatgatggagaaggagtgaaggaagaacatctgggccagacaggcaaagaagtttatctcccgatccctgaaccagaatatggcaagcattttgggcagtgctgaggaggaaaggaccaggtcgatggctgccaacatggccagaaagaggtacatgggttcatggagggctgcatcagcctggatgatgagaaggagagtgcagtttccaagcagggccagtgtatatgctaagcagaaagggatggagatccagatgtgcaggtgttccaggcctggaatccccaccaacaagaaggcagttggatgtgttaaggtgatattggaggctgacatggctcctgggaattctcttcctccttatctgcttccacagggcccttccagagaatattcaatatcagcagaattacaatgctcacattcaaactctgatcattcttgtgagaagatagttcttagacccatttttagacatgaaaagaaatgagaaaataatcatatgtatcatgaaatattatgcatgatccttgcccttaagctgtttataaaaacactgggtgctcaggacatttaattccaataaagctagtattacaaagcagccttattgagaaatcaagtggaggaagagccttttgtggcctgcatgtggccaaaagcaactttgtaaataatacagattgctgcttaattcaaatcatacccacaaacatttaccgtcactgtcttcctattgccttccaattcaaactacactcccaattatgaaagagtttctgccctgaaatgtcaatcttggtcatatgaaaaataaatgtagttagcactttctaataattcacttccctacaagttctttagattttttttctagcagggtttcgtaggtccttgtttgacactcagaaatccctccaactaaagccctacctccaggtaacttgagaacatgagaagcccttttgttgttctcttttgcctaactgtagtttaaccttcatctctacgtgcttcttccttcctggacttcatgacattcagaagaagagatgccccacacttacctttttgcaagactgacctattcccttcacactatttttccatctgggatccttatcattctatctttttccaccttctgttgtcatttcccttgaaaacgtttaaacatttccttgcaatatttttgacctgtgccaccttttttttcagctcctgcctaaaaactttc

SEQ ID NO: 3772 - DNA, 480 bp, Homo sapiens
  MAP TO AP000090.1; EXPRESSED IN LUNG, SIGNAL = 1.4; EXPRESSED IN HELA, SIGNAL = 1.4; EXPRESSED IN ADULT LIVER, SIGNAL = 1.2; EXPRESSED IN BRAIN, SIGNAL = 1.2; EXPRESSED IN HEART, SIGNAL = 1.1; EXPRESSED IN BONE MARROW, SIGNAL = 1.1; EXPRESSED IN PLACENTA, SIGNAL = 0.93; EXPRESSED IN BT474, SIGNAL =   1; EXPRESSED IN FETAL LIVER, SIGNAL =   1; EXPRESSED IN HBL100, SIGNAL = 0.85
gagaaaatggacaaccccagggtactcctattaaacactgatatttagaatttctgaattctgattctaaatattttgcaatatttggaatttctgaatcctaaatattgcaaaaggtggcgcggggaggacggggaagggagcctgaaaggaaaatggaggacagcagaaagaaaatcagaagcagcagaatgacatcagtgtggggagaatgcacccatcaaccgatgccactgagagactgtggaggacacaacagtgcccagtgagtccgacaaccagaatgatagcaaagagctcattccctggagctcaaggaacagatgcctgataacaggtgactgtggagggaactggaggttacgaagatcacacaggaacttctgactaccatataaagaagcatatctgtgaagagacagagcgagggtggaagttaaaggaatacacagagttgaatgactggagtgagggatcagg

SEQ ID NO: 3773 - DNA, 444 bp, Homo sapiens
  MAP TO AF121781.1; EXPRESSED IN HEART, SIGNAL = 1.6
atgctttgttacagagggggcgcatccatgattaattcacaccctctctctattaactttggaatcttaaactgtctgggcccctgaaatacagacctgtatttttttgtcatttgcgtccatttttgttgtgataatagataatttatgagtgagttcttccctttctgcaaggtttttgtcttcagaaagtttctgcagtgcctgcaagatatctttagtcttcagtaactggctgtcagtttctctaagtttcctagatagagttctttccttttcctgggatttcctaagtagttgccttaaattttttacttcattctgatgtttagccataatttgaggtagattattttgtgaattctcatattttcctatagctttcaaatgcctaagctgaagttgtttcaaaaattggttttctgtaaggatggcttccaattt

SEQ ID NO: 3774 - DNA, 415 bp, Homo sapiens
  MAP TO AP000070.1; EXPRESSED IN BONE MARROW, SIGNAL = 1.1; EXPRESSED IN BRAIN, SIGNAL = 1.5; EXPRESSED IN HBL100, SIGNAL = 1.5; EXPRESSED IN PLACENTA, SIGNAL = 1.2; EXPRESSED IN HEART, SIGNAL = 1.2; EXPRESSED IN BT474, SIGNAL = 1.5
  unsure 38
aatgactgttggttccccacccctggacaggatatttntgaggcaagatagcccagagaggtctcccgtggagctgagctcccccatctggtgtagcaactggtgacaatgaaccctgcctggcttccttccctcccctgggtcactttgtcactccgctatcagtggtttttcagtttacttcgaatgatctatttgtacctgaagctttgctttggagtctgtttctggggaacacacactgaaaacagagcccctcctccgtgcttacgctcactgtacacatttattacagcccttacattgcacttgtgggtatccagcatcgggctcctgcacagtgacctccttgagggcagaaactttgcctctccaaggcctggtgcagtgctgggcatacatccggtgcccatac

SEQ ID NO: 3775 - DNA, 465 bp, Homo sapiens
  MAP TO AL049563.4; EXPRESSED IN LUNG, SIGNAL = 1.1; EXPRESSED IN HELA, SIGNAL = 1.1; EXPRESSED IN ADULT LIVER, SIGNAL = 1.1; EXPRESSED IN HEART, SIGNAL = 1.1; EXPRESSED IN BONE MARROW, SIGNAL = 0.77; EXPRESSED IN BRAIN, SIGNAL = 1.1; EXPRESSED IN PLACENTA, SIGNAL = 0.9; EXPRESSED IN BT474, SIGNAL = 0.7; EXPRESSED IN FETAL LIVER, SIGNAL = 0.84; EXPRESSED IN HBL100, SIGNAL = 0.81
cctctgctttccctttctccatctgagaatatctgatgtcctgccacatacagtgctgctgaacaattccatcagaaattgtgtacattggctctgaactgggttcagacatatgaccattaaatttggagaataggagacccagtttcttgagagaaggacccatgaaggagcgtttgcttgatgactcagcttttgactttccttgggcaccactggaccttggcatggttctgatgagaggtggcccatggcaagtctttttcttgcagcctaaattaaaagagacactcttggatttggcccgagccccaccactgccatcattattatcgtctctctgagacagttcagtgctgctagtggaaaagctccttggatgttttctatttcccaagaggtcaagcacttcataccgaaagctggagatgtcttgctttaattcctgggaaaagagaggagaca

SEQ ID NO: 3776 - DNA, 1964 bp, Homo sapiens
  MAP TO AC005291.1; EXPRESSED IN HELA, SIGNAL =   3; EXPRESSED IN PLACENTA, SIGNAL = 4.5; EXPRESSED IN BT474, SIGNAL = 4.5; EXPRESSED IN BRAIN, SIGNAL =   5; EXPRESSED IN HBL100, SIGNAL =   5; EXPRESSED IN HEART, SIGNAL = 3.3; EXPRESSED IN ADULT LIVER, SIGNAL = 3.3; EXPRESSED IN FETAL LIVER, SIGNAL =   3; EXPRESSED IN LUNG, SIGNAL = 4.7; EXPRESSED IN BONE MARROW, SIGNAL = 5.7
atcctgaccacctgtccttgcagagggaaaagccaccaaagtgagactgaagagctgcaatcttatctcctcctcaaacactgggcaagtcataacttgtctgcatcatctccagaaaatgagggtattacacttgcttggtcttctaataggcttgttgggaggatggaatggaaaagagaaaaatgggcctgtgacaacttagcatcatacaatgttgttctgtgtgttcgaaataatattattctccctcctgactttggatttttttgactgtgaagattgaggcaattgaaaagatcatttcagtggacactttcagcaatgatgatggtgatggtgatgatggtgatagtggtggtgatgatgatgatggtgatggtgatcttgagaaggtggtggtggtggtgatgatggtgatggtggtggtgatgatggtgatggtgatcttgagaaggtggtggtggtggtgatgatggtgatggtggtgatcttgagaaggtggtggtgatgatgatggtgatggtggtggtgatgatgatgatggtgatggtgatcttgagaaggtggtggtggtgatgatgatggtgatgatggtgatcttgagaaggtggcggtgatgatgatgatggtgatgatggtgatcttgagaagatggtgatggtgatgatgatgatggtgatagtggtgatagtgatggtggtgattttaatagtgatgaaggtgatgatggtgataatgatgacggtgatgatgatgatgatgatggtgatgatgacagtcataataatggtagtggtgaagttagaggaaggtgacctcagaatcattttctgctgccaccgctgctgccaatcctcctcaatttccaaccccactgtgtcaaaggcatttggggtgggctggtgatgagatgaaaaggagaatctagaaggccagagagaaggaataatctaagatgttaaagaatagtgtacttatctcagtgcctggtacatagtaagccagtactcactatcaggtaatagaagctatgaatttttaaaacagttttattaagatgtaatcatacaccatacaatttatctgtttaaagtctaaaattgaatggcttttaatatattcacagttatgctgccaccaccacaatcaattttagaacatccgttttcccaaaagaaaccctgtgcctcttgctgtcaccccaaccgcctcatccctcctggcaaagctatgatttttattgttatctacaccttacagaataaggaaattgagactaagcaatgagaataacttgcccatgaccacacagttggtatgtgacagcactgggattccatctaggtttgccagaacctaaagcctgtgcttctgtccacacaggtcagtttgaccaatgaggaaactcaggttcagagaatatatgtgatcaacccaaggccacacagctacagctattaagtggtcaggatgaggctcacatttagacttggctcctaatccacccataagtgtccttattccattttactgtgccccttcagggtaagcaaatcaacataatcagaatggatgagatccttaagatccgagagagagatgtgaaactagcagtagttttctttcccattggggagggagaatggtgcctgggtccagtctcgtcctggacttggaaagttaacatctctttggacccagctgctcccttttccttttggccctgaacaccctgaggaggctccatgcaggtggggaggagttaccctagctggaaggaggagcaaggtggtacctgagcccctatccaaccttttctaaagcatctgtcttcctaggagtgaatgagtttgacagtacctactaccttctcagatgttaaggggaactgtgggtgggcatgagagaattgtacgacaaagcctttaaaagggatgggatggaaaagcagagttgcttgg

SEQ ID NO: 3777 - DNA, 356 bp, Homo sapiens
  MAP TO AC007629.3; EXPRESSED IN FETAL LIVER, SIGNAL = 0.98; EXPRESSED IN LUNG, SIGNAL = 0.93; EXPRESSED IN HELA, SIGNAL = 1.5; EXPRESSED IN ADULT LIVER, SIGNAL = 1.1; EXPRESSED IN HEART, SIGNAL = 1.2; EXPRESSED IN PLACENTA, SIGNAL = 0.59; EXPRESSED IN BT474, SIGNAL = 0.95; EXPRESSED IN BONE MARROW, SIGNAL = 0.72; EXPRESSED IN HBL100, SIGNAL = 0.99
acatacctggaagagggtgggagaataaggtttaagactataaacactcagatagtggacgagttagatactgacttataaagtgtacattaatgatttgtacccatctaaaggtacattacaaaaggatctctttaggtaacatagagactaacttgtgatgacagcaaaatgaaatgtacttactcatccaattcttcttcttcagttttagaactatcagcatagaggtacttgctcatatccacaggtcttatattttttctttttgtagactggggaggagaatcctttatggtcacaaatgcttctggctcatcgaatgggttcaaatactgtggagtctgcacctcttt

SEQ ID NO: 3778 - DNA, 1966 bp, Homo sapiens
  MAP TO AL035423.4; EXPRESSED IN PLACENTA, SIGNAL =   1; EXPRESSED IN HBL100, SIGNAL = 0.98; EXPRESSED IN HEART, SIGNAL = 1.7; EXPRESSED IN BT474, SIGNAL =   1; EXPRESSED IN FETAL LIVER, SIGNAL = 1.6; EXPRESSED IN ADULT LIVER, SIGNAL = 1.1; EXPRESSED IN BONE MARROW, SIGNAL = 1.4; EXPRESSED IN HELA, SIGNAL =   1; EXPRESSED IN BRAIN, SIGNAL =   1
caggactctgcctcagttacctgtcagtctgggggtgggggatgctgggacaggggtcaattgcctgaagcaagtgctctcatccccctagctcctgctgatctagttggggctccagagtggggaggagaaaggcactttgaaacttctctgcccttaccgtcttagccatcaaactctgagctggagatagtgacgatgtgacaggaactttccctgggcctctctgggccacaattcctggccgagagaaagaggaggaatgaggtgagcaccttcttcactcctagggccatgtggtagagctgcagtcgcacctccttctgccaataggcatagatgagtgggttgagcagggagttgcccacgccgagcagccacaggtaccgttccagcactaggtagaggtgacactcctggcaggccacctgcacaatgccagtgataaggaagggggtccaggatagagcaaagctcccaatgagaacagacacagtacggagagctttgaagtcgctgggagtccgtggggatcgataacctccagccatggctcctgcatgttccatctttcgaatctgctggctgtgcatggaggcaatcttgagcatgtcgcagtagaagaagacaaagaggagcatggctgggaagaagccaacgcaggagagggtcagcacgaagtgagggtgaaatacagcaaagaagctgcactgccctttgtaggcagtctgctggaacatggggattccgagtgggaggaagccaatgaggtaagacactaaccacagcccggcaatgcaggccccggccacgaacccactcatgatcttcaagtagcggaagggctgcttgatggcaaggtacctgtcaaaggtgatcagcatgaccgtgaggacagaggcagctgcggaggaagtgacaaatgccatccgcaggctgcacagggtcttctgtgtgggccgagaagggctggagagctggtctgtgagtaggccagagatggccacaccaatcaaggtgtcagccacagccagattcaaggtgaagcagagactgacaccatcattcttgtggatcaacagcagcacagccacagccactagtgtgttagtagcaatgatgagggaggccaggacagcaaggatcactccaaatgagaaagatgattccatgtctcgaagtggcaggacttcacttaccagggcatgctatctctccagctgaaattctcatgggccaggggcagaggagctgtgggttcagagctacagcacgattctggccttcgctggcagtccaggctggcaggtcgccatctttgggatcctacaggtcatgaagaattactcaccctctcttttcagtcctcagcctcctgcctctccagctctctaaaggcagcaacttcagtatagacctccccctgggccctgagctagtccctccccctccaaccagcaagttactagacaactcccaagtacctgtacatgctgtctcgccaggccctctcccttcactggtgcttcagggactctggagggacagggacattcatcaggtctcctgtctgtcaaaagatataattgactccaatcatacttttttcttcctccataccttgacattaaatttctacttttcttccaaaacctcgagtaccagcttaaataattaatctcagcttaattaagctttttcttactaattctcaattactattatgaattgcttttaatcaagcaagatgctcataatcagttgaagtgggaagtgagggaaggtgagctttttgaggggccccagcatattttcaggagtgctaccacacatttaagctgtttcttaccttttgcttcctagcgcctcaaattctaattctctcaagtagggcgtgctgttcccccgtttctcatccctaggatctcagttgaggattcaggacaggaaaaacagggccaaaaac

SEQ ID NO: 3779 - DNA, 425 bp, Homo sapiens
  MAP TO AJ009612.1; EXPRESSED IN HBL100, SIGNAL = 1.2; EXPRESSED IN PLACENTA, SIGNAL = 0.98; EXPRESSED IN HEART, SIGNAL = 1.1; EXPRESSED IN BT474, SIGNAL = 1.2; EXPRESSED IN FETAL LIVER, SIGNAL = 1.1; EXPRESSED IN ADULT LIVER, SIGNAL = 1.2; EXPRESSED IN BRAIN, SIGNAL = 1.3; EXPRESSED IN BONE MARROW, SIGNAL = 1.3; EXPRESSED IN LUNG, SIGNAL = 0.96
ttccagtttttcaagggcagctgaatacagggatcatgtgaaaaattctggtttttaaatgttggcaatgaattcaccccctgggccaaacaaaaccaatctgtgctagtggcccaagggagagccctcaagctcttggtgcctggaggacgggcttgtcctccttgggcctgtctgccagtcctccttgggcatacagctgctctgcccagaaaggcacccaccgcacaccccgggacctggctggctcggaccacagccaccctaccggcttgggacagtggatgtagcgtgccaggctgatgatgaggtcgtgtgtgatggggtccaccaggttccggaagctggcgtacggatacagaacgtcgtctagcgaggtcgactccatgcccaggtcctgcaagagcaaaggatgcccagaggtc

SEQ ID NO: 3780 - DNA, 1972 bp, Homo sapiens
  MAP TO AC003037.1; EXPRESSED IN ADULT LIVER, SIGNAL = 8.6; EXPRESSED IN LUNG, SIGNAL =   8; EXPRESSED IN BRAIN, SIGNAL = 6.2; EXPRESSED IN HBL100, SIGNAL = 7.3; EXPRESSED IN HELA, SIGNAL = 6.5; EXPRESSED IN HEART, SIGNAL = 5.7; EXPRESSED IN PLACENTA, SIGNAL =   7; EXPRESSED IN BT474, SIGNAL = 6.4; EXPRESSED IN FETAL LIVER, SIGNAL = 6.1; EXPRESSED IN BONE MARROW, SIGNAL = 7.2
gagttcaagtctggttgggctttgccaccaaataaattatgaataaattttcagttctcagagccttgtggctttcaaaattgtgcataatggattctgaaattatatcatgttacaaaagacatacaaagctgtagctggtacaataagctctcagtaaatgttagtggttatcgttaccatggcttcagaaactgtatagtgcaagtttgtccttattactctcttccatttttcaaaaaaataatattctcaagtatattttcttctctgccttgtccacttacttctgaaattggctttttgtaccctgcagccctagagaatgaagtgtactgcaatccaaagcagtctgtgatcgatcgttctgtcaatggattaataaatggcaatgtggtgccttgcaatggtgagataagtggggatttcttgaacaatccttttaaacaggaaaacgttctagcacgtatggttgcatcaaggatcacaaattatccaactgcatgggtggagggtagttcccctgattctgaccttgagtttgtagccaatactaaggcaagggtcaaagagcttcagcaagaggccgaacgcttggaaaaggctttcagaagttaccatcggagagtcattaaaaactctgccaaaagcccactagcagcaaagagcccaccatctctgcacttgctggaagccttcaaaaacattacttccagttccccggaaagacatatttttggagaggacagagttgtctctgagcagcctcaagtgggcacacttgaagaaaggaatgacgtcgtggaagcactgacaggcagtgcagcctcgaggctccgcgggggcacttcctccagacgcctctcttccacaccccttccaaaagcaaaaagaagcctcgaaagtgaaatgtatctggaaggtaagccacccgcacaaagggttgcggggtgctctggagttgggtagccaccctgcccacgacacagggttgccgtgagggtcagcgggccagagtggcaaggtctagtgtttggcacacagagctgtttagagagtgatagttgccttgcctttgctgcctgttggtttcctgcattttattattgccactgcaatttaatttaggtgcttgaatcattagttttctggatcttatgcatcataattggctatttgtgaggataacagtttattttcaaactagtagagctctttagaaaccacgttggtatcttctccgtgcaattggtaatattcttgccttggttctttctgcaccttaggtctgggcagatcacacattgcttcccccagtccttgtcctgacagaatgcccctaccatcacccactgagtctaggcacagcctctccatccctcctgtctccagccctccggagcagaaagtggggtaagtataacgttctgattgattagcttcagctgaataatgttacttgctctgtcagccttcacttgttttactgggattttttttttttgagataattattatagatcatgtggcagtatagaatttgcaatcagattgcaaaatgatatgtcatctttgagaatcatctaaattacctggagggaaaaagattgcttttagcaaataagtggataatgcttatttgctaaacttgatatatggaccatgcaatctggtattaataagcatcttcctagttctgtgaatagatttggtttattaagataaaaaacaaatgtacaaaatctgaaagcaaacaaatggaggttatttataaagttggaacaattttacacatcattaaaaagtcatttttaaaatattttggcattgaaatataaacagataaggttctgacctgcatatcattgaaataaattcaaacgtggtagcaggctctggtgtatgattgttgaaacaggaaggagtggatgtttttagaaactagtccactgggtcagccaggctatgattt

SEQ ID NO: 3781 - DNA, 1987 bp, Homo sapiens
  MAP TO AC005521.1; EXPRESSED IN PLACENTA, SIGNAL = 2.5; EXPRESSED IN ADULT LIVER, SIGNAL = 2.2; EXPRESSED IN BRAIN, SIGNAL = 1.8; EXPRESSED IN HEART, SIGNAL = 1.7; EXPRESSED IN HELA, SIGNAL = 1.6; EXPRESSED IN HBL100, SIGNAL = 1.6; EXPRESSED IN BT474, SIGNAL = 1.5; EXPRESSED IN FETAL LIVER, SIGNAL = 2.1; EXPRESSED IN LUNG, SIGNAL = 2.2; EXPRESSED IN BONE MARROW, SIGNAL = 1.7
ggagaaccaccagagcaaactccagattttaaatgaatcccgactgggtggtgccacctttgttgacagttactgctttaggtaatttaatcatcttgattgttcttgtcaggagttaggaatccattatcacaacctaatcaatccagaagtcaggaagtctccacccactaattaaggtgactcaatataaacctgcctcctgtgcctccacattagctcatttggaagacctgggtataggtggtcgtctccttggctcagagtccctgcagcagctgaggtgcctgtgtctctcttgttcccagtggccaccatcatgctctcctccccactcagggtggctgtggtgtgtgtgagcaacatcaacaggagcatggaggcccacagcatcctcaggagaaaagggctaagtgtccggtctttcggaactgaatctcatgtgaggctaccaggacgaagacccaatcatcctgtagtttacgattttgcaacaacatataaggagatgtacaatgacctcctcaggaaagatagagaatgctacacccacaatggaatcttacacatcttgggaagaaatgagagaatcaagcctggcccagaaagatttcaggaatgcactgaattctttgatgtcatctttacctgtgaggagcgtgtctatgacacagtggtggaagatctgtgttccagagaacagcagacctttcagcctgtgcacgtgatcaacatggacatcaaagataccctggaaggtgccatcctgggagctttcctcatctgtgagatttgccagtgcctgcagcagtccgacgacatggaagacagtctggaggagctgctgttgcaaatggaggagaaggcaggaaaaagctttcttcacaccgtctgcttctactgaagatctgggctggctttgtctccttcctcggtaagaacttaggcatgggactttagtccagattgattgtgagaagtatctacaaagaccttccactgagtgctgtttgtattacttttgtacatatcacctgcaaagagactattaccaagaaaatattttatgggaaatgagaaggactaacagttttaaaagcactgaaaaatgcttggcattgttctacatgcattacatacaataactaatttaatgcttatattattctacaaggaagctatcccaccatgactgcattttccggatgagcaaatggagctgataatggactgctggaaaaatgatttgtttaagggtattcagcagataaataacattgtatagataagcaccttttaaatagacttccttttctcaatttgagtggttttttttttaatttttaaattttttaagttatttgagaccaatggagtgtggtatattaacttaaatgttgttcttctttaataagagtataatattacatgtttgaaccaataaatgttttcacatatagattatatcttttttactaatgctcactttaataggtaaaatccaagttggataatgaactacatattattgtaaaatttggaattatctactcaaataataggtcatcaaattaaatgaaataaaaaatttaaataaaaaaaaaaaaaagaaagaaatcctgttcccaggatctgcaaagaacaccacagcagttctacacatctgcctctcccccagttcccctccctggatggcagagattttaatatcattaaaactaacttggatatagtagagggaagctcttaaaaccctgacaccagtgtgttaggagatggtacgtcaattgacagattcgttacccaagaagaacgtatacatgcatcatgctaggtacagggagaaaaccaaagttaggcaaagtattttgtccacttattatctatgtcattttcatagccagtagaacctctcagtaagtctcctagacctggccatgcccaccatggcccaacactctcttcgtccctgtcaactcaagcctct

SEQ ID NO: 3782 - DNA, 1988 bp, Homo sapiens
  MAP TO AC003682.1; EXPRESSED IN BONE MARROW, SIGNAL = 4.3; EXPRESSED IN HELA, SIGNAL = 3.6; EXPRESSED IN PLACENTA, SIGNAL = 4.9; EXPRESSED IN BT474, SIGNAL = 4.2; EXPRESSED IN ADULT LIVER, SIGNAL = 4.7; EXPRESSED IN BRAIN, SIGNAL =   4; EXPRESSED IN HEART, SIGNAL = 3.9; EXPRESSED IN HBL100, SIGNAL = 4.2; EXPRESSED IN FETAL LIVER, SIGNAL = 4.1; EXPRESSED IN LUNG, SIGNAL = 4.8
aggagtcacctgtcacccacagtcagccaaggtcctgctaaaagtcattgcagaggattaagttggagaccttgtactacaccccatcctcgtgtctttgtttcttgtgaggccatctccattctgtgactcttagattccagtactgtacagcagcccttttttcaacctgatcctagctctgttccaccaggaaacttaggtactcagtcctgggtacagcagacacatatttgtgatgtagttgccccacccaccaaagtcagcatgtacatcaatagtatttttctgccttcaggttgttggcatgaagtgaaggatgaagagtcatcttctgaacagagcatttctatagcagtgtcacatgttaatacttccaaggcaggtttgcccgcacagacggctctcccttgtgacatatgtggccccatcttgaaagatattttgcacctggatgaacaccagggtacacaccatggactgaaacttcacacatgtggggcatgtgggagacaattctggttcagtgcaaaccttcatcagtaccagaagtgttacagtatagagcaacccttaagaagggataaaagtgaggcctcaattgtgaagaactgcacagttagcaaagaacctcatccgtcagagaagccctttacgtgtaaggaggagcagaaaaacttccaggctactttgggtggctgccaacaaaaggccatccacagtaagaggaagacacacaggagcactgagagtggggatgcatttcatggtgaacaaatgcattacaagtgcagtgaatgtgggaaagctttcagccgcaaagacacacttgtccagcaccagagaattcatagtggagagaagccttatgagtgcagcgaatgtgggaaagccttcagccgcaaagctacacttgtccagcatcagagaatccatactggagaaaggccttatgaatgcagcgaatgtggaaaaaccttcagtcgaaaagacaaccttactcagcacaagagaatccacactggagaaatgccttataagtgcaatgaatgtgggaaatattttagccatcactccaatctaattgtacaccagagagttcacaatggagcaaggccttataagtgcagtgattgtgggaaagtcttcagacacaaatctacacttgttcagcatgagagtattcacactggagaaaatccttatgattgcagtgattgtgggaaatcctttggccacaaatacaccctcattaaacatcagcgaattcacactgagtcaaagccgtttgagtgcattgaatgcgggaaattctttagtcgaagttctgactatattgcacaccagagggttcacactggtgaaaggccttttgtgtgcagtaaatgtgggaaagactttatcagaacctcccaccttgttcgacaccaaagagttcacactggagaaaggccatatgagtgcagtgaatgtgggaaggcctacagcttaagctcccacctcaatcggcaccagaaagttcacactgcaggcaggctttaggagtgctttgaatacaacaggactcatcaatcagatgttgaatttcatgtatctgaacattgacacaaaggagataccttatggtgccaggtacgtgggaaccttctagggatatgttgcactttctgacttgctcaggttttttgccagagttatgtcactgtcaatccatgtggccgaaaccatcttaactctaccagctaagataccccagcattggggaaggcagggttttgtattgtccagtccctggagaaaatcatgaaatgcctgagttcattgggggtcctcattcccttctgtatgacaggtataggtatggatatgacccatttttagccaagagggtctgagctgtatctgctggtggcttatacaaaaagtttactttcttcatggatattcttggtctcacatacttgtaatcaagtttttccagcctccaa

SEQ ID NO: 3783 - DNA, 442 bp, Homo sapiens
  MAP TO AL009178.4; EXPRESSED IN BONE MARROW, SIGNAL = 1.6; EXPRESSED IN LUNG, SIGNAL = 1.7; EXPRESSED IN PLACENTA, SIGNAL = 1.6; EXPRESSED IN FETAL LIVER, SIGNAL = 1.9; EXPRESSED IN HEART, SIGNAL = 1.7; EXPRESSED IN HELA, SIGNAL = 1.6; EXPRESSED IN HBL100, SIGNAL = 1.6; EXPRESSED IN ADULT LIVER, SIGNAL = 2.7; EXPRESSED IN BT474, SIGNAL = 1.6; EXPRESSED IN BRAIN, SIGNAL = 1.8
tatgatgcaaaaacctccccgtccctactgcttgggggtccccagctctatttctctgaagtgaaatggagctcagtgtccttgcttttttggcatgggttctcagctttcagtcattttgcttttctctacacttctggtgccaaaatctgtgtcagtcagagttcaatgagagaaacagagccagtaggaagcacacactgactcagcacagagagctggcctgggcaacaagaggtgaggtgagtccggcatcttagggcagacaccaggctgagtaggctgaagcagccgtctgccaggagcttttcctcacctgagaggcccctggtctccccagaaggccttttggctgaatcaggaccacccaggttatctgttataatttttttacttaaagtcaactgattatggactttaatcacattggcttccttcacag

SEQ ID NO: 3784 - DNA, 1979 bp, Homo sapiens
  MAP TO AL035685.17; EXPRESSED IN HELA, SIGNAL = 1.3; EXPRESSED IN PLACENTA, SIGNAL = 1.2; EXPRESSED IN FETAL LIVER, SIGNAL = 1.5; EXPRESSED IN BRAIN, SIGNAL =   3; EXPRESSED IN LUNG, SIGNAL = 1.3; EXPRESSED IN BONE MARROW, SIGNAL = 1.3; EXPRESSED IN HEART, SIGNAL = 1.6; EXPRESSED IN HBL100, SIGNAL = 1.2; EXPRESSED IN ADULT LIVER, SIGNAL = 1.4; EXPRESSED IN BT474, SIGNAL = 1.2
accctgggcttgctgatagctttaaaacatttcatttctctgggccttggtttccacatctagacaataaatggattacaacaaattctctttttggctcattaaatgactagtgaaatgtgaaaatgctcttgaacattgaggagtgccctgtagatccaggatattatgatgatcatcctgtggggtggttgataactaaatcccactctcttctcctcacagatccttgccataatttccatcatgttcatcgtcctctccaccattgccctgtccctcaacacgctgcctgagctacagagcctcgatgagttcggccagtccacagacaacccccagctggcccacgtggaggccgtgtgcatcgcatggttcaccatggagtacctgctgaggttcctctcctcgcccaagaagtggaagttcttcaagggcccactcaatgccattgacttgttggccattctgccatactatgtcaccattttcctcaccgaatccaacaagagcgtgctgcaattccagaatgtccgccgcgtggtccagatcttccgcatcatgcgaattctccgcatccttaagcttgcacgccactccactggcctccagtctctgggcttcactttgcggaggagctacaatgagttgggcttgctcatcctcttccttgccatgggcattatgatcttctccagccttgtcttctttgctgagaaggatgaggacgacaccaagttcaaaagcatcccagcctctttctggtgggccaccatcaccatgactactgttgggtatggagacatctaccccaagactctcctggggaaaattgttgggggactctgctgcattgcaggagtcctggtgattgctcttcccatccccatcatcgtcaataacttctctgagttctataaggagcagaagagacaggagaaagcaatcaaacggcgagaggctctggagagagccaagaggaatggcagcatcgtatccatgaacatgaaggatgcttttgcccggagcattgagatgatggacattgtggttgagaaaaatggggagaatatgggtaagaaagacaaagtacaagataaccacttgtctcctaacaaatggaaatggacaaagaggacactgtctgaaaccagctcaagtaagtcctttgaaaccaaggaacagggatcccctgaaaaagccagatcgtcttctagtcctcagcacctgaacgttcagcagttggaagacatgtacaataagatggccaagacccaatcccaacccatcctcaataccaaggagtcagcagcacagagcaaaccaaaggaagaacttgaaatggagagtatccccagccccgtagcccctctgcccactcgcacagaaggggtcattgacatgcgaagtatgtcaagcattgatagtttcattagctgtgccacagacttccctgaggccaccagattctcccacagccctttgacatcactccccagcaagactgggggcagcacagccccagaagtgggctggcggggagctctgggtgccagtggtggtaggtttgtggaggccaaccccagccctgatgccagccagcactctagtttcttcatcgagagccccaagagttccatgaaaactaacaaccctttgaagctccgagcacttaaagtcaacttcatggagggtgaccccagtccactcctccccgttctagggatgtaccatgaccctctcaggaaccgggggagtgctgcggctgctgtcgctggactggagtgtgccacgcttttggacaaggctgtgctgagcccagagtcctccatctacaccacagcaagtgctaagacacccccccggtctcctgagaaacacacagcaatagcgttcaactttgaggcgggtgtccaccagtacattgacgcagacacagatgatgagggacagctgctctacagtgtggactccagccc

SEQ ID NO: 3785 - DNA, 449 bp, Homo sapiens
  MAP TO AC007444.1; EXPRESSED IN PLACENTA, SIGNAL = 1.5; EXPRESSED IN ADULT LIVER, SIGNAL = 1.4; EXPRESSED IN BRAIN, SIGNAL = 1.1; EXPRESSED IN HEART, SIGNAL = 1.3; EXPRESSED IN FETAL LIVER, SIGNAL = 1.3; EXPRESSED IN BT474, SIGNAL = 1.2; EXPRESSED IN LUNG, SIGNAL = 1.5; EXPRESSED IN BONE MARROW, SIGNAL = 1.3; EXPRESSED IN HBL100, SIGNAL = 1.2
cttttccttcctgtttccccactggcaccctgatgtgaagaagcttttgctggcttctcatgctgtcagacagaacagcagaggagcagggcggtttaaagctgccataggtactgcttctctgagtggccctttatgttggaggttggaaggaataagtcaaaggacagctcaaaagaatcataagtagcccccaaatgtccccagaagagcccacccttgagagaacaggtgcctgggagtcctgtgcccaccagtcacgtggcttctgcatgaccagatgtcccaccccaattgggctttctgcaggagccaaagagcctggaccttcaggcctgatggtcttcatcaggtaagaggctggctacttgcaacaggtgggaggagcagacatagggggcagcacagggtcacgactggcagcacagaggtggagagagaccaacctg

SEQ ID NO: 3786 - DNA, 469 bp, Homo sapiens
  MAP TO AJ011929.1; EXPRESSED IN PLACENTA, SIGNAL = 2.7; EXPRESSED IN HBL100, SIGNAL = 2.7; EXPRESSED IN HEART, SIGNAL = 2.3; EXPRESSED IN ADULT LIVER, SIGNAL = 3.8; EXPRESSED IN LUNG, SIGNAL = 3.3; EXPRESSED IN BRAIN, SIGNAL = 2.5; EXPRESSED IN HELA, SIGNAL = 2.9; EXPRESSED IN BT474, SIGNAL = 2.5; EXPRESSED IN FETAL LIVER, SIGNAL = 2.8; EXPRESSED IN BONE MARROW, SIGNAL = 2.5
ctagtgaaggcaaagcagggtggagctgtcaatctgggtcagcccagctcagtctttgcacgtcactgccgttcctccttaggtgcagtgttttagttacagtaactttttaagaagaaccatcttcatgcttctggagatgatgtggtttgacaggaagcatcctgatgtgattacaggtcctgagcactgtagtgtcacacctgtgaccaggagcaagtgtgtaacctccctcatcttccctttcctcagctgtggagaatcaaatttctgcattaatgtcctggtctcaaaacaatagaaacttgttctcataattctgcaggccagagttcaaaaagcaaggcgacagcagaaacactgtccctccggaggctctgggggaggatccttccttccctcttcttagtgtctgatggctgctggcatttcttgacccttggccgcatgactccaatctctcccctcc

SEQ ID NO: 3787 - DNA, 1957 bp, Homo sapiens
  MAP TO AC005731.2; EXPRESSED IN PLACENTA, SIGNAL = 1.4; EXPRESSED IN ADULT LIVER, SIGNAL = 1.4; EXPRESSED IN BT474, SIGNAL = 0.91; EXPRESSED IN FETAL LIVER, SIGNAL = 1.1; EXPRESSED IN LUNG, SIGNAL = 0.94; EXPRESSED IN BONE MARROW, SIGNAL = 1.3; EXPRESSED IN BRAIN, SIGNAL = 1.1; EXPRESSED IN HEART, SIGNAL = 0.99
aaggcctgatttgtttgcagggaatgacagcatcacatagaaggcactggcactctggcagctggaaagcctttccttttgaattatacttgaggtgtgcttacattcctttcaggatcagagactattacctttgcctcctggtgagaggttgagtgatgattcccacaaaggattttggaaacaggtttccctcattggcatccctgccaacccactggaacatctctctgtgaataattcttttcttcctggccaaactagagaatattttcagagaaggagtcgaaatgagcttaaataagtagactgcagctggtttgtatctggctatttaggtcatttgaatattatggatagtgggtatgtgcaggtgtgtgtgtatgagtgtgtgtatttgtatatgtgtgaacagtcacttgacatccaaagcttttagtactagtctctgtactcagggttctcttgaatccttcccaagtgtaaaaatcattcttgctgctgtttctcaatctgcagcctgagccaccctcaaccaacaagtggcaactggataaatggcttaacaaagtgacatcccagaacaagtcttttatttgtggccaaaatgaaacacccatggagactatttctctgcctcctccaatcatccaaccaatggaagtccagatgaaagtgaagacgaatgccagtcaggtcccagctgaacccaaagaaaggcctctcctcagtctcattagggagaaagcccgtccacggcccactcagaaaattccagaaacaaaggctttgaagcataagttgtcaacaactagtgagacagtgtctcaaaggacaattgggaaaaaacagcccaaaaaagttgagaagaacaccagcactgacgagtttacctggcccaaaccaaatattaccagcagcactcccaaagaaaaagaaagtgtggagcttcatgacccaccaagaggccgcaacaaagccactgcccacaaaccagcccctaggaaagaaccaagacctaacatccctttggctcccgagaagaagaagtacagagggcctggcaagattgtgccaaagtctcgggaattcattgaaacagattcatctacatctgactccaacacagatcaggaagagaccctgcaaatcaaagtcctgcctccgtgcattatttctggaggtaatactgccaaatccaaggaaatctgtggtgccagcctgaccctcagcaccttaatgagtagcagtggcagcaacaacaacttatccatcagtaatgaagagccaacattttcacctattcctgtcatgcaaactgaaatcctgtcccctctgcgagatcatgagaacctgaaaaacctctgggtgaagattgaccttgacttactctctagagtacctggccacagctcactccatgcagcacctgccaagccagaccacaaggagactgccacaaaacccaagcgtcagacagctgtcacagctgtggagaaaccagcccctaagggcaaacgtaagcacaaggtaagctgtctaaagtggcctgccaagtgcttgtgagcagtgtctgtttgttgtctaacttgatcttgagcctcatcttcaaggaagccaatggcagtgcattgcagattttggcaaaggtgatgatgctttctgtgggaaatgcagtatttgacatgaccagagaggaaaaactaggaatgatctgtagccagtggcaagagtgtccattatggcatatgagggcttatgatgtgtaggaaagaaaaatatgaagaaagtctccttacttaggcaaggcacgcaagtgccctcaatgtccaaatgcatcttctagggctttttaatttctctggacaaacattagcatctccacagtccagttatactctaagtctcctgggtcctaccaaccacatgttcttcccagcctgctgggatcactgat

SEQ ID NO: 3788 - DNA, 1975 bp, Homo sapiens
  MAP TO AC000015.2; EXPRESSED IN PLACENTA, SIGNAL = 2.9; EXPRESSED IN ADULT LIVER, SIGNAL = 1.8; EXPRESSED IN BRAIN, SIGNAL = 1.4; EXPRESSED IN HEART, SIGNAL = 1.9; EXPRESSED IN HELA, SIGNAL = 2.5; EXPRESSED IN HBL100, SIGNAL =   2; EXPRESSED IN BT474, SIGNAL = 2.5; EXPRESSED IN FETAL LIVER, SIGNAL = 1.9; EXPRESSED IN LUNG, SIGNAL = 2.6; EXPRESSED IN BONE MARROW, SIGNAL = 2.4
tccaattgggacagtcatttctatgtttgtcagcagaatttggatcatcagcatctagatggatgtcatttttttcttttcttgtattttcattctgtttctctgggtcattctttctgtaccgatcatttcctcgtggacatctccaaccatcatttgcccatcttcccttccaccggggagagtaactatctctgtcaattctaccaaatgatgaactcttactttttgttctacatcttgagggggacctagaatgagatctggacctagaccactttctggttctcctttctctctctctcctctgcccatctctatcactttctcgttctctgctctgggacctggatttttctcctggggaagaatctttcactcttggctgagatcttttgttctctctagaagtttctcttcttggggacagtgattcagatcttctgctttccctagtagtatccctttttggagaccgagactgagattgcctcctttctcttgcaatatccttttttggggactgagaacgggattttttccggcctctggctgactcattcttaggagatggtgattgagacttcctgctttctttcccagtttctcttctgggagatggagactggggccgcttcttttcttgtggagtgtctttgttgggtgaccaagttgtagatggagaatgaaatctagatcttcgagtacgaggctttttggttttatctatggtatcttttgggctttcagatggttgagaaacagtttcaaccttttcatccgcaagatcagaagacggcatattattttcagaacagtgtgtcacagaattttcattcatttgtttaagatcagcatttacagatggttcaacttcagattcattttggtcactgcaaaatgaatcacactccataggtatcatttcattgttgtcctcactaaaatgcttctgaatctgttcaatgtgtgttttaggcaactctgtagatctaggatgttcggtcagcgattcattcttttcttctaaagatttttccaatttggtgttcagaagattattttttagtaagttattttcagagtcttgaatattattgaaatcttcattcccaaaagtatcacatgttgcaattatttctacatcttcagtttcaacatgcccaagcaattgaacctctgggctcttaacagattgtctgtccactgtctgtataatttcaccctcagaagattctaacttggggctctctataagctcctctgtttttagtgtaaaatctttatgttcagtaatttctactagggaactctctgttattttttcttcattaaccactgactctacattctcagataagtcacttaggggacaagatacaggttggtacactttgctttcagatgttaaacatgtaggaaaatcatttggaagatgaactgtacatacatctgtctttacctctgattgtgaaagtccagatatctggtcttgcttttccaatggatcacctcctttttcaagaatattttcagaaatctcactttccaaacacaaaacattagcctctatacctgtattctcgagttttttaacttccccttcctcaccaactagcacaggaagatcttgagcacaagactcagaagatgaagatcctactctttcctctgtatcataatttgcagtatgcttctcactttcttctatttgctcattgcaacttttcaagcaattagcagactggttttctacatgagtctgcacagtacaaatgttactactgtctacatctggttggtgctctttttctaacacaggtgatgtgtcagattctgctgtttcttcatctactgaatcattggaagatgatttttcaggggcagctacagagctccgaagtttctttttcagtaaaggtggttttcttcctcttcttacagacttccgttttggagcctgtcttgtttgctt

SEQ ID NO: 3789 - DNA, 412 bp, Homo sapiens
  MAP TO AL121588.14; EXPRESSED IN BRAIN, SIGNAL = 1.5; EXPRESSED IN BONE MARROW, SIGNAL = 1.5; EXPRESSED IN HBL100, SIGNAL = 1.6; EXPRESSED IN PLACENTA, SIGNAL = 1.6; EXPRESSED IN HEART, SIGNAL = 1.3; EXPRESSED IN LUNG, SIGNAL = 1.4; EXPRESSED IN HELA, SIGNAL = 1.7; EXPRESSED IN ADULT LIVER, SIGNAL = 1.8; EXPRESSED IN BT474, SIGNAL = 1.7; EXPRESSED IN FETAL LIVER, SIGNAL = 2.1
atggatggagtgaaaggcactgggggtatagggtggcagtgagaagattgctaggacactaggcacaagaggtgtccactacacgccatccacagttgtataattgattctttcatgagtctctttcttactagaatgtaaactctgggaaaggtcttcttcttaatatacccttatttcctcccacccacccccagcacagtacctggcacataacaggggccacaaatatttaagtacttaatctagcagcatggcttaaaggagccggcacccagggtgctggggtactggaggtggcgtgggcatgacatcagagctgagctggctggagtctgtgtgtaacgatggagatgagagtctgtggagacccttgaaagatccaaataatcacagaaaaggcttgaaccgg

SEQ ID NO: 3790 - DNA, 476 bp, Homo sapiens
  MAP TO AC007245.3; EXPRESSED IN HELA, SIGNAL = 0.8; EXPRESSED IN BRAIN, SIGNAL = 0.74; EXPRESSED IN HEART, SIGNAL = 0.82; EXPRESSED IN BT474, SIGNAL = 0.6; EXPRESSED IN FETAL LIVER, SIGNAL = 1.1; EXPRESSED IN LUNG, SIGNAL = 0.89; EXPRESSED IN ADULT LIVER, SIGNAL = 0.73; EXPRESSED IN PLACENTA, SIGNAL = 0.77; EXPRESSED IN BONE MARROW, SIGNAL = 0.73
aacttccttctattagcacagacagttgtaaactaactatatttcagaggacctacccacaggtcattatggcacctaccaccagtatcctctgacagagaatgtaatgacagttactataagaaaggaagaaatatggagtgtgagggagtggtgagcaaaaaggcttggggaagcaaggcgactctccatcaaaccataaccatgatcacaggaggggagcttcttcaatggggaggatgaacacagcatcatcaagttcagaacgatcaacactgaaaacggcttctgctggcccgtgctttcatggtcattgcaaacacactttaacttgcaaagtatgaggaagggaagtagagaaaagagcaagaagagtaaacccaaaaccaaaagaaagagcttcatccagggaaaccataaaatgtatcctgtaaacctgaacagttctgagtgcaacgtgggcactggtaacaatt

SEQ ID NO: 3791 - DNA, 430 bp, Homo sapiens
  MAP TO AC009819.2; EXPRESSED IN PLACENTA, SIGNAL = 2.4; EXPRESSED IN HELA, SIGNAL = 2.7; EXPRESSED IN HEART, SIGNAL = 2.4; EXPRESSED IN ADULT LIVER, SIGNAL = 2.8; EXPRESSED IN FETAL LIVER, SIGNAL = 2.7; EXPRESSED IN BRAIN, SIGNAL = 2.5; EXPRESSED IN BT474, SIGNAL = 2.2; EXPRESSED IN LUNG, SIGNAL = 2.3; EXPRESSED IN BONE MARROW, SIGNAL = 2.3; EXPRESSED IN HBL100, SIGNAL = 2.4
ggggcctgatgctttctatgccttttaaaataataataaccatcatcgtcatcataagtagcgtgtattgagtgcttactatgtgccaggcattgtgattttaaaaaatatacattatctccctaactggctaaaatgttgagtctctgctgcataggaaaatgactcctttgaggttgtctattctttacaatgattcccaaacactgagtgatatctaagagaggtggtccagctccaggtcagagcttaacttccaagaacttccctaagttcccactatcaccagcagcagtaaccaccaccactccaagcctcctctctctgattagactcccaaaaggagacaacagaggatagtgaaaggagaccagtgggaggtgggagagaaggaactggaactgaaaagcccagctcttggggagataaa

SEQ ID NO: 3792 - DNA, 470 bp, Homo sapiens
  MAP TO AL035691.17; EXPRESSED IN HEART, SIGNAL = 1.1
tgaaagaaattgccagggagagaacaaaagagaaaataggctcttagtattaactgtctatcagtgtgtaataaattaccctcaaatccagtggtgtaacacaacaaccatcatttattaattctcactagtgagaattaatggggtcaggaatttagacagggtccagtcggaatggctcatttctgttttaagacttctgggccctcagctttaagacttgaaggatggaaactggtatcatctgaaagattttcacttgcacatttgatggttggtgctggctgtcagctgagaccttagctggaatgcctgcatatagcctccacatgtggccggagtttcttcagctgtggtagctgggttccaagtcaagcaaaaggagagagaaggaagagtaagcgaggtggaagctacatccttcttatgactcattcttggatcacaggacaccaattttgccattgtga

SEQ ID NO: 3793 - DNA, 1967 bp, Homo sapiens
  MAP TO AC002431.1; EXPRESSED IN LUNG, SIGNAL = 4.3; EXPRESSED IN BONE MARROW, SIGNAL = 3.3; EXPRESSED IN HELA, SIGNAL = 5.4; EXPRESSED IN PLACENTA, SIGNAL = 7.8; EXPRESSED IN BT474, SIGNAL = 7.2; EXPRESSED IN ADULT LIVER, SIGNAL = 3.7; EXPRESSED IN BRAIN, SIGNAL = 3.9; EXPRESSED IN HEART, SIGNAL = 3.5; EXPRESSED IN HBL100, SIGNAL = 5.3; EXPRESSED IN FETAL LIVER, SIGNAL = 5.6
caggcacccacctgagacgtggccagggctgaaacggcacagcctgcaggtgccacagttaaatctatggatggttttggtggcagctgaggggaggatgacttaggaaggttctcctcattgatcaccctgttcccttgtggcaaactggaaggagtcgaagccacagttttgttatcaactttggcccctgtgttcgaggccctgctgctgtctataataaccttgagttgggggtgtggtggagaaggagtttgggagagccctggcttttttggagggataggaggaggatttcctctgtcaactcgtgctacaccatgagtctttaaactggtccgaccaactggagggtgggtgccaacatcccctgttgggggcactccaggccttgagggagcacctgcttgagggcttgtaaatcttgacagtgcttgggtcacagtattccgagctagttgtttggccactaggttgtcacgacttgtaggcgagacatctcttgacggaggactttgggtagtatttccattttggtctgggtcgttagcattgccctgaaatctaaatctagctgcttggattcgtgggtttagacctggatgcaaagaggtgttggcacatggtgaatgtaaactgtgcataggtggagcttgcgagttctgaggagctatgcctggtgtttgagcggtgggaggggcagcgttactgggaagtgggggtgtgctactggttggatctggtgttgagccagtgcttggtccattttcctcaattttgtttgcacttggaggtgggaaagcgggtacagaagcgccaatcaagtcaccataggaagcctgcctgtcaatacctggtctggccatggtggcactggtgcacacgctcccttttgcatttgcagaaactaggggactccctgtggaaggttttacaggcatggttaaaggcaactttttcatgtggtcagcattttctgtcactaggtctgtctggcatgcaacagaccttgtcacagttccttctgttcccacagatatggaaaccaaacgcctatcttttgtcttccgtggaagagagaggcttggtttgctgtcacttccccttttcagttgctcaatcattttcctcatcttgtctatctcctctttgaggtcagtggtgtgtgcttcttcccggttcagcttggcacgaagctgttcccgctcagtgtcaaactcagagagttgtttttccatctgagcttccatttctgtgcttcttcgtttctcagcggagagttcctcttctaattcattcgtctttttcttttcctcttccagtttggccattacgtcttcgagcttctgggcctcctctatgactttgcctgagagctgcttgcactctttgaccagcatcaggaccacctgcttgttcttgccacgctcttcctcaaggcgggcagccagcttcttgtgctcttgctcaagggcttgtagctgaagcttctccatttccagctgaaagaaattcacaggaaaaccctgattaatatacagaattttcttttcaccaaggaaatgctttttgtgagatttttattaattttctaacaattacataactcgggttagcaaaaacgccacattttcaaaaagtgttgtgataagaaatattttaaagacacattaaaatgagaaaatagacgtaaatggctttataaagacatctaaattacaacaatagagaatttttaaagtctattgaagttaactacagaaaaagagaacaataaccagatgctttaaatcacagcacagggatcagaaaggtctatttttgtaaaaacacagctctgtgatggaattggtgatatttttaaaaaaggtttaatgctttaaaattattaatctctgaggtaaagtatcatgaaaagtactgaaaaccgaggacttcagttaaattctaagcccccatgtttgcta

SEQ ID NO: 3794 - DNA, 466 bp, Homo sapiens
  MAP TO AC009886.2; EXPRESSED IN BONE MARROW, SIGNAL = 4.2; EXPRESSED IN HBL100, SIGNAL = 4.8; EXPRESSED IN HELA, SIGNAL = 5.8; EXPRESSED IN ADULT LIVER, SIGNAL = 6.6; EXPRESSED IN BRAIN, SIGNAL =   5; EXPRESSED IN LUNG, SIGNAL = 7.1; EXPRESSED IN PLACENTA, SIGNAL = 5.8; EXPRESSED IN HEART, SIGNAL =   5; EXPRESSED IN BT474, SIGNAL = 5.2; EXPRESSED IN FETAL LIVER, SIGNAL = 5.4
  unsure 32
tatttcttggctgctctgggcttcagcactangggagttactataagagtagggaacaaattcactcagtagacccagaggactcagccctttatccccaccctcaatcatatactatttatatagagttgagatgtaaaatgtataagcaacagctgtggaagctatcaaatgttctaaggaaaatgtactcaccgcttttttttaacccccaaattaatctgttacaataatagattaacatagatgttcataaattaacacttcttaccttctcactatgaaggagggcatgcatggcagcctccctacagagtgctgtcaggtcggcaccaacatagccaactgtcatttctgcaagaaggcccaaatcaacatgactggagatgggcatcttcgaggtaatcacttgcagaatttcctttctttgtttaagtgtgggagtcccaatgaccacctatatgca

SEQ ID NO: 3795 - DNA, 380 bp, Homo sapiens
  MAP TO AC007016.5; EXPRESSED IN FETAL LIVER, SIGNAL = 1.8; EXPRESSED IN ADULT LIVER, SIGNAL = 0.97; EXPRESSED IN LUNG, SIGNAL = 1.1; EXPRESSED IN PLACENTA, SIGNAL = 1.6; EXPRESSED IN HBL100, SIGNAL = 2.4; EXPRESSED IN HEART, SIGNAL = 1.3
aaggtggaagaatgcacacacaaaagtttgaacagtgggaatccttgaggaattgggttcaaaggaagggatctgtgtgtggggactcccacattttactttgtgtaattctatatcatttttggttttacgacaaacatattttttataattttcaaaaattacaaacatgtgttggattccgatggaactagactctctactcttcacattttggggatcacaggagagatgatggtgggtatcagaaggtcttgaaccataaggcctggccctggtacttttttacctaaggcatccccaagtgccttaggatagatatcggcacccaaggggattctcattattaaagacaatttgaacacctcaactgtttccca

SEQ ID NO: 3796 - DNA, 479 bp, Homo sapiens
  MAP TO AC007035.2; EXPRESSED IN PLACENTA, SIGNAL = 0.94; EXPRESSED IN BT474, SIGNAL = 1.1; EXPRESSED IN BONE MARROW, SIGNAL = 1.4; EXPRESSED IN HBL100, SIGNAL = 0.93; EXPRESSED IN FETAL LIVER, SIGNAL = 1.2; EXPRESSED IN HEART, SIGNAL = 1.3; EXPRESSED IN LUNG, SIGNAL = 1.5; EXPRESSED IN HELA, SIGNAL = 1.3; EXPRESSED IN ADULT LIVER, SIGNAL =   1; EXPRESSED IN BRAIN, SIGNAL = 1.5
tttatcttagccagatcttccggatatcttgctgcactgtctacatcaccacttgttgcttcctgttgcacttttatgttaggaagatagtttcttctcttaaacctcaagaaccaacctctgctagcttcaaacttattttctgcagattcctcatttctctcagctttcgtagacttgaagagagttgtggctttgctctggataggagaatcttgtggctggctttgtcttctatccagaccactaaaatagcaatgaggctgtttcattttcttattgtttgttggttcactgaagtcgaacttttaattttcttcaagaacttttcctttgcattcacaacttggctaactgtttcatgcaaaatgtctagctttaagcctatcatggcttttgacatgccttcctcactaagcttagtaatttccaccttttgatttaaagtgagagacatgtgactcttcttttcacctgga

SEQ ID NO: 3797 - DNA, 376 bp, Homo sapiens
  MAP TO AC007221.1; EXPRESSED IN PLACENTA, SIGNAL = 2.7; EXPRESSED IN HBL100, SIGNAL =   3; EXPRESSED IN HEART, SIGNAL = 3.4; EXPRESSED IN BT474, SIGNAL =   3; EXPRESSED IN FETAL LIVER, SIGNAL = 3.1; EXPRESSED IN ADULT LIVER, SIGNAL = 3.7; EXPRESSED IN LUNG, SIGNAL = 3.3; EXPRESSED IN BONE MARROW, SIGNAL = 2.7; EXPRESSED IN BRAIN, SIGNAL = 2.7; EXPRESSED IN HELA, SIGNAL = 3.3
atgtcctgggatgacagaggcaaagattaaagtggagcatctacaagccaaggaacaccaaggattgctagaggtcaccaaaatctaagagagaggcatggaacagattctctcggtgcctccagaaggatcaatcctgccgacacctagatttcagacttctaatctccagaactgtgagagaatcaatttctgttgttgtgagccactcagtttgcagtaatagtatccctaggaaactcacacacctctgtggatgctggccttgtcctgggctcctccacatgtctcacagccacacacaaggccatcaactcagacatggtggccaggattctcctagtcttgcaaactgaggctgcaggtcagagaatct

SEQ ID NO: 3798 - DNA, 411 bp, Homo sapiens
  MAP TO AC007029.2; EXPRESSED IN BRAIN, SIGNAL =  26; EXPRESSED IN HELA, SIGNAL =  41; EXPRESSED IN PLACENTA, SIGNAL =  40; EXPRESSED IN HBL100, SIGNAL =  29; EXPRESSED IN HEART, SIGNAL =  28; EXPRESSED IN BT474, SIGNAL =  28; EXPRESSED IN FETAL LIVER, SIGNAL =  39; EXPRESSED IN ADULT LIVER, SIGNAL =  46; EXPRESSED IN BONE MARROW, SIGNAL =  32; EXPRESSED IN LUNG, SIGNAL =  45
gcctcagagccaaaattcaggaagcagctccctaacttcttctccaggttagacattgagtttatatctaactccatctactaaattttttctgctcaaaaaaagagtggttttggtttctactatactgtactttgactgatacgcgttttaaaaagactcctacatcgtccaaaggaattccttcttaccttgcagagttaacctggcaatccacaagtatggcagtaaccctgggcaacatagtgagaccccatctctacaaaaaaagaaaaaaaatcagttagcagggcatggtgatgctcacctgaagtcccagctactagggagactgaggtgagaaggtcacttgagcccaggtgtttgaggacacagtgagatgcaatggtaccactgtactccagcctgggt

SEQ ID NO: 3799 - DNA, 1955 bp, Homo sapiens
  MAP TO AC003002.1; EXPRESSED IN HEART, SIGNAL = 2.5; EXPRESSED IN ADULT LIVER, SIGNAL =   2; EXPRESSED IN FETAL LIVER, SIGNAL = 2.5; EXPRESSED IN LUNG, SIGNAL = 2.5; EXPRESSED IN BRAIN, SIGNAL = 2.2; EXPRESSED IN HBL100, SIGNAL = 2.5; EXPRESSED IN HELA, SIGNAL = 2.5; EXPRESSED IN PLACENTA, SIGNAL = 3.2; EXPRESSED IN BT474, SIGNAL = 2.8; EXPRESSED IN BONE MARROW, SIGNAL = 2.3
cagccctgcatagtggaccctcctctcactggccttaatgtccatgatgtccccaatcccatggccttatttgtgtgtgtgcctgacacacatttgtgatggagctgcttcctcccaccagagtcaacatgcacttctccagcatttctgttctgacaggttcttggcatggagctgaggatgaggaggcaccttcacagcaaggtttttctgtaggagtgtcagaggttacagcttcaaagccctgtctgtccagccagaaggtccaccctagtgagacatgtggcccacccttgaaagacattctgtgcctggttgagcacaatggaattcatcctgagcaacacatatatatttgtgaggcagagctttttcagcacccaaagcagcaaattggagaaaatctttccagaggggatgattggataccttcatttgggaagaaccacagagttcacatggcagaggagatcttcacatgcatggagggctggaaggacttaccagccacctcatgccttctccagcaccagggccctcaaagcgagtggaagccatacagggacacagaggacagagaagcctttcagactggacaaaatgattacaaatgtagtgaatgtgggaaaaccttcacctgcagctattcatttgttgagcaccagaaaatccacacaggagaaaggtcttatgaatgtaacaaatgtgggaaattctttaagtacagtgccaatttcatgaaacatcagacagttcacactagtgaaaggacttatgagtgcagagaatgtggaaaatcctttatgtacaactaccgactcatgagacataagcgagttcacactggagaaaggccttatgagtgcaacacatgtgggaaattctttcggtacagctccacatttgttagacatcagagagttcacaccggagaaaggccgtatgagtgcagggaatgtgggaaattctttatggacagctccacactcattaaacatcagagagttcacaccggagaaagaccttataagtgcaatgattgtgggaaattttttaggtatatctccacactcattagacatcagagaattcacactggagaaaggccttatgagtgcagtgtatgtggggaattgtttaggtacaactccagccttgttaaacattggagaaatcacactggagaaaggccttataaatgcagtgaatgtgggaaatcatttaggtaccactgcaggctcattagacaccagagagtccacacgggagaaaggccttatgagtgcagcgaatgcgggaaattctttcgttacaactccaacctcattaaacattggagaaatcacactggagaaaggccttacgagtgcagagagtgtgggaaagcctttagccacaagcatatacttgttgagcaccagaaaatccacagtggagaaagaccttatgagtgcagcgaatgccagaaggcctttattagaaagtctcacctggttcatcaccagaaaatccacagtgaagagaggcttgtgtgctccatgaatgtggggaattctttagctaaaactccaacctcattaaacatcagagatttcacaatggagaaagtttaccattgactattgtaattgggtagtaatgttatataaattccacatttttatgcaactaatctccagaacatttttcctcttaccaagaagtaaaatgctgtacccattaacaacaactcattccccttccctacttccccagaaatgtctcaactatatttctatactctatggtacttatatgaggtaccaatagatatctatgaatttgatatatatttgtacctcatataagtggattctacagtatttatcttttgagactggcttatttcacttaggataaggtcttcacggttcacccatgttgtataatgtgtcagaatatccttcctttttagg

SEQ ID NO: 3800 - DNA, 458 bp, Homo sapiens
  MAP TO AP000065.1; EXPRESSED IN BONE MARROW, SIGNAL = 4.6; EXPRESSED IN LUNG, SIGNAL = 4.1; EXPRESSED IN PLACENTA, SIGNAL = 3.8; EXPRESSED IN HELA, SIGNAL = 5.2; EXPRESSED IN HEART, SIGNAL = 4.8; EXPRESSED IN HBL100, SIGNAL = 5.1; EXPRESSED IN FETAL LIVER, SIGNAL = 4.3; EXPRESSED IN BT474, SIGNAL = 4.6; EXPRESSED IN ADULT LIVER, SIGNAL = 5.1; EXPRESSED IN BRAIN, SIGNAL = 3.7
ttggcaactttactgcaagtttaaaattagttcaaaatagaaagttttaaaaaaccatatatatatatatatatatatatatatataaataaataaaacggctggagcttataggaaggaacagaatttcttgcacattctggatgaatctagacagagatgggggtgaggcagtggcaacagactgagatgtacacctaattctagactgacaaggctaatgatggcagttcaaagtaaccctgcatccatatgatctccaatactttacatacctcgatcatgtagggctaacaaaacccgttcatacaagcaggctctgtagaggtctccaggaataggttttcctgcccagcagtcaagttccagcttctcggggtcaggggcgtgcggatcaggctcagctagaatataccgatagccatctttgttaaacgggtgttccaatgggtagccat

SEQ ID NO: 3801 - DNA, 378 bp, Homo sapiens
  MAP TO AP000556.2; EXPRESSED IN BT474, SIGNAL = 1.6; EXPRESSED IN FETAL LIVER, SIGNAL = 2.3; EXPRESSED IN BRAIN, SIGNAL = 1.4; EXPRESSED IN BONE MARROW, SIGNAL = 2.6; EXPRESSED IN HBL100, SIGNAL = 2.1; EXPRESSED IN PLACENTA, SIGNAL = 3.1; EXPRESSED IN LUNG, SIGNAL = 2.1; EXPRESSED IN HEART, SIGNAL = 2.2; EXPRESSED IN HELA, SIGNAL = 2.3; EXPRESSED IN ADULT LIVER, SIGNAL = 1.8
gtggttggaattagatgcccagagcaagaatttattggcacaggtgggcagacagaggtgaccaaaggacaggtgtaggtcagcaggtggctgctagcacctacctcactctctggaacccgattcccttcatcctaaaggggatctcagaacgttccacacaccccctccgcctccaccctggccctcacccaggctcaccgcacagccaggtagcctggacacacatctccatgaaccacttgaagggtgtggcctccatcttgccccccatgatcatcaccatctcatccgtcagcttgatgtcgggttcccagccgagattgccgcccggcgagctttcaaacatgaagccaaagtctgcaaaaccccaaagag

SEQ ID NO: 3802 - DNA, 1999 bp, Homo sapiens
  MAP TO AB019441.1; EXPRESSED IN HEART, SIGNAL = 6.1; EXPRESSED IN HBL100, SIGNAL =  20; EXPRESSED IN BT474, SIGNAL =  13; EXPRESSED IN FETAL LIVER, SIGNAL =  17; EXPRESSED IN ADULT LIVER, SIGNAL = 3.9; EXPRESSED IN BRAIN, SIGNAL = 4.2; EXPRESSED IN BONE MARROW, SIGNAL =  14; EXPRESSED IN LUNG, SIGNAL =  31; EXPRESSED IN PLACENTA, SIGNAL =  18; EXPRESSED IN HELA, SIGNAL =  15
ggagggaatcaaagaagccatagtaaaatatcaaaatttaaaccccgattttgaatttaaaaagtgttaaaatatggttgtggcctacactcagaaaatctgtgtccttcagatggtttctcagtggcaccagatggtttcaagtggctattcattaagtttctcagtgaaattaccagacatagaataaataaattgtcactgtcttaaatcaacccatgggaaaggaaaactgtgtaaatacagcagagaggaaacattgctcaagggaaaaacaatctccagaaagtattgttaaagaaacagaggccctctttccagccagcgccgagcgatgggcacctctcgggacaactggcacaagggccgcaaagctgggggcaagagaaggccctgccacaagaagcggaagtatgagttggggcgcccagctgccaacagcaagactgacccgtgccgcatccacacagtccgtgtgcgaggaggtaacaagaaatactgtgccccgaggctggacgtggggaatttctcctggggctcagaatgctgcgctggtgaaacaagggtcatcgatgttgtctacaatgcatccaataacgagctggttcgtaccaagaccgtggtgaagaattgcatcgtgcccatcgacagcacgccctaccgacagtggtacgagtcccactgtgcactgcccctgggccgcaagaagggagccaagctgactcctgaggaagaagagattttaaacaaaaaacgatctaaaaaaattcagaagaaatatgatgaaaggaagaagaatgccaaaatgagcagtctcctgggggagcagttccagcagggcaagcttcttgcgtgcatggcttcaaggccgggacagtgtggccgagcagatggctatgtgctagagggcaaagagttggagttctatcttaggaaaatcaaggcccagaaaggcaaataaatccttgttttgtcttcacccatgtaataaaggtgtttattgttttgttcccaaaaaaaaaaaagaaagaaaaagaaacagaggcatcacacttactagaaaaacatattctatttcatatattatggggatatgacgtgatgttttgacatatgcgggcattgtgaaattattaaatcaagtaaataaacatgtccatcacctcacatacttattttttatggtgtaaacgtgtaaaatctactctcttatcagttttcaagtatatagtacattagtatcatggaagtcaccatgctgtgcaatagatcttcaaacgaattccttctatctaaccaaaactctgtaccctttcaccaacgtctcagctttcacatgcccctgacgccagcccctggtaggcaccattctactctctactctgagttcaacatttttagattgcatgtgtaagtgagatcatggagtaattttttatacctggcttatttcactcaacataaagagtcaaatgctcaacatcactaatcatcagggaaatgcaaattaaaaccacgataagatatcacctcacacatgttacaatggcttagtctcagtctgtctttttgttactataaccgaataccagagactgggcaatttctaaagaaaaggaatttatgctttatggtgcttgagtcagagaagtctaatatcaaggcactggcatctcacaagggccttctcactgcctcatctcacagcagaggtgggtgagcaagagaccatttgtccacgagagaaaagagaccatcttttattagaaattcactcctataataactaacccactccattgatagtgacagtaatccattcatgaggacagagccttcatgacttgatcacataataaaggtcccacctctcaacactgttgcattaaagattatttccagatcctaaactttgggagacacatttaaaccatagcattccattcctaatatcaaaatttatgtccttatcacaatgcaaattacattcattccatcc

SEQ ID NO: 3803 - DNA, 475 bp, Homo sapiens
  MAP TO AC006387.3; EXPRESSED IN PLACENTA, SIGNAL = 0.74; EXPRESSED IN BONE MARROW, SIGNAL = 0.69; EXPRESSED IN BT474, SIGNAL = 0.62; EXPRESSED IN FETAL LIVER, SIGNAL = 0.73; EXPRESSED IN LUNG, SIGNAL = 0.65; EXPRESSED IN HEART, SIGNAL = 0.96
tctcctaagaaaaagggcattcttctaggtaatataacactgaaggaatttaacatcgatacgatactattatctcatacagagtttagagtcagatttcctccactgtcctatcatgtttttttctctctctcttttaaattcaagctaattcaaggattttttattgcatttaattgtcatgactcagtttttcttgcctttcataaattgactccctgaagtttttgaaatttgctttttcagagttttgaaggttattcctaaccataagacagttccctataccgcctgttatgcattcatagatggcattagcacagctgctgtttgttcagtatgccccaccgacgtccatgaaatctttgcattgacatttactattgctttcaaggactacttgaaagcaattacttgttctaataagtaattatttcttataatagaaggattttcttttctcatgtagttaacc

SEQ ID NO: 3804 - DNA, 427 bp, Homo sapiens
  MAP TO AC009965.3; EXPRESSED IN FETAL LIVER, SIGNAL = 5.6; EXPRESSED IN BONE MARROW, SIGNAL = 4.9; EXPRESSED IN HBL100, SIGNAL = 5.1; EXPRESSED IN BT474, SIGNAL = 5.1; EXPRESSED IN ADULT LIVER, SIGNAL = 6.8; EXPRESSED IN BRAIN, SIGNAL = 4.4; EXPRESSED IN LUNG, SIGNAL = 5.9; EXPRESSED IN PLACENTA, SIGNAL = 4.6; EXPRESSED IN HEART, SIGNAL = 4.3; EXPRESSED IN HELA, SIGNAL = 5.6
ttttaccagaccatcctgggaagtattacacttctcaccctgaatttgatttctagcaaataatattatctactacattacaccttgagtttcacgagaaagtcacattgaaatggaggctttgggtggggtgtggatggagaatcccctatgcacccttccttccactcccaacctgggtttctatatttaggtttccccaccttcttctctaagcctcctgttctgaaactccataccccttcttgagaaagttcccatttctagattttttaggttctttattaggctagtgggccatatgccaagtctgagtctgacagtcatgagcagagctttagactccagcccactgggcagctgaagcttattattcttagtaatgcaggtgctggggtggaggaaaacagggagtgtgggcattagt

SEQ ID NO: 3805 - DNA, 393 bp, Homo sapiens
  MAP TO AC006317.3; EXPRESSED IN BT474, SIGNAL = 0.78; EXPRESSED IN BONE MARROW, SIGNAL = 0.75; EXPRESSED IN BRAIN, SIGNAL = 0.79; EXPRESSED IN PLACENTA, SIGNAL = 0.85; EXPRESSED IN HEART, SIGNAL = 0.79; EXPRESSED IN ADULT LIVER, SIGNAL = 0.66; EXPRESSED IN LUNG, SIGNAL = 0.94; EXPRESSED IN FETAL LIVER, SIGNAL = 0.68
aaattgcctgctttgtgtccagagatcctcttcactcaattatctttcaatgtgttgggttccaaagccttgctgaggtcctaatgatatttatcacctctttccaacgccctctaatgttcttttaaatagagtaggcaggctttaagatttcaaacactttgtcctttaagtgttcgacagttggtggcatttaaaatcctgacttcatattccataatcagaaaggtttccttcctatagtgcatttgagccttttgctatgatgaaggcaaaaatctcaccatttacacaagatcatcactaccttaagacacagagctacattctcatttggattgtaaacagtagtgtgttggtaatacttaacaaccagctccttgggaaaagaag

SEQ ID NO: 3806 - DNA, 477 bp, Homo sapiens
  MAP TO AC007746.1; EXPRESSED IN HEART, SIGNAL = 0.8; EXPRESSED IN PLACENTA, SIGNAL = 0.68; EXPRESSED IN BONE MARROW, SIGNAL = 0.71; EXPRESSED IN FETAL LIVER, SIGNAL = 0.9; EXPRESSED IN LUNG, SIGNAL = 0.68
aaaacacggcaacaaactcctctccattctcactgaagccatctacccatgtactttctttccttcaggacacccatcaatttacagctgttcccccagaccctccacctcacccataatgctgtagccacctacatacaacctccaatttattttctcttgcctcaggactgctcagtaatgattttacttattcctccacagctttcgtttacatctcccatggcagtgattccggattttatgctgctatcaaactgcatgtcctacagcaccccactctcagttgcatgcagtacttgaacacatcagccatgattttgcttaaagtccccaccattacccctagatttcttgacagaaaccagcagactaaagcttcatccctccccaacttctcccaatacctcacgtcattagatcactttactgtttgtttgcttgggcttctcccatcctcagacatcatcgctgctc

SEQ ID NO: 3807 - DNA, 349 bp, Homo sapiens
  MAP TO AC010807.2; EXPRESSED IN PLACENTA, SIGNAL = 1.3; EXPRESSED IN HELA, SIGNAL = 1.8; EXPRESSED IN HEART, SIGNAL = 1.4; EXPRESSED IN ADULT LIVER, SIGNAL = 1.7; EXPRESSED IN FETAL LIVER, SIGNAL = 1.8; EXPRESSED IN HBL100, SIGNAL = 1.5; EXPRESSED IN BT474, SIGNAL = 1.8; EXPRESSED IN BRAIN, SIGNAL = 1.3; EXPRESSED IN LUNG, SIGNAL = 1.7; EXPRESSED IN BONE MARROW, SIGNAL = 1.4
gtgctatgggctctgaatgcaattttttaaaatgccaaaaacctttttgaaaaaggttctgagcaaaaaggttctaaataacacacattaggcatcatcagccccatgtttaaactggacaatatcataaaatctgtgtgagaaatcaccattttccttatcttcccaccctaggttctgaccttttcgccataggcagccgccagcactgtttttgtgacatactgttcaaaaagcaagatgaggagaatccagaggaatttctctgcacccagtgtatcaacaagttgaacaaggatgggcaggcgcctgtgctccgggacgtgtggcagcgcatccacaaatacac

SEQ ID NO: 3808 - DNA, 455 bp, Homo sapiens
  MAP TO AB016897.1; EXPRESSED IN LUNG, SIGNAL = 0.67; EXPRESSED IN BRAIN, SIGNAL = 0.97; EXPRESSED IN PLACENTA, SIGNAL = 0.59; EXPRESSED IN ADULT LIVER, SIGNAL = 0.85; EXPRESSED IN HEART, SIGNAL = 0.83
ggaggattctgctctttattccattaggaactagaaacagaagaaactactccagtgctactgaatctccaagcagaatttactactgaaaaggtacgcatcatcactgatacagtgtcagagttctacaacacggctagcctgaagagccaatttttatctctcagtgagattgattttccatttttcttgtcatactctattcacagtctactctcctatttcccataaactacaataagaaaacacagtaagttagaatcattgagcattctttagtcttttttcttataagcagacactgtaccgcacaacacagcagagctctgataacattttaatatgcgccgatgccagatattcaggctgcctacccaaaagtgaaagttttagttgcttgtttggaagtatcggaatagccgacttgaactaagaggaaaatgctggaaatgcat

SEQ ID NO: 3809 - DNA, 448 bp, Homo sapiens
  MAP TO AC009307.1; EXPRESSED IN ADULT LIVER, SIGNAL = 0.68; EXPRESSED IN BT474, SIGNAL = 0.66; EXPRESSED IN HELA, SIGNAL = 0.78; EXPRESSED IN HEART, SIGNAL = 0.83; EXPRESSED IN PLACENTA, SIGNAL = 0.63; EXPRESSED IN BONE MARROW, SIGNAL = 0.69; EXPRESSED IN HBL100, SIGNAL = 0.71; EXPRESSED IN FETAL LIVER, SIGNAL = 0.74; EXPRESSED IN LUNG, SIGNAL = 0.81; EXPRESSED IN BRAIN, SIGNAL = 0.74
tcaaaaggctcaaaatagtccctccaccatgtaaagtcaatctctccctttcagaatactcaatggaagttcaagattctaaaaaaaaattaaaaaaaaataaacaaactactccctcaagtccaagtccaccattgtctactccctatcccacagtgcccaccctgctggtaaggactgccatctcatttctgttaccctctgaattctagaaccttccacatgctatcacagtcatcctttccccacagcacatacactattgtcacctacgtccttgtccatgtcccccagcagactcaactcctgggtgtctctggcatctctggcatctgtacaaagatgctatctctgaagtcaggagtagcccacagtcctgttgcacatggtcagaaggctggcatgtcagaccacatgcaaggggcctctaacaatcccacaacaggct

SEQ ID NO: 3810 - DNA, 457 bp, Homo sapiens
  MAP TO AC007720.1; EXPRESSED IN PLACENTA, SIGNAL = 0.63; EXPRESSED IN BONE MARROW, SIGNAL = 0.74; EXPRESSED IN FETAL LIVER, SIGNAL = 0.59; EXPRESSED IN LUNG, SIGNAL = 0.78; EXPRESSED IN ADULT LIVER, SIGNAL = 0.72; EXPRESSED IN BT474, SIGNAL = 0.64; EXPRESSED IN HBL100, SIGNAL = 1.6; EXPRESSED IN HELA, SIGNAL = 0.69; EXPRESSED IN BRAIN, SIGNAL = 0.95; EXPRESSED IN HEART, SIGNAL = 0.82
ttcaatccaatctgatttccagaataaatgagaaagtatacataataggcaaaactatcatgacagacgcaataacttagcttaaaattcagatgttattaagtgataattattaaaaagtgggctttggcattatagacacagagaataataagtctttaaccaaacaaccacaaacagaaattccaaactgtctttggtacctagtctccaacaatgatctctagtgaactacatctcccagtatatcctcccgtagtaccctgtctcactgaatgtggaagaggtggttgtttgccagttctgggctgtgcctttgagacaactgtcagcatccttttctttgctcttgggagaccccttttcataagccatgatagaggaagtctggctccccttctggaaataccacgtggagcgcccacatcaatggaagccctgagactgcgtgaatgaa

SEQ ID NO: 3811 - DNA, 407 bp, Homo sapiens
  MAP TO AC010812.2; EXPRESSED IN BRAIN, SIGNAL = 1.7; EXPRESSED IN BONE MARROW, SIGNAL = 1.7; EXPRESSED IN LUNG, SIGNAL = 2.4; EXPRESSED IN HBL100, SIGNAL = 1.7; EXPRESSED IN HEART, SIGNAL =   2; EXPRESSED IN PLACENTA, SIGNAL = 1.7; EXPRESSED IN HELA, SIGNAL =   2; EXPRESSED IN ADULT LIVER, SIGNAL =   2; EXPRESSED IN BT474, SIGNAL = 1.8; EXPRESSED IN FETAL LIVER, SIGNAL = 2.1
agtttcttgcttcctggtgcccagagcagcctctggcatgagctgtttgaacactggctgagtctcacgggcctgtgtcgtgcagagtattctaaaaggcaaggggaaggtggggtgaggaattttttttatcaaggctggaagaaacatgggcttctgtattctagtcctgaattggatggggaggatggggaaggtgacatgtaccatccatgtggagccccttctcccacctcggaggatgaagagtatcttaccatcaactctacatgccaaggccagctaccctgtgaagaatgtttggaggcagattctgggaccattcccttgccacagttctgctcttggggcactgtcccagagtctttgcctccagaagagtccccagagagtgggagtgaatggga

SEQ ID NO: 3812 - DNA, 436 bp, Homo sapiens
  MAP TO AC007052.4; EXPRESSED IN HELA, SIGNAL = 1.1; EXPRESSED IN PLACENTA, SIGNAL = 1.1; EXPRESSED IN HBL100, SIGNAL = 0.91; EXPRESSED IN HEART, SIGNAL = 1.1; EXPRESSED IN FETAL LIVER, SIGNAL = 1.1; EXPRESSED IN ADULT LIVER, SIGNAL = 1.1; EXPRESSED IN LUNG, SIGNAL = 1.1; EXPRESSED IN BONE MARROW, SIGNAL =   1
ccgaaattcatccttaccaagaggctaaagacttgcttaaaattttaagctgttcttcaccacattttatggggaaaattatatacaataatgacatgtacagatttcatgatcactgacatcttgagtacattcctctcaagattatgtaactttaatgtaatttacatgaaggacaaatagttctaaaagaaaagatagctgcatgaagcagatgaaagggaggcccagaatcctcctggttaagatttgggcttgaggctagacagccttggatctagcctggttctaccacttaggaagagtgaaagacactggctgtggtcatcaacaagatgccccaagtgatgaagcagggagaatttgccaggcttccaatgggctggaaaaaatctctctcaagcctatcatcctcagctgtgactccacactcacc

SEQ ID NO: 3813 - DNA, 1963 bp, Homo sapiens
  MAP TO AC004099.1; EXPRESSED IN PLACENTA, SIGNAL = 1.9; EXPRESSED IN FETAL LIVER, SIGNAL =   1; EXPRESSED IN ADULT LIVER, SIGNAL = 1.2; EXPRESSED IN BONE MARROW, SIGNAL = 1.3; EXPRESSED IN LUNG, SIGNAL = 1.3; EXPRESSED IN BRAIN, SIGNAL = 1.3; EXPRESSED IN HEART, SIGNAL =   1; EXPRESSED IN HELA, SIGNAL = 0.98; EXPRESSED IN HBL100, SIGNAL = 0.97; EXPRESSED IN BT474, SIGNAL = 2.4
atgtgcctctaacaccaagctggtgctagatttcaaaaataaaaatatcttagctacccaatctaagttccacagtagccatagtatccatatcaagtatccatagaatcaaatttaacactgctttaaggagactggcaataaagaggttgattattagagattcataaagctaaagggccagagccttactcatgtaaatcaacacccgcagaatcatctttgaaatctacaacaccatcaccagagcaatctcaccaattcctcacctgcagcaggaggatgctggccactaactgttggtaaatccaaagagctatcagacatgacatgcttaagatctcctcccacatcagccaatttcatgtcaaactgaacagagagtgcatcttcagagtcctccttgccaacactgctgccaccaatggaagggagatctaaggacttcactgatgcagagtcttctttggtgtgtctgaaagccactgctttctctcccagggatttgtccgagtttatggaagaaaatttactggagtggaagtcagcaaaatcatcatcactttttcctgaaggagtgttatctttcaggtcttcaacacctagtccagacccttccagagaaagttgtctgaagacatcgtacttggtagacgcagcagtcgagttttgtccacccttcactgtgctgcccacgttgctggttagaggaacaggactggcttcctctttaagggcatcatatttgtcatccggcttttgctcagatgaaatagagctattactgaaagccataaaatctgcaaagtcatcctgctccccaacaggtgctagaccagaatattccccaaaaaggctgaattctccaaaatcatcagccaaactagaagtttttgttgctgccaatgctgtcatagtagcagcagaacctgttgactgtggtgtagaaactgattttgatgtgctaaacacagctgaaaaagacaatggtttctcgctgctgcaattaactgaggaaaacatatctaggtctgctaagttcagagggtttttcacttgtgtttgttgtttctgttgtatagttcctgaggggaaggatggtggaaaagttttgtcttttgttggtggctctagtggtgatacactatcggctgttttaaaatcggtgaaaccatcatcagttcctgcagatctgaattctgcaaagctttctcctgaaagaaaaaataccaccaaacaaatgggaatgctgaactgaaaaccatataatacacagtatattaaactgcaagcataattttactgacttttctccactgacttgacattacttaataatgtttacatactttaaaccctatcgaactacacatttatttccacactgaagtctagtgatactgaaataaatagaaatcgaactgaaagtacctgacggtaccattttcatttgctcatgcttttagtgtgggatctctcttagctctagatcctacaactggctaaaagtactcctctcaagactttttgttcccacagctagccagccaagcagacaatacaataagaaatagggctagaggttcttgaagagaggcatattaaaacagtggccctttaaagataaacatgttacccattaaaaaaatcagaggtaccaataaagtattatgaaaaatcctacatctaatattcaggatgtacaacacttggtttagccaggcactttaagaataacattagatactatgtggtcttgctcaagtaaatgaaggcattaatttgaagggaactttgatgaaaatttttgaaaaggtatctatttatttgcaaagcattctaggtggggcacattgtaaagcagctcctccctatagtctctaataagctgaatctcacagaaaaaaagtccttgagcacttgagcttttctagaaatcagctgtctcactgtatcaatgagc

SEQ ID NO: 3814 - DNA, 1959 bp, Homo sapiens
  MAP TO AC000382.1; EXPRESSED IN LUNG, SIGNAL = 1.9; EXPRESSED IN PLACENTA, SIGNAL = 2.8; EXPRESSED IN HEART, SIGNAL = 1.9; EXPRESSED IN BT474, SIGNAL = 1.6; EXPRESSED IN ADULT LIVER, SIGNAL = 1.8; EXPRESSED IN BRAIN, SIGNAL = 1.1
gacagacgttcagaccccagcagcagtgttctggaatcctatgtgaggtacaaacattcagacaccagcagaagtgttctggaatcctatgtgagggacaaacattcagaccctcgtagcactgttctggaatcctatgtgaggtacaaacattcagaccacagcaacaatgctcatgaatcctatgtgagggacaaacattcagaccctcgtagcagtgttctggaatcttatgtgagggacaaacattcaaaccacagcagcagtgttctggaatcctacgtgaaggacaaactttcagaccacagcaggagagttctggaatcctatgtgagggacaaactttcagaccaaagcaggagtgttcttaaatcctatatgaagaacaaacattcagaccccaggagcactgttctgaaatcctatgataagggcaaacattcagaccccaacatgaatgttctggaatcctatgtgagggacaaacattcagaccctcgtagcactgttctggaatcctatgtgaggtacaaacattcagaccacgacaacaatgctcaggaatcctatgtgagggacaaacattcagaccctcgtagcactgttctggaatcctatgtgaggtacaaacattcagaccacagcaacaatgctcaggaatcctatgtgagggacaaacattcagaccctcgtagcagtgttctggaatcttatgtgagggacaaacattcaaaccacagcagcagtgttctggaatcctacgtgaaggacaaactttcagaccacagcaggagagttctggaatcctatgtgagggacaaactttcagaccaaagcaggagtgttcttaaatcctatatgaagaacaaacattcagaccccaggagcactgttctgaaatcctatgataagggcaaacattcagaccccaacatgaatgttctggaatcctatgtgagggacaagcattaagaccatagcaggagtattctggaatcctatgtgagggacaaacattcagacccttgtagaagtgttctggaatcctatgtgattaaaaaacattgagaccacagcaggagtgctctggaatcctatgtgagggacaaacattcagaccccagaaggagtgttctggaatcctatgtaaaggacaaacattcagaccctcgtagcagtgttctggaatcctatgtgagggaaaaacattcagaccacagcaggagtgctcgggaatcctatgtgagggacaaacattcagaaccttgtagcagtgttctggactcctatgtgagggacaaacattcagaccctcccagcagtcttctgggattctatgtgagggacagacattcaaaccccagcagcagtgttctggaatccgatgtgagggaaaaacattcagaccccagcagcagtcttctggaatcctatgtgagggacaaactttcagacactcatagcagtgttctggaatcctatgtgagggacaaacattcagaccctcatagcagtgttctggaatcctatgtgaggtacaaacattcagaccctcatagcagtgttctggaatactatgtgagggacaaccattcagaccatggcagttctgaaatgctatgtgaaggacaaacattcagaccctcgtagcagtgttctggaatcctatgtgaaggacagacatttagaccctcgaagcagtgttctgcagtcttaagtgaggaacaaaaattcagaccctcgtaacagtgttctggaatccttttttgagggacagacattgagaccccagcagcagtggtctggaatcccatgtgagggacaaacattcacaccccagcaacagtgttctgtaatcttatgtgagggacaagcattcagaccccagcagcagtgttctggaatcttatgtgagggacaaacattgagaccctcatagcagtgtgctggaatcctacg

SEQ ID NO: 3815 - DNA, 1962 bp, Homo sapiens
  MAP TO AC002081.1; EXPRESSED IN ADULT LIVER, SIGNAL = 3.5; EXPRESSED IN BRAIN, SIGNAL = 3.2; EXPRESSED IN BONE MARROW, SIGNAL = 1.8; EXPRESSED IN PLACENTA, SIGNAL = 3.9; EXPRESSED IN HELA, SIGNAL = 2.9; EXPRESSED IN HBL100, SIGNAL =   2; EXPRESSED IN BT474, SIGNAL = 2.1; EXPRESSED IN FETAL LIVER, SIGNAL = 2.9; EXPRESSED IN LUNG, SIGNAL = 3.2; EXPRESSED IN HEART, SIGNAL = 2.4
gaactcagtccccacttcccagtgcagcgacccctgtgcccccaatgaaatgaagaatatgcaaccaggggatgtctgctgctggatttgcatcccctgtgaaccctacgaatacctggctgatgagtttacctgtatggattgtgggtctggacagtggcccactgcagacctaactggatgctatgaccttcctgaggactacatcaggtgggaagacgcctgggccattggcccagtcaccattgcctgtctgggttttatgtgtacatgcatggttgtaactgtttttatcaagcacaacaacacacccttggtcaaagcatcgggccgagaactctgctacatcttattgtttggggttggcctgtcatactgcatgacattcttcttcattgccaagccatcaccagtcatctgtgcattgcgccgactcgggctggggagttccttcgctatctgttactcagccctgctgaccaagacaaactgcattgcccgcatcttcgatggggtcaagaatggcgctcagaggccaaaattcatcagccccagttctcaggttttcatctgcctgggtctgatcctggtgcaaattgtgatggtgtctgtgtggctcatcctggaggccccaggcaccaggaggtatacccttgcagagaagcgggaaacagtcatcctaaaatgcaatgtcaaagattccagcatgttgatctctcttacctacgatgtgatcctggtgatcttatgcactgtgtacgccttcaaaacgcggaagtgcccagaaaatttcaacgaagctaagttcataggttttaccatgtacaccacgtgcatcatctggttggccttcctccctatattttatgtgacatcaagtgactacagagtaagtctttgattgtttcttatttttcttgttctttctcctccagtgtttcttgtgtagtatttaaaatagactccttttatttcatctcaacgagttgggtaatttcaaatgccatgatgagcctgtatattgtatgttaaaattaattatgtatgtagatagcatttaattagtacctaccacatgcagagcactgtgctaggcacagaggggaagagaaatataaatgatacggtcatttacccaatttataatctagtgggagataaaatgtaatacacgtacacataatgttaattaaacttaaaaagcgattgacaatagaataagacataaactaagaatctaattgtgaatctatttgagaatactttaaattagatataggaggactcggctaccatggatcaatctgtaaattaaaatacacttgcaatattaagccaggataagtttaaagatagaaactttcactcatgcttcattatttctctaaaacagattaaaatacaatgttaatttgctatgtcttttctatagctttagttatatgtacatatatatttttctttaactagttaaaaattttactgtacatatccaggtaacctaattaacatataatagggtattagtaatatacagttcaaatttatgggctcccttataattaccatctcttttgaaagaaacttcttcattccattataatattccaaactgttaaaatgctacataaaatgtagcattttataattctgatttcagtatcttacaatgagtgagtataagaatgtttctctcttcaggtatttgttttttattctctatgtttcttaaattgtcagagattaaagttttccagaagcataatggtttacttgctgcaccatgatttcacaaaatgaagtgcctccatcagttgtaaaaatcctcaaatctgctgtttaccagcaattcctacatcgccaaaatctagaaaattgcagcccaaaaagaagacagagtagatacaaaatttcagttagataggaagaataattcaagaggtctgttgtataacatggtga

SEQ ID NO: 3816 - DNA, 1950 bp, Homo sapiens
  MAP TO AC005185.1; EXPRESSED IN PLACENTA, SIGNAL = 2.3; EXPRESSED IN HELA, SIGNAL = 1.9; EXPRESSED IN HEART, SIGNAL = 1.8; EXPRESSED IN HBL100, SIGNAL = 1.9; EXPRESSED IN BT474, SIGNAL = 1.7; EXPRESSED IN FETAL LIVER, SIGNAL = 2.2; EXPRESSED IN ADULT LIVER, SIGNAL = 2.6; EXPRESSED IN BRAIN, SIGNAL = 1.8; EXPRESSED IN BONE MARROW, SIGNAL = 1.8; EXPRESSED IN LUNG, SIGNAL = 2.4
ctccacccaccaccactgctgctgcagctgtgtcatgtaccgaatctgacgaaggtgccaaatgccaaggtgaggaaaatgcaagtttctcccaggccacaacatccactgagagctcagtcaaagatcctgtagcctgggaggcaggaatgctgatgcacttcattctacgtaagtataaaatgagagagcccattatgaaggcagatatgctgaaggttgttgatgaaaagtacaaggatcacttcactgagatcctcaatggagcctctcgccgcttggagctcgtctttggccttgatttgaaggaagacaaccctagtggccacacctacaccctcgtcagtaagctaaacctcaccaatgatggaaacctgagcaatgattgggactttcccaggaatgggcttctgatgcctctcctgggtgtgatcttcttaaagggcaactctgccaccgaggaagagatctggaaattcatgaatgtgttgggagcctatgatggagaggagcacttaatctatggggaaccccgtaagttcatcacccaagatctggtgcaggaaaaatatctgaagtacgagcaggtgcccaacagtgatcccccacgctatcaattcctatggggtccgagagcctatgctgaaaccaccaagatgaaagtcctcgagtttttggccaagatgaatggtgccactccccgtgacttcccatcccattatgaagaggctttgagagatgaggaagagagagcccaagtccgatccagtgttagagccaggcgtcgcactactgccacgacttttagagcgcgttctagagccccattcagcaggtcctcccaccccatgtgagaactcaggcagattgttcactttgtttttgtggcaagatgccaaccttttgaagtagtgagcagccaagatatggctagagagatcatcatatatatctcctttgtgttcctgttaaacattagtatctttcaagtgtttttcttttaatagaatgtttatttagagttgggatctatgtctatgagcgacatggatcacacatttattggtgctgccagctttaagcatatgagttttgatattctatatttttcaaatccttgaatcttttttgggttgaagaagaagaaagcatagctttagaatagagattttctcagaaatgtgtgaaagaacctcacacaacataattggagtcttaaaatagaggaagagtaagcaaagcatgtcaagtttttgttttctgcattcagttttgtttttgtaaaatccaaagatacatacctggttgtttttagccttttcaagaatgcagataaaataaatagtaataaattatattacttgttcagtggctcatttattctcaccataaattgagcatctgctctttgtaaggctctgtgatagtagtgattgtactaagttaaagaagacccttcgcctgcacacagatttttagtctaaggacagttattatttaaagaagatggtgagatacactctaacatgtacagatttttttttttttacatataaacactcatttaaaaaaaaaagaagtgagaatggtgggagaaggttcagacaagagcagtcaagtgttaatttcctagccaaggcacttcgtggtgtgggacaatgcaagtccctcgttgggaggtcattttaagttagctccatggtgaactggatgaggttgtgataatcataagaaggtgccaaaccctcagatcatgagccttagagttgagagattaagcctggaaagggaaactgcccttaacagttactttgggattgtgggtaaagcagagagaacctgtgtctggaggaggagtggaagaatacagtgctctcgtcccagggcagtcaaacacagtgcacaaactagttgttttatgcacattgtctccagaaagtgtttgagaaa

SEQ ID NO: 3817 - DNA, 484 bp, Homo sapiens
  MAP TO AC009296.1; EXPRESSED IN ADULT LIVER, SIGNAL = 0.91; EXPRESSED IN PLACENTA, SIGNAL = 0.78; EXPRESSED IN BT474, SIGNAL = 0.83; EXPRESSED IN HBL100, SIGNAL =   3; EXPRESSED IN LUNG, SIGNAL = 0.74; EXPRESSED IN HELA, SIGNAL =   1; EXPRESSED IN BRAIN, SIGNAL = 0.87; EXPRESSED IN HEART, SIGNAL = 0.87; EXPRESSED IN BONE MARROW, SIGNAL = 0.88; EXPRESSED IN FETAL LIVER, SIGNAL = 0.7
caggccccaagagctttaccctaaagcttatcggttagagttcaccatggtaacgtaaattgatagcttatcttcacaggtgcagagacataggacagaactcaaagacatccctctgcccacctgagacaaatgcatatctgattgtttcctctgccctattgtttccattatcttatgtaaaaatgcagattcactgagccagacaaaggcatgaatgactgttttcccctactgccctctcacatgaaaattgtgtatttctcaatatcccacccttccccatttaaatattgaagctctcaaagtcatctttagagaaaggcatagacatgtctttcagcacatccttaactttgacaaataaacctcctaaaatgattgagactttcttggtcattttcgttgattgacagtacctatgagtcacgtgggaaacctgttaaaatgaaaattctgattcagtagatttgagggagggcct

SEQ ID NO: 3818 - DNA, 408 bp, Homo sapiens
  MAP TO AC009974.3; EXPRESSED IN BT474, SIGNAL = 5.6; EXPRESSED IN FETAL LIVER, SIGNAL =   7; EXPRESSED IN BONE MARROW, SIGNAL = 5.2; EXPRESSED IN PLACENTA, SIGNAL = 6.7; EXPRESSED IN HBL100, SIGNAL = 4.9; EXPRESSED IN HELA, SIGNAL = 6.5; EXPRESSED IN ADULT LIVER, SIGNAL = 7.1; EXPRESSED IN BRAIN, SIGNAL = 4.8; EXPRESSED IN LUNG, SIGNAL = 8.1; EXPRESSED IN HEART, SIGNAL = 5.1
caaggatgagatgggagaggtaggggagaaggagtggggcactttgtacccccatgaatccagagcagactccagacattcttttccctgcagtctctaccctgtggtccccacaaactcccggatcatagaaaaggaaattgaagttgatggcttcctcttccccaagaacgtgagtgggctagagagcccgattgcccaggagtgccctatgcccccgaagagaggcattcatgctgcccaatcttcctttatagacccagtttgtgttctgccactatgtggtgtcccgggaccccactgccttctctgagcctgaaagcttccagccccaccgctggctgagaaacagccagcctgctacccccaggatccagcacccatttggctctgtgccctttggctatg

SEQ ID NO: 3819 - DNA, 413 bp, Homo sapiens
  MAP TO AC010825.2; EXPRESSED IN FETAL LIVER, SIGNAL = 1.4; EXPRESSED IN BONE MARROW, SIGNAL = 1.1; EXPRESSED IN PLACENTA, SIGNAL = 0.99; EXPRESSED IN HBL100, SIGNAL = 1.1; EXPRESSED IN BT474, SIGNAL = 1.1; EXPRESSED IN ADULT LIVER, SIGNAL = 1.3; EXPRESSED IN BRAIN, SIGNAL = 1.1; EXPRESSED IN LUNG, SIGNAL = 1.3; EXPRESSED IN HEART, SIGNAL = 1.8; EXPRESSED IN HELA, SIGNAL = 1.3
ttgctcgttcattttccctctcaccatgctggctccccttcacttccctttcaccttccaccatgaattgtggcagcctgaacccctcaccagaagctaaacagatgccagagctatgctcttgtacagtctgcagagccataggccaaaaaacctctcttctttataaataactcagtctcaagtattcctttatagaaacatgaatgaactaagacagttcacatggtgctaattctgcaggcacacggactgcaagagctgtggggcatgtcagcttctaccaaggtttcaaaagtgtttcaaacagtctggggcctcaggcagagacttgtcacaggggtggagccattgcagagagcccctgtgaagacaatgtctagtgaagttgtggcagtagggaagtccgtgaa

SEQ ID NO: 3820 - DNA, 473 bp, Homo sapiens
  MAP TO AC005674.9; EXPRESSED IN FETAL LIVER, SIGNAL =   1; EXPRESSED IN HELA, SIGNAL = 1.3; EXPRESSED IN BRAIN, SIGNAL = 1.2; EXPRESSED IN HEART, SIGNAL = 0.87; EXPRESSED IN PLACENTA, SIGNAL = 0.97; EXPRESSED IN BONE MARROW, SIGNAL = 1.1; EXPRESSED IN BT474, SIGNAL = 1.2; EXPRESSED IN ADULT LIVER, SIGNAL = 0.9; EXPRESSED IN LUNG, SIGNAL = 1.2; EXPRESSED IN HBL100, SIGNAL = 0.87
gactccaggagccagaagcgttcttggtctactctgaaatcatgtaggcacctgtcagggtagggggaggccagcgtgtagtcctgcacagctgaactgctgcctgccactgactcacttgccttttgtcaaacaggtgaacgcccagctgcagccatgaagatctgtagcctcaccctgctctccttcctcctactggctgctcaggtgctcctggtggaggggaaaaaaaaagtgaagaatggacttcacagcaaagtggtctcagaacaaaaggacactctgggcaacacccagattaagcagaaaagcaggcccgggaacaaaggcaagtttgtcaccaaagaccaagccaactgcagatgggctgctactgagcaggaggagggcatctctctcaaggttgagtgcactcaattggaccatgaattttcctgtgtctttgctggcaatccaacctcatgcctaaagct

SEQ ID NO: 3821 - DNA, 472 bp, Homo sapiens
  MAP TO AC005497.2; EXPRESSED IN BT474, SIGNAL = 0.93; EXPRESSED IN BONE MARROW, SIGNAL =   1; EXPRESSED IN HBL100, SIGNAL = 0.7; EXPRESSED IN LUNG, SIGNAL = 0.93; EXPRESSED IN BRAIN, SIGNAL = 0.72; EXPRESSED IN PLACENTA, SIGNAL = 1.1; EXPRESSED IN FETAL LIVER, SIGNAL = 0.71; EXPRESSED IN ADULT LIVER, SIGNAL = 0.92; EXPRESSED IN HEART, SIGNAL = 1.3
gaatgtgaggacgcagaggcagcttcctcagggactccctgttgccaggctgccatctctcccagcaaaaacaatcttgctgttttttatgcccacttgaagtaccagagacataacaaagagtgcatcagtgtgtcgaagctgcaaacaaacggatcatctgctcttagagtggctctgtaaattcttttctctcctttatcaactttcctctctgtggtggaaccttcctatcagcactgaaacatgttcaagtccctcttatctttaaaagtaaaaataaaacataaaaaatctacccttggtcccactccctcctccagggactgctccacttcctcatccccttcaaaaggcttgaacctgctctctacattcaccgtgtgccttcctcatgcctcatgcatatttcaaaccacctcaacacagatggcttccaaatcttcatcctctgacctcatgagaaccatgc

SEQ ID NO: 3822 - DNA, 474 bp, Homo sapiens
  MAP TO AP000337.1; EXPRESSED IN LUNG, SIGNAL = 0.87; EXPRESSED IN BRAIN, SIGNAL = 0.74; EXPRESSED IN HEART, SIGNAL =   1; EXPRESSED IN PLACENTA, SIGNAL = 0.65; EXPRESSED IN BT474, SIGNAL = 0.83; EXPRESSED IN BONE MARROW, SIGNAL = 0.96; EXPRESSED IN ADULT LIVER, SIGNAL = 1.5; EXPRESSED IN HELA, SIGNAL = 0.97; EXPRESSED IN FETAL LIVER, SIGNAL = 1.7; EXPRESSED IN HBL100, SIGNAL = 0.82
aagctgggtagagagcatgggttgctgtcaggcccatgaacagcgtccatcaccttggctaccttgtccatgtgcccatcatgccagtagtacagtagccaataaaagatgctgtccaatatcaactggctgagtcaactgtctacttggttgtataatgcttctttcatggatgctctctggtgggcattaacattgtatacaaagaacattgtacttcgtgctattccaatttatctgaccacataaatctaccacacacctccttatctccaacttccgattgttttccttccaggcccttaaccagttacccaggccctctagcattgcccatggctccatgtatattctcaccttgggctacttcttccacaaaaaagtggacgaccaggagctctgcctgaaattctgcctattgagaggatatgcccttatcaccatttttcaaggtcacccctgagaaggctgtaa

SEQ ID NO: 3823 - DNA, 362 bp, Homo sapiens
  MAP TO AL121959.4; EXPRESSED IN BT474, SIGNAL =   1; EXPRESSED IN BONE MARROW, SIGNAL = 0.93; EXPRESSED IN BRAIN, SIGNAL = 0.96; EXPRESSED IN HBL100, SIGNAL = 1.2; EXPRESSED IN HEART, SIGNAL =   1; EXPRESSED IN ADULT LIVER, SIGNAL = 1.3
acagccacgtaatggtctccttccctccagtcctgctccctggacgttaccgttcacagtgcaaccagagtgatggttccgaaatatagatctgaatgcagtctctaaaaacaattcagagctttaccctgtcctcagaagaaatcagaaattctttaatcagtcctacctgcagccatggcagtgtctagcggtagtaccgctctgccaaaaggccccttgaaggggctccaggggtgttttttgctccctgggaccaccgtcccaagtagtagttctggggacgattcctcttccttctccctcagtcctgttccattgttctcgccattctctcgccctgtcagcagcctcacactgtc

SEQ ID NO: 3824 - DNA, 472 bp, Homo sapiens
  MAP TO AC005100.2; EXPRESSED IN ADULT LIVER, SIGNAL = 0.69; EXPRESSED IN HEART, SIGNAL = 0.86; EXPRESSED IN PLACENTA, SIGNAL = 0.61
acccctctgcaaatgtgaacccctgtggagccaaggctggttacaccaccaggaccagatgtagccttgtccctccttgagaccatcaggcacaggtgaagcctgcacagaagagcctctgctggggctgaagatcttgctccagcctgaccctcactgggagacctgccccttcacagggcagccagcccactgcatgggtccatgctctaatctcccacttccttctgtcctcaggaagaggttggaaagggacatgttcatgatctttgctaagagcagacctttcagagagtttgtgaagggtcagtcatatggccctttcattcctctgcagccccttcccccaccatgcacacagcagcctgaggaggaggccaaagtgtaccttcgggagaagacagagaaaatttcaggtggggctctagtgcttaactagctgcatgattcggaacaagctctttaaactctc

SEQ ID NO: 3825 - DNA, 491 bp, Homo sapiens; identical to SEQ ID NO: 791
  MAP TO AP000247.1; EXPRESSED IN ADULT LIVER, SIGNAL = 0.87; EXPRESSED IN BRAIN, SIGNAL =   1; EXPRESSED IN HEART, SIGNAL = 1.1; EXPRESSED IN BT474, SIGNAL = 0.8; EXPRESSED IN LUNG, SIGNAL = 0.95; EXPRESSED IN PLACENTA, SIGNAL = 0.64; EXPRESSED IN HELA, SIGNAL = 0.7; EXPRESSED IN FETAL LIVER, SIGNAL = 0.66; EXPRESSED IN HBL100, SIGNAL = 0.88; EXPRESSED IN BONE MARROW, SIGNAL = 0.84

SEQ ID NO: 3826 - DNA, 460 bp, Homo sapiens
  MAP TO AL049797.8; EXPRESSED IN PLACENTA, SIGNAL = 0.66; EXPRESSED IN BONE MARROW, SIGNAL = 0.74; EXPRESSED IN HELA, SIGNAL = 0.73; EXPRESSED IN LUNG, SIGNAL = 0.67; EXPRESSED IN HEART, SIGNAL = 0.9; EXPRESSED IN ADULT LIVER, SIGNAL = 0.8
gcagttttcagtttcctgttctgtagaatgaaaactggcttcaaaaagacatctgagtttttaaatagaaaagtgcatctaatttctgcaaattagaagggatctttttgtatcgtcttgtcttattcacctctaagcgtttttcccccaacttctacacaatgtcatatacataatgggcatttggctaatgttttcattttgatattttaaatacatgaatgagaataagcataacattattaaagtgatcattaattgtgcacaccatgccatagcattttcctattaatggattgccttgtttttaaaatactttcagattgggttgaatttagtccatacgaaattggcatggctaaatatggtacttttatggctcccgacttatttggaagcaaattttttatgggaacagtcgttaagaagtatgaagaaaaccccttgcatttcttaatgg

SEQ ID NO: 3827 - DNA, 406 bp, Homo sapiens
  MAP TO AL122035.1; EXPRESSED IN BT474, SIGNAL = 0.92; EXPRESSED IN BRAIN, SIGNAL = 1.2; EXPRESSED IN BONE MARROW, SIGNAL = 1.5; EXPRESSED IN PLACENTA, SIGNAL = 1.1; EXPRESSED IN HBL100, SIGNAL =   2; EXPRESSED IN HELA, SIGNAL = 1.8; EXPRESSED IN HEART, SIGNAL = 1.1; EXPRESSED IN FETAL LIVER, SIGNAL = 0.95; EXPRESSED IN ADULT LIVER, SIGNAL = 1.5
gagcatagtcggcacaggacttttccccgaagcacaggagccagcggctacagccactaggcagtccacttgcaaacgcaggttgtgcccgggttctctttctttggctgcaggtcttcaggtgttatgggcctaactcttccgctacaagtgtccctcccgcaaaaaatgggtccgggggacctgcacaccctcagagccctcgtccacagccccacactcaacaacaatgtcaggtgcttacgcggagatctccttcccgttcaggatttctgctggcgccatggcctttattagtccgctgcccacgatggacaccaccaatatcgaggttccactccctccgcagccaagcaggacaacccaacccacgtgcttagggactggccaggggatcacactactg

SEQ ID NO: 3828 - DNA, 364 bp, Homo sapiens
  MAP TO AC010787.2; EXPRESSED IN PLACENTA, SIGNAL = 1.1; EXPRESSED IN HBL100, SIGNAL = 1.2; EXPRESSED IN HEART, SIGNAL = 0.96; EXPRESSED IN BT474, SIGNAL = 0.99; EXPRESSED IN FETAL LIVER, SIGNAL = 1.1; EXPRESSED IN ADULT LIVER, SIGNAL = 1.2; EXPRESSED IN BRAIN, SIGNAL =   1; EXPRESSED IN BONE MARROW, SIGNAL =   1; EXPRESSED IN LUNG, SIGNAL = 0.94
tgccagcagaaatacagcaccctaacaaatggaagagcagtacattctttacatcagcaaccaatatatgacattattttctctacagcagggacacacaagcatagaaaggaggagggtggagtaagagaggcccctctcatgaatgcatctaataatccagttaaagaatatttgcttcttgtccccactgtcttattccttgcaggtttagaagccttagttgctaagggagaaaatgcttccaatagggaacatagttgcagactcgttaagttggaagctaagactgctcagttgccattttgttttcctcatgccgctgagccaataggcagagatgtgggttactctatcggctggg

SEQ ID NO: 3829 - DNA, 462 bp, Homo sapiens
  MAP TO AC010682.1; EXPRESSED IN FETAL LIVER, SIGNAL = 3.1; EXPRESSED IN HEART, SIGNAL = 1.7; EXPRESSED IN HELA, SIGNAL = 1.8; EXPRESSED IN BONE MARROW, SIGNAL = 1.1; EXPRESSED IN LUNG, SIGNAL = 0.88
ggtacataggatggattcttgctaaaactactttgaacaaagaaacaggctaaaataccaggctgcaggcagatttttaaaaaaacctgaacaaacctgcagcccactcatataaaggaacaaagcctaacaaacaaatattttttgcacttttttgttacctaaaacatgccaacagataatctgataaaagaagaatattctgcataaaaatatttttcttcttaaataatgcacatacttccagaaaatagtttctattccttttacacagggagcttcagtgtgcttcagtgagcacttttcttcttcttcttcttcttcttcttcttcttcttcttcttcttcttcttcttcttcttcttcttcctcttcctcttcttcttcttcttcttcttcttcttcttcttcttcttcttcttcttcttcttcttcttcttcttcttcttctgcttcttcttc

SEQ ID NO: 3830 - DNA, 393 bp, Homo sapiens
  MAP TO AC010809.2; EXPRESSED IN BRAIN, SIGNAL = 1.2; EXPRESSED IN BONE MARROW, SIGNAL = 1.2; EXPRESSED IN LUNG, SIGNAL = 1.8; EXPRESSED IN HBL100, SIGNAL = 1.7; EXPRESSED IN PLACENTA, SIGNAL = 2.6; EXPRESSED IN HELA, SIGNAL = 1.1; EXPRESSED IN HEART, SIGNAL = 1.3; EXPRESSED IN BT474, SIGNAL = 1.6; EXPRESSED IN FETAL LIVER, SIGNAL = 1.9
ttgctgctccctcctacatcatcacggtcagagaagagctgactaatttggcacaaaagtcttctaaaaatagctacctgacaagtgacatgatagcttgggtttatttgtatatttgtatgtctttttgaacctgcctcacagggaatgtggtaaatggcaccattggcaagcagatggttgacacactggtagaatcatctaccaatgtagaaatgatcttgaaattctttgacatgttcttgaaacttaaagacttaaccagctcagacaccttcaaagaatatgacccagatggtaaaggaattatctccaaaaaagaattccagaaggccatggaagggcaaaaacagtacacgcagtcagagattgactttctcctgtcgtgtgcag

SEQ ID NO: 3831 - DNA, 443 bp, Homo sapiens
  MAP TO L39891.1; EXPRESSED IN BRAIN, SIGNAL = 3.7; EXPRESSED IN BONE MARROW, SIGNAL = 3.6; EXPRESSED IN FETAL LIVER, SIGNAL = 2.1; EXPRESSED IN ADULT LIVER, SIGNAL = 2.9; EXPRESSED IN BT474, SIGNAL =   3; EXPRESSED IN LUNG, SIGNAL = 2.1; EXPRESSED IN PLACENTA, SIGNAL = 3.2; EXPRESSED IN HEART, SIGNAL = 1.9; EXPRESSED IN HELA, SIGNAL = 2.4; EXPRESSED IN HBL100, SIGNAL = 1.4
gagtctttgggagctttggggaggttgtgccaagcctgagcctcgacgtcccccttcccggctttctgttggctcttctgaggccagggcatctctatgagggcctcctgctggagccgtctctgtggatctcctctgccatcctggcccatgagtgggtgatgcgctggccaccatctggtgacagtggccgggcaccgctgccaaatgtgggtcccgcatctgcaagcccctccctgggtcccctagggtatggggtggttctgccactgccctcgctcccccaccttggggtgcctctccccctgctcgtgggggagaccctgcctgggatctgctttccagcaaggaatatactttggagggagacacacatgttcttttctggagctctgcagtggccacggcagcccagcccgccaagcaccctggaatgaaaacat

SEQ ID NO: 3832 - DNA, 464 bp, Homo sapiens
  MAP TO AC006536.2; EXPRESSED IN PLACENTA, SIGNAL = 0.94; EXPRESSED IN BONE MARROW, SIGNAL = 0.93; EXPRESSED IN HBL100, SIGNAL = 0.89; EXPRESSED IN LUNG, SIGNAL = 0.82; EXPRESSED IN ADULT LIVER, SIGNAL = 0.95; EXPRESSED IN BRAIN, SIGNAL = 0.8; EXPRESSED IN HEART, SIGNAL = 1.1; EXPRESSED IN BT474, SIGNAL = 1.2; EXPRESSED IN HELA, SIGNAL =   1; EXPRESSED IN FETAL LIVER, SIGNAL = 0.91
aagtacgagagtgtttgcctcaggccacagtggcaggtttcatgaatggctcccactcttcagccctccctctgtgcacaccctttgccatgtaactttgcagtgccctccttattgtaggtgggaggtacttccctacctcttgattttgagatttaaccttagccacgtgttttggtcaacggggtgatagcagatatggctcaagcagagacttgcaaagggcttgcaggactgagtttcctctcttgtgccactatcattgccttcaggtggacatagccaggatagcccactggtcccagcaggaggcgggagacgcatggaagaggggcatccccaactgacccagcctaaggcagctgatcacctagatcaaagctcattagagatgaggagaaccagtcaagctcagcctgaatcagccaacacccagctgactgacagacatgtgaggaatgagg

SEQ ID NO: 3833 - DNA, 1969 bp, Homo sapiens
  MAP TO AC005261.1; EXPRESSED IN FETAL LIVER, SIGNAL = 1.8; EXPRESSED IN BRAIN, SIGNAL = 1.5; EXPRESSED IN BONE MARROW, SIGNAL = 1.3; EXPRESSED IN HEART, SIGNAL = 1.6; EXPRESSED IN BT474, SIGNAL = 2.2; EXPRESSED IN ADULT LIVER, SIGNAL = 1.8; EXPRESSED IN LUNG, SIGNAL =   4; EXPRESSED IN PLACENTA, SIGNAL = 1.9; EXPRESSED IN HELA, SIGNAL = 2.3; EXPRESSED IN HBL100, SIGNAL = 2.3
agcttaccatgcacggtgtcgtcgttactctgtctacccaggtccaatctgtaattgtgaaggtggctccacgaacagacgcattgtctcctgacccagcctctgcccctaggtctcccatgcagaatatcccgagtccaaggaccaggatagaaagaaattgcaaacccaagaatttgagatacagaaaatagcaacacagaggcaatatttttatctatggtttttcacagaaatggtaatattcttttttccatgttgtcctttactaacaggcccttttgtgtgctggatttctttcaggcgacaaaggaaaacctaagaccacagaacctaccacttgtgagccagccttgtcagagggaatctcacttcagggacaagtgacacaaggaaactcagtggactcacagttggggcaagccgaggatcaggatgggctatcagaaatgcaggaaggacacttcagaccaggaatagatccccaggagaagtctcctgggaagatgagccctgaatgtgatggtttagggacagctgatggtgtgtgttcaaggattggacaggagcaagtctctccaggagatagagtccgtagccataactcatgtgagtcaggtaaagatcccatgattcaggaagaggaaaataactttaaatgcagtgaatgtggaaaagtatttaacaagaaacacctccttgctggacatgagaaaattcactctggagttaagccctatgaatgcacagaatgtgggaaaacctttattaagagcacacatctcctgcaacatcacatgatccacactggggagaggccctatgagtgcatggagtgtggaaaggccttcaaccgcaagtcataccttacccagcaccagcggattcacagtggagagaagccttacaagtgcaatgaatgcggaaaggccttcacccaccgctccaattttgtcttgcataacaggagacacactggagaaaaatcctttgtgtgcacagaatgtggccaagtctttcgacataggccaggctttctccggcactatgttgtccacagtggtgagaatccctatgagtgcttggagtgtggcaaggtcttcaaacacaggtcatatctcatgtggcaccagcagactcataccggggagaagccctatgagtgcagtgaatgtgggaaggtcttcttggagagtgcagccctgattcaccactatgtcatccacactggagagaagccctttgagtgcctcgagtgtgggaaggctttcaaccaccgatcctacctcaagaggcaccagcggattcacactggggagaagcccttcgtgtgcagtgaatgtggaaaggccttcacccactgctctacttttatcttgcataaaagggcccacactggagaaaagcctttcgagtgcaaagagtgtgggaaagcctttagcaatcggaaggacctcattcgccacttcagcatccacactggagagaagccctatgagtgcgtggagtgtggaaaggccttcacccgcatgtcgggcctcacgaggcacaagcggattcatagtggagagaagccctatgaatgtgttgagtgtgggaaatcgttttgctggagcacaaacctcattcgacatgccattatccacactggagagaagccctataaatgtagtgaatgtggaaaggccttcagtcgcagctcgtccctcactcagcatcaaaggatgcatactgggaaaaatcccatcagtgtaacagatgtgggaagaccttttacaagtggacaaacctcagttacccttcgagaacttcttttagggaaggactttttgaatgtaaccactgaggcaaatattttgccagaggaaacatcttcctctgcatctgatcaaccataccaaagagaaaccccacaagtgtcttcactgtgagaaaaccttctgttgctgaatattacttgtcatctgaa

SEQ ID NO: 3834 - DNA, 479 bp, Homo sapiens
  MAP TO AP000279.1; EXPRESSED IN BT474, SIGNAL = 1.2; EXPRESSED IN HELA, SIGNAL = 0.88; EXPRESSED IN HEART, SIGNAL = 0.95; EXPRESSED IN LUNG, SIGNAL = 0.93; EXPRESSED IN PLACENTA, SIGNAL = 1.2; EXPRESSED IN BONE MARROW, SIGNAL = 1.1; EXPRESSED IN HBL100, SIGNAL = 1.2; EXPRESSED IN FETAL LIVER, SIGNAL = 0.99; EXPRESSED IN ADULT LIVER, SIGNAL = 0.83; EXPRESSED IN BRAIN, SIGNAL = 0.74
gcagttcagaagaaagttaagtcagtcttaatctgaaatacattaaaaaggactacaggaccatttttccatttacttgaagacttatttgcaaaatacaattacctgtctgtgaataaacttggaaaagttgggaaacttctggttctcctattttttatatttgcaaatggaaaaactccctcttcaaacagcaatgtcataataagaaacaccactcagctaattccttcttaataatcatctttaaagatggcccattcttgagggtttagtttagttctgagaaatacttttgagtacacacctggacgaagaacattcaatgaagataaagcatttgaaaaagctccaccagtctttggcttttcttcctctttttcactttccatatccatttcatcttcaccatgttcactgatgataactccatcttcttgatttgtatccttaacatgtcctgttttgtccaaaggttg

SEQ ID NO: 3835 - DNA, 499 bp, Homo sapiens
  MAP TO AL078584.17; EXPRESSED IN BONE MARROW, SIGNAL = 1.4; EXPRESSED IN FETAL LIVER, SIGNAL = 0.86; EXPRESSED IN LUNG, SIGNAL = 1.2; EXPRESSED IN PLACENTA, SIGNAL = 0.85; EXPRESSED IN HEART, SIGNAL = 1.1; EXPRESSED IN BRAIN, SIGNAL = 0.78; EXPRESSED IN ADULT LIVER, SIGNAL = 0.88; EXPRESSED IN HELA, SIGNAL = 0.69; EXPRESSED IN HBL100, SIGNAL = 0.81; EXPRESSED IN BT474, SIGNAL = 0.77
tctttcaacaaaacccattgtgttcaaattcataagcaagaaagttaagcacccaccttcctctttaaggaaatatgaaagttgttgctttgaaatagaattcattgcattcagactttgagtgatatctgtattcatatccaaccggatctgcagccctcttcaaaaaattctttctcctcagtggtgagaattaccccacctgggattcactcttcacaaggctcaagaagcctattcatatgaatgaaactgctttcttcagggcagatgcggaagctgccctccagagggcttgggcaacccaaggaaaggaaatcacctcggtcggcagtgtgactgctgagactgccggggctgctgcctgctgcttctcgcgcctgtcctctccaagatgcagttttttgatgctgaggagctcctggtcgatgaagaggatgatgtttttggtgaaggtaaatgcatctttctggcaggaggctctccggtctgctttgct

SEQ ID NO: 3836 - DNA, 448 bp, Homo sapiens; identical to SEQ ID NO: 3572
  MAP TO AL050339.4; EXPRESSED IN ADULT LIVER, SIGNAL = 0.7; EXPRESSED IN HEART, SIGNAL = 0.83; EXPRESSED IN PLACENTA, SIGNAL = 0.65; EXPRESSED IN HBL100, SIGNAL =   1

SEQ ID NO: 3837 - DNA, 394 bp, Homo sapiens
  MAP TO AL050308.9; EXPRESSED IN BONE MARROW, SIGNAL = 1.2; EXPRESSED IN LUNG, SIGNAL = 0.94; EXPRESSED IN HELA, SIGNAL = 0.7; EXPRESSED IN PLACENTA, SIGNAL = 0.98; EXPRESSED IN BT474, SIGNAL = 0.87; EXPRESSED IN HBL100, SIGNAL =   1; EXPRESSED IN FETAL LIVER, SIGNAL = 0.85; EXPRESSED IN ADULT LIVER, SIGNAL = 0.75; EXPRESSED IN BRAIN, SIGNAL = 0.79; EXPRESSED IN HEART, SIGNAL = 0.78
ttcaatcagataaagtacatggtgctattagagacctcaataaattatagctgttatttatttatgtgtgctcctctaatggtagatattattattatatgcattacattattaagtacagaagttattttccattctgctgctttaggttaatttatcatcaatagtttccatgttttttctcattgtaataattttattgaaaaatgtcttagtccattcctgctgctataacaaaataccttagtccaagcaatttataaataatagaaacttatacctcacagttatagagattgagaaatctaagatcaaagcactagcagattcattgtctggtaagggctcactctctgtttccacgatggtgctttgttgctgaatcctctggagg

SEQ ID NO: 3838 - DNA, 412 bp, Homo sapiens
  MAP TO AC003666.1; EXPRESSED IN FETAL LIVER, SIGNAL = 0.65; EXPRESSED IN LUNG, SIGNAL = 0.74; EXPRESSED IN PLACENTA, SIGNAL = 0.69; EXPRESSED IN BONE MARROW, SIGNAL = 0.83; EXPRESSED IN BRAIN, SIGNAL = 0.83; EXPRESSED IN HEART, SIGNAL = 0.86
tcaaagtcaaccttgtttcttcagcatgatcagcaaaccaccttcggtaagaaaaaataaagccaaatataacaagataaagccaaatatgaggcttaaagtgtatatatatatatatatgcattgtgcacatgaaacagtggggaagggttttgcaagtgaagtttgagtggtagcattagagctggaaaaagcccgtcatctagtgttaagccacgaacttcagagcaggcacttgaaggtgaaatcacagacattcacaaatctcccagcagcattcccaagcacgcatggaacggcaggggtccccagccaggaccctgcccaaatacccacctctgactgattcaccagcagctccgaccatttctgccacaggggacacttgtctctgtcctcaaaagtggtctcg

SEQ ID NO: 3839 - DNA, 409 bp, Homo sapiens
  MAP TO AP000268.1; EXPRESSED IN FETAL LIVER, SIGNAL = 0.78; EXPRESSED IN LUNG, SIGNAL = 1.6; EXPRESSED IN PLACENTA, SIGNAL = 0.73; EXPRESSED IN BT474, SIGNAL = 0.86; EXPRESSED IN BONE MARROW, SIGNAL = 0.83; EXPRESSED IN HBL100, SIGNAL = 0.8; EXPRESSED IN HELA, SIGNAL = 0.86; EXPRESSED IN ADULT LIVER, SIGNAL = 0.72; EXPRESSED IN BRAIN, SIGNAL = 0.73; EXPRESSED IN HEART, SIGNAL = 0.78
aaccctgctcccttgaaaagtgactttagagttaacgtcacatgatcggatttgtgggccattcatgtaggttgctcagcactcagaagctggctggcttcttccattgttctcactgctaccaggtgttcatctgatatttacttaaggaagaccagctatttaaaaaatactgatgcaagtacaatttctcaggctgacggatgagcacgcagccaaccgtccaccagccttcctgattcttggctgcagggctctgctctggtttattggcagcaacagtggcggcttgtctgcaagaccttgaaacccacctttcaggagcttgctgaagtcaaagttgtactgcatgaccacgtgggggaccaccttctggtagaggcatatgacctggagcaaaacagctttc

SEQ ID NO: 3840 - DNA, 1982 bp, Homo sapiens
  MAP TO AC004534.1; EXPRESSED IN BONE MARROW, SIGNAL = 1.6; EXPRESSED IN LUNG, SIGNAL = 2.6; EXPRESSED IN HELA, SIGNAL =   4; EXPRESSED IN PLACENTA, SIGNAL = 5.1; EXPRESSED IN HEART, SIGNAL = 1.8; EXPRESSED IN ADULT LIVER, SIGNAL = 1.4; EXPRESSED IN FETAL LIVER, SIGNAL = 1.9; EXPRESSED IN BT474, SIGNAL = 3.2; EXPRESSED IN BRAIN, SIGNAL = 1.2
gccccacacttaacagggtcgctaggaaaatatttatgaaataaatacatcaatgacaagttttttagaggctattgcttattttgttgagaacctgttgtctcaaagaatgaccctaaatggaaccaaataaatgcatcactcttcttttttatggtctcttcctctgataggtaaaagcagagttgttagaaacatttgtctttgattcctccttaggattcagccctgatggaggctgaggaggcccagcgtggagcctctcctcccatctctgccatagaggaattcagcattatccctgaggctcccatgaggagcagccaggtctctgccttggggcttgaagctcaagaagatgaggacccatcctataagtggagagaggaacacagactctcagcaactcagcagagtgagttaagggatgtgtgtgactatgcgattgagacgatgccctcttttcccaaggaaggttctgcagatgtggagcccaatcaggaaagccttgtggctgaggcctgtgacactccggaacactgggaggcagtaccccagagcctagcaggccgacaagcaaggactctagctcccccagagctctgggcctgccccattcagagtgagcatctagacatggccccattttccagtgacctgggaagcgaagaagaggaggtggaattttggccaggacttacttctttgacattgggatctggacaggcagaagaagaagaggaaacctcttcagataactctggtcagaccagatattattctccctgcgaagagcatcctgcagagaccaaccagaatgaaggctctgaaagtgggactatcaggcagggggaagagctgccacctgaggagctgcaggaaagtcaagggctcttgcatccccaggaggtccaagttctggaggagcagggacagcaggaagcaggatttcggggggaaggaactctgagggaggatgtttgtgccgatgggctattaggggaggaacagatgatagagcaggttaatgatgaaaagggagaacagaagcaaaaacaggaacaggtacaagatgtgatgcttgggagacaaggagaaagaatggggctcactggggagccagagggtctgaatgacggtgagtgggagcaggaggatatggagaggaaggctcagggtcagggaggtccagaacagggagaagagaggaagagggagctgcaggtgccagaagagaatagggcggactctcaggacgaaaagagtcaaacctttttgggaaaatcagaggaagtaactggaaagcaagaagatcatggtataaaggagaaaggggtgccagtcagcgggcaggaggcgaaagagccagagagttgggatgggggcaggctgggggcagtgggaagagcgaggagcagggaagaggagaatgagcatcatgggccttcaatgcccgctctgatagcccctgaggactctcctcactgtgacctgtttccaggtgcctcatatctcatgactcagattcccgggactcagacagagtccagggctgaggaactgtcccccgcagctctgtctccctcgctagagcccatcaggtgctctcaccagcccatttctctactgggctcctttttgactgaggagtcacctgacaaggaaatagatcaaaacagccagcaagaggaatccaggctgaggaagggaacagtgtccagccaagggactgaggtggtctttgccagtgcatctgtgactcctccaaggacaccagattcagctcctcccagtcctgctgaagcctaccccatcacacctgcctcggtatctgccaggcccccagttgcctttcccaggagggaaacctcttgtgctgcacgtgctccagaaactgccagtgcccctctctcaatggatgacccatctccctgtgggacttctgagatgtgcccggctgccctctatggcttcccctccac

SEQ ID NO: 3841 - DNA, 478 bp, Homo sapiens
  MAP TO AC005193.2; EXPRESSED IN FETAL LIVER, SIGNAL = 0.8; EXPRESSED IN LUNG, SIGNAL = 0.59; EXPRESSED IN HELA, SIGNAL = 0.69; EXPRESSED IN PLACENTA, SIGNAL = 0.65; EXPRESSED IN ADULT LIVER, SIGNAL = 0.98; EXPRESSED IN BRAIN, SIGNAL = 0.97; EXPRESSED IN HEART, SIGNAL = 0.85
atgacatcactacacccccgcctgggcaacagagcaagactctgtctaaaaaaaaaaaaaaaaaagaaagaaaagaaaagaaagaaaaaaagaaaagaaaaagaaatcagaaacttgtatttctaactacacaaggaactatatatcttgtccaaacttcccactgagaacaactaaaaatttaagttgtaagtagtctgcgcacaaaaggcaagtggctcttagaaagaattttcttttcttttagaagggggcagaagtggctggcaccacccctctcctttctgtgccaaatgcaagagatgtgatgctgaattgtcacaaccatacagtgaccacagcccaaggctctggcagacacacaacagtcagtgagtcaacagatgcagccattcttttcaacaaatatggcagtgagaaggctgaagtaatcacctgttttatttcagtcttttccattagggaaaacaatcttcaa

SEQ ID NO: 3842 - DNA, 1952 bp, Homo sapiens
  MAP TO AC004616.1; EXPRESSED IN FETAL LIVER, SIGNAL =   1; EXPRESSED IN ADULT LIVER, SIGNAL = 1.2; EXPRESSED IN BT474, SIGNAL = 2.9; EXPRESSED IN BRAIN, SIGNAL =   1; EXPRESSED IN LUNG, SIGNAL = 1.4; EXPRESSED IN BONE MARROW, SIGNAL = 1.1; EXPRESSED IN PLACENTA, SIGNAL = 1.4; EXPRESSED IN HEART, SIGNAL = 1.4
cattatttaagagctcctattccccaacctggcttcccttacaaaccccgctttgttgtcagttcctaagcaatcattctggaatccacatttcagaagacgtggatgtaagttgttttggagtcactgccgagaatgttttttgccatgcacttgtagaagccggcatctctctgtgtggcatgctggatggtcagtgatccctgggggtgaagaaatctgtttccatacagacgagcctgaacccctgccttcagatgcgacttatccggtaactcccacgtgatgtcagctttgggaatccccatagccatgcagttcagtttcacggtgttcccgggccgggtgtagatgaccggggtgggctcgctggtgatccggggaggataggcgatcacaatcacggggatgctggtgaccgaagggccgtactccgtctccatcctgcatacataggtacccctgtcaaacaccgaggcctcacgaaccgtgagggtgccattgtccagaagagaaacgcgtcccagggtttgggggccctccagatgcatgccattggggagcgtccaggagaaacgtccctgcccagccccgggaggggtgcaggggagcttcagggtctcaccattgatgatgctgaccaggttatgatactgcttgtttgcttctggcttcagtcccaccttcagggagaccagcctctccgtgtggccagcggcattgcgggccacgcagcggtaggccccggcgtccaccgaggagagaccgctaatgtgtagcatgccgtcagccttgtggtagaagcgctgcagctgctgtccactctgcagatcggtgccattgggaaggacccacaccaggctgggtgtcggggtccccgcggcagagcagttgaggctgatggtgtggcccgccatggccgtgatcttctcgctgatcgggtcgtggaagatgggtttctccatgggctccaggacagtgagctgcaggatcaacctggcctcccctccctcgttgcgtgccatgcataccagctggacggagtcgctcttcctcaaactcctgatgtccagggaaccgttgccatggacagtgatccggtttccatagtatggagctggcagaaccacaccctcgggaaaagcccataacaccctcggggtggggatgccttcagctttgcagtcaatcagtttccgactgcccccggctgctatctcccgcacagtggtgatggggttggggttaccgttgatcttgggtggctggacgttgacgtgaatccacaccgtcttcctatcctctcccgcgctgttcctgaccaagcaggtgtagttgccgctgtcagaacgctgggctttctgaataaggagagtgccatcttggtatatctgatacttctcagaggaggtggggatcaccttgttggttggggacaaccaagtcaccttgggcatgggttctcctttggcctcacaggctacagtgaccacgtctccatagggcacctgaaccgccaagtaagtcttgttccggatggtggcgggcgctgtcaccaccttgactctgactctcatctcgtccttcccgacctgattttcagcaaagcaggtgtagtctccttcctccctcatccccacttcgttaaagtagagtgtcccattgttgaagacgacatagcgcttggtgcgtccaccgctgtcatccgactgcatgaaggagttcaccagactcccgtctgggaggctccaggagatctcgggattgggaagcccggtggccacacagtccactttcaggtcacccccgtagaagactttgtggtcgttctcctccttgtgttcaatcttggccggtttcatcaccacatccactttgagcaccacgtagtcatcaccaaccttatttcgagctacgcacaggtaatctccggcatctttgtccgtcactga

SEQ ID NO: 3843 - DNA, 499 bp, Homo sapiens
  MAP TO AL049859.7; EXPRESSED IN BONE MARROW, SIGNAL = 0.64; EXPRESSED IN ADULT LIVER, SIGNAL = 0.65; EXPRESSED IN HEART, SIGNAL = 1.3
ggtgaagtctcaacctctattcagaaacacatgaagaatatttttaaccgtggacatactaaatttgagctgtttgggagacatttgggtagtaagcgttctatagacatttgaaaatgagcctgtcttaatgtagaaagttgaatatggagatacacaattgacaaaaggagaacattgttgtccaatattctaaattcacctcatcttctccaccaccttctgaacatgtacatacatctgtctttacttccctggggaaggcggggtagggggtgcttcattagattatctctggtcatctaatatatcttaatttgacaatggtttcaaatattgttattcaaaatgctgtctgtagaccagcaatagaacttggaagcttgttagaagtgcagaatctcagccctgtcccaggccttgtaattcagaatctgtattttaccaagatccacaggtaattcaatatgtacattgattgttgagattcactattttg

SEQ ID NO: 3844 - DNA, 469 bp, Homo sapiens
  MAP TO AP000169.1; EXPRESSED IN ADULT LIVER, SIGNAL = 0.65; EXPRESSED IN BONE MARROW, SIGNAL = 0.74; EXPRESSED IN LUNG, SIGNAL =   1; EXPRESSED IN HELA, SIGNAL = 0.63; EXPRESSED IN PLACENTA, SIGNAL = 0.99; EXPRESSED IN BT474, SIGNAL = 0.88; EXPRESSED IN HBL100, SIGNAL = 0.68; EXPRESSED IN FETAL LIVER, SIGNAL = 0.85; EXPRESSED IN BRAIN, SIGNAL = 0.75; EXPRESSED IN HEART, SIGNAL = 0.99
tcccacgtgatgaaagacaggcgtgtctctggccagggactaaggcgccatgagcatgtgtgctttgtttgggtgttggtgtgctctgactcatgctctcagtggccctcgaaggcaccaggtgaaagaagagggtcagacaaccactagccacagctgtggcagcctcggttcaaaaatgtaaaatctgccatgcaggcagtttcaaagacttaacctatgcccttgtataattattatttttacttcttttatagcaacgttcattttctaacctgaaggtggttcaggtgatgttctaatctgcttttgagtttgaaaatgcatctaccagatgattcatggtggctgccgaggtggtgaataccgaggatcccaaaatgaaaaattacggagggaaacttagaaaagtagtactctctcacagccagagtggtgctggtgaccctccagtccaggctaaaacagg

SEQ ID NO: 3845 - DNA, 401 bp, Homo sapiens
  MAP TO AC011994.2; EXPRESSED IN PLACENTA, SIGNAL = 3.7; EXPRESSED IN HELA, SIGNAL = 3.9; EXPRESSED IN HEART, SIGNAL = 3.2; EXPRESSED IN BRAIN, SIGNAL = 3.2; EXPRESSED IN LUNG, SIGNAL = 3.8; EXPRESSED IN BT474, SIGNAL = 3.8; EXPRESSED IN ADULT LIVER, SIGNAL = 4.5; EXPRESSED IN FETAL LIVER, SIGNAL = 4.3; EXPRESSED IN BONE MARROW, SIGNAL = 3.7; EXPRESSED IN HBL100, SIGNAL = 3.3
gcacatgctctcttgactgccatcatgtaagacgtgcctttgcttctcctttgccttttgccatgattgtgaggcctccacagccatgtagaactgtgagtccattaaaccactttctttataaattactcagtcttgggaatgtcttcatagcagtatgaaaatggactaatacatctggagtccaggagagcagtcgggtttgcagctacctgggcgcaggctgttcatagggcccaggactccccaggtctaagggtaattctggggacaatcatggcttctggtctcctggggctgacggaactgcttaagttgctcatgtcagccagaatggtctggaaagagctcgggtcaggagtagcactgaatgtttcctgtgggtttaagaggctggctct

SEQ ID NO: 3846 - DNA, 467 bp, Homo sapiens
  MAP TO AC007263.3; EXPRESSED IN LUNG, SIGNAL = 0.79; EXPRESSED IN PLACENTA, SIGNAL = 0.6; EXPRESSED IN BT474, SIGNAL = 1.2; EXPRESSED IN BONE MARROW, SIGNAL = 0.87; EXPRESSED IN FETAL LIVER, SIGNAL = 0.83; EXPRESSED IN ADULT LIVER, SIGNAL = 0.65; EXPRESSED IN BRAIN, SIGNAL = 0.76; EXPRESSED IN HEART, SIGNAL = 0.93
acattctgaggtactcggggccagggcttcaacacgtgaattggtttcaacatacgagttgtgcagttcattttgtaacacctgtggagatgggtagagggcaggttctctctgcaataaggttttacagatggtcatttatcttctgcttctttcttttcccttcttattttttactgtgagaaaattcaaacatgcagaaaagttgcaagaatagcaatgagtaattgttaacatgttgttgtatttgcctcctctttatgtgtagattatatgaactgatgaaaacaaagttttaggcatcatggcacctcacctgtaaacttttcagcatgaagctcagaacaaagacatccttttctataaccccacgctattgtcacacctaagaaagtttcaaataattcagttcgatgtctgtcatctagtccatattcagatttctccagttgtccactaagaccttt

SEQ ID NO: 3847 - DNA, 408 bp, Homo sapiens
  MAP TO AC012458.2; EXPRESSED IN BRAIN, SIGNAL = 3.3; EXPRESSED IN LUNG, SIGNAL = 2.7; EXPRESSED IN HELA, SIGNAL = 7.2; EXPRESSED IN PLACENTA, SIGNAL = 3.4; EXPRESSED IN ADULT LIVER, SIGNAL = 1.5; EXPRESSED IN FETAL LIVER, SIGNAL = 1.7; EXPRESSED IN BT474, SIGNAL = 4.4; EXPRESSED IN BONE MARROW, SIGNAL = 2.4; EXPRESSED IN HEART, SIGNAL = 2.4; EXPRESSED IN HBL100, SIGNAL = 4.6
tgcatacctgcgatccttacttacgttgctgtagaaaggatcacccggctccattggaggtggtgggacatcataggagctcctccagatcttcaccaggcctcaccatgctctgcagcagtttctgctttattgagaccagttagacccccatagtgccgctcttcgaggcgctaagtcctcactactggcagccacatctgatcaatggcatctggcactgtccagagggtccggattgttctcttaagcagatatcaaactcgtagccagcatctggcagcgcctgctcccagcgctttgcctcctcgtcgcctgctgggttcaggttggcatcgtaccagccaccgaagcggttctccaggttccacgcaacctcgccgtgccggatcagcacctgtttgtagg

SEQ ID NO: 3848 - DNA, 1964 bp, Homo sapiens
  MAP TO AC004763.1; EXPRESSED IN BONE MARROW, SIGNAL = 1.9; EXPRESSED IN LUNG, SIGNAL = 2.4; EXPRESSED IN HELA, SIGNAL = 2.5; EXPRESSED IN PLACENTA, SIGNAL = 3.1; EXPRESSED IN HBL100, SIGNAL = 1.9; EXPRESSED IN HEART, SIGNAL = 1.8; EXPRESSED IN ADULT LIVER, SIGNAL = 3.2; EXPRESSED IN BT474, SIGNAL = 1.7; EXPRESSED IN FETAL LIVER, SIGNAL = 2.6; EXPRESSED IN BRAIN, SIGNAL = 1.8
gaaaccatctgtagtttttggcatatcgaccatctaatccatatacagggcttgtgccctatttacagcaatttcttgcttttcaaatttcttatttttttccaaatgtttctgcagcaatccattacgacagtttgcaaacaatcaaatatttgacctaaaatacagcagcaacacattttaaaatttacatttgcttagatagaaagcagctaatcatactgattaaaaaaaacaacaacaacaatttcagaatctttggcagcccattaccagagaggcatcacatcagggaaccatactcttcccaggtatttggagacttcagtgtgaatttcatctaggctataatcctcatcagggatcaaaacttcctccattacagagagctgtgttaaccttctctcacacagtcttacaaacctgatgaaggcactgcagctaacttcacatttgctgaggcccaaggctgttaggtttgtacagtgttcagcaatacaaataagttcattatcaagaggctgaagatcattagcacacaccactaactcaatcagtcgaggacagttgagacctacccgtcctaaaaccactttgctgactgaacgaccaaaataaaggtgagtaacaggggtttcttctttgaagaacgtctcgaattcctcttcatatagaaagaagtgcataacaacattaactctaggggaatgtttaataagtgcatcccaactgtgttttttaacagcatgaaatttaatctgtccaggattttcactcacaacgtcaattcgaagatgttcaaggttaacatgagtctcgcttgagagtgcaaggaaaagttcatcagttaggatgtaataattcaacgccagttctctaaggccttgacaacggtcagctacacaaagaattcctgtgggaagttggggaaaattctcaagaacaaagaatcatactgatcctaatataatattttgtaaatttaaatttaatattaattattcattatttgtgaaaatagctatctaataacaacttctgagagcatggctgccaggaggtattatgtatataatgaaaagcatatgtatatatgtaaaattaaaatatctcaggagaaacttactataactatacctaccttgcagattaagaaatcttttgaaaaaacttaaataatttatgcttcataggtatataattttcaaaaggaaattgcatctttatagttattgtaataaaaatatcatatcattctagctttaaaaaatgtaacccatcatcagatgaaacatgaggacagctactcatctttaggagtcttagagtgtcactattattggccacaagaatcttcaatgaaggatcatccactggtgtatcttcaattttgattgatgataatgattttgagttgataaaaactgtaagtgctgacacaaaatgagacttgcatggcaataagaaaaaattatgaaaacattattttaaaatgtacagctttaagtaattcattaaaactatatcaatacatgctaatgataacatagtaagaaccatgaacatacggctgtttctacagaatcattttctagtagaagatatttttataatgaagtatagttttatactttttataattgataaatgaaatagtgagaaaaaaaagcttcaaagatttcataaaacatgtcttccaattacttcaattaaggatttggttttcaatattagaaggacatgattattatatatttatttcctagaacaggggttggtagattacagacaacttgccaaatccagcccatggtctgcttctgtatggctcactaagaatgccttttgtatttttaaatggttggaaaaattttttaaagaataatattttatgacatgaaataaacttgaatttcagtgtccctaaatacagtctgatgggaacacagccatgccctttattt

SEQ ID NO: 3849 - DNA, 404 bp, Homo sapiens
  MAP TO AF015262.1; EXPRESSED IN HELA, SIGNAL = 1.1; EXPRESSED IN PLACENTA, SIGNAL = 0.99; EXPRESSED IN HBL100, SIGNAL = 1.1; EXPRESSED IN HEART, SIGNAL =   1; EXPRESSED IN FETAL LIVER, SIGNAL = 1.1; EXPRESSED IN ADULT LIVER, SIGNAL = 1.6; EXPRESSED IN BT474, SIGNAL = 1.1; EXPRESSED IN BRAIN, SIGNAL = 1.2; EXPRESSED IN BONE MARROW, SIGNAL =   1; EXPRESSED IN LUNG, SIGNAL = 1.3
acatgccacactttgctctgagcatacactccctgcagatatttctgcccacagcagcaacctgtgctctgacaatagaaggactgtcttaaactcctcctggtggataagccactggccaacaagattgagtctacaaatggccttttcttcacttggacataccttgacatttcttacactgttatcactaaacattcccttctggtgagcagtaggctcctgttgtatgatgcaaatcatagatgtatggaactgctatctggagatagaaaaacaggagttgcagatgactcctgccatcgtggaactaaaccacagtctagaagaggagagcaagtttatgtgggttatgcattacactaaaggtaagagtatttcatggtaggagaaggtgtgcaaaa

SEQ ID NO: 3850 - DNA, 462 bp, Homo sapiens
  MAP TO AP000208.1; EXPRESSED IN PLACENTA, SIGNAL = 0.77; EXPRESSED IN LUNG, SIGNAL = 0.61; EXPRESSED IN HBL100, SIGNAL = 0.81; EXPRESSED IN FETAL LIVER, SIGNAL = 0.62; EXPRESSED IN HELA, SIGNAL = 0.6; EXPRESSED IN ADULT LIVER, SIGNAL = 0.65; EXPRESSED IN BRAIN, SIGNAL = 0.99; EXPRESSED IN BT474, SIGNAL = 0.77; EXPRESSED IN HEART, SIGNAL = 0.82
tcccacatacttttgatgctgtttcatcctacacaaatgaagatgtaatagggaaatggaataaaattatggcattaactgggagctccagcagtggcagaaatttaagaaaagggattttatttcattacgagtgatttctcccctatattctcacatacaggtttgttaccaaggctataatttggatttcatttcctgctattcagcaacatctcagaagcaaaaacacttcgtccatggagaggcctggtaaccacatacagctgtgtaggtgacattgtcagctgtgattcttcagtggttcaaagcatgggatgtgaaaatgaaaatctctcaccttgctgctgtgatcagtctcatctgaggattccaagtctggcccctcggtctcctctggagcggtctcagcactgctgccctgctcgctgcaaaggctgtgccctgtcagatgaaatcaga

SEQ ID NO: 3851 - DNA, 470 bp, Homo sapiens
  MAP TO AP000134.1; EXPRESSED IN LUNG, SIGNAL = 0.83; EXPRESSED IN HELA, SIGNAL = 0.79; EXPRESSED IN ADULT LIVER, SIGNAL = 0.81; EXPRESSED IN BRAIN, SIGNAL = 0.89; EXPRESSED IN PLACENTA, SIGNAL = 0.81; EXPRESSED IN BT474, SIGNAL = 0.71; EXPRESSED IN BONE MARROW, SIGNAL = 0.72; EXPRESSED IN HBL100, SIGNAL = 1.4; EXPRESSED IN FETAL LIVER, SIGNAL = 0.69; EXPRESSED IN HEART, SIGNAL = 0.92
ttccccctcagagtacatgctgcctcatgttgcctcttcctatacatcagtttcaccctggctggaaactgctcatcagcaactaagagaaactttcttctccaatgggcccatagggaagttgccctctctgatctctcctgagtaaaatccccttttcactttgggcttctcgtcccacagccgccaccattccaagctcgcgctcttggcaatgacctgcgcgtcatgcgtgcgtacagactgctgagttacaaatcggggcaagtttatccaaacacaggccaagctcctccacagcagcgccgtgggagatgaatgtggctgagaccttgccatctaagagtttgcggtctggcaagtgtccacagagacccaagctagactataacaacacacagaaaagaaacattgtaacgattcagaagggaagggacgacttcaagtcacggaggaagcagaacatcgag

SEQ ID NO: 3852 - DNA, 491 bp, Homo sapiens
  MAP TO AC007370.7; EXPRESSED IN ADULT LIVER, SIGNAL = 0.8; EXPRESSED IN BRAIN, SIGNAL = 0.73; EXPRESSED IN HEART, SIGNAL = 0.85; EXPRESSED IN LUNG, SIGNAL = 0.67; EXPRESSED IN PLACENTA, SIGNAL = 0.72; EXPRESSED IN HELA, SIGNAL = 0.77
tcacaagctttttggaattttgaaataaggaaactaagagaatgtagccagctggatccagacagcagcatataattgagaccagtgtgacaacaaaggccttgtccaacctgatacaaataaaagaaaaagtagtttatagagaggaggtagtgaatacttacagagaaacaagaggccatggaacctttggagagagaccatgataagagagtggggaggatgcctgcacggtttcccatatacagctcccccaaactgactgtacatatacaaattattaatcttactttttcttaagacccatggcatactttgtaaaaagaacttcttgaactttcttgagtgaatttttattgttcactagctccttatttaagcagacattgatggttactaacacaataaccattagctcttttattttaaagccctgaattatatctacattttccagcctccttcatgtagccacatttccctgagaaggt

SEQ ID NO: 3853 - DNA, 1993 bp, Homo sapiens
  MAP TO AL033520.9; EXPRESSED IN PLACENTA, SIGNAL = 3.5; EXPRESSED IN HBL100, SIGNAL = 3.6; EXPRESSED IN HELA, SIGNAL = 4.3; EXPRESSED IN BRAIN, SIGNAL = 2.8; EXPRESSED IN BONE MARROW, SIGNAL = 3.4; EXPRESSED IN HEART, SIGNAL = 3.2; EXPRESSED IN BT474, SIGNAL = 3.9; EXPRESSED IN ADULT LIVER, SIGNAL =   5; EXPRESSED IN FETAL LIVER, SIGNAL = 4.1; EXPRESSED IN LUNG, SIGNAL = 4.7
agagcccagcagttcaagaccagcctggctaacacggtaaggcctgtcttgaggggaaaaaatagtgaatcagtgaaaaaggagataatctgattctaagaagcaataaatattggcttgaaaactgcccattaaataggccattctatgcattctcctggactatatggtacttcccaatctagaaatgcacatagtaagaggccttaaacccaatgatcagaactaggagaaggagatgggatgagtgaaggaggtacagagccacttacttggctgggggcagggacaacatcttgtgcatggtggaggtcattcgatctctgcccaaactgaaggcatccttagtcagggacacagcttccttggtgaggtccatggtggcatgtagagcctccttggtggcatccttggtcatgtgaatagcacttgacaattctccctcaatgttcttcaaggggatgagctcaccctgtccattcacagcagtctccctgccagctgggggcttcaatgcagctggtgagctggaggcttgggttctgctcagtttcttggcctgtagggactctactgcctcatggcccttccctgccagctgctgggcaagtggacctgagtcctgcagttctccattgctatgtggcctctcctgggatacatcctgattttcaatgctactttcctccaagaccttctcagggcttgctgggccctggtctgatgaggcatcagacttcagttcccgatcctctgaaggagatagctctgaatctacgaggctagtgctatctgagcctgcagagtcagcatcgacagcaccgggtgcaggatgcataagcagagccacttcagcactgggaaagagaactccaatgcaagctgtctgattctgcaggggagacccagtcattgactctgtatccttagtcagctgctcctgaagcctctgcagcacctccttcaggcgaagcagagccaagtactggtagtggtcaagcctcacgcggacatgggccggggaatgtacaagcatatgaacatctgctacatcctccagctctgtcagaggccctttgttgtccataccactactgccttctttcagaatttccatgacttctgtaagtcctgataagcttttcaagtcatgttcagtctttgaccgcggatgggacatagagtcaggggcaagagcctcagactggacaggacttccaaaactggctgatggtttcagcctcccctctgaggccaaaagaagcttccgtgcctgggcttgctgccagcggaggggtaggcaggcccaaatggacagggggaagggggctacaaaattcaaggtatggcctttgaagttttctgttccctcaaagtccaaggagatctgggtaaagtggacagaccagagatcccaggaagccttaggtctctggggagggagggtattaggctgaggcaggcaggaatccatctgaaaggcatgatgcaaaaaaagcatgtgcagaaggctaaagccacctggaaccttaggaaagtgatcataattggaatgaaagaactcagcagcagcaaaaccccggaagagactctggaggtctgaacaactacaatgtggagcatgacgtgtattggtggcaatcatgcctgacgcagagaagacaagggcctggggacgatgcaactctgcccgctctctcttttccagtggaaagctcaccttcacagagaaaatgaaacacaattcagaatggtcatctgagtatctcagcatcccactattaatacacatgtaaaagatcctttgggctgtgaaactattttcttacttccacaaaatggacagagcaaaaccatggattatatccattggaaaaatgcagctgtggctactaacaggggataaaagtcacactctcccctcaccttcaaccagaatgcatctagtcggatgtccaagtgttcatctttctgacttgaatcttccagcttg

SEQ ID NO: 3854 - DNA, 476 bp, Homo sapiens
  MAP TO AL078474.2; EXPRESSED IN PLACENTA, SIGNAL = 1.2; EXPRESSED IN HEART, SIGNAL = 1.3; EXPRESSED IN ADULT LIVER, SIGNAL = 0.76
acacttttcacttccgcaggaaggttcatctgtgtaccagtttctgcaaacagagagtaataggaacactcagatacatgcctactaaatgattctgcctgtcctactctgacatcctctacaggtaacagagtcctccctctatctttggagttccccagagcacctgccaactgctcaagatccatactcaccggtactgggaattgcttccatcagaccactggtagagatctgggcaggcaccagatgtttgcccatctccattcctccaaagccctatccagaaatcaccatcagaaatccctgtcccgggttttgtcaggttttgcaacatgctctctattaacttctgttctgcttcattctcaaggctgaggaggactcctccctcactctcacaagccaggcgtgcctcctgaaagctcactcggctggacagttcatggaagtaggccattttgtagcagggatgc

SEQ ID NO: 3855 - DNA, 473 bp, Homo sapiens
  MAP TO AP000124.1; EXPRESSED IN BONE MARROW, SIGNAL = 1.1; EXPRESSED IN ADULT LIVER, SIGNAL = 0.74; EXPRESSED IN BT474, SIGNAL = 0.65; EXPRESSED IN LUNG, SIGNAL =   1; EXPRESSED IN HELA, SIGNAL = 0.63; EXPRESSED IN PLACENTA, SIGNAL = 0.91; EXPRESSED IN HBL100, SIGNAL = 0.76; EXPRESSED IN FETAL LIVER, SIGNAL = 0.81; EXPRESSED IN HEART, SIGNAL =   1
ggaagaaaggtacaagtatttcagctatataaatcctattgcttttgtaggttttaacatgcaaggaattctgtttgacaatcaaactcaaggcacgcacaggcttagtgaactccctccattcttcactgccaggtgatgtagggagaaggtggagccaacactcagcccactgcccatcagcagtaaggccaaaggaagaggaaattcctcacctattaacatggacaatgagaccatggggaggacagttcaagggtcttctggctttgcaaagggtcagatctggatcaccgaatacatgttggaagatggaatactgctttcctgttaagtccatgtatatggctctcatgcaccattcctgacaagggcagaccagtttttcttcagctaccacagtttccacctgagtggattcttcatagttgtactggaagaaatcttgaagagcattgagttcagggttccct

SEQ ID NO: 3856 - DNA, 477 bp, Homo sapiens
  MAP TO AF027390.1; EXPRESSED IN FETAL LIVER, SIGNAL = 5.1; EXPRESSED IN BRAIN, SIGNAL = 5.2; EXPRESSED IN LUNG, SIGNAL = 5.5; EXPRESSED IN HELA, SIGNAL = 5.2; EXPRESSED IN PLACENTA, SIGNAL = 5.2; EXPRESSED IN HEART, SIGNAL = 3.7; EXPRESSED IN ADULT LIVER, SIGNAL = 6.6; EXPRESSED IN BT474, SIGNAL = 5.1; EXPRESSED IN BONE MARROW, SIGNAL =   5; EXPRESSED IN HBL100, SIGNAL = 5.3
attttgctctgacaggtgccaagagccataataattcagtttcaggggttgagttgattcacagttaggtgttggttaccacatcagtctgcatctacttccagttaccctgttccagcaggatttctggttttccaacccaaagtatgaggctcctgaagcaccaccccctgctggtccctggatgccaacattttccctgtagcccaggaagctgtcaatgtttcatccaggacaagagaggctgcaagcactgggtgacttctctccatctctgtcttcttaggaagcatgagcctggggctcctcagtgtcctcggcatcctgaggcttcgtgcagacacagacatctgtccagtgcttctacttgacttcaacccgagggttggcccaattatctataccaggggtcagcatactctttttgcaaagggccagatagtaaacattttaagatgtgtggagaattcaggctcc

SEQ ID NO: 3857 - DNA, 418 bp, Homo sapiens
  MAP TO AC012443.1; EXPRESSED IN HBL100, SIGNAL = 1.5; EXPRESSED IN HEART, SIGNAL = 1.1; EXPRESSED IN BRAIN, SIGNAL = 1.9; EXPRESSED IN LUNG, SIGNAL = 1.6; EXPRESSED IN HELA, SIGNAL = 1.6; EXPRESSED IN PLACENTA, SIGNAL = 1.8; EXPRESSED IN ADULT LIVER, SIGNAL = 1.9; EXPRESSED IN FETAL LIVER, SIGNAL = 1.6; EXPRESSED IN BT474, SIGNAL = 1.3; EXPRESSED IN BONE MARROW, SIGNAL = 1.4
acaaggtccacgttttcaggaagaaccagttaagttacctgaggcatagtcaagaaccagcaccagggtgggacttcacaggacagctggagaaatcttagactcgttgatttggtgtttgatgagctgtaccagatggatgatggatggatgaacctgaaaagatggatgaacttgaaaagggggtaggaggtttttctctctaatgctaatctctccacatctgtctttagatttgacttgaagacactgcctgtggactttgtggaatgcttgatgcggttcctaccaactgagaatgaagtgaaagtgcttcggctctacgagcgggaaaggaagcctctggaaaacttgtcagatgaagatcggttcatgatgcagtttagtaaaatcgagaggctcatgcagaagatgacca

SEQ ID NO: 3858 - DNA, 1981 bp, Homo sapiens
  MAP TO AC010896.2; EXPRESSED IN BONE MARROW, SIGNAL = 3.7; EXPRESSED IN LUNG, SIGNAL =   4; EXPRESSED IN PLACENTA, SIGNAL =   3; EXPRESSED IN HEART, SIGNAL = 3.7; EXPRESSED IN HBL100, SIGNAL = 3.1; EXPRESSED IN HELA, SIGNAL = 3.7; EXPRESSED IN FETAL LIVER, SIGNAL = 4.1; EXPRESSED IN BT474, SIGNAL = 3.2; EXPRESSED IN ADULT LIVER, SIGNAL = 4.3; EXPRESSED IN BRAIN, SIGNAL =   3
acaggtagcccaggagcaccatgagggggagaactcggtgctttgccagctggtgaaagacaaagagcagctggtgggccaacaccagggcctgcgccacatccagaaaaaggtggccaggtagaggaaatgacagaggaaggcggcacaaggcagagcgggcttcggggccctggagagaggaatggggcgcccaggaagcaagtgtctgcggccagcaagcagaacaccatgttgagcagggcggcgtggcggaaataggagatcttgttccgcaccacgactctccacaccagccagtacacacccaggcacacaagcagcgccagtatggaagctcccaagcccacttgagtcagcagcgccagagcgggttcttccggaacagtgtgtggggacatgaggacggagaaggcagtgaggtgctggcagaggcactgagcagtggggctggcactggccacctgtgcctggcacccttctttggaccaaccccccctgccctggaagagactgtgatcccagaagacacagtgaggggaaccatctgtgttcccaaagtccatgatgacctctccctggctgaaggcccggtcacctgccatgatggaaatgacaaggaccaggccaggagtggcatagagggaatcccccagcccttgtccatagtttgagggcagaaggtggtccagttttcgcagcaccaggctagtaatacttatttcagttccattacggaccaatggggccagtgagtgcctgggaatctgagcctgcagtgggggccgagtagggaaggagatgctgtagtcagcaggaaacgtgggtccaaacagctggctctgcagcagcacattgggtaagctgaaggcgaaggggtggtcctgtgggcacaggctgcatgccagggtctccacagccagcaggagagtcgagcctgcccagggcttccgggcttgggccagggtccacagagacctggtgtccatatctaggaccttgtctgtggcaatcaggagattctgcagcacccaaaagaaagatgaaccccgtctgctggcgcccacaggactgagccgggggcaatgagaacaacagaccccacaccttcccttcccagtccagtgtgcgacccaaggttggagagaaaagggagaggaagacaggcctgtgaagggagactttctagatgggaagaacagggagctgtttggccaaccacctggggcatcttcaaggatatgtcccctgacctgcacccagcccctctgctgaaaacccttcttccccctccatccctaggggccacccaggttctaagaggggacttctcccattctttggcccctccaggtctgcaaagctaggaatggtgaccagcagtggtagagggcaccgtgtcctggaggcgacggccacacgcatgtctgtgcattcacacatgccatgtattcccaggcataaacggtgtgtaatatcattgccctttgttacacttttggctgcagctcatgggtcaccaatggatgcccatacagagagccgatttaggtgagcccagcaaagccaagcatacttcagcgtctccatagaaacttcctgtctgtatcatagccacacgcctgcatgcgcacacacgcctcgggcctcatgtctccacacccttgcctgcctccaacccccatgtgctcccagcgccaggcctccattctgcagcctcagagagtggtgtctgagaggagaaatggatcaggagcaggcccctggactctggaaaggtctgctgcccaacagcccatggtgacatcagagggacagaaatgcccacaggtggggagtcttcagcccccgactgcccagctggcccccactgtggctcagagatctcaccttcagggctctgcggtcaagctgtattctggcctctgccaccaccttggccacgtatttcatggtgctcagcagggtcagtaagtcggag

SEQ ID NO: 3859 - DNA, 403 bp, Homo sapiens
  MAP TO AC012447.2; EXPRESSED IN BONE MARROW, SIGNAL = 5.7; EXPRESSED IN LUNG, SIGNAL = 5.6; EXPRESSED IN HELA, SIGNAL = 5.8; EXPRESSED IN PLACENTA, SIGNAL = 6.1; EXPRESSED IN HBL100, SIGNAL = 6.2; EXPRESSED IN HEART, SIGNAL = 4.4; EXPRESSED IN BT474, SIGNAL = 5.4; EXPRESSED IN BRAIN, SIGNAL = 4.8; EXPRESSED IN ADULT LIVER, SIGNAL = 6.7; EXPRESSED IN FETAL LIVER, SIGNAL =   5
ttaaacacgggaaaccaagcacacattttcatcaacttttgctcctgacagcccatcagaatgacagaagtacagattatcaccgaaacaactcagagaagtgaggcattggtagaacacaagcagccatcagcaaataaatttttccccaaacacaatttgagaagaagaaaagagagggaaagccacaacccagaatatgctccaaaggggctgcagttggcatgaaagcttatcctcctggtccctaaataagttctgggttcctgtggcagctatggggcaagaagcactgggacactgggataagcaggagaatgcaggtggacaaggggactgccactgtcagagaaaagaagttgtatacacaggtggggaaagacgaggaggaggcctatcaaca

SEQ ID NO: 3860 - DNA, 460 bp, Homo sapiens
  MAP TO AL049844.6; EXPRESSED IN BT474, SIGNAL = 1.3; EXPRESSED IN BONE MARROW, SIGNAL = 1.1; EXPRESSED IN HELA, SIGNAL = 0.91; EXPRESSED IN ADULT LIVER, SIGNAL = 1.1; EXPRESSED IN BRAIN, SIGNAL = 0.92; EXPRESSED IN HBL100, SIGNAL = 2.1; EXPRESSED IN FETAL LIVER, SIGNAL = 1.3; EXPRESSED IN LUNG, SIGNAL = 0.94; EXPRESSED IN PLACENTA, SIGNAL = 1.3; EXPRESSED IN HEART, SIGNAL = 0.97
ttactgcttcagtgggatggtaaccatagaacgttacagttggaagagaccttcaagagcatttaatctgagacttctgtattttagagcagaaaatgtgagattcattgcttttcctaccaaaccagattgatcaaacaccctcactcttcctgcctagacaagaacccttcctgaaataccttccaattttacttgtgtaaagtggttttgttctgttactttttaagttgttttggtaggtaatttatgacctttactttaggaaatctgagaatgaagatgacagcgagtgggaagatgtggatgatgagaagggagatagcaatgatgactatgactctgcaggcctattgtcagatgaagactgtatgtctgtgcccggaaaaactcacagagctatagcagatcacttgttctggagtgaggaaacaaagagtcgcttcacggagtattcgat

SEQ ID NO: 3861 - DNA, 461 bp, Homo sapiens
  MAP TO AP000135.1; EXPRESSED IN FETAL LIVER, SIGNAL = 1.2; EXPRESSED IN LUNG, SIGNAL =   1; EXPRESSED IN HEART, SIGNAL = 0.91; EXPRESSED IN BONE MARROW, SIGNAL = 0.94; EXPRESSED IN HBL100, SIGNAL = 1.1; EXPRESSED IN PLACENTA, SIGNAL = 0.71; EXPRESSED IN BRAIN, SIGNAL = 0.76; EXPRESSED IN ADULT LIVER, SIGNAL = 1.2; EXPRESSED IN HELA, SIGNAL =   1; EXPRESSED IN BT474, SIGNAL =   1
ctagcacaccttactaaatgtattctgaagacatctgatgagattcagaaaataatgcaagtgaatacattctgtaaatttttggttcactccttactgctgctttatagctggtttaaggtacgaaagcaaatctaagggtatacatcaatgaataaacaaggcacaagaaagcaatatttcaaataaaaatcaacacagtggtaacatttcttttatagttttgctaacagttataaaacactttaaacccaagacatgaaaaaatagtacatgaggtttgaatataaaggttgagttaccacttgcagtttccggtttcacttgagggaggcctttttgtcgacgttctctctctttttctcgatcccgtctttcttgagatcgagatcggggagaatgtcggcgtctatccctggaccgagatcgagaacgtcgatgccgagaccttcgagatctag

SEQ ID NO: 3862 - DNA, 447 bp, Homo sapiens; identical to SEQ ID NO: 3441
  MAP TO AP000199.1; EXPRESSED IN PLACENTA, SIGNAL =   1; EXPRESSED IN BT474, SIGNAL =   1; EXPRESSED IN BONE MARROW, SIGNAL = 0.87; EXPRESSED IN FETAL LIVER, SIGNAL = 0.67; EXPRESSED IN LUNG, SIGNAL = 1.1; EXPRESSED IN ADULT LIVER, SIGNAL = 0.67; EXPRESSED IN HBL100, SIGNAL = 0.95; EXPRESSED IN HELA, SIGNAL =   1; EXPRESSED IN HEART, SIGNAL = 0.99

SEQ ID NO: 3863 - DNA, 438 bp, Homo sapiens
  MAP TO AC012513.2; EXPRESSED IN BONE MARROW, SIGNAL = 1.8; EXPRESSED IN HEART, SIGNAL = 1.1; EXPRESSED IN ADULT LIVER, SIGNAL = 1.4; EXPRESSED IN LUNG, SIGNAL = 1.3; EXPRESSED IN BRAIN, SIGNAL = 1.5; EXPRESSED IN HELA, SIGNAL = 2.4; EXPRESSED IN HBL100, SIGNAL = 3.7; EXPRESSED IN PLACENTA, SIGNAL = 1.3; EXPRESSED IN BT474, SIGNAL = 1.6; EXPRESSED IN FETAL LIVER, SIGNAL = 1.2
attcaaggggagccaaaatctcaagaaattcccagcaggttacctggaggcggatcatctaattctctgtggaatgaatacacacatatatattacaagggataatttagaccccatacaagtttataaagagtcattgttattttctggttggtgtattattttttctgtggtcttactgatctttgtatattacatacatgctttgaagtttctggaaagtagatcttttcttgacctagtatatcagtgacagttgcagcccttgtgatgtgattagtgtctcatgtggaaccatggcatggttattgatgagtttcttaaccctttccagagtcctcctttgcctgatcctccaacagctgtcacaacttgtgttgagcaagcagtagcatttgcttcctcccaacaagcagctgggttaggaaaaccatgggt

SEQ ID NO: 3864 - DNA, 450 bp, Homo sapiens
  MAP TO AC009309.1; EXPRESSED IN BONE MARROW, SIGNAL =   1; EXPRESSED IN HBL100, SIGNAL = 1.2; EXPRESSED IN FETAL LIVER, SIGNAL = 0.96; EXPRESSED IN HEART, SIGNAL =  11; EXPRESSED IN BT474, SIGNAL = 0.99; EXPRESSED IN HELA, SIGNAL = 0.97; EXPRESSED IN ADULT LIVER, SIGNAL = 0.83; EXPRESSED IN BRAIN, SIGNAL = 0.88
agctagcagacatccgacttggttgtgatgatggttgcacagctctctaaattttccaaaaattgttgaattatatacataaaatcagtaattaatttatggttataccttagtaaggtggtaaaagcttcacagatgagtctgatgctcagggcacgttaattatgtttaatacttggtggcagtgatacatctcttaatttttaatatctggatgcatattttggagtattaaatatatatgctcctatctttacaggaatcctacggcccctgaatattttggcatcttcaacctaccgcaactgtgtcaagaatgcctctcttatttctgcattgtccactggacgttttagtcatattcagacaccagttgtttcctccactcccagacttaccacatctgagagaaacctgacatgtgggcatacctcagtgatccttaatagg

SEQ ID NO: 3865 - DNA, 465 bp, Homo sapiens
  MAP TO AC007832.1; EXPRESSED IN PLACENTA, SIGNAL = 1.2; EXPRESSED IN BONE MARROW, SIGNAL = 0.96; EXPRESSED IN HBL100, SIGNAL = 0.85; EXPRESSED IN FETAL LIVER, SIGNAL = 0.91; EXPRESSED IN LUNG, SIGNAL = 0.83; EXPRESSED IN HELA, SIGNAL = 0.83; EXPRESSED IN ADULT LIVER, SIGNAL =   1; EXPRESSED IN BT474, SIGNAL = 0.9; EXPRESSED IN HEART, SIGNAL = 1.2; EXPRESSED IN BRAIN, SIGNAL = 0.96
  unsure 65
agatggaaacacaaccaggcatcacttaatgacgggaataccttcagagaaacgcactgtaaggntaacttggttgttgtgtgaacatcatagagtttactgacacatcctagatagtagagcctcctacacccctcagctatgatatagcctattgctcctagatcacagaatcttaccgcctgttactgtgctgaatactgtaggcaattataacacaatgataagtatttgtgtgcctaaacatagaaaagatacaaatatggtattataatcttatggggctactgtcttacatccaatcattattgaccaaaatgtcgtttggcccatgaccgtgttctaaaatccgaaaaaatctgaaattcaaaacctttctggttccaagcatttcagataaggaatactcaacctgtaccttgaaaatgtaagtgttcagtttcctggaaaaataaagcattcaaa

SEQ ID NO: 3866 - DNA, 474 bp, Homo sapiens
  MAP TO AL034395.6; EXPRESSED IN PLACENTA, SIGNAL = 0.94; EXPRESSED IN BT474, SIGNAL = 1.1; EXPRESSED IN BONE MARROW, SIGNAL = 1.4; EXPRESSED IN LUNG, SIGNAL =   1; EXPRESSED IN HELA, SIGNAL = 0.89; EXPRESSED IN ADULT LIVER, SIGNAL = 0.95; EXPRESSED IN BRAIN, SIGNAL = 1.4; EXPRESSED IN FETAL LIVER, SIGNAL = 0.74; EXPRESSED IN HEART, SIGNAL = 1.2
catctagaaggctctcagtaaagtgaacacaaatattattgtattcctttgaataccatgatgtcaacagtgtgcctctgcccatcattcccatttacatcaccccttacactttctgatgagctgctgcacgcgtttttctggctccattttcactgcgcacctcccattacacacccaaggtatggagggagagaatatgcaacggccaaccacaggaatgagaaagtcagaaaaggggccctgggctctctgggcagcctgcataaactgtcagctcagattcctgggtaaccatgtccagccctccagaggtctccttggaaattatagcttttaaggtttcctttggctgtgacatgtctgaacttcaggtcgaatttcccctccaacacatcagcttgcatttggagcaggagggtaagatcactttggttatttcctcttttgattccctttggtcttatttctccc

SEQ ID NO: 3867 - DNA, 455 bp, Homo sapiens
  MAP TO AC008111.1; EXPRESSED IN BT474, SIGNAL = 0.98; EXPRESSED IN BONE MARROW, SIGNAL = 1.3; EXPRESSED IN HELA, SIGNAL = 1.3; EXPRESSED IN PLACENTA, SIGNAL = 1.1; EXPRESSED IN FETAL LIVER, SIGNAL = 1.3; EXPRESSED IN LUNG, SIGNAL = 1.4; EXPRESSED IN ADULT LIVER, SIGNAL = 1.2; EXPRESSED IN BRAIN, SIGNAL = 1.5; EXPRESSED IN HEART, SIGNAL = 1.2; EXPRESSED IN HBL100, SIGNAL = 1.1
  unsure 118
  unsure 284
  unsure 357
cacctggagatccccattcatggcagcctctaactctttttctaagctgtgtagctgggcctccaggcaccctgcctgtgcccaaaaggccctttcctgcactgcatccctcaggganttgggagtgtacttcttgtagcacagaaaaaatgcccatccaactctgctgtcaaaggctcattccttctcggtgctctgcacttccagctgcttcagtgctttctccgtgctcgtggggtacccatctactgctggccaggtttccaacagagttcacccttgcnagcacagctgtgaccaggtaccacaacccatgtcgtggccacattgccaacccagaatcagcagggaccaaanggctcgcccaccttgggatcctgttcgtgatgccaattgtcaggttctaactgaggtctgaggggagtcagtgggtgagtggtgggtagctggaaaaa

SEQ ID NO: 3868 - DNA, 455 bp, Homo sapiens
  MAP TO AL049838.2; EXPRESSED IN PLACENTA, SIGNAL = 0.93; EXPRESSED IN BT474, SIGNAL = 0.65; EXPRESSED IN LUNG, SIGNAL = 0.98; EXPRESSED IN FETAL LIVER, SIGNAL = 0.61; EXPRESSED IN HEART, SIGNAL = 0.97
agtcccccatggagttcttcattgtagaagacccactctgcttcattaactccactgtagacagtattatcacctgtttttacacttactcaagacagagtttataccaagaagaacctcagagaaaggagatttgggttattggagttcagaccaactactaagaaacataagccacagatcttaattatttccccctcaggaagcaaatataagtttgcagaggtatttcataaaacccacacacttgtttcagctagcacttgatatccacatgtcttcaacagggtagtaaagaggacttccatcctgaaatccccttccatgttgggaatatcgtagtagaagatgcagactctgggaccagaaagacaggtttcatcctttactatctgagagtcatgggttcctttgcaaaagggtaataacaatatgctgcacttcacacatttgtt

SEQ ID NO: 3869 - DNA, 472 bp, Homo sapiens
  MAP TO AP000104.1; EXPRESSED IN PLACENTA, SIGNAL = 0.62; EXPRESSED IN BONE MARROW, SIGNAL = 0.65; EXPRESSED IN LUNG, SIGNAL = 2.8; EXPRESSED IN ADULT LIVER, SIGNAL = 0.65; EXPRESSED IN FETAL LIVER, SIGNAL = 0.89; EXPRESSED IN HEART, SIGNAL = 0.92
gaagtcaggcatggagacgcctgctcaattcattgataaaatgggacagatatttccctgccctcaccaactgagaacataatcagatatcaaaatcccaggcacagaaatgtgggaacccagctccaccttacccgacctctgcccaccttcctggggatacccctgcatgtctcttgtctccaaaccccgaaggctcagtgcacaggctcctgtccccctggggctgcagcctcaccttcatgggctctgagccccaaagagccacgaccgcaggagttgtgccccttccgtcccctggccacactcagcctgctgctcctttttgttcctaacacacaacccggccatggtcctgtggcagctgctgtgactgtcacctctctgggcactgctgctgctgttaactccccttcctttgtgccctgaaaagggtgtgaccaccttggagagcctaaagggctcctttttc

SEQ ID NO: 3870 - DNA, 452 bp, Homo sapiens
  MAP TO AP000095.1; EXPRESSED IN BT474, SIGNAL = 1.1; EXPRESSED IN PLACENTA, SIGNAL = 1.2; EXPRESSED IN HEART, SIGNAL = 1.2; EXPRESSED IN BRAIN, SIGNAL = 1.4; EXPRESSED IN ADULT LIVER, SIGNAL =   1; EXPRESSED IN HELA, SIGNAL = 0.87; EXPRESSED IN LUNG, SIGNAL = 0.84; EXPRESSED IN FETAL LIVER, SIGNAL = 1.1; EXPRESSED IN HBL100, SIGNAL = 0.86; EXPRESSED IN BONE MARROW, SIGNAL = 1.1
aatcggggccaaagttaatctcaacatgtcagctatcttctttccaattatatagtgccttcaaaatataggagtgaactttcctgtcctttgcaagtcaatttgtggattggggtctcacaacagccgtaacatagttatgacaaagatgataattaagaatacttctggatgtcttcttcaacattttggtgaccaatatccagatggttttacttccaggttctccttaccgggataaaattactattgctattcttcaactccaagaagaagggaagctgcatatgatgaaagagaagtggtggcgtgggaatggctgccccgaggaagacaacaaagaagccagtgccctgggagtggaaaatattggaggcatcttcattgttctggctgccggactggtcctttctgtatttgtagctattggagaattcatatacaaatcacgg

SEQ ID NO: 3871 - DNA, 430 bp, Homo sapiens
  MAP TO AF130866.1; EXPRESSED IN BT474, SIGNAL = 2.3; EXPRESSED IN FETAL LIVER, SIGNAL = 2.8; EXPRESSED IN LUNG, SIGNAL =   3; EXPRESSED IN BONE MARROW, SIGNAL = 2.7; EXPRESSED IN HEART, SIGNAL = 2.4; EXPRESSED IN PLACENTA, SIGNAL = 2.6; EXPRESSED IN ADULT LIVER, SIGNAL = 3.4; EXPRESSED IN BRAIN, SIGNAL = 2.5; EXPRESSED IN HELA, SIGNAL = 2.8; EXPRESSED IN HBL100, SIGNAL = 2.5
gtgatcaaaaactgccctccggaaatctaggatggatgaggattagggagaaaaatctctggttctttctgctccatgttccctgccctgatgaccctcatctcctgactaccagcctctccctggccatacctgtctgctccacacaaatagccctgcttttcccctctgctgctagcagaaatgaagaagagctctgagattcaaataggaggttttggtcccacctaggcgaggttcagaggcttgtccagctgctgttcctttgagaggcagcatgtgtgctggtctccccagctggagagggaatgccatcagctctgaagacactcagactaggagcaaagaggacaatggaggcatcggcagcagcttcttgggtgagtgactgggcatgtctggggctggatgagcaactggacatgtctgg

SEQ ID NO: 3872 - DNA, 382 bp, Homo sapiens
  MAP TO AF070718.1; EXPRESSED IN BONE MARROW, SIGNAL = 3.5; EXPRESSED IN ADULT LIVER, SIGNAL = 4.1; EXPRESSED IN FETAL LIVER, SIGNAL = 3.3; EXPRESSED IN BRAIN, SIGNAL = 2.7; EXPRESSED IN LUNG, SIGNAL = 3.7; EXPRESSED IN HEART, SIGNAL = 2.8; EXPRESSED IN HELA, SIGNAL = 3.6; EXPRESSED IN HBL100, SIGNAL = 3.5; EXPRESSED IN PLACENTA, SIGNAL = 3.6; EXPRESSED IN BT474, SIGNAL = 3.4
cataaaatttccacatttcacttgaagtaataaaatgttgataccagtagattgtaagtcagtcactgttacaggctgaattgtgcttccccaaaatttatgtgttgaagtcctaacccccaataattcaaaatgtggctgtgttgggagatagggctcttaaagagggaattagaggaaaatgaggtcatatgtatgggctgtaatccaatatgaccagtgtctttataagaagacgagattaagacagagatgtgtgtgcacatggagaaaagaccaggtgagacacagcaagaaggcaaccagctgcaagtcaaagaggcctcagaagaaaacaaacctgttgacaccttgatcatagacttccagcctccagaactgt

SEQ ID NO: 3873 - DNA, 454 bp, Homo sapiens
  MAP TO AP000133.1; EXPRESSED IN BRAIN, SIGNAL = 1.3; EXPRESSED IN HBL100, SIGNAL = 0.86; EXPRESSED IN HEART, SIGNAL = 1.2; EXPRESSED IN PLACENTA, SIGNAL = 1.3; EXPRESSED IN BT474, SIGNAL = 0.8; EXPRESSED IN BONE MARROW, SIGNAL = 0.9; EXPRESSED IN LUNG, SIGNAL = 1.5; EXPRESSED IN HELA, SIGNAL = 0.99; EXPRESSED IN ADULT LIVER, SIGNAL = 1.3; EXPRESSED IN FETAL LIVER, SIGNAL = 0.92
caaggaactccccaccatccctctgaaagccagctgcaccggcgtcatcctgccctcaaatctgaggctgcatttagaacctgaagcagcagaaatgagcgtcccgctgtcctgcatcatcctacagggtcaggacgaaggggacaaagggtgcgtcagcacctccaccagcctgtccctccttgggcagcaagatttacaaagcatttaatttaggtccgacaaatattatgtgccctgaggtgctgctctgggcttggttgtgcctttttacattcatctgctcctcagtgaccactgcccaatcacccatgtcacgggcttggcagccaggctcaggtggaagcttcctgcatccgtcctctccactgaggaggggaacaggctgggccatccttcctgatgggaagcccaaggaccagtaaagcctggtggtctttgatgtggggcagtc

SEQ ID NO: 3874 - DNA, 469 bp, Homo sapiens
  MAP TO AP000237.1; EXPRESSED IN BONE MARROW, SIGNAL = 0.77; EXPRESSED IN HBL100, SIGNAL = 0.67; EXPRESSED IN ADULT LIVER, SIGNAL = 0.65; EXPRESSED IN HEART, SIGNAL = 8.2
tttctcttcatctcctcgggcctccctatttcttgagacacaatattgaaattagactaattagtaaccctacaatggcctctaggtgtttaagtgaaaggaagagttatacatctcttacttaaaatcaagagctagaaattattaagcttagtgaggaagacatggcaaaagccgagacaggcggaaagctaggcctcttgcaccaattagtcaagttgtgaatgcaagagaaaagttcgtgatggaagtgaaaagggctaccccagtgaacacacaaatgataagaaagcaaaacagccttattgctgatataaagaaagttttagtggtctggatagaagctcaaaccagccgcaagagcctcttaagccaaagcctaatccacagcaaggtcatcaataacgaggcaaaaccctccaccagcaaaaagattacaacttgctgaaggctcaggtgacagttagca

SEQ ID NO: 3875 - DNA, 479 bp, Homo sapiens
  MAP TO AC010104.1; EXPRESSED IN BONE MARROW, SIGNAL = 1.1; EXPRESSED IN ADULT LIVER, SIGNAL = 1.1; EXPRESSED IN FETAL LIVER, SIGNAL = 1.1; EXPRESSED IN HEART, SIGNAL = 0.99; EXPRESSED IN LUNG, SIGNAL = 4.2; EXPRESSED IN BRAIN, SIGNAL = 0.95
aaagaggccagaaacaagaggaataatgctgagaaaatatagcatgaaaaagtggaagagaacagaacagaaaagcagagatgttcagtctgcatgaaagaggtaatgatggatcatctcatcacagctgcctttccatggaccctgctgcatggggtgaatagagccccatctaaatccatttgggctgccatcacaaaacacagtagaccaaggcttagaaacaatagacatttactgctgtcagtcctggaggctggaagtccaagatgaaggtgtggaagattcagcatctggcagagaccagcttcctaattaacagtgctatcttgctgtgtcctcatatagtggaaggggcgagggagctccctggggtcccttttataaagacactgatcccattcatgaggacccaccctcatgacctcatcacctcctaaaagccctacctgctaatatcatcatcttggggactaggg

SEQ ID NO: 3876 - DNA, 353 bp, Homo sapiens
  MAP TO AJ003147.1; EXPRESSED IN PLACENTA, SIGNAL = 7.2; EXPRESSED IN HBL100, SIGNAL = 8.2; EXPRESSED IN HELA, SIGNAL =   8; EXPRESSED IN BT474, SIGNAL = 7.6; EXPRESSED IN LUNG, SIGNAL = 7.9; EXPRESSED IN HEART, SIGNAL = 5.6; EXPRESSED IN ADULT LIVER, SIGNAL = 9.6; EXPRESSED IN FETAL LIVER, SIGNAL = 7.8; EXPRESSED IN BRAIN, SIGNAL = 6.7; EXPRESSED IN BONE MARROW, SIGNAL = 7.1
tccattcttctccttcagcccagcctcctgctcttcttaaagagggtcgtcccggagagacgacggacacctgctttgtctctggggtccatgtgagtcaccagtccctttgtcttctttaaggcacttggccctgttgagtttgtaaaatgggacttgctgtcccatcaggcctctttcatctgacccatcctgtccccgccagtgctgctgggaggcctgagccgggtcttctcaccccattccagggacctgtggcattgggagacatcccattctatttctcccgggaagaatggggcaccctggaccctgctcagcgggatctcttctgggacataaagcgggagaac

SEQ ID NO: 3877 - DNA, 431 bp, Homo sapiens
  MAP TO AL008626.1; EXPRESSED IN PLACENTA, SIGNAL = 1.6; EXPRESSED IN HBL100, SIGNAL = 1.5; EXPRESSED IN BT474, SIGNAL = 1.5; EXPRESSED IN ADULT LIVER, SIGNAL = 1.8; EXPRESSED IN HEART, SIGNAL = 1.3; EXPRESSED IN FETAL LIVER, SIGNAL = 1.6; EXPRESSED IN LUNG, SIGNAL = 1.7; EXPRESSED IN BONE MARROW, SIGNAL = 1.8; EXPRESSED IN BRAIN, SIGNAL = 1.8; EXPRESSED IN HELA, SIGNAL = 1.8
catgttttgtaactgagccatgtaatgtactataatgacttttcctttcttgcaaaactttctggtttccttgaagttagttgtcttttgtttatttgcttagatttttatgaatgcacctttagttttttctgtatacttaccagtaattcagctgattgaaagctctatgtctaggggtagactcatggtcttcattcacatttccaccaattgtataatccctcttggtatattaggtatcctatcaattttctatcaatttctgtttcttgaggaaaccatcctgaagccttctaaccagctccatcctgagcttccagctgtccaactatattacaagactgttcatcttgttaagtctgctcaccatcattatggggatgccactcaactctctctgttgtttgatcctttgtttcctggattgc

SEQ ID NO: 3878 - DNA, 492 bp, Homo sapiens
  MAP TO AC008159.1; EXPRESSED IN BT474, SIGNAL = 0.78; EXPRESSED IN HELA, SIGNAL = 1.1; EXPRESSED IN BRAIN, SIGNAL = 0.72; EXPRESSED IN HEART, SIGNAL =  23; EXPRESSED IN BONE MARROW, SIGNAL = 4.6; EXPRESSED IN HBL100, SIGNAL = 1.2
tgaggtgtttttgtgtctttggaattctttccagagattcattcatatagtcacacctcatttccaactgaaataagcaataatcaacttaatcaccaggttccagttgactcttgtccatcctgactctcagcctcaaagtcatagccttccttagaatgatggctttctgccattaagaataatcaaaagaatgtaatgtatgatttgaagaggcctcttaaaataactggttttgttgcattttaggtttacctcctctttacctgagatgtttgcctgtccttttccttaggtaccaaaaactgtggaagagttatgtgaaacttcgccacctcctagcaaatagtcccaaagtcaaacaaactgacaaacagaagctggcacagagggaggtctgtatcaaactccattccttggtgattaacgatgatgtgcttcaggtttatttcgtgattgttgtatcacactatacttctggtacaagatgga

SEQ ID NO: 3879 - DNA, 464 bp, Homo sapiens
  MAP TO AC007784.7; EXPRESSED IN HEART, SIGNAL = 0.82
agggtcacatatttcccagtcttgactgaaaggaaccatacaatgaatcattttggaaagaatcatttctgtaaagtaagagtcatgatctaagtttgagttatcacatttatttaaagtgctgcaccctcatttgtgtgtatataaaggcatatgtactttgtgtaatttttgtgaatgtgtgcacattgtgtaaatatatatgcatgaatattagagcaactaagacttgaatggtttgattcagttcaacctcctccttcaacagatgaagaaactgaggtccaaagaaatcatgaggtcaaagaacttgctcaggatcacttggctggccagtggcaaagccggtctgagaggttttccactaatttatattgccacatttacacccagcattatgactgtaagaagctggaaaattgagataaagttgcagtaacatccaactcttaccctacgcagga

SEQ ID NO: 3880 - DNA, 462 bp, Homo sapiens
  MAP TO AL022721.1; EXPRESSED IN LUNG, SIGNAL = 2.2; EXPRESSED IN BRAIN, SIGNAL = 1.6; EXPRESSED IN HELA, SIGNAL = 2.4; EXPRESSED IN HEART, SIGNAL = 1.7; EXPRESSED IN FETAL LIVER, SIGNAL = 2.2; EXPRESSED IN BONE MARROW, SIGNAL = 2.2; EXPRESSED IN PLACENTA, SIGNAL = 1.9; EXPRESSED IN HBL100, SIGNAL = 3.4; EXPRESSED IN BT474, SIGNAL = 1.8; EXPRESSED IN ADULT LIVER, SIGNAL = 1.9
tgaaaatctgtctcgccctcccaggttatgagcccctggccccgctcccctcagctgctgcctctgtgcctgtgtggcaggaccgtaccattgcctcctcccggctgcggctcctggagtattcagccttcatggaggtgcagcgagaccctgacacggtaacgtgtttgggggtgagggtgaggctttgcacaattgtggagaggccggccgggtgatccagggctgcaactcaggatctgggggttgggggtctggcctgttcaggaagccctaggcaattctatacctgtgcagtgctcccttccccgcccccgggcctgcaagcctgagtactctcctgaccctgtctgggccctccccacagtacagcaaacacctgtttgtgcacatcggccagacgaaccccgccttctcagacccacccctggaggcagtagatgtgcgccagatctatgacaa

SEQ ID NO: 3881 - DNA, 493 bp, Homo sapiens
  MAP TO AP000107.1; EXPRESSED IN FETAL LIVER, SIGNAL = 0.68; EXPRESSED IN BRAIN, SIGNAL = 0.7; EXPRESSED IN HEART, SIGNAL = 0.83; EXPRESSED IN LUNG, SIGNAL = 0.65; EXPRESSED IN HELA, SIGNAL = 0.61; EXPRESSED IN ADULT LIVER, SIGNAL = 0.69
tcagctgcttaacagcagtagcaacaaacaacagcaggttttcaggctccacctacgatgctgtgttttgatgaaaaggttactgtgcactgtattttatttttttagatgagaagaaacttcagaagcaattgagagaccaggaagtgggtcctctggggctcaggaggcattctgatggatggcttttaaagatgtttcctccagaatcaactgcctcgttaaagcataaatgtcaagcgtaaattgttcttgtcttagaagtctctctttgactttataaacctgatatgatttattgttctgttatgaatgcgtggtgctctagtccttcaatgagcccatcacacgttttcattatgtcgtctagaggcaatttttctgcagtgttaactatgttatcttcagcattgtgcacctgcattttgactgcgacccatcacacgaggtcaggtgagaaatcttccacttgtggcatcatgttggtgcttaa

SEQ ID NO: 3882 - DNA, 437 bp, Homo sapiens
  MAP TO AL031117.1; EXPRESSED IN BONE MARROW, SIGNAL = 2.7; EXPRESSED IN LUNG, SIGNAL = 3.5; EXPRESSED IN BRAIN, SIGNAL = 4.1; EXPRESSED IN HELA, SIGNAL = 3.4; EXPRESSED IN HEART, SIGNAL = 3.6; EXPRESSED IN FETAL LIVER, SIGNAL = 3.1; EXPRESSED IN ADULT LIVER, SIGNAL = 3.2; EXPRESSED IN PLACENTA, SIGNAL = 4.9; EXPRESSED IN HBL100, SIGNAL = 3.3; EXPRESSED IN BT474, SIGNAL = 4.2
atgagttcctccctgtggacatgaattgactggcttctcagcctacagtattgcaggagaataaaattcataatgagaaacatcttttaattttataatatgtaaagccaaattgctttgctttacaaaatgggagggctatgccatgttctaatgttgtaaattaagactctacattgtatactgaaaccctgcagtaagaataaataaatagccccactaggctttccacattttcattctaaactctcttgaacagacattagcaaatggagttaaaattccttttatatttaaatatatgtagctgacataattcagatattttaaaattatttaaataagatagttactcctctagaattcaagtagaaaatggggattatcaaactattcaccataatgaagatcttaatccctgctgctattggtccatt

SEQ ID NO: 3883 - DNA, 437 bp, Homo sapiens
  MAP TO AL022726.1; EXPRESSED IN BT474, SIGNAL = 0.96; EXPRESSED IN BONE MARROW, SIGNAL = 0.91; EXPRESSED IN LUNG, SIGNAL = 1.2; EXPRESSED IN HEART, SIGNAL = 1.1
gcggaaatagaaatccatgccaatgttaataactgggtgtgagggactcctcgtaactcctgggcaagggtggaagttctagttctccattaaacctctgttgatatcatcctggctgggaggggcatgaagactcattactgcttggcctctactgacattgttgagttgagttggggtggtctggtttctgctgggcaggagtgaaagttctacctctccactaacttcttctgatgccactccagtgaggtggggaggagcattttattactgcaggatgggatggaagtccatactctccatgtggtctccatgagcaccatcagtgtggtggtggtggtgaagactccttattgcctggtggagatgaagttcctagctctctgcttttcctctatgacaccacttggataggagttttggggtatctggca

SEQ ID NO: 3884 - DNA, 433 bp, Homo sapiens
  MAP TO AL031132.1; EXPRESSED IN PLACENTA, SIGNAL = 1.2; EXPRESSED IN HEART, SIGNAL = 1.6; EXPRESSED IN FETAL LIVER, SIGNAL = 1.5; EXPRESSED IN BT474, SIGNAL = 1.6; EXPRESSED IN BONE MARROW, SIGNAL = 1.5; EXPRESSED IN BRAIN, SIGNAL = 1.5; EXPRESSED IN LUNG, SIGNAL = 1.8; EXPRESSED IN HBL100, SIGNAL = 1.4; EXPRESSED IN HELA, SIGNAL =   2; EXPRESSED IN ADULT LIVER, SIGNAL = 1.6
gccttttctacacagaaggcactaagttcacatttggtttcattaatggatgagttattctttcataaagaacataagaaaaatcaattaatattaacaaacaaacaaaaaagccctggtgcaaaaagttataatactgttacccaaatacagggagtttctggatggatttcagaagttggagaacccctgaaatgagatataaaataaggaaaagattatccttctgggcagacagcagcccatgttaaagctgtggcctcatccacttccttggctgagtacaactatgcagtacacaaaccacacaacggcatgcagcatccctaggtactcacatgttagaacaactttgagtctttctcctctgtctttagtgtagtttattgccttgactagggctgtgtctacttgttcggatgccatcattttt

SEQ ID NO: 3885 - DNA, 417 bp, Homo sapiens
  MAP TO AL021155.1; EXPRESSED IN BONE MARROW, SIGNAL = 6.2; EXPRESSED IN PLACENTA, SIGNAL = 6.6; EXPRESSED IN BT474, SIGNAL = 4.8; EXPRESSED IN ADULT LIVER, SIGNAL = 6.3; EXPRESSED IN FETAL LIVER, SIGNAL =   5; EXPRESSED IN BRAIN, SIGNAL = 5.8; EXPRESSED IN LUNG, SIGNAL = 5.8; EXPRESSED IN HEART, SIGNAL =   5; EXPRESSED IN HELA, SIGNAL = 6.4; EXPRESSED IN HBL100, SIGNAL = 6.7
tacatcctcgggaacaaagcccagctcaagggtgtgcggccagactccctgcagcagtgggagctggtgcccattgaggtattcgaggaacagcaggtgaaggccaacttcaagaagctgctgaaggcatgtgtcccgggctgccccgctgctgagcccagcccagcctccttcctgtgcttgctggaggactcggagcggctgaccccaatccacaagctgctgcaggtgccagtgctggtggtggagcccctggattcagactcctctgtgctggtgggcctggaggatggctgggacatcacctcccaggtggtatccttggtgcagctgctctcagaccccttctattgcacgctggagagcttccgcctgccagtggagaagaagtggttgtccttcagtcatcccttcagc

SEQ ID NO: 3886 - DNA, 355 bp, Homo sapiens
  MAP TO AL023281.1; EXPRESSED IN HEART, SIGNAL = 9.2; EXPRESSED IN FETAL LIVER, SIGNAL =  12; EXPRESSED IN BT474, SIGNAL = 9.2; EXPRESSED IN BONE MARROW, SIGNAL =  10; EXPRESSED IN BRAIN, SIGNAL = 9.2; EXPRESSED IN PLACENTA, SIGNAL =  12; EXPRESSED IN HELA, SIGNAL =  11; EXPRESSED IN HBL100, SIGNAL =  10; EXPRESSED IN ADULT LIVER, SIGNAL =  16; EXPRESSED IN LUNG, SIGNAL =  13
tcccaaagcactgggattacaggtgtgagcaaccaggcgatcacttttcattgcatattattctcattcatgtcatgttactcagctttctttgttccctttctgcactgaaatagagaagcatcactctacctaaggtcttggctacatccaagtcctgctgcatatatccggtgctcttctctgtatttccaagagaccagtaagcactgctcagggcagagaaaacagaacctctcagtttgaggctgcaggtgccaatcttcagtgcggcttctaagacaaccacagaggccccatgatggccagctgtcaggagttcctgcccaaccacagacacgaccacaaagggact

SEQ ID NO: 3887 - DNA, 396 bp, Homo sapiens
  MAP TO AJ229042.1; EXPRESSED IN FETAL LIVER, SIGNAL = 6.1; EXPRESSED IN BONE MARROW, SIGNAL = 5.8; EXPRESSED IN HEART, SIGNAL = 4.6; EXPRESSED IN PLACENTA, SIGNAL = 5.4; EXPRESSED IN BT474, SIGNAL = 5.5; EXPRESSED IN ADULT LIVER, SIGNAL = 5.4; EXPRESSED IN BRAIN, SIGNAL = 4.8; EXPRESSED IN LUNG, SIGNAL = 5.9; EXPRESSED IN HELA, SIGNAL =   6; EXPRESSED IN HBL100, SIGNAL =   5
ggttttgggggtgataggtcatgcgggtggagccctcatgaatgggattagcactcttaggagaagacacaggagagagatgattgctctcttccttatgtaaggattcagagagtagccagtcatctgcaaaccaggaagaggactctcaccaggaacagaattggctgccaccttgattttggacttacagcctccaaaactgagaaagtcatgcctggtgtgtaagctgccccatctttggtatcctgaatggcagcctgatgtgactgcaatagtgatgagctcaccatgcacctgctgctggaagttcttgttagtttcctgctgcttctgcccaaggataagaaagaagatgatgtctctaaagaccagggcccctccaccctgtatatt

SEQ ID NO: 3888 - DNA, 392 bp, Homo sapiens
  MAP TO AL031224.1; EXPRESSED IN BONE MARROW, SIGNAL = 1.4; EXPRESSED IN BRAIN, SIGNAL = 1.3; EXPRESSED IN LUNG, SIGNAL = 1.6; EXPRESSED IN HELA, SIGNAL = 1.4; EXPRESSED IN PLACENTA, SIGNAL = 1.2; EXPRESSED IN HBL100, SIGNAL = 1.2; EXPRESSED IN HEART, SIGNAL = 1.4; EXPRESSED IN FETAL LIVER, SIGNAL = 1.7; EXPRESSED IN BT474, SIGNAL = 1.3; EXPRESSED IN ADULT LIVER, SIGNAL = 1.2
tcgttcaacttgctcccttccttagtcattcgagggagggaatccgactccctcttttctgcttccctttccttgaataagcccattccaaaaggggtgcgttttccccatcccccttgtgcatctactgcttccccaccagtcccttttctttgcttttctgagaatctttctttccgtctctatctctttctcttcactccccccttttattattaagattatgttttcccgctcattatggcaaatgtttcttaacgtggcagagagttgccctccctggcgacagatgtcataacgaactttctcccctttccttccttaacttcccccgaaagacagattataattaaacgtaacggtccaatatagattagagacaggggaggctg

SEQ ID NO: 3889 - DNA, 427 bp, Homo sapiens
  MAP TO AJ229043.1; EXPRESSED IN PLACENTA, SIGNAL = 9.4; EXPRESSED IN HBL100, SIGNAL = 8.3; EXPRESSED IN BT474, SIGNAL = 7.5; EXPRESSED IN FETAL LIVER, SIGNAL = 9.1; EXPRESSED IN LUNG, SIGNAL = 8.8; EXPRESSED IN BONE MARROW, SIGNAL = 8.3; EXPRESSED IN HEART, SIGNAL = 7.2; EXPRESSED IN HELA, SIGNAL = 8.9; EXPRESSED IN ADULT LIVER, SIGNAL =  11; EXPRESSED IN BRAIN, SIGNAL = 7.9
tacagcagttgccagcactccttagcttctgggctacatcagcccagtctctgcctccagcatcatatgaggtcttccctctgtctgtccgttttttcttcttataaggacatcagtcattagattcagagcccaccctaatccaggatgacctcgtcttaaccagttacttcttcaaaaacgctatatccaaataaggtcacattctgaggttctatgtggacatgaactttggggaacactacacaacccagttcagaccatacagacgtgggagccgttcccctatctaccactttgtagccgtgtgacttcaggcaagtcacatcaccgctttgtgcctctgcttttccacctgtaaaacagaaataacagtcatcatcaccatcatcatcatcatcatcatcatcatcatcgtaatccctgc

SEQ ID NO: 3890 - DNA, 361 bp, Homo sapiens
  MAP TO AL021367.1; EXPRESSED IN BONE MARROW, SIGNAL =   2; EXPRESSED IN BRAIN, SIGNAL = 1.2; EXPRESSED IN HELA, SIGNAL = 1.7; EXPRESSED IN HEART, SIGNAL = 1.4; EXPRESSED IN PLACENTA, SIGNAL = 1.6; EXPRESSED IN HBL100, SIGNAL = 1.7; EXPRESSED IN BT474, SIGNAL = 1.5; EXPRESSED IN ADULT LIVER, SIGNAL = 1.9; EXPRESSED IN FETAL LIVER, SIGNAL = 1.8; EXPRESSED IN LUNG, SIGNAL =   2
aggaggaaattggttccaggaatcccctccccaccaacaaggataccaaaatttgtggatgcttaagtaccttatataaaatgtcatagtatttgcatataatctacatctcctctcatatactttaatcatttctagattacttatacttaatacaatgtaaatgctatgtaaaaagtcattatagtgtatcatttttatttgtattatttttattttatttttttatcattatttttatatttttctgaatatttttgatgtagttgttcaacccacagatgcagaactggcagatatgaatggccaactgtacatagcctttaagattaaaatgtttttcttcagaattgaccatttt

SEQ ID NO: 3891 - DNA, 417 bp, Homo sapiens
  MAP TO AL008628.1; EXPRESSED IN BONE MARROW, SIGNAL = 2.2; EXPRESSED IN PLACENTA, SIGNAL = 1.7; EXPRESSED IN BT474, SIGNAL = 1.7; EXPRESSED IN ADULT LIVER, SIGNAL =   2; EXPRESSED IN FETAL LIVER, SIGNAL = 1.8; EXPRESSED IN BRAIN, SIGNAL = 1.8; EXPRESSED IN LUNG, SIGNAL = 1.9; EXPRESSED IN HEART, SIGNAL = 1.6; EXPRESSED IN HELA, SIGNAL =   2; EXPRESSED IN HBL100, SIGNAL =   2
tgagtgtgctctggtgttctgacaccatcttcccagagttagcatcagatatcacaggttgagggctcagtccccaagactgccggccccctgcaccagtcacaggcccaggcttctggaacttccaacaggctgccttcaagttgggcttcccatggctccctctttgggttcgattaatttgctggaggagctcatagaactcagagaaacacgttaactgatttattgtaaaggatattgctattgcaaaggatacagatgaagagacaggtaggtcaagatataggggaaaggacacagagcttctaaggtaggtcaaggtacagggaagggacacagagcttctaaggtaggtcaaggtgtagggaagggacacagagcttctaaggtaggtcaaggtgtagggaagggaca

SEQ ID NO: 3892 - DNA, 469 bp, Homo sapiens
  MAP TO AL031003.1; EXPRESSED IN LUNG, SIGNAL =   5; EXPRESSED IN HEART, SIGNAL = 3.6; EXPRESSED IN FETAL LIVER, SIGNAL = 3.6; EXPRESSED IN BT474, SIGNAL = 3.8; EXPRESSED IN BONE MARROW, SIGNAL =   4; EXPRESSED IN BRAIN, SIGNAL =   4; EXPRESSED IN PLACENTA, SIGNAL =   4; EXPRESSED IN HELA, SIGNAL = 4.2; EXPRESSED IN HBL100, SIGNAL = 3.4; EXPRESSED IN ADULT LIVER, SIGNAL = 4.7
tgtgattagacctggagcccgagaaccttttacaaagggaaaatacaaggttgatattattctttgacaataaagttagtataaaataataaataaatagattaaaaatatgctataagatattccatgaatacaatgaaaagtatcaaccttacacaaaattcaagcttctttcacagtaagtttttgcttttgagtacacaacaccaccatctgcttgtaccccaggatgcgtgcttgttccagacagtcagtaggccctgtctccagccacagagccaccctggaaagggtcctcagcagttacaaggcatgagagaagggttctgcttacccagtcctttgacaaacttcataaggcacatgatgtagctagtggctgcattagcaaagacctggatgttgtcagtattgagaaaagcttcaaatacatcaaacactggagcttggccttttcctaagggaggaa

SEQ ID NO: 3893 - DNA, 407 bp, Homo sapiens
  MAP TO AL031073.1; EXPRESSED IN PLACENTA, SIGNAL = 9.3; EXPRESSED IN HEART, SIGNAL = 4.6; EXPRESSED IN FETAL LIVER, SIGNAL =  14; EXPRESSED IN BT474, SIGNAL = 4.2; EXPRESSED IN BONE MARROW, SIGNAL = 5.2; EXPRESSED IN BRAIN, SIGNAL = 4.7; EXPRESSED IN LUNG, SIGNAL = 5.4; EXPRESSED IN HELA, SIGNAL = 5.7; EXPRESSED IN HBL100, SIGNAL = 4.2; EXPRESSED IN ADULT LIVER, SIGNAL = 4.9
ctgcctctgttacaggctcctctgcttcgtatttgaggagcaggaactccactaactcggccaccttttcatctagtgtatatgtgaaagaggactcactgtctggcaggccctgacaggtgcctgtatcctcccctttctggctgctggactcctcactgaatgagctccatgaaaaagaggagcagcaggagctcagaggactctgggaaggaccctgtggaggaccctgtggaggactactgggaatgctctcggtaagatttggtatcacaccagagggcacctcctcctcctcaggaccaccaagaatcagagaagaggatgtggagaaagaagagggggaaaatactaagtacaaagtggaagaggcggaggaggcttcctcctcttcctcatctgtggga

SEQ ID NO: 3894 - DNA, 474 bp, Homo sapiens
  MAP TO AL022154.1; EXPRESSED IN BT474, SIGNAL = 2.5; EXPRESSED IN FETAL LIVER, SIGNAL =   3; EXPRESSED IN ADULT LIVER, SIGNAL = 3.9; EXPRESSED IN BONE MARROW, SIGNAL = 2.6; EXPRESSED IN LUNG, SIGNAL = 3.5; EXPRESSED IN BRAIN, SIGNAL = 3.6; EXPRESSED IN HEART, SIGNAL =   3; EXPRESSED IN PLACENTA, SIGNAL = 4.4; EXPRESSED IN HBL100, SIGNAL = 2.4; EXPRESSED IN HELA, SIGNAL = 3.1
agctgagcactcggaagaaccagagtaataatgggacaaagtgaaagcagacattctgcttatttaaatttcttaaggcatttattacgaagagagggagtgaaagttagtattcagaatttgttatcactctttagtgcagtaaagcagttttgcccacggttcctggaacaagggactatggagttggatcaatgggagagaattgtcagagattttttaaaagtgtataaagatggagcaaaaattccagtctcagttttggtcaatgtgggtgctaataaaagcagctcttgagccatttcaaacagatgatgaggcagattcagatgcggaagaggaggatgggtgtaaagaactaaattcagattctgaatgtgaggaacaggaaatggaggaaattaaagaaaagaaagggaaactgaacaaagtatgttttactgctgaattaagtgaaaggccacctcctctctc

SEQ ID NO: 3895 - DNA, 454 bp, Homo sapiens
  MAP TO AL031076.1; EXPRESSED IN BT474, SIGNAL = 5.9; EXPRESSED IN ADULT LIVER, SIGNAL = 8.3; EXPRESSED IN BONE MARROW, SIGNAL = 7.2; EXPRESSED IN BRAIN, SIGNAL =   7; EXPRESSED IN LUNG, SIGNAL = 8.7; EXPRESSED IN HELA, SIGNAL = 7.4; EXPRESSED IN PLACENTA, SIGNAL = 7.8; EXPRESSED IN HBL100, SIGNAL = 7.1; EXPRESSED IN HEART, SIGNAL = 7.4; EXPRESSED IN FETAL LIVER, SIGNAL = 7.6
agagcaggtggactttccaggactgtaggcactccagccctgtagcctcctcctcttccccagctgttggactatctgctagagaggctggggttcctccatgtgcaggactccccttggctggcactggggctgcctctttctctgctgggttctgtctccctgggatggggctcaggcttccccggcgagggctgtggtggcacctcctttgcactgtgcacaagccctgagaaggaggcataggaaggatggacagagtggctggtccagagccgcccacctcctccgggggatcccagcggccatcctgggtgtctggatgctcgtccttgtgtgcctggtccgtctcctcccagcggccattctgagtgtctggatgctcgtcctgtgtgcctggcccctctcctctaacctccatccaggtctgcagtgcagtgatacagaggtggca

SEQ ID NO: 3896 - DNA, 431 bp, Homo sapiens
  MAP TO AL022722.1; EXPRESSED IN BT474, SIGNAL = 6.8; EXPRESSED IN BONE MARROW, SIGNAL = 3.5; EXPRESSED IN LUNG, SIGNAL = 5.8; EXPRESSED IN HELA, SIGNAL =   7; EXPRESSED IN HEART, SIGNAL = 5.2; EXPRESSED IN ADULT LIVER, SIGNAL =   1; EXPRESSED IN FETAL LIVER, SIGNAL = 6.4; EXPRESSED IN BRAIN, SIGNAL = 4.1; EXPRESSED IN PLACENTA, SIGNAL = 3.8; EXPRESSED IN HBL100, SIGNAL = 9.2
cccccagcttcctaagtaccaggctgtctgtggcacctggattgccacccttgggtcctctacaccccacggcagcaacggtggaagggcaggccaggcaatcataaggaataaacagtctttagtgggctcaaaccaggagtccataggtcttgaggacctctgtgtaattgttttctcctccacattcttttgggcctgtttacatagcctcataagctgcttttcttccaatagcagatattggccttcttcctcttctcctgggtggctgtcactgcctggtacttccagccaaactcgtgaaccaggcaccccagataggcaaattttctcacaggcttcagacacacaaccttgggagcagcaggaagcatcatccactttttcttgtcatagggcagtgggatcccattaaacaccttggggtg

SEQ ID NO: 3897 - DNA, 437 bp, Homo sapiens
  MAP TO AL078624.22; EXPRESSED IN BRAIN, SIGNAL = 2.4; EXPRESSED IN BONE MARROW, SIGNAL = 3.5; EXPRESSED IN LUNG, SIGNAL = 3.6; EXPRESSED IN HBL100, SIGNAL =   4; EXPRESSED IN PLACENTA, SIGNAL = 3.2; EXPRESSED IN FETAL LIVER, SIGNAL = 3.9; EXPRESSED IN HEART, SIGNAL =   3; EXPRESSED IN HELA, SIGNAL = 3.9; EXPRESSED IN ADULT LIVER, SIGNAL = 3.8; EXPRESSED IN BT474, SIGNAL = 3.5
ttcacagccttcaagagtgctgcctccctccagcattgttctaaattcctcacctgcttcacccctgcctgccagcatctgcagcagccacctttgaccactggaaaaactccaagaggatggcccagaggccagccctgacctcaccacgcctctgaaccaaacacagtgcctacctcctcaggcttctggtcacatgctccattttcttaagttgaatacactcctgactgatgcagggcctctacaaattcattagtgtcatgagggcatgtgggctttgttttaagctgctatggtgagagacacaggcacagaaatgattgtcatgaagaaagaagtttatgttcacagtttcctagaaacaggagttacagcacaacacagagaaggaatgggtggggcagggcagggcagggcaggcaggtttagaattg

SEQ ID NO: 3898 - DNA, 354 bp, Homo sapiens
  MAP TO AL031119.1; EXPRESSED IN PLACENTA, SIGNAL = 1.7; EXPRESSED IN BT474, SIGNAL = 1.2; EXPRESSED IN BONE MARROW, SIGNAL = 1.2; EXPRESSED IN BRAIN, SIGNAL = 1.2; EXPRESSED IN LUNG, SIGNAL = 1.5; EXPRESSED IN HELA, SIGNAL = 1.4; EXPRESSED IN HBL100, SIGNAL = 1.3; EXPRESSED IN HEART, SIGNAL = 1.3; EXPRESSED IN ADULT LIVER, SIGNAL = 1.3; EXPRESSED IN FETAL LIVER, SIGNAL = 1.2
ctggcatgcaaatgtctcaccagtaagtccagtgtgtttgctacttcttgctcactggatccactcagcagaatgtcatcaatgttatggaccagtgtgatatcttgcagaagtgagaagcaatcaaactctctctgaataagattataacacaaagtcagagagttgatatacccctgaggtaggacagtaaaggtatattactggccttaccagctgaaggcaaattgcttctggtgggctttatggacaggaatagagaaaaaggcatttgccaagtcaatggctgcataccaggtaccaggagatgtgttaatttgctcaagcaatgaaaccacatctgctacagcagct

SEQ ID NO: 3899 - DNA, 414 bp, Homo sapiens
  MAP TO AL023279.1; EXPRESSED IN PLACENTA, SIGNAL = 2.2; EXPRESSED IN HEART, SIGNAL = 1.7; EXPRESSED IN FETAL LIVER, SIGNAL = 1.9; EXPRESSED IN BT474, SIGNAL = 1.5; EXPRESSED IN BONE MARROW, SIGNAL = 1.9; EXPRESSED IN BRAIN, SIGNAL = 1.8; EXPRESSED IN LUNG, SIGNAL = 2.1; EXPRESSED IN HELA, SIGNAL = 1.8; EXPRESSED IN HBL100, SIGNAL = 1.7; EXPRESSED IN ADULT LIVER, SIGNAL = 1.8
gacaaggcaagacccttctgcctatgagcctgtaaaatcaaaggcaagttacttacctcttagatacaatgggtgtacagccattgggtaaatacagctgttccaaatgggagaaattagccaaaaggaaggggctataggccccacgcaagtgcaaaatctaatagggcagtcattaaaacttaaagttccagaatgatttcctttaactacatctctcacatccaggtcacactaatgcaagagatggctttccacaggcttgggcagatctgcccctttgacttgcaggatacagctgccttcctggctgctttcaaggctagcgttgagtgtctgcagcttttccaggtgcatgatgcaagttatcagtggatctgtcattctggggtctggaggatagtggcccttttc

SEQ ID NO: 3900 - DNA, 380 bp, Homo sapiens
  MAP TO AL022166.1; EXPRESSED IN BT474, SIGNAL = 1.1; EXPRESSED IN ADULT LIVER, SIGNAL = 1.2; EXPRESSED IN FETAL LIVER, SIGNAL = 0.98; EXPRESSED IN BRAIN, SIGNAL = 0.97; EXPRESSED IN BONE MARROW, SIGNAL = 1.7; EXPRESSED IN LUNG, SIGNAL =   1; EXPRESSED IN HELA, SIGNAL = 1.2; EXPRESSED IN HEART, SIGNAL =   1
tcaaactgctgatgtcaggggaaataagaagaggagtgagaattaaccattgcatttagcagtgcggaggttcctggtgaccttaataagagcagcttctttgggggactgtgtgaaaaagcctgcttgggacagctttaagagagaatgggaggagaggaatcaatgagtatggacaagtttcacaaggagttttgcagcaatggggagcagagaaatcaggcggcatctggtggggaaagagggagtcaggaaaaggtttacttcaggtggaagaaataccattgtgctgaaggcaagcacccggtggagagacatgaaatcaatagcacaggggtggcagagagcatccttggagcagcagctttgagtaggcagga

SEQ ID NO: 3901 - DNA, 472 bp, Homo sapiens
  MAP TO AL031177.1; EXPRESSED IN LUNG, SIGNAL =   4; EXPRESSED IN HEART, SIGNAL = 3.6; EXPRESSED IN FETAL LIVER, SIGNAL = 4.8; EXPRESSED IN BT474, SIGNAL = 3.6; EXPRESSED IN BRAIN, SIGNAL = 3.5; EXPRESSED IN BONE MARROW, SIGNAL = 4.9; EXPRESSED IN PLACENTA, SIGNAL =   4; EXPRESSED IN HELA, SIGNAL = 4.1; EXPRESSED IN HBL100, SIGNAL = 3.8; EXPRESSED IN ADULT LIVER, SIGNAL = 4.8
cgaggaccccaaaaagaaactgatatgttttgcctgagatttacctgattttaaaactataagtcccacattcaaggaattcccatggtactgggaaaactgagtcagttgttctctatactaccagacagttttgggtccctggacaagactttaagaacctgtgtaaggccgcccttaacacagaagaaattctcagttcagtgttattaccacaccatcatctagaatttgagtatcttcatatgataatttgttagaaactctcctcccactaccccagtgagccccaagaaaactcaactttcttgtatggtttattctaccttcttcccctcaccttggattcctcaaataggatgtctttgtaagtgttctgtgatgaaacagtgttatcagaatttgagtatgtactattgatttttttatgattatcttttcaggtcaggttagtgtggtgcaagtgaccatc

SEQ ID NO: 3902 - DNA, 382 bp, Homo sapiens
  MAP TO AL023285.1; EXPRESSED IN BT474, SIGNAL = 1.1; EXPRESSED IN FETAL LIVER, SIGNAL = 1.2; EXPRESSED IN ADULT LIVER, SIGNAL = 1.2; EXPRESSED IN BONE MARROW, SIGNAL =   1; EXPRESSED IN LUNG, SIGNAL = 1.2; EXPRESSED IN HELA, SIGNAL = 0.95; EXPRESSED IN PLACENTA, SIGNAL = 1.1; EXPRESSED IN HBL100, SIGNAL = 0.97; EXPRESSED IN HEART, SIGNAL = 0.96
aaacccacttgacttgctgggcattcctgtctgatggcctaataatcattgcctttaaactcaagacatctcaaatccaaaccttactcctcccacatctgtctccccttccccctggttgttgttttctcattcctgtgaagggcacccaggcttgcattctagttgtcatggcttgtaagttcctgtgtatgctcagtcctggaggtactgcctttcaaagagctcttgcccaaccctctctttctgttcccattttcacctcctttattcagatcctgttgatgttgtacctgtgtgattgtgatggccccattgtggaaccaaccatcccctgccccaagtccttcaacaatgctagtgaatctcaatccaagctgca

SEQ ID NO: 3903 - DNA, 465 bp, Homo sapiens
  MAP TO AL031228.1; EXPRESSED IN PLACENTA, SIGNAL = 3.5; EXPRESSED IN HBL100, SIGNAL = 4.4; EXPRESSED IN BONE MARROW, SIGNAL = 3.6; EXPRESSED IN LUNG, SIGNAL =   5; EXPRESSED IN HELA, SIGNAL = 4.8; EXPRESSED IN HEART, SIGNAL = 3.9; EXPRESSED IN BT474, SIGNAL = 3.6; EXPRESSED IN ADULT LIVER, SIGNAL = 3.4; EXPRESSED IN FETAL LIVER, SIGNAL = 4.5; EXPRESSED IN BRAIN, SIGNAL = 4.4
ccgctgcaaactcttctctcacctgcccatcagaccacccatctggcccctcaagcacctcaaacccggccatctccctgcaggtttcttctctgcgtggcctgctgtgccatctccaccttcatctccacaccgcacccctgcacgatgtcctgtggcctcgtttcccctcaccccacatgcagtcagctgccaggcctgatgaagtcccaggggtctctctccctccatcctcctcactccatgctcagcccaatctccgtgctcaccctcctgacaagctccggttgggctcctcccatcaatccccagctcaaagtccccttccctcctggcactaaggtcccttaggccggcccggctgcccctactccctgggcccggcccccacggctgccccaggagccctggttcacagccctcacctcggcgctgccggatgagtggctccatcagctcgtactt

SEQ ID NO: 3904 - DNA, 391 bp, Homo sapiens
  MAP TO AL021069.1; EXPRESSED IN BT474, SIGNAL = 1.8; EXPRESSED IN LUNG, SIGNAL = 1.8; EXPRESSED IN BRAIN, SIGNAL = 1.8; EXPRESSED IN BONE MARROW, SIGNAL = 1.8; EXPRESSED IN HEART, SIGNAL = 1.5; EXPRESSED IN FETAL LIVER, SIGNAL = 1.9; EXPRESSED IN ADULT LIVER, SIGNAL = 2.4; EXPRESSED IN PLACENTA, SIGNAL = 1.9; EXPRESSED IN HELA, SIGNAL = 2.1; EXPRESSED IN HBL100, SIGNAL =   2
aggttatggtggagccacagttccccaaagtagtagaagtagaatgacggggatggggtagggtcacagaagtaaggagaagaatttctggaggatactctggtggtatatagcctatcactggttcaggccagaaatgctacctaagcaagagatacacatggccatcggaatgacagaagtgatatttgtatccagcagatacacactggtatcactcagcctcaatcaaggcatcagcaaggcagttgataatgtccaaattgaagatattagacctgccatagtcctgaagagttcatggggaatctcaggcttgatcttgagtggaacctccaagctacacttaggaaaatcatgggaaattcacagcattatcaaacaagggcaa

SEQ ID NO: 3905 - DNA, 413 bp, Homo sapiens
  MAP TO AJ011931.1; EXPRESSED IN LUNG, SIGNAL = 6.7; EXPRESSED IN BRAIN, SIGNAL = 5.7; EXPRESSED IN BONE MARROW, SIGNAL = 6.5; EXPRESSED IN HELA, SIGNAL = 5.6; EXPRESSED IN HEART, SIGNAL = 5.4; EXPRESSED IN BT474, SIGNAL = 5.7; EXPRESSED IN ADULT LIVER, SIGNAL = 7.2; EXPRESSED IN FETAL LIVER, SIGNAL =   6; EXPRESSED IN PLACENTA, SIGNAL = 7.3; EXPRESSED IN HBL100, SIGNAL =   6
ttgcacatctcttcaccagccttttgtacttcttcttctgtaaactgtctttccgatccttcacccatttttctataaaagttactgtattagtttactattgctgatgttacaaattacatcacaaatttattatcttctatttccagaagtcagaggtctgaatcagatctcactagacaagtcacggtgtttacagggctgtgttccttctgaacaaaagtcacggtggctgcagggctgtgttccttctgaacaaaaatcagtgtggctgcagggctgtgttccttctgaacaaaaatcagcatggctgcagggctgtgttccttccgaacagaagtcagggtggccgcagggctgtgttccttctgaacaaaaatcagcatggctgcagggctgtgttccttctgaac

SEQ ID NO: 3906 - DNA, 445 bp, Homo sapiens
  MAP TO AL033517.1; EXPRESSED IN BONE MARROW, SIGNAL = 1.5; EXPRESSED IN BRAIN, SIGNAL = 1.4; EXPRESSED IN HBL100, SIGNAL = 1.4; EXPRESSED IN LUNG, SIGNAL = 1.5; EXPRESSED IN HELA, SIGNAL = 1.5; EXPRESSED IN PLACENTA, SIGNAL = 1.1; EXPRESSED IN HEART, SIGNAL = 1.7; EXPRESSED IN FETAL LIVER, SIGNAL = 1.3; EXPRESSED IN BT474, SIGNAL = 1.5; EXPRESSED IN ADULT LIVER, SIGNAL = 1.6
gattgccctgtgtgtgactgactccagaataaacagattttttaaagatctagtatttctaacagtaaaatggatttccggtttgcccagggggaacaatgggacatcccagtcatcatggtggcatgaaatctagaaagcggaagaaccagtttctccattggtacgaatctgtctcccactcagtagctcagtttgaaactttgctaggaccactagtgaaagtagtgaacatccgctcctgagagtgaagagtgctccctgtctccacactgggggcacaggtggagggctcccttggagggagcagtgccatttgctgaagctgcgatccactggagctgaggcaccccctcttggcaggcacccctgctagtttggagggtctgcaggggaaagacagagcgggcattgtaggcctgcctgctgcttgtccggtacatct

SEQ ID NO: 3907 - DNA, 411 bp, Homo sapiens
  MAP TO AJ229042.1; EXPRESSED IN BONE MARROW, SIGNAL = 4.2; EXPRESSED IN PLACENTA, SIGNAL = 4.3; EXPRESSED IN ADULT LIVER, SIGNAL = 4.5; EXPRESSED IN LUNG, SIGNAL = 4.5; EXPRESSED IN HEART, SIGNAL = 3.5; EXPRESSED IN HELA, SIGNAL = 3.8; EXPRESSED IN HBL100, SIGNAL = 3.9; EXPRESSED IN BT474, SIGNAL = 3.8; EXPRESSED IN FETAL LIVER, SIGNAL = 4.1; EXPRESSED IN BRAIN, SIGNAL = 4.3
tttttaagactgtgcaggttggttaccaagacagagaatgtaagttctcacctttaattaacatgaacttgattaagtcctttcactttctcaattatttaatccatgtctgtacatatggaattctcagtgaagactaaatctgtgtggagcgatgggcaatcatgtgttcactcaacagtcactgagcatttatcaaatgccaagtcctaggctgggtgccagggggctgggacttcttccagttgcagatgtatgtttaagagatcctctttttcattgtcttagtccattttctgttgcttataacagaatacctgaaacagtttataaagaaaaggaatttattttttgcagttatagaggttgagaagtccaaggtcaaggggccacatctggtgagggccttct

SEQ ID NO: 3908 - DNA, 392 bp, Homo sapiens
  MAP TO AL096829.12; EXPRESSED IN PLACENTA, SIGNAL =   7; EXPRESSED IN HEART, SIGNAL = 3.6; EXPRESSED IN HBL100, SIGNAL =  14; EXPRESSED IN HELA, SIGNAL =  10; EXPRESSED IN FETAL LIVER, SIGNAL = 8.8; EXPRESSED IN BT474, SIGNAL = 5.6; EXPRESSED IN ADULT LIVER, SIGNAL = 2.9; EXPRESSED IN BONE MARROW, SIGNAL = 5.9; EXPRESSED IN LUNG, SIGNAL =  17; EXPRESSED IN BRAIN, SIGNAL = 2.1
gggaggagtgttaccctcagatttatttgtgcaaatagcacaggaggacaccagccctatgcagacggcagtgcagggcgggtcacaccagtccttctgtcctcatattggcagatggagatctctactttgaaccctttgtagtggcctgggcgcctttgggagcctgagctggaattgaagctggagctgcaggctgggccttggtttgatccttggtcttggcctttggcccacacagcctgagccctttggcaatgtgggcatgatcatgcttcccaagcttggagtgggcaatgtgggcaagtcgatggagcttgtggctgacaccctttgggatcttgggcttaacttccttgggctttaccagggccttgatagcctttgcacgt

SEQ ID NO: 3909 - DNA, 449 bp, Homo sapiens
  MAP TO AL021331.1; EXPRESSED IN BRAIN, SIGNAL = 2.3; EXPRESSED IN BONE MARROW, SIGNAL =  16; EXPRESSED IN HEART, SIGNAL = 2.6; EXPRESSED IN PLACENTA, SIGNAL = 2.8; EXPRESSED IN FETAL LIVER, SIGNAL = 2.8; EXPRESSED IN ADULT LIVER, SIGNAL = 3.6; EXPRESSED IN LUNG, SIGNAL = 9.8; EXPRESSED IN HELA, SIGNAL = 2.4; EXPRESSED IN HBL100, SIGNAL = 2.2; EXPRESSED IN BT474, SIGNAL = 2.8
cccagagattctgacaggacttctgactgagagtcattgctaattcaaattgtatttttctaagagatcacagaactaacgttagttttcaaaaacagaaaagttatgaaatcacctgcccaaagtcattgagttggtaacagatgaatctgaaagagaatccagcattcctggcacccaatctcatgtacttttttctttttgactaattttgaaaacttgaaaaattttaattatgtcagaaaagcagtaaaacaagtaaccagcacttttccaagttcattcttccctgaatctttgcagaacacgaataggattttccacctcccaaagtgtcttaaatcgagtctagggacatgtgcctagactcgatctaaatctattttgagacactgggtctttccacgtgacctgtagtgatgcctccccccaggtgtccaatgtccttt

SEQ ID NO: 3910 - DNA, 419 bp, Homo sapiens
  MAP TO AL022323.7; EXPRESSED IN BONE MARROW, SIGNAL = 3.9; EXPRESSED IN HELA, SIGNAL = 3.6; EXPRESSED IN HBL100, SIGNAL = 3.4; EXPRESSED IN BT474, SIGNAL = 4.1; EXPRESSED IN BRAIN, SIGNAL = 3.1; EXPRESSED IN LUNG, SIGNAL = 5.7; EXPRESSED IN PLACENTA, SIGNAL = 3.7; EXPRESSED IN HEART, SIGNAL =   3; EXPRESSED IN ADULT LIVER, SIGNAL = 4.9; EXPRESSED IN FETAL LIVER, SIGNAL = 3.9
cagaagcaagccaggagtgggagcaaggggcccaccccagggatgccccctcgatcctctttccagggctacgaatgggccttctgactcccaagcacgaacacatccagatgcatttgctgtgcagaaagggcccttcattgtagccgccagggagggtgatccagggccggcccaggtgccacagcctgcagtcagaatgcggaaagccggcgccatggaccagagaatggacagatggcggcggcggactttaccccccaacgtgaaatttgatacattcagttctcttgtcccagaggactctccacatgtggggcacagacgaacagattatgtgagccccacagccagtgccttaagaaaacctcaactatcccactacagggtggagacccaggaggtgaacccaggtgctt

SEQ ID NO: 3911 - DNA, 380 bp, Homo sapiens
  MAP TO AL008630.1; EXPRESSED IN HEART, SIGNAL = 1.5; EXPRESSED IN BT474, SIGNAL = 0.97; EXPRESSED IN BRAIN, SIGNAL = 1.4
ttactccctgtcaccccttgatttcccattcttgaagagactcatctaggtgggctgcatagctaacctctgggaatgcagggttgtggggcagagagggactggctggatccttgtccaaggtctctgtagtgagggcagcttggctgggccaaagagataaataaaaacaaaccgaaaaagcatggctcaattttgaatttgaaggccgggccccaaacagcgagtggcacttcccctacagcatgtctccccctagtggtgggcttcttggtgctagctgttgttctcggctgtgagatatttcagggcagcaaagccgtagcggcgggacatgtcctgctgaaactcttccttgagggttttgagacagatgcggt

SEQ ID NO: 3912 - DNA, 477 bp, Homo sapiens
  MAP TO AL021396.5; EXPRESSED IN LUNG, SIGNAL = 1.1; EXPRESSED IN HBL100, SIGNAL = 0.93; EXPRESSED IN HEART, SIGNAL = 1.5; EXPRESSED IN FETAL LIVER, SIGNAL = 1.2; EXPRESSED IN BRAIN, SIGNAL = 1.3
ataccgagcgtaaaggaccctttgcccttgctgcccacatgccctgctgaagtcattatggtccatgaaatctccagagacaggtggagaagccctaaatggggctaggatgccaaccagagaatctgtcctatatgaccatagtttcaagatagaaaaaactgtcacttaccctctatttttatttcacagctaaacacactcaattgattaccgaattaccattgtttattcagaggatattcctctttcttccctccatagagcagaatcggagatcagaggaggctcatagagctgaacagttgcaggatgcggaggaggaaaaagatgattcaaatgaagaagaaaacaaagacagccttgtagatgatgaagaagagaaagaagatcttggcgatgaggatgaagcagaggaagaagaggaggaggacaacttggctgctggtgtggatgaggagagaagtgaggccaatg

SEQ ID NO: 3913 - DNA, 459 bp, Homo sapiens; identical to SEQ ID NO: 1633
  MAP TO AL031662.24; EXPRESSED IN PLACENTA, SIGNAL = 6.7; EXPRESSED IN HEART, SIGNAL = 6.4; EXPRESSED IN BT474, SIGNAL = 6.2; EXPRESSED IN FETAL LIVER, SIGNAL =   7; EXPRESSED IN ADULT LIVER, SIGNAL = 8.4; EXPRESSED IN BONE MARROW, SIGNAL = 6.4; EXPRESSED IN LUNG, SIGNAL = 7.6; EXPRESSED IN BRAIN, SIGNAL = 6.6; EXPRESSED IN HBL100, SIGNAL = 6.2; EXPRESSED IN HELA, SIGNAL = 8.2

SEQ ID NO: 3914 - DNA, 465 bp, Homo sapiens
  MAP TO AL009182.13; EXPRESSED IN BT474, SIGNAL = 1.6; EXPRESSED IN LUNG, SIGNAL =   2; EXPRESSED IN BRAIN, SIGNAL = 1.9; EXPRESSED IN BONE MARROW, SIGNAL = 2.1; EXPRESSED IN HEART, SIGNAL = 1.8; EXPRESSED IN ADULT LIVER, SIGNAL = 2.3; EXPRESSED IN FETAL LIVER, SIGNAL = 1.9; EXPRESSED IN PLACENTA, SIGNAL = 2.2; EXPRESSED IN HELA, SIGNAL = 1.9; EXPRESSED IN HBL100, SIGNAL = 1.7
ccagtctcatttgccctctcctaagctgcctctctgggctttttgctggagggctttttgttttatttttgttttgagggaggtgatggctttgtctgtgccttctgccacctgcacctggagaggctgttctgcttggaatcaggcaacaggttagttatcaggaccagctcagctgtcagatggctggggattctttgctccaaaagtgagactgactcctgggatcccattgatcatcctctgctccctgctcctgctttctcctcatcccatcactgctgtcagaggtgtggacagacaagctgcctctcagcctcagcaaagtagaggagcaaacaatggcggctggggaggggagggaggagacagaagcagacaaggaggagatgaattcagactcattcttcacagagaaccatgagacgaaaggtgagaaattttagtccagcccaatcaatgaat

SEQ ID NO: 3915 - DNA, 448 bp, Homo sapiens
  MAP TO AL031665.18; EXPRESSED IN BONE MARROW, SIGNAL = 1.7; EXPRESSED IN BRAIN, SIGNAL = 1.6; EXPRESSED IN LUNG, SIGNAL = 1.8; EXPRESSED IN HBL100, SIGNAL = 1.4; EXPRESSED IN HELA, SIGNAL = 2.9; EXPRESSED IN PLACENTA, SIGNAL = 1.7; EXPRESSED IN HEART, SIGNAL = 1.7; EXPRESSED IN ADULT LIVER, SIGNAL = 2.6; EXPRESSED IN BT474, SIGNAL = 1.6; EXPRESSED IN FETAL LIVER, SIGNAL = 2.1
cagaatctccttgagggcaggaactgcttctttaaattttggtactgccctgtctattgatagcacctgatacagagtaggtattcagtaaatggttatacactgagaatagaagtatatcctaagactgagtcttggcattgacatctatactagaaaaaggcaaggaaaaatgtattgggaattacatttacacatcaaaagattcattctatagctacgtctactggcattatttcaatacacaaatacaaatataattgattataatttgtaattttgagttctcaaatattctcaccaaagctctcagcttggaaaattagatcattgtcaaaattttctctaagagtgatttcttctggtctgctttggttctgagtaaagtgttctgaaacatcaatagcactatggagaaatagaaggttgagaaaaacatgagaacaga

SEQ ID NO: 3916 - DNA, 468 bp, Homo sapiens
  MAP TO AJ011929.1; EXPRESSED IN PLACENTA, SIGNAL = 2.9; EXPRESSED IN HBL100, SIGNAL = 2.9; EXPRESSED IN LUNG, SIGNAL = 3.3; EXPRESSED IN BRAIN, SIGNAL = 3.2; EXPRESSED IN BONE MARROW, SIGNAL = 3.1; EXPRESSED IN HEART, SIGNAL = 2.9; EXPRESSED IN HELA, SIGNAL = 3.7; EXPRESSED IN BT474, SIGNAL =   3; EXPRESSED IN ADULT LIVER, SIGNAL = 3.7; EXPRESSED IN FETAL LIVER, SIGNAL = 3.5
aagttacagcagggctgtggctttgccagataattgattttgaaaggtgacatagttatttgcagtttatctgcttgcagcacaaaaatagggcaaatcactgaaatctttcttaggggattgatgttcattttatgacatccttcaatgagcagaaacataaaagccaccatcacaccaccagcagcaggaccactgccatgcacgaagctctgaaacaaacagggggtactcctgaaaggctaaggaatgaacaggaacagagtgagcttgcctgtccagggagtgggcacactggccaaacccaggctgaccctgtgtgcaggtgggcacccattgctggcctgtatcgcacaggctttcctttgggtagggatggctttgtgcatgtggctgcctgggatgcccagaaaagtgtcagcaattcctggattccccgggtgactaggcacaatatgtttggtggga

SEQ ID NO: 3917 - DNA, 374 bp, Homo sapiens
  MAP TO AL034400.2; EXPRESSED IN BT474, SIGNAL = 2.1; EXPRESSED IN LUNG, SIGNAL = 2.5; EXPRESSED IN HBL100, SIGNAL = 1.9; EXPRESSED IN PLACENTA, SIGNAL = 2.1; EXPRESSED IN FETAL LIVER, SIGNAL = 1.9; EXPRESSED IN ADULT LIVER, SIGNAL = 1.8; EXPRESSED IN BRAIN, SIGNAL = 2.5; EXPRESSED IN BONE MARROW, SIGNAL = 1.7; EXPRESSED IN HEART, SIGNAL = 2.1; EXPRESSED IN HELA, SIGNAL = 1.9
agcaggaaccaactcaatgcacagtcccttttcctcccaaaactgaatgagaaaacaaagtcagcacttcttaaaccagtggccacatagtaaaaactgtacattgttgtccattcatttaaaaagcaaagtcactaggatggtagaaaagtgataactggtgccttttaactttttgatgaacactttttctcagagtttgagaattatctccactctctctgcataaccaggaacaagatgcagaagacagtgaggaggtaggcctgtgccccaggacggacaccagcactgtcggctttctcattggcactcttcccagcatggtcagtggcattgtagtcaaactctgaagggcactgctgatactcaca

SEQ ID NO: 3918 - DNA, 385 bp, Homo sapiens
  MAP TO AL020994.1; EXPRESSED IN BONE MARROW, SIGNAL = 1.8; EXPRESSED IN PLACENTA, SIGNAL = 1.7; EXPRESSED IN HBL100, SIGNAL = 1.9; EXPRESSED IN ADULT LIVER, SIGNAL = 1.7; EXPRESSED IN LUNG, SIGNAL = 1.7; EXPRESSED IN BRAIN, SIGNAL =   2; EXPRESSED IN HEART, SIGNAL =   2; EXPRESSED IN HELA, SIGNAL = 1.8; EXPRESSED IN BT474, SIGNAL = 1.9; EXPRESSED IN FETAL LIVER, SIGNAL = 1.9
tgctttgttcttttccccaccctgccttcctcctgcctcagctttcaatttcgtccttcccagagccccctttcctcctgcccatcgctcccccagcctggagggcatctgcagcagccagcaatggcttgaggtgaggacggaatcagaggtgcccgccacccaccctcacttccttgcacagcctcccacccctccatctaaatccttgattaatccctgtcctcatttgaaggtcagagattagatacatatcattttcctctccagggctggagctgctggtccccaggagagccagttccgagttaccccccaggcacagacggaggagcagagaactcggtgtgtaatgagccggcttcgaggtcaagggggtgtttaa

SEQ ID NO: 3919 - DNA, 415 bp, Homo sapiens
  MAP TO AL031674.1; EXPRESSED IN BT474, SIGNAL = 2.8; EXPRESSED IN HBL100, SIGNAL = 2.5; EXPRESSED IN ADULT LIVER, SIGNAL = 2.7; EXPRESSED IN FETAL LIVER, SIGNAL = 2.6; EXPRESSED IN BRAIN, SIGNAL = 2.5; EXPRESSED IN LUNG, SIGNAL = 2.9; EXPRESSED IN BONE MARROW, SIGNAL = 2.8; EXPRESSED IN PLACENTA, SIGNAL = 2.8; EXPRESSED IN HEART, SIGNAL = 2.6; EXPRESSED IN HELA, SIGNAL = 2.8
tgcgtatgcatgtaagtatgtgcatatatacttatgtatgtgtgtacatataatatatatacacacgtgtgtgtattttatatatatattttatatatatacacacgtgtgtacatattttttatatatgtatgcacacacatatatatatatttgtaggtgtctcgtttgcaacctagactaaaatttttgtaattttgtgaaatttatttcacatataacaataaaatatactatatcaaaaattataataatattgggagtataaagcaaagtaaccatgaatgtttagtctcaagatccagttagaccaagatggcattgttctgaattttcattcccaagaggacatattcctgctgttccctttttcattgagaagactgaatgcacctgcctgctgcattctcttctt

SEQ ID NO: 3920 - DNA, 350 bp, Homo sapiens
  MAP TO AL031682.1; EXPRESSED IN LUNG, SIGNAL = 1.8; EXPRESSED IN BRAIN, SIGNAL = 1.8; EXPRESSED IN PLACENTA, SIGNAL = 1.8; EXPRESSED IN HEART, SIGNAL = 1.9; EXPRESSED IN ADULT LIVER, SIGNAL = 1.9; EXPRESSED IN BONE MARROW, SIGNAL =   2; EXPRESSED IN HELA, SIGNAL = 2.2; EXPRESSED IN HBL100, SIGNAL = 1.7; EXPRESSED IN BT474, SIGNAL = 1.8; EXPRESSED IN FETAL LIVER, SIGNAL =   2
ctggagcagacccagttaggactccttagcatttaacattcctctacatgtctatatcttcttcctgcaaacactggggattctctccggaggactttttctggtcacagaaacatgctcagggccatgcacacttcagggtagaaatgccaaggagttaatgtgtcaggtacagttcccaactcataaaaaatgggaattgctgaataaatgtcccacttccttgcccttcagatgggaccaccctggggtacaacctataccacctctcagagaccctcatcaggaccgagctccagttgctgacagtagtaacctgttggaaatatgctctgcactggctgcttttt

SEQ ID NO: 3921 - DNA, 408 bp, Homo sapiens
  MAP TO AJ011930.1; EXPRESSED IN HBL100, SIGNAL = 2.9; EXPRESSED IN HELA, SIGNAL = 3.3; EXPRESSED IN BT474, SIGNAL = 2.4; EXPRESSED IN LUNG, SIGNAL =   3; EXPRESSED IN BRAIN, SIGNAL =   3; EXPRESSED IN BONE MARROW, SIGNAL = 2.7; EXPRESSED IN PLACENTA, SIGNAL = 3.1; EXPRESSED IN HEART, SIGNAL = 2.3; EXPRESSED IN ADULT LIVER, SIGNAL = 2.9; EXPRESSED IN FETAL LIVER, SIGNAL = 2.8
gcttgattgactcaaacccccatgatggcaacctaatggggaatgtccatttccagatagaaatactgttgtctcacatacaatggctggctttcagtaaataattatgaggcacaaaaaaaaaaaaaaaagggaaaagaaaaatcacaaccaggagacaaaaatcagtagaaccagattcagatatgactcagatgcaaggattgtcagataggaatttatcttaaaggttctagtggaaacagtaaacaatatgaatgtcaaggtgaggagcttcagcacagagattgaaatgctaagaaagagtccagtgaaaatgctagagaggaagcccacctccaacaggctcatgaataggctcaacacagccaagaaaagaagcagtgagcttccagataagtccacaga

SEQ ID NO: 3922 - DNA, 399 bp, Homo sapiens
  MAP TO AL034422.18; EXPRESSED IN BONE MARROW, SIGNAL = 2.9; EXPRESSED IN BRAIN, SIGNAL = 3.5; EXPRESSED IN LUNG, SIGNAL = 3.7; EXPRESSED IN HBL100, SIGNAL = 2.4; EXPRESSED IN HELA, SIGNAL = 2.7; EXPRESSED IN PLACENTA, SIGNAL = 4.6; EXPRESSED IN HEART, SIGNAL =   3; EXPRESSED IN ADULT LIVER, SIGNAL = 2.9; EXPRESSED IN BT474, SIGNAL = 2.7; EXPRESSED IN FETAL LIVER, SIGNAL = 3.6
agttcatatggcccctaccccatcgtgccatagggaaatgactggagtctctctggctcccccagaatataagctatgtcccaagtacatcctcagggttcccagcacccatcacaaggcccagatatcaccggtggataacagagagtccagctgccaactccctacccagagaacccaggggcagagcccaggagccactcccagtggcagcactgagtcctattttgcccgcgatgcccacagctctaaggtatgggtggagtgggcggaggggggagctcgctgcaaatggccaactggtaaccaaacccactccgtttctaaaactagggcacaggagagaaacgggaacagcagtattgtccccaaatagaactatgtctcatctggttccgg

SEQ ID NO: 3923 - DNA, 408 bp, Homo sapiens
  MAP TO AL021155.1; EXPRESSED IN HBL100, SIGNAL = 1.1; EXPRESSED IN LUNG, SIGNAL = 1.3; EXPRESSED IN BRAIN, SIGNAL = 1.9; EXPRESSED IN BONE MARROW, SIGNAL = 1.5; EXPRESSED IN PLACENTA, SIGNAL =  23; EXPRESSED IN HEART, SIGNAL = 2.4; EXPRESSED IN HELA, SIGNAL = 1.2; EXPRESSED IN BT474, SIGNAL = 1.1; EXPRESSED IN ADULT LIVER, SIGNAL = 3.1; EXPRESSED IN FETAL LIVER, SIGNAL =  35
gcctttttgtgccttctctgctgtgtggagctgcttttggacgtttagttgccaatgtcctaaaaaggtactctgtgtgtgtgcgtgtgtgtgcgcatgtgcatgtgtgtgcacgtgtgcgtgtgtatgcatgtgtgtgcgtgtgcgtgcgttgatgtgtctgtgcccatgcatgcacatatgtgcataggcacaagagtatgagctgtaggtcctccccacagcctatcagtgtggttcaaagccatgttctcggtgttttccttcactagctacattggattgggccacatctattcggggacctttgccctgattggtgcagcggctttcttgggcggggtggtccgcatgaccatcagcctcacggtcatcctgatcgagtccaccaatgagatcacctacggg

SEQ ID NO: 3924 - DNA, 367 bp, Homo sapiens
  MAP TO AJ229042.1; EXPRESSED IN BONE MARROW, SIGNAL = 1.6; EXPRESSED IN LUNG, SIGNAL = 1.7; EXPRESSED IN BRAIN, SIGNAL = 1.7; EXPRESSED IN PLACENTA, SIGNAL = 2.1; EXPRESSED IN HELA, SIGNAL =   2; EXPRESSED IN HEART, SIGNAL = 1.5; EXPRESSED IN HBL100, SIGNAL = 2.2; EXPRESSED IN ADULT LIVER, SIGNAL = 1.8; EXPRESSED IN BT474, SIGNAL = 2.1; EXPRESSED IN FETAL LIVER, SIGNAL = 2.1
ttagtccacagctcgcttccttcagaaaacccttttctgagtctctgccatatagagctggtccctctctctttatagcctctgtggagtcttgtatgctgatagcaccatccctcaaaccatttacttcaagtacttgtgcatctgtctgctgcagctgaatatgcaccctggagctgtgttttattcacttttgaatccccggggccctggctcagggcctcgcacacagcaggctcccaaggctcattcaacagatgcagaaaccacctcgaatatgaccttcgcctcctgctgtgtccctgttatgtcacctgccagggagttcatgctgccacctccaggtggggtatttgggattgcactc

SEQ ID NO: 3925 - DNA, 401 bp, Homo sapiens
  MAP TO AC007073.2; EXPRESSED IN LUNG, SIGNAL = 1.6; EXPRESSED IN BRAIN, SIGNAL = 1.3; EXPRESSED IN HELA, SIGNAL = 1.5; EXPRESSED IN PLACENTA, SIGNAL = 1.6; EXPRESSED IN HEART, SIGNAL = 1.5; EXPRESSED IN BT474, SIGNAL = 1.2; EXPRESSED IN ADULT LIVER, SIGNAL = 1.4; EXPRESSED IN BONE MARROW, SIGNAL = 1.4; EXPRESSED IN HBL100, SIGNAL = 1.6; EXPRESSED IN FETAL LIVER, SIGNAL = 1.5
ttaagccactgctttttggggtcattcattatgcagcaatagtaaccagaacagcaggcattccaagtgggacgtcactccttgtattgataactctatgggacgagcatcatagggaatttacttagcagcctctcctgcctcctaccacccatattccctaaccccttacttgtttatttttctccactgctcttaccactccctggcatactatatgtttagttgcttgtttgcttactgtctgttccccatcaccaccacctcccaaaatgtaaactctacaatggagaattctgcctcttttttcatcacctggcaggtgtggctcctcaataaaaactttagtatttcagctgttggtggccgggctaacagctggagggaggccagaacaagat

SEQ ID NO: 3926 - DNA, 396 bp, Homo sapiens
  MAP TO AL033521.2; EXPRESSED IN PLACENTA, SIGNAL = 0.99; EXPRESSED IN HELA, SIGNAL = 1.3; EXPRESSED IN HEART, SIGNAL = 1.1; EXPRESSED IN BT474, SIGNAL = 1.2; EXPRESSED IN HBL100, SIGNAL = 1.2; EXPRESSED IN FETAL LIVER, SIGNAL = 1.3; EXPRESSED IN BRAIN, SIGNAL = 1.1; EXPRESSED IN LUNG, SIGNAL = 1.1; EXPRESSED IN BONE MARROW, SIGNAL = 1.2
ccatctagcaagccaataacaactactgtatgtataacaaataaacatggaaagagaataatgcagaagaaggcattaggttgaataaatatgatctggattctaggctgccagtaactcattcaatggcttcacacacatctcccaatctctgcgggcctcggttattttagctataaaacaaatttgagttaaatattgcaaattcttttctcatctgcaattctacaatgcaatgaaataatcatacacggatttttaaagttctgtgtaattagtatacctatgcttggtccttccagattcttgctcatctcatcaacttcatcctcatcaactaccagcacgctaacagaggagaggctctgagagtgctgaatcccctcctctccaaga

SEQ ID NO: 3927 - DNA, 1982 bp, Homo sapiens
  MAP TO AC007204.1; EXPRESSED IN HELA, SIGNAL = 1.5; EXPRESSED IN HBL100, SIGNAL = 1.7; EXPRESSED IN PLACENTA, SIGNAL =  39; EXPRESSED IN HEART, SIGNAL = 1.8; EXPRESSED IN ADULT LIVER, SIGNAL = 1.5; EXPRESSED IN BT474, SIGNAL = 1.3; EXPRESSED IN FETAL LIVER, SIGNAL = 1.8; EXPRESSED IN BONE MARROW, SIGNAL = 1.5; EXPRESSED IN LUNG, SIGNAL = 1.5; EXPRESSED IN BRAIN, SIGNAL = 1.4
cttcagcctccagtcctctggtttctccatttcaggaggcagctacctcctacattccggacagggcttgtgggacaggggacgccctcacctgccatccttgtcaactggcagtctcttcttcctctacccccctcctctatttaccatgggagcttctcattctacccctcctaaaaccaccccccttgggtatcttttgcacaacctcaatgctctcagcctccattcaagggtccatcctaagaggcttattttctaccgtaatactgcctggcctcaatacaaattggacaatggctcccaatcacccgaaaatggcacttttgatttcaacatgcttacagacttagacaacttttgccaccgcaatgggaaatggtctgagattccttatgttcaggctttcttcactctccatagccacccttctctctgccagtcctgttctactttccaaatcctccttgcctgctctaaacctgatttgcctcctaccaccctccctacgaccccagccgacgactcatcccctactaccctccccatcgccccagctgatgactcctcttcctttgaccccaccaattttccccctccccgtcaacatcatgatcctctgccagagcatcatgatcctcctccgtatgcccccgctctggctctacttctttctccccctctctccaacaaccctccttctgactctgagtcctccccatcaccaccccttacccactctcaggccaagcagccagttcccttgttgcccctttgggaagcagcaggggccaaagggatcgtctgtgtccacatccccttctccctttccgatctcttccaagttgaaaaatgtctcggatttttctcctccgatcctgatacctatatcaaagaatgtacgtatcttactcagtcttatgaactcacttggcatgatctctatattatcctgtcttttaccctccttctggaaaagaaggaaagagtgtggctcgcagccccgacgcgtgctgatgatctccatcagcaagattttaccaagcccataggagccgctgcagtaccctggcaggagcctccttgggagtaccaacccacagaccccagcctggcatcccataatcatatgattacttgcctcattgcaggcctaaacaaggctgcccacgaggctgtaaactttaaaaagctcaaagaaatctcccaaaagatcaatgaaaaccttgcccaattttttttcctgtcttatggaggctctccaaaaatatacccatgttgatcctgcctcctgagaaggtgctattgttcttcatacccattttatcttccaatctgcccccaatatttggcacaaacttaaaaaggctgaagatggccctgaaacccccaacaagacctccctaatctggctttcaaagtcttcaataacagggatgagcaaaataaattagataaagcctaaagagatcttgctaaataccagcttctagcagtggctatctgccaacctcgccatagtacccaagggcacaaaacacccaatagcattaactctcccaggccttttttaaagtgaagcaaagaaggccactgggcatgagcatgccctaatccatgaatgccaaaaagcccttgcccagtctgccagcagacaggccactggaagtctgactgtcctgttaacaggcagacagaaaagcctgtactgcaaaaccaccacccttttggagagacaaaaggtgaagtatcacttgcattcccacagctccttagtctagccactgaagactgacgaggcccagggcccctggccccatctaccttcactgcatcagagcccagggtaactctactagcagcaggtaagccgatctcttttttaaatcaatactggggccacctactcaactatgcctgaattctcaggaccaactcatccctcccaggtctcagttgtaggggttaatggactcatctcg

SEQ ID NO: 3928 - DNA, 451 bp, Homo sapiens
  MAP TO AL033532.15; EXPRESSED IN BONE MARROW, SIGNAL =   1; EXPRESSED IN BRAIN, SIGNAL = 0.95; EXPRESSED IN HBL100, SIGNAL = 0.97; EXPRESSED IN HELA, SIGNAL = 0.97; EXPRESSED IN PLACENTA, SIGNAL = 0.9; EXPRESSED IN HEART, SIGNAL = 0.95; EXPRESSED IN ADULT LIVER, SIGNAL =   1; EXPRESSED IN BT474, SIGNAL = 1.5
catcacactgactgatgtttagttgattaattttctcatagtcacaacagaagttgattttaatatgacttgcatgaaaaatgataaatttttactgctttttttgtgaagctataatattgggcatctgtaatgtcttcagttttcagaatcaagccatattctgatcttttatatctactaatgacacccaaatttagaactgtgtgctctggctatgtagaaaagactgattgaaaaagaaaagaaaagactgctttcctgtgtctctgtagctcctcaactttttttttaatgtgctcctctttaaaattttttctttcaggttgtacctacaacagatcatatagatacagaaaaattgaaagccagagaacagattaagttttttgaagaagttctcctttttgaggatgaacttcatgatcatggagtttcaagcctgagtgtg

SEQ ID NO: 3929 - DNA, 411 bp, Homo sapiens
  MAP TO AL021332.1; EXPRESSED IN HBL100, SIGNAL =   2; EXPRESSED IN HELA, SIGNAL = 1.7; EXPRESSED IN FETAL LIVER, SIGNAL =   2; EXPRESSED IN BT474, SIGNAL = 1.9; EXPRESSED IN LUNG, SIGNAL =   2; EXPRESSED IN BRAIN, SIGNAL =   2; EXPRESSED IN PLACENTA, SIGNAL = 1.9; EXPRESSED IN HEART, SIGNAL = 1.9; EXPRESSED IN ADULT LIVER, SIGNAL = 2.6; EXPRESSED IN BONE MARROW, SIGNAL = 1.7
ttgtctagtgggatggagcctggccttactgacaacctgttttgaggaattttagtagctttgtcgagtttttagccattctatttcagcatagaattctcatctatctatctatctatctatctatctatctatctatctatctatctatctatctatctatagagagagagagacctgctaaagtttctctaaagagtcctacaggagaaaaagcacagcaggcagctgggtcaatacaattgatctcatcgtttaacattttgcatcagagaaaaagtcagtggcaagagcctcaccttccagcggggtcctgctgctccctttgagtcattagttacttctgtgagggtaccaagctgggctgcactgtcctttttacaaatatttaggtctgcaatgaatggttga

SEQ ID NO: 3930 - DNA, 422 bp, Homo sapiens
  MAP TO AL034344.21; EXPRESSED IN BT474, SIGNAL = 2.8; EXPRESSED IN LUNG, SIGNAL = 3.1; EXPRESSED IN HBL100, SIGNAL = 2.6; EXPRESSED IN PLACENTA, SIGNAL = 3.2; EXPRESSED IN ADULT LIVER, SIGNAL = 3.5; EXPRESSED IN FETAL LIVER, SIGNAL = 3.2; EXPRESSED IN BRAIN, SIGNAL = 3.3; EXPRESSED IN BONE MARROW, SIGNAL = 3.2; EXPRESSED IN HEART, SIGNAL = 3.1; EXPRESSED IN HELA, SIGNAL = 3.8
gaactcaccctttgccagtgaagtggactggcaaacactgctgtcacattttgtacccacgcagagcaccgcttcaggcacacttggtccaggcacacttggtccacgtgatctttgtaggtgaaccctgcacgctgagtcctgtggtggcccctggcccctgccaccctcccgggattgcacgctttcacagccacagcaagctcagccagcgttcactcttcttctagcccatcctacttaccacagtcacttaactccgaaaaatcctggcaccttctcactgcctgccaagttgtactccactggcacgtggatggtgtgactgcctttacacgtgactgggaatctaaaccccaccctgctcagcgccatggcggggtgtctgatgcagcagccgcagcaacagcttcccaagttgt

SEQ ID NO: 3931 - DNA, 397 bp, Homo sapiens
  MAP TO AC007223.1; EXPRESSED IN FETAL LIVER, SIGNAL =  40; EXPRESSED IN LUNG, SIGNAL =  44; EXPRESSED IN BRAIN, SIGNAL =  26; EXPRESSED IN HELA, SIGNAL =  40; EXPRESSED IN PLACENTA, SIGNAL =  43; EXPRESSED IN BT474, SIGNAL =  31; EXPRESSED IN ADULT LIVER, SIGNAL =  50; EXPRESSED IN BONE MARROW, SIGNAL =  33; EXPRESSED IN HEART, SIGNAL =  31; EXPRESSED IN HBL100, SIGNAL =  40
gcctgtgcagctctttgtagaagtgtctatttcataaagttcagattatgtcagtatttcataacagccaggtctttccctgagacttacccctacagggataagagaacaagcaggacatggtggcttatacctgtaatccaagccctctgagaggccaaggcaggaggatcccttgagcccaggagttcaagaccagtgtatgcaacatagtaagacctctcttctctacaaataaaatgaaaaaaaaaaaggaattcgccaggcatgatggtgcatgcctgtggtcccacttacttgggttgctgaggtcgtaggattgcttgagcccaggaggttgaggctgcagtgaaccatgatcacaccactgcattccagcctgggtaacagagcaaga

SEQ ID NO: 3932 - DNA, 431 bp, Homo sapiens
  MAP TO AL031659.6; EXPRESSED IN HELA, SIGNAL = 2.2; EXPRESSED IN HEART, SIGNAL = 1.7; EXPRESSED IN BT474, SIGNAL = 1.5; EXPRESSED IN PLACENTA, SIGNAL =   2; EXPRESSED IN HBL100, SIGNAL = 1.5; EXPRESSED IN ADULT LIVER, SIGNAL = 1.8; EXPRESSED IN FETAL LIVER, SIGNAL = 1.8; EXPRESSED IN BRAIN, SIGNAL = 1.9; EXPRESSED IN LUNG, SIGNAL = 2.1; EXPRESSED IN BONE MARROW, SIGNAL = 1.4
cttctgggatcagttctttgcatgtattacctcatttaattcttataataaccctgttttacagaaaaggaaacttaggtttcaggaggcaaactagcttgataaaggtcatacaaatagtaagtggtagagccaagattcaaactagtctcaaattgagatttaaagtccatagtcttaaccattctgctacagctcagtcccaaaggttttttgtagcttaggaggcccttagagaacattgaatttatttttgagaaaactgagtctaggagacaggatgggacttggttaaggtcatagagcaagtagtaaaggtgagccagaggtactccatactaaaccttatcactttacacagtacggaggcatcatccagtgtctttctttcaatgttagacttggacatccctgacatccctggactccat

SEQ ID NO: 3933 - DNA, 431 bp, Homo sapiens
  MAP TO AL008633.1; EXPRESSED IN FETAL LIVER, SIGNAL = 6.8; EXPRESSED IN ADULT LIVER, SIGNAL = 8.4; EXPRESSED IN BT474, SIGNAL =   5; EXPRESSED IN BRAIN, SIGNAL = 6.2; EXPRESSED IN BONE MARROW, SIGNAL = 6.5; EXPRESSED IN LUNG, SIGNAL = 7.2; EXPRESSED IN HELA, SIGNAL =   7; EXPRESSED IN PLACENTA, SIGNAL = 7.3; EXPRESSED IN HBL100, SIGNAL = 6.9; EXPRESSED IN HEART, SIGNAL = 5.4
tcagtctttacatggccagcctgtgaattttccttatctttctgtttggcttatctttttaagtataaatttcatctttaagtcattctttggctttcacatctcgctgtatgtggctaaaagtagccatgcagcagcctgaatacattgctgcttagatatttcttccattagatatcctagttcattgctcttaagttctgcatttcatgaagtcctaggacacagacacaattcagccaaggtctttgctactttataacaaggaaggttttttcttcaatttctaatattttgtttctcaaatcattctgtgaccccatcagaatggcctttgctgtccatatttctatcagcattctggtcatgaccacttcagtaatctctaagaagatttagacttcctctgtagctctccccttaggagccct

SEQ ID NO: 3934 - DNA, 385 bp, Homo sapiens
  MAP TO AL034350.2; EXPRESSED IN BONE MARROW, SIGNAL = 1.3; EXPRESSED IN LUNG, SIGNAL = 2.2; EXPRESSED IN BRAIN, SIGNAL = 2.6; EXPRESSED IN PLACENTA, SIGNAL = 3.3; EXPRESSED IN HBL100, SIGNAL = 1.6; EXPRESSED IN HELA, SIGNAL = 1.5; EXPRESSED IN HEART, SIGNAL =   2; EXPRESSED IN BT474, SIGNAL = 1.4; EXPRESSED IN FETAL LIVER, SIGNAL = 1.8; EXPRESSED IN ADULT LIVER, SIGNAL = 1.2
tgggctagtggcttgtaacctacaaggaagaggttatgaaatgatgacagaatagaatggggctatgaggatgggaagagatattttccttggtccaagaacaatttgccttgtgtgggaagagattgataggtggaagtttcagtgggggagtaggtgggagtgaccgatgagaaggagaaaaacttgccatgagggatagaagttggaatgctacctgcttttttagctaccttatcagcataagagctgccctgagcgatgggatctgatgccttttgatggcccttgcagtgaatgactccagtttcctttggaagtaaagcggccttgagaagagtttttattaaagaggaattaatgatggaggacccttgcatagtga

SEQ ID NO: 3935 - DNA, 1982 bp, Homo sapiens
  MAP TO AL109752.7; EXPRESSED IN BT474, SIGNAL =  79; EXPRESSED IN BRAIN, SIGNAL =  28; EXPRESSED IN HELA, SIGNAL =  82; EXPRESSED IN PLACENTA, SIGNAL = 1.1e+02; EXPRESSED IN FETAL LIVER, SIGNAL =  61; EXPRESSED IN ADULT LIVER, SIGNAL = 9.3; EXPRESSED IN LUNG, SIGNAL = 1e+02; EXPRESSED IN BONE MARROW, SIGNAL =  56; EXPRESSED IN HEART, SIGNAL =  26; EXPRESSED IN HBL100, SIGNAL = 1.1e+02
cggtgatcaatcttttccttcagtacagcaaacttgcatgcagtgtgagccatgtggcaatccagtacaggagtatagccagcactgatttggcctggatggttcaggatgatcacctgagcagtgatgccggctgctttcattggtgggccatttttgctgtcaccagcaatgttgccacaacgaacatccttgacagacacattcttgatattgaagccctcattgttcccaggaataaagctttatttcatttcactcgaagctttattttatttcactcaaagcttcctggtgcatttcaacagactttatttcagttgtaacatcgactgcagcaaaggagaccaccataccgggtttgagaacaccagtcttcacttgaccaccaagtacagtaccaatgccaccaattttgtggacatcctggagaggcaggcgcaagggcttgtcagttggaccagatggtggtaggatgtagtccagagcctcaagcagcgtggttccactggcattgccatctttacaggtgactttccatcccttgaacgaaggcacgttagcagttgcctccagcatgttgtcatcattccaaccagaaattggcacaaatgctactgtgttggggttgtagccaattttcttaatgtaagtgctgacttccttaacgatttcctcatatctcttctggctgcagggtggctcagtggaatccattttgttaacaccaacaattagttgtttcacatccagtgtgtaagccagaagggcatgctcactggtctgcccattcttggagataccagcttcaaattcaccaacaccagcagcaacaatcaggacagcacagtcaacctgagatgtccctgtaatcacgttcttaatggatacagtagtcattacaggtgttagcagatcaaaacctggcaaattacatgaggccagttactgactttaacacaccttcctgtgttcagaacccctaaataaccatcttccttcagttaaataaaaatttcttgacaccagaggaattatagctttggattagaatgcattgatgagtataactctaaatcagatttttgtgaagcgtttctactctgtgaagagaataattaattgattttcagcttgcaattaagaaaaggaacattatatagtcttgatgctgattatatcctgtcaagagcagtcattttcatgatgggcacatatagaacattgtgacctctaaagagagtagtaactgctccagtgtttaattggtatacgtacatttgatatagccacattcttaaatttgcagttcttttgcgttgttccttgtcatgctagaggactgacaggtttttgttattttaggggcatgttcttttttgtaaagtcgtatgatgtttacataatccctattctgccacaatctaaagcttttattattcttccttgttttaaagtgaaagcaagtttatcaagaaagtaaaggaataaaggaatgactactccataggcagagcagcctaaagctttcattattctttacagttttgtctcattgaattgaatgacagatatgctgtgtattcagtttggtattttgtttcttttttttttatttttgtttttttgtttccaagatggttctcagtttttaaatgtaaataaaatccaagaattccttttttttgaggtctttctctacattagtgggaaatatgtaaaagcctttgtcccatatggattcatgttccttcaaagaaggggcagtgaagctcaataatttagttttctgtttagttaggaagcctcttgattttacagacaggtggactaaatttgggtcatgttagcattgatggagttctatttgggaatgaacaaaggaatgaaactaaaaaagggtggagaaaacctgatgagaaaatgtttcttatgtaaatagagaatagaccaggaactaactgataggtgggaagtaggca

SEQ ID NO: 3936 - DNA, 401 bp, Homo sapiens
  MAP TO AC007249.2; EXPRESSED IN HEART, SIGNAL =  10; EXPRESSED IN FETAL LIVER, SIGNAL =  14; EXPRESSED IN LUNG, SIGNAL =  13; EXPRESSED IN HBL100, SIGNAL =  12; EXPRESSED IN HELA, SIGNAL =  13; EXPRESSED IN PLACENTA, SIGNAL =  13; EXPRESSED IN ADULT LIVER, SIGNAL =  12; EXPRESSED IN BT474, SIGNAL =  13; EXPRESSED IN BRAIN, SIGNAL =  12; EXPRESSED IN BONE MARROW, SIGNAL = 9.7
gcctgctgtacatgaccaagggccaggggcagagagaagcggaaggcccttccagtgcccatcacctgacccacaacatccacggccaatggtgtgaatgtgctggaaagtgccttctgatcccagagtccctcaactcgtggtggtggtggtggcggtggcggtggcggtggtggtggcggtggcggtagtggtggcggtgatggtggcggtggcagtggcggtggtggcggcggtggtggtgatggtgatggtggcggtgatggtggtgatgatggtgatggtggtggtggtggtgatggtgatggtggtggtggtggtgatggtggtggtggtggtggtggtggtgatggtggtggtggtggtggtggtggtgatgatggtagtggtggtgatggtgg

SEQ ID NO: 3937 - DNA, 473 bp, Homo sapiens
  MAP TO Z98744.1; EXPRESSED IN BONE MARROW, SIGNAL = 1.5; EXPRESSED IN LUNG, SIGNAL =   3; EXPRESSED IN FETAL LIVER, SIGNAL = 2.1; EXPRESSED IN HELA, SIGNAL =  63; EXPRESSED IN HEART, SIGNAL = 0.87
caacctataaatgcttgggccctatactagaaaacaaaatgaagtagttggatgttccagctctgtatgggactatcctgaatgcaacaaggaccaaaccaactgactcaggtaactcaaataccacaagggacattactctcagtaatgtgatttttttctttttgaaaaggccagtaatgctgagtgacatttgaacacaataaaatacagtcttctcttaatttgtaaagtgattgcattcttggaaaattcagtgcacattaaactatgcacacacacagacatttcatgcttatgtgtaaaaggaattctgttttagcctcaaataatcaggtttttcatcttcagattgattttgagatacctggaagtcatgcatgagttgaggcttcttcacaggatatctagcatccctggtccttccctaaatgtcagtagtgtgccctttcccaatcaccaggacagcaaaa

SEQ ID NO: 3938 - DNA, 471 bp, Homo sapiens; identical to SEQ ID NO: 492
  MAP TO AL031676.2; EXPRESSED IN BRAIN, SIGNAL = 0.9; EXPRESSED IN BT474, SIGNAL = 0.61; EXPRESSED IN LUNG, SIGNAL = 0.86; EXPRESSED IN HELA, SIGNAL = 0.95; EXPRESSED IN ADULT LIVER, SIGNAL = 0.84; EXPRESSED IN HEART, SIGNAL = 0.79; EXPRESSED IN PLACENTA, SIGNAL = 0.78; EXPRESSED IN FETAL LIVER, SIGNAL = 0.7; EXPRESSED IN BONE MARROW, SIGNAL = 0.89

SEQ ID NO: 3939 - DNA, 1986 bp, Homo sapiens
  MAP TO AC010130.3; EXPRESSED IN BONE MARROW, SIGNAL = 1.1; EXPRESSED IN LUNG, SIGNAL = 1.8; EXPRESSED IN BRAIN, SIGNAL =   3; EXPRESSED IN PLACENTA, SIGNAL = 1.9; EXPRESSED IN HEART, SIGNAL = 1.2
gccatggctacacttgcctttaaatactgtgacatctttattgtgctattgaccacacattagtctgacactctgtttaaataggaggctgccgatggcagacaagatttgggatctcagctgaaaaaggcatagatagcccttaccttccactgtgaacatcttgaattatgtcctcccagggcagataaagttcagaaatggttatggtcacataattctaatctaagtacctagaatgtagaggtaccccattgtgttccttttgtttggtttcacagattcttctcttggtagacaattgcaattgttatctaatcaaggaaatgtaacggtaattttaattatcattttaggtgaaaaaccttacgagtgcccaaactgcaagaaacgtttctcccattctggttcctacagttcgcacatcagcagcaagaaatgtattggtttaatctctgtaaatggccgaatgagaaacaatatcaagacgggttcttcccctaattctgtttcttcttctcctactaattcagccattacccagttaagaaacaagttggagaatggaaaaccacttagtatgtctgaacagacaggcttacttaaaattaaaacagaaccactagacttcaatgactataaagttcttatggctacacacgggtttagtggcactagtccctttatgaatggtgggcttggagccaccagccctttaggagttcatccatctgctcagagtccaatgcagcacttaggtgtagggatggaagcccctttacttgggtttcccaccatgaatagtaatttaagtgaggtacaaaaggttctacagattgtggacaatactgtttccaggcaaaaaatggactgcaaggctgaagaaatttcaaagttgaaaggttatcacatgaaggatccatgctctcaacctgaggaacaaggagttacttctcctaatattccgcctgtcggtcttccggtagtgagtcataatggtgccactaaaagtattattgactatacgttggaaaaagtcaatgaagccaaagcttgcctccagagcttgactactgactcaaggagacagatcagtaatataaagaaagagaagctacgtactttaatagatttggtcactgatgacaaaatgattgagaaccacaacatatccactccattttcatgccagttctgtaaagaaagttttcctggccccatccctttgcatcagcatgaacgttacctttgtaagatgaatgaagagatcaaggcggtcctgcagcctcatgaaaacatagtccccaacaaagccggagtttttgttgataataaagccctcctcttgtcatctgtactttctgagaaaggaatgacaagccccatcaacccatacaaggaccacatgtctgtactcaaagcatactatgctatgaacatggagcccaactccgatgaactgctgaaaatttccattgctgtgggccttcctcaggaatttgtgaaggaatggtttgaacaacgaaaagtctaccagtactcaaattccaggtccccatccctggaaagaagctccaagccgttagctcccaacagtaaccctcccacaaaagactctttattacccaggtctcctgtaaaacctatggactccataacatcaccatctatagcagaactccacaacagtgttacgaattgtgatcctcctctcaggctaacaaaaccttcccattttaccaatattaaaccagttgaaaaattggaccactccaggagtaatactccttctcccttaaatctttcctccacatcttctaaaaactcccacagtagttcatacactccaaacagcttctcttctgaggagctccaggctgagccctttagacttgtcattaccaaaacaaatgaaagaacccaaaagtattatagccacaaagaacaaaacaaaagctagtagcatcagtttagatcataacagtg

SEQ ID NO: 3940 - DNA, 1965 bp, Homo sapiens
  MAP TO AL049646.17; EXPRESSED IN BONE MARROW, SIGNAL = 1.6; EXPRESSED IN HELA, SIGNAL = 1.9; EXPRESSED IN PLACENTA, SIGNAL = 2.8; EXPRESSED IN HEART, SIGNAL =   2; EXPRESSED IN BT474, SIGNAL = 2.3; EXPRESSED IN BRAIN, SIGNAL = 2.7; EXPRESSED IN HBL100, SIGNAL = 2.6; EXPRESSED IN ADULT LIVER, SIGNAL = 0.99; EXPRESSED IN FETAL LIVER, SIGNAL = 1.9; EXPRESSED IN LUNG, SIGNAL = 1.8
cctttgaccacttacagaatgcatttctctactccatttcatcaaagtgtcaacattctgactcttagtccttgtccccatctttgccttcagagagagtataaggaatccgaaggttgccctgcacacggctcagggtcgggctgcactggcagtctgtggtggacagacgtggtcttcctgtgtctgctgaggtgagacttgaggctgaagccccgcccacacgtcttgcacacatatggcttctcccccgtatgtgtcatttgatgtaaggtgaggtgtgacttttggagaaagccttggccacactctctgcacacacaaggcttctcttccgagtgagcccgcttgtgtgtaattagagctgacttattgccaaagcccagtccacactgcctgcacatgtagggcttctccctcgagtgcttccgcttgtgcctgatgagaccggcctggtggctaaagcctcgcccgcactctcggcacacatacggcctctcccctgagtgcgtcctctggtgtgcaacaaggtttgacttctggctgaagcctcgcccgcactccccacacaccatgggcttctcgcctgagtgcgtcctctggtgtctgatgaggttggattgctggctgaagccccggccacagtccttgcacacaatgggcttctctcctgagtgtatgttctggtgtctgttgaggtgtgacttgagactaaagcctcgcccacacaccccacaaacatacggcttctccccagtgtgtgtccgcctgtgagagatgagggttgaattctggctgaagctgtgcccacacaccccgcacacatagggcttctcctttgagtgtgtcctctggtggttgacaagggtggtcctctgcctgaagcatcgcccacactccttgcaggcgtagggcttctccccagagtgcgtcctctggtgggagatgaggtttgacctgtcgctgaagcccaggccacagtcactgcacacgatggtcttctcctccaagtgtgtcctctggtgtctcacgacagctgacttctggctgaagcctttgccacattcccggcacacgtaaggcttttcccctgagtgtgtcctctggtgtatgatgaggtttgacttctggctgaagcctcgcccacactcactgcacatgtaaggtttctcaccggagtgtgtccgttcgtgtatgattagcgttgacttccggttaaagcctcgtccacactccctgcacacaattggcttctcccccgagtgtgccttctggtgtctggcgaggctcttctttaggctgaagcccttctcacataccccacacacgtagggcttctcccctgagtgtatccgctggtgactgagcaggtttgtcatcttgctgaagctcagtccacactctccacagttgactgttccaaatcctaagacttctatcctcttcaacaatttgtctgtttcctcagggttccctgactgagctgggctggcttctaactccacccctctgaggccgttccgagagctgactggctgcctctggggtggcctggagaacgctcccagagtccttttcttggttcttccaaacaaaggcatggcaccttctccctcaggaccttctgcttgatcactccagggtctcccctcagaggcttgttgctgcttctcctggtcccctgggcccggatccccaggctggatgttaccttctgcacacaagcatgtgaagatccaggggggatgattacacagcacatgctgcatggggaatttctgactggagaaacccggagggcagaaaggatcgaggtagagctctggctctggatctgctgcagagagaaaagtgtgagtcacaactgagtcctcagtgggcagcctgagcaatcagcttagtcagatcccctaggcttcaaaacacttaggccttaagtgccatccaaccgggacttcctttaca

SEQ ID NO: 3941 - DNA, 475 bp, Homo sapiens
  MAP TO AL080312.4; EXPRESSED IN BONE MARROW, SIGNAL = 0.96; EXPRESSED IN LUNG, SIGNAL = 1.2; EXPRESSED IN HEART, SIGNAL = 1.1
gcaaggtggcaggatacaagagtaataggcaaagttaagtgctgtcttatatagcaccaatgagtaaatgggatttcaaattaaaaatataacacatttacattagcacaaataaatgaaatatttatacctaaatgaaatgtttaggtataaatctcagaaaatgtgtacagaatctatatgaggaaaactataaaactttgatgaaagaaatcaaatatctaaataaatggagagatatccatgttcatgaatatgaagactaaatattgttaagatgtcaattcttcctaacttaatctatagattcaaaactatcccaatcaaaatcccagcaagttgctttgtggatatcaacgaagtaattctaaagtttgtgtgggaaggtaaaagactcataaaagccaacacagttgcattggctgaaatagaacaaggccagaggactgacactacctaatttccagccttgcta

SEQ ID NO: 3942 - DNA, 404 bp, Homo sapiens
  MAP TO AC008940.2; EXPRESSED IN HBL100, SIGNAL = 1.1; EXPRESSED IN HELA, SIGNAL = 1.3; EXPRESSED IN PLACENTA, SIGNAL = 1.2; EXPRESSED IN HEART, SIGNAL = 1.4; EXPRESSED IN BT474, SIGNAL = 1.3; EXPRESSED IN ADULT LIVER, SIGNAL = 1.4; EXPRESSED IN FETAL LIVER, SIGNAL = 1.3; EXPRESSED IN BONE MARROW, SIGNAL = 1.2; EXPRESSED IN LUNG, SIGNAL = 1.2; EXPRESSED IN BRAIN, SIGNAL = 0.95
taccagtcagagggagggtcattattggatatctactgtttactcacgtattggatggaggtggtgcccaccctcttggcagagacaaagattccagccactgatgtcgctgatgccagcctgaatgaatgttccagtaccgaaaggaaacaagacgtagtgttgctgttcgtgaccttgtcccacacacagccacctctgtttcacctgccttatgtccagaaacccttaatctctaatgtggagcagctgatcctggggatcccgggccagaatcgccgggagataggccatggccaggatatctttccagcagagaagctctgccatctgcaggatcgcaaggtgaaccttcacagagctgcctggggcgagtgtattgttgcacccaagactctcagctt

SEQ ID NO: 3943 - DNA, 370 bp, Homo sapiens
  MAP TO AL022323.7; EXPRESSED IN BONE MARROW, SIGNAL = 2.3; EXPRESSED IN LUNG, SIGNAL = 2.6; EXPRESSED IN HELA, SIGNAL = 2.2; EXPRESSED IN HEART, SIGNAL = 2.3; EXPRESSED IN PLACENTA, SIGNAL = 2.4; EXPRESSED IN HBL100, SIGNAL = 2.3; EXPRESSED IN FETAL LIVER, SIGNAL = 2.3; EXPRESSED IN ADULT LIVER, SIGNAL = 2.7; EXPRESSED IN BT474, SIGNAL = 2.2; EXPRESSED IN BRAIN, SIGNAL = 2.1
ataaaatgtttggcccatgcctgttaccatgcgctgttgtctgctcccccagagccttgataaaccgggctggaggcctgggtgaggctcagcagggatggtaggaggcttcttaccccacagctgcctcctggtagcagctgccaggtctggcctcatagagcctgtgagtccaaacagaaaggcctgaatgtgtctgagaccctctaactctgattagctcaggaatccacctcccccagcccaccctggggctccaaagggccccacgggtctgatgtgctgacacgccaggatcttggactggcttctcgcccttagattcccagggttgggggttgaggggcagggcctgctgaagcctagagag

SEQ ID NO: 3944 - DNA, 473 bp, Homo sapiens
  MAP TO AC010127.2; EXPRESSED IN HEART, SIGNAL = 1.1; EXPRESSED IN BRAIN, SIGNAL = 1.4
gcacattactgttcaaatggaagaatattatttgtatttatagttataaaaatagattttagaatgtcataatagccatatttttcacatgaaaacatccctaaaggccaatttcagggatgttttttagaggtagttgattcagaaaaaaaaaaaatgctgacatattagtaagaataattttttctattgttatgaaaaagcaccagtgacatttccagcactaaaatgtatggtaatattttacaaaatattcccctttggtaggtggaactccagcctaagtatgaagaaagtctgtacatgtatctttactttgttattttcatcatctttgggtccttcttcaccttgaacctgtttattggtgtcatcatagataatttcaaccagcagaaaaagaagataagtatttctaatattttctctcccactgagatagaaaattattccttggagtgttttctctgcca

SEQ ID NO: 3945 - DNA, 459 bp, Homo sapiens
  MAP TO AC005480.3; EXPRESSED IN HBL100, SIGNAL = 0.77; EXPRESSED IN FETAL LIVER, SIGNAL = 0.68; EXPRESSED IN BT474, SIGNAL = 0.78; EXPRESSED IN ADULT LIVER, SIGNAL = 0.85; EXPRESSED IN HEART, SIGNAL = 0.8
ctaccagattcgtatttggatactccctagttcaatatcttcagtggcttcctatcacctgcagagtaaagtccaaactccttagctgagtatttggtgtcctctactatgtgacctcaatctatctcttcaactttattttctactatagttggtcaaactgatccattcactgttcctcaggggcccccatcccttttccacatccgtgtcttgattcatggttttattcctgaaaagcactccttgcctgtcctaattcatttccctcctcaggaccctcctcagatacgacctttttcacagagccttctccatcatcccagctttgaagtttcagagcatagtaactgtgctgcttgacacattttcactttatagaggtaatttatggacatgtattttttttttccaacttagtatagtttcttagggtttcttaaagtttctaagatgatt

SEQ ID NO: 3946 - DNA, 384 bp, Homo sapiens
  MAP TO AC009232.2; EXPRESSED IN BT474, SIGNAL = 5.8; EXPRESSED IN ADULT LIVER, SIGNAL =   7; EXPRESSED IN LUNG, SIGNAL = 6.9; EXPRESSED IN BRAIN, SIGNAL = 5.7; EXPRESSED IN FETAL LIVER, SIGNAL = 7.2; EXPRESSED IN BONE MARROW, SIGNAL = 7.1; EXPRESSED IN PLACENTA, SIGNAL =   6; EXPRESSED IN HEART, SIGNAL = 5.1; EXPRESSED IN HELA, SIGNAL = 6.4; EXPRESSED IN HBL100, SIGNAL = 5.5
cttaccctgtctcaggctgcctccttgaagcaacacaaaacatatccacttccccaaatcctaaggtgggagggaacttcactgctgatctagatatttttcaagctacagctgtggattaaaccagtaatttctaaccttcctgtgtatcaagcttgcaacacagtcagacacgagtggagatgtgtgcagtatgctgcttgccttgtacccacaggcccctaaatctctagagcagaatgtgtatcatgagcagtgctgtatttaatgtaatagatgagaactgtaaataccggagtcaggctgttagcagctaccagctaggcaatatatctaaaaatatctctcgtatcattgatgttatggtaaattcatgctgtggcc

SEQ ID NO: 3947 - DNA, 1980 bp, Homo sapiens
  MAP TO AC011451.2; EXPRESSED IN ADULT LIVER, SIGNAL = 1.5; EXPRESSED IN LUNG, SIGNAL = 1.7; EXPRESSED IN BRAIN, SIGNAL =   2; EXPRESSED IN HBL100, SIGNAL = 1.5; EXPRESSED IN HELA, SIGNAL = 1.5; EXPRESSED IN HEART, SIGNAL = 1.3; EXPRESSED IN PLACENTA, SIGNAL =   2; EXPRESSED IN BT474, SIGNAL = 2.1; EXPRESSED IN FETAL LIVER, SIGNAL = 1.4; EXPRESSED IN BONE MARROW, SIGNAL = 1.3
gcaatcacctttttaagagactcctgtaaccaagctataaaatctgcatagggttcttttggcccctgcttaacagcactaaaataagggtattgttctccacctgaagagatttttttcccaagctctaatgcacactcctctaagctgatctataacatcatcctgcatgaccacttgtgcgtctaatgcagcccagccaccaactctcaaaagttggtcggtagttacattaattggaggttgaatttgtgcactgcaggcagcttgaatagaagcttcatctggccaccaggtcttaaactgtaaaaactgagcaggagccagacaggctcgagtaagagtgtcccatcaatgggaatcatctgactggaggtagcaacattttttgacagacccatcacgaaaggagaacgtggtccatactgattgatagcctgtttaaactcattcagtaatttaaagggaaaagcctcaaatgtagccataacattcccctgttgatctggggggtgtatcctaacagggaacttccaagcctctaaattaccctctcttctagcttgctgaattcctgcctgaatagaactgagggcggtcactcggggctctgctcgaacagttgctggggagactactttttgctcagtgtcctccagaaaagaaagatccagagggtcaggccattccctatcttcaaggtattgaggaggtgctgaggggcagggacaagcttccccttcttgggtctctttaagtggttgacggatctgttcttttatctcttctgcaacattatcacactccctctcttctttgtctccttcctcctcatcatcagtgtgaaaagcttccaaggtggaatgaatcagagcccacactgaccagacagttataggaatatcctcagcaccatccttatacgcctttttcagtgcgctgcctacctcctcccagacctctacatccatatttcctcagtcggaaaccaggggcaatatttctctaccatactaaaaagctgcataagtcagctagtgctaactttcactcctccttttctgaggagctgccgaggcagactcaaataagccttgtgcctgcttgacccttgtcccattgttaccctgatgcttccgagctccccttcttacttaccatggggattgcttaagagtactcaggtgtgctccagcgtagttccatgttctccaaccatcgctctggcgacccttcgacccgggttcgagccccatgtttgggcgccacttgctgagaccagcttggtcatggagacctcaacccagcggtgctagaggaataaagacacagacacaaaaagagagtgcaatgtgggatcagaagtgcaatgagaccttcagagctgacggtctcaaacagagtttgacccaactatttattgacagtaaactcatgataaacatcgtttctgcagtttatagattaactgaatgtattatttatggagaaccaagggacaggctcttgcttgttatctgcagcaggaacatgtccttaaggcacagattgctcatgccattgtttgtggtttaggaatgccttgagaagttttccgccctgggtgggctaggtgttccttgagcttattctggtgaaccagcaacctccagtgtgtgcatcatagccatcacgagcatgtcacagtgctgcagagatcttgtttatggccagtttctcatggcctgtttatgtccaggcttggggcctgttccaagcaatattcttttcttagtctatcattgcctgtttttttgtatgaaggttggagtattttctcctttccttaactcatacagtactttcttattacaagtattatcagtcacaattcactggcagaatcagctgaatctggattatttgttgccattgttatgggattttattttcatgttttggaatgaattcaaagcatggactcaattatttttatatttt

SEQ ID NO: 3948 - DNA, 406 bp, Homo sapiens
  MAP TO AC011995.2; EXPRESSED IN BONE MARROW, SIGNAL = 3.7; EXPRESSED IN HBL100, SIGNAL = 3.8; EXPRESSED IN HEART, SIGNAL = 3.2; EXPRESSED IN BT474, SIGNAL = 3.1; EXPRESSED IN BRAIN, SIGNAL = 3.6; EXPRESSED IN LUNG, SIGNAL = 5.2; EXPRESSED IN PLACENTA, SIGNAL = 5.2; EXPRESSED IN HELA, SIGNAL = 4.1; EXPRESSED IN ADULT LIVER, SIGNAL = 6.3; EXPRESSED IN FETAL LIVER, SIGNAL = 4.3
tgaccagagcaaagacatggggaagttagggcagaagagtcctgcagggagcaaaaagaggcgtgagggaagaggccaggcaaggcagagtgtgaggagtgaagcccaaatcaagcctcttggacctcaatagctgtcaaggtcttatcttggctacaaataaaatattgcattttaaacccccaaatatgccaagaccatcctctgcctctctgtctctaacctttccagactgagctctaggatgccagggaaaagcagcagggcagttaattcccgcattccttccacctacagcaggctctgggagtccagtacatgcagggcctgggggacagcagagccccacctgagacagaggctgagctcagcagccagtcaaacccggtctggttctgcttccaga

SEQ ID NO: 3949 - DNA, 471 bp, Homo sapiens
  MAP TO AC007786.1; EXPRESSED IN LUNG, SIGNAL = 0.81; EXPRESSED IN ADULT LIVER, SIGNAL = 1.4; EXPRESSED IN BRAIN, SIGNAL = 0.88; EXPRESSED IN PLACENTA, SIGNAL = 0.86; EXPRESSED IN BT474, SIGNAL = 0.78; EXPRESSED IN BONE MARROW, SIGNAL = 0.82; EXPRESSED IN HELA, SIGNAL = 0.76; EXPRESSED IN HEART, SIGNAL = 0.82; EXPRESSED IN FETAL LIVER, SIGNAL = 0.92
acacccagaaagtgccaaagaaaaactgcaacaaagtagagaagttaaaaataccttaaagtaatggagaatgagagagtttaacattctcttaggaggaagatttaatccagcagctgacacaaagtgtttgcagtcgtggcccgggaatcacgggagttgaatcggagcccctgaagatcacgttcccaatgaacaagtgcaggaacagaggccacagcacatacccagggacatcagaacttctcacatacaggttgggtttgcgtgcatagaaattccttcctcttactaggtacaagcaaaccctcctgaaggaaccagagatcctagaatttctaggccatgtggacatcatcaggatcctcgttgctgtctcagttgtgcttacccttgggggactttcctactggctgagagagcagaaacaagacattaaaccaagctgggggtgtgccttccagctttgat

SEQ ID NO: 3950 - DNA, 420 bp, Homo sapiens
  MAP TO AC012002.2; EXPRESSED IN PLACENTA, SIGNAL = 1.7; EXPRESSED IN HELA, SIGNAL = 1.7; EXPRESSED IN ADULT LIVER, SIGNAL = 2.1; EXPRESSED IN FETAL LIVER, SIGNAL = 1.7; EXPRESSED IN BRAIN, SIGNAL = 1.3; EXPRESSED IN HEART, SIGNAL = 1.6; EXPRESSED IN BT474, SIGNAL = 1.4; EXPRESSED IN LUNG, SIGNAL = 1.9; EXPRESSED IN BONE MARROW, SIGNAL = 1.5; EXPRESSED IN HBL100, SIGNAL = 1.6
atgaatggccatggttgtgcttcagtgaaattctgtttatgaaaataggcagtggactagatttggcctctgggttatggtttgtgtgatgcctggcttaaaacaacaatcttcttttttttttttttttttttcagaaaattgaaattctgacaagatgtgatggggaacgcttgtctcagctgcatgtggctttagctggggtgacctgcctggggtctggagggtctactttcaagatggtacacttttatggctgtcaaatgctgctggctgctggctgggagtctggctggagctgtgggttggaggaccctgtatctctccttgttggcacgtccaggggctgcttgagcttccttacatcatggcaacttggttccaagcttgagcaccccaagagcatgaggcagaagctgt

SEQ ID NO: 3951 - DNA, 458 bp, Homo sapiens
  MAP TO AC011257.2; EXPRESSED IN HEART, SIGNAL = 1.1; EXPRESSED IN PLACENTA, SIGNAL = 1.7; EXPRESSED IN ADULT LIVER, SIGNAL =   1; EXPRESSED IN FETAL LIVER, SIGNAL = 1.1; EXPRESSED IN LUNG, SIGNAL = 1.3
  unsure 174
  unsure 272
  unsure 309
tccacttgactatgcccaggtacctcaattttaattatgtccaaaatgaaacttcatttcccccttaattctgttttcttttcctgtgttttctatgatgcttttcagataaagtccaaagcccttaccgtggcatacaaaatccttcaacatctatcccctgatggctttagncttttgctgaaacactgatcctctcaactctctatcacatttcacaacttcggttattatatttattcatttattcctttattattctttcaacctanctgtggtagacactttctggcttcttcagatccattncttcacccttctcaccagctgtgtgcccaggatgctgccgtgtatgggttatactaacagtattcttcgctctggtatctgattgagtttggtctgtaaagagtctggagaagaggtcaagagtgggaggtcctacacatcccctccaa

SEQ ID NO: 3952 - DNA, 397 bp, Homo sapiens
  MAP TO AL022169.1; EXPRESSED IN PLACENTA, SIGNAL = 9.2; EXPRESSED IN HEART, SIGNAL = 7.2; EXPRESSED IN LUNG, SIGNAL = 9.4; EXPRESSED IN BRAIN, SIGNAL =   8; EXPRESSED IN HELA, SIGNAL =  10; EXPRESSED IN HBL100, SIGNAL =  10; EXPRESSED IN ADULT LIVER, SIGNAL = 7.5; EXPRESSED IN BT474, SIGNAL = 7.7; EXPRESSED IN FETAL LIVER, SIGNAL = 9.1; EXPRESSED IN BONE MARROW, SIGNAL = 7.7
cagcaacatcgaatgactggagtaaaacgatagcaaatatttatcaagaaagtgcagacaaacagaaagcagtggcaacattaataacagaaaataattgaattgtcagagaaattaattaaatgggataaggacggtcccgagaatgcctatggttagaatgcagagccctaaatttctttctcagaccccttatctcttccaaacacctttccatctcatctccctcccttgtcatttcttcatctttaaaatgcctatagtctatgtcctctttaaattcttcgagagactgaagcagcctctgtctaaaattcccttctgtttgctggcgttcaaattctccatacgggcgtttttcctccctctttggcacgctgcactttggctttccttc

SEQ ID NO: 3953 - DNA, 465 bp, Homo sapiens
  MAP TO AC007011.1; EXPRESSED IN PLACENTA, SIGNAL = 0.9; EXPRESSED IN ADULT LIVER, SIGNAL = 1.1; EXPRESSED IN BT474, SIGNAL = 0.97; EXPRESSED IN FETAL LIVER, SIGNAL = 0.93; EXPRESSED IN BONE MARROW, SIGNAL = 1.3; EXPRESSED IN BRAIN, SIGNAL = 1.4; EXPRESSED IN HELA, SIGNAL = 1.1; EXPRESSED IN HEART, SIGNAL = 1.1
agggagtgtggagacagacgtgagctgggtcccagtgacactgctgagctcgaaaccaaccatttccacagacacttccatttcatgggccaaaaaatgtggtcctttgctgaggcctgtttctatcatttggaaccagcattcggcctgattcaccagcctcaccccacctcctgcagagcccacaaggaaccgacttccggaggcccactatggcccttcttctcactcatccttgagtggtttaggggacggtattttaccctcttcctagactctcaccacttggccagcagaacgaggggatggttggggccatgcaccagacccatgatggagtagccatagttgtgccagtcaatgacgagcttgcttccacaaaggcagcccacgaaccagcagacagcaatgctaggcagacctggggggttctaggaaagatagagacttgaaggggaggaaacc

SEQ ID NO: 3954 - DNA, 468 bp, Homo sapiens
  MAP TO AC007199.1; EXPRESSED IN ADULT LIVER, SIGNAL = 3.7; EXPRESSED IN LUNG, SIGNAL = 2.5; EXPRESSED IN BRAIN, SIGNAL = 2.8; EXPRESSED IN HEART, SIGNAL = 2.4; EXPRESSED IN HELA, SIGNAL = 2.6; EXPRESSED IN HBL100, SIGNAL = 2.7; EXPRESSED IN PLACENTA, SIGNAL = 2.6; EXPRESSED IN BT474, SIGNAL = 2.5; EXPRESSED IN FETAL LIVER, SIGNAL =   3; EXPRESSED IN BONE MARROW, SIGNAL =   3
ttcaccagataggtgggaggtattcaaagtgagagcactttaaggaaataagctgatcctcagtgtgcaataagaggctgctatatagcaggttgaaaatttgaagttaagagatatcagaaggtctgaatatacttaaatacttccagaaaatttaaagttgacagatatcagaaggtcgcaagaactacagatgtggaagcagacactgttatgagcaactacattcctcccatagaatgctgctcaatactggcacacagaccagaggtagccagcagtacacaagactgcaaggcaacaagtacattatcaatgaattagccatctatcactcaaactatgtcccgcattggaagtgtgtcaagcaagagcaccttcgacaacacttttcggccaccactaatgatcatctccactgatgcctcagcagaaaggataacattcagccaatcctgcttaggtgtc

SEQ ID NO: 3955 - DNA, 434 bp, Homo sapiens
  MAP TO AC007014.1; EXPRESSED IN BONE MARROW, SIGNAL = 9.3; EXPRESSED IN PLACENTA, SIGNAL = 8.8; EXPRESSED IN ADULT LIVER, SIGNAL =  12; EXPRESSED IN BRAIN, SIGNAL = 7.4; EXPRESSED IN HEART, SIGNAL = 7.4; EXPRESSED IN HELA, SIGNAL = 7.8; EXPRESSED IN HBL100, SIGNAL = 9.3; EXPRESSED IN BT474, SIGNAL = 7.6; EXPRESSED IN FETAL LIVER, SIGNAL = 9.1; EXPRESSED IN LUNG, SIGNAL = 9.8
gacaggaaccctggagtttgttcacccttgcttgagcctccaggtgctctgcagagactttttagagaaccagctgtgtgaaagcagaaccctcaaactgatctcagagaacccaggggccttttcttcaaaacctgcatgggacatgcacaccgctggctcaaggtcacagctcaataatagtacaaaatgtaggttgcacactgaccctcccagtggcgtgtgaatcagcagagtggtgtcccatgtcccatgtcccccagccccctgctgtgactcagagcagccaactcactcagatccaggacatcatcagtcttgatcaggtcctcctcccgagtcagcggcaactgtgtctcaggctcccctcgcaattgcagtgacagggaacgcagcatgaagaacacccggatggcctggaccaacagttcaga

SEQ ID NO: 3956 - DNA, 441 bp, Homo sapiens
  MAP TO AC007220.1; EXPRESSED IN LUNG, SIGNAL = 4.7; EXPRESSED IN BONE MARROW, SIGNAL = 4.8; EXPRESSED IN HELA, SIGNAL = 3.9; EXPRESSED IN PLACENTA, SIGNAL = 4.2; EXPRESSED IN BT474, SIGNAL = 4.5; EXPRESSED IN ADULT LIVER, SIGNAL = 4.8; EXPRESSED IN BRAIN, SIGNAL = 3.7; EXPRESSED IN HEART, SIGNAL =   4; EXPRESSED IN HBL100, SIGNAL =   5; EXPRESSED IN FETAL LIVER, SIGNAL = 4.2
tgaagggctgagaagagtggtcccacactgacgtctacttattgctggcctcctgcctgctagggagagctcctcttctcttccatgcagccctagaaactcaccagaaaccaaacacccaggaaatggaacttcctcgtattcgtatataaaacaattcctgaatcatacgtgtcttcttctatgctatgggggttctcaaggtcagtgtgagaactacaaacagccctgacccaccaagtgctcagaggatgccctgccagggtccagccactcaccagctattctctgcatcttcatgcgccttgcctggatgcggcctttggccaggcgctgcttggcgatgatgcagcggatgtggtctgagaagatgaaggtggcctggaggatggggaagggcttggaatgggggctggacgcaggcttgtggatggtgatgtt

SEQ ID NO: 3957 - DNA, 377 bp, Homo sapiens
  MAP TO AC011032.2; EXPRESSED IN PLACENTA, SIGNAL = 5.4; EXPRESSED IN HELA, SIGNAL = 5.6; EXPRESSED IN HEART, SIGNAL =   4; EXPRESSED IN ADULT LIVER, SIGNAL = 7.5; EXPRESSED IN FETAL LIVER, SIGNAL = 5.2; EXPRESSED IN BRAIN, SIGNAL = 4.9; EXPRESSED IN BT474, SIGNAL = 4.9; EXPRESSED IN LUNG, SIGNAL = 6.3; EXPRESSED IN BONE MARROW, SIGNAL = 4.3; EXPRESSED IN HBL100, SIGNAL = 4.2
tttcctgggtgtttttcagctaaacccttggatcactttctcaaaactctcattataagcagatgttattgttctttagccttccagaaagtcaacaagcaaaatgccttgaacatcccccaaaaaactgttgtcatgacctttgcacttaattggttcacttttgttttgattggaccacttccatctcttagcatccattgctttgattgtgctttgtctttaggattatactggtaaagccatgcttcatctcctcttatcatacttcaagaaaacgtttcaggatgttgagcccacttgtttaaaattttcattgaaagctctgctctcatctatggccaatgtgggtgcaatggttctggcatccattgagt

SEQ ID NO: 3958 - DNA, 430 bp, Homo sapiens
  MAP TO AC009721.9; EXPRESSED IN FETAL LIVER, SIGNAL = 1.1; EXPRESSED IN BT474, SIGNAL =   1; EXPRESSED IN ADULT LIVER, SIGNAL = 1.3; EXPRESSED IN LUNG, SIGNAL = 1.1; EXPRESSED IN BONE MARROW, SIGNAL =   1; EXPRESSED IN HELA, SIGNAL = 1.2; EXPRESSED IN PLACENTA, SIGNAL = 1.2; EXPRESSED IN HBL100, SIGNAL = 1.1; EXPRESSED IN HEART, SIGNAL = 1.2
ttgcagcataacaaaccaccccaaaacttagtggcttcacataacaataacttatcatatgttatgattctgtgggtagatggcttttcatggtgttggccagcattctgacacagttgatagatccaaaatgactgcaaccacatggctggcaagttggcactggctattagctaggagctcagccagggtcatggcctgaagcctgctctccttcatgaggtttcttcctcacagttgcttgagcttccttgtagcatggaagttgtgttcaaaaaggatcattctgaacataagtatgtggagaagaaggaaacagaagcagccaatcctcttaaggcccaagcttggaagtcccaagatgtccctgctactatatcctattggtcaaagcagtcacagggccagcccagagaaggggtggacatgt

SEQ ID NO: 3959 - DNA, 450 bp, Homo sapiens
  MAP TO AC009296.1; EXPRESSED IN HEART, SIGNAL = 1.1; EXPRESSED IN BT474, SIGNAL = 0.93; EXPRESSED IN LUNG, SIGNAL = 1.1; EXPRESSED IN HELA, SIGNAL = 0.86; EXPRESSED IN ADULT LIVER, SIGNAL = 1.3; EXPRESSED IN BRAIN, SIGNAL =   1; EXPRESSED IN PLACENTA, SIGNAL = 0.92; EXPRESSED IN BONE MARROW, SIGNAL =   1; EXPRESSED IN HBL100, SIGNAL = 0.85; EXPRESSED IN FETAL LIVER, SIGNAL = 0.77
gaagaatctccccagaaatccatatgtaaagtagatggttcaaaaatatgaatattctaatacaggggaaaagaaaaaatctccttagagtcactatatcctaaaagcaaaaaaatcagaaccactcatttctacctctgagattatttttgataaccccaggaaatggcttcttctgttgccatctcaaaggacaatcacaccatttttcaatccattattaaagaagagccatcagcctgcctttccacgagtaagcgggtggttttaagctttgactgcttttatctccctgcagttagcaggccctgtgatcaccaggagcatggacaaaagcctccagaagacaaaagtgcaggaaagctcatttctcagagatcagttcagaagtggtccaggttgggggtgggagtctgatgcaaaggtgtcccagccaagaggaacaaggag

SEQ ID NO: 3960 - DNA, 417 bp, Homo sapiens
  MAP TO AC008925.2; EXPRESSED IN BRAIN, SIGNAL = 6.3; EXPRESSED IN HELA, SIGNAL =  16; EXPRESSED IN PLACENTA, SIGNAL =   6; EXPRESSED IN HBL100, SIGNAL =  13; EXPRESSED IN HEART, SIGNAL = 6.2; EXPRESSED IN BT474, SIGNAL = 6.2; EXPRESSED IN FETAL LIVER, SIGNAL =  11; EXPRESSED IN ADULT LIVER, SIGNAL = 4.5; EXPRESSED IN BONE MARROW, SIGNAL = 5.9; EXPRESSED IN LUNG, SIGNAL =  11
gcaaatggacaccaaaagtgagaaggagtagctatttttatatcagacaaaaccaactttaaagcaacagcagtttagaattcttacacacaccggaagagaggtcgtctttccttgcctaatgcagccatggctggtggtcccaagaagcatctgaagtaggtagcaactccaaagcattggatgctggataaattgaccagtgtgtttgctccttgtccatccaccagtcctcacaagttgagagagtgtctccccctcatcattttcctaaggaacagacttaagtatgccctgacaggagatgaagtaaagatttgcatgcaggggttcattaaggttgatggcaaggtacgaactgatataacctaccctgctggattcatggatgtcatcagcattgacaagacgggagat

SEQ ID NO: 3961 - DNA, 423 bp, Homo sapiens
  MAP TO AC007223.1; EXPRESSED IN HEART, SIGNAL = 1.1; EXPRESSED IN ADULT LIVER, SIGNAL = 1.9; EXPRESSED IN FETAL LIVER, SIGNAL = 1.5; EXPRESSED IN LUNG, SIGNAL = 1.5; EXPRESSED IN BRAIN, SIGNAL = 1.5; EXPRESSED IN HBL100, SIGNAL = 1.5; EXPRESSED IN HELA, SIGNAL = 1.3; EXPRESSED IN PLACENTA, SIGNAL = 1.3; EXPRESSED IN BT474, SIGNAL = 1.4; EXPRESSED IN BONE MARROW, SIGNAL = 1.6
cttcccccagaatagttccctaaagtggcatatagtatctgttttttcttcctcctctttcttcctgggaatcattaccagccccggctggtgatttataatcacattcccaacaaatttcactgttgttaatgactacttattttctatacaaatgatttttgctctccttcctgaggataattaactaagaaactggtaataaattactgataatgatcagtttgtcagagatgattgtcgaatggtgccatcttccatagtaactagataaagtatctttaattgctgataacagaacagacaaattgtggttcttttttttgttgttgttgttattgagatattcatgaaatcttcctcctggaagtcaggcagaataacaccttttttctctgtctcctgagggaggggaaaaggaag

SEQ ID NO: 3962 - DNA, 430 bp, Homo sapiens
  MAP TO AC007248.1; EXPRESSED IN ADULT LIVER, SIGNAL =   2; EXPRESSED IN FETAL LIVER, SIGNAL = 2.1; EXPRESSED IN LUNG, SIGNAL = 2.1; EXPRESSED IN HELA, SIGNAL = 1.6; EXPRESSED IN PLACENTA, SIGNAL = 1.5; EXPRESSED IN BT474, SIGNAL = 1.5; EXPRESSED IN BONE MARROW, SIGNAL =   2; EXPRESSED IN BRAIN, SIGNAL = 1.7; EXPRESSED IN HEART, SIGNAL = 1.4; EXPRESSED IN HBL100, SIGNAL = 5.1
ggttcatatgctcagtccccagaatatcttgagttctttttggcgttcactgtttctgaagattaagactcggaaagaacaggcaagacttccggttcgtctctacctggcttgactgtttttgcaggcattaagtaaagaaggttcttccagaaccttgagttataagaaagagatttatcggccttccacttcagaactctgtgagatttcaaaagctttagtgattggggcaagaatgtgaagtcagtaacaggtgtaaattcaattaagattattttaatttttctttccaccaatgcttcatggagtccactttcaagttcatacctgacctcattagacatataacttttacttaggacaatgattagtcttcggcttttctctatcagtgagtggatttcatcaacaacagctgaaaatgcaa

SEQ ID NO: 3963 - DNA, 383 bp, Homo sapiens
  MAP TO AC011061.2; EXPRESSED IN BONE MARROW, SIGNAL = 5.6; EXPRESSED IN HBL100, SIGNAL = 4.9; EXPRESSED IN HELA, SIGNAL = 3.7; EXPRESSED IN ADULT LIVER, SIGNAL = 6.3; EXPRESSED IN BRAIN, SIGNAL = 5.1; EXPRESSED IN LUNG, SIGNAL = 5.2; EXPRESSED IN PLACENTA, SIGNAL = 5.9; EXPRESSED IN HEART, SIGNAL =   4; EXPRESSED IN BT474, SIGNAL = 4.6; EXPRESSED IN FETAL LIVER, SIGNAL = 5.1
attgagtccagcagagtgccacttaataagctatctgtgggagaactacttgtggttcatagtactaaattgcccattataggctaagtttaatttgggggatagattaattatccaaaaggtaaagatctcctgcttaaatgactctttggtttctgtctcctgattggaccctgattgataaatgcagaggttttttttttaatactctattttatttttattctagacttattctggactcttctgtgtagttataaacccttacaagaatcttccaatttactctgagaatattattgaaatgtacagagggaagaagcgtcatgagatgcctccacacatctatgctatatctgaatctgcttacagatgcatgcttc

SEQ ID NO: 3964 - DNA, 477 bp, Homo sapiens
  MAP TO AC007540.3; EXPRESSED IN LUNG, SIGNAL = 1.1; EXPRESSED IN BRAIN, SIGNAL = 1.1; EXPRESSED IN HEART, SIGNAL = 0.96; EXPRESSED IN PLACENTA, SIGNAL = 1.2; EXPRESSED IN BT474, SIGNAL = 0.98; EXPRESSED IN HBL100, SIGNAL = 0.96; EXPRESSED IN HELA, SIGNAL = 0.92; EXPRESSED IN ADULT LIVER, SIGNAL = 0.95; EXPRESSED IN BONE MARROW, SIGNAL = 2.5; EXPRESSED IN FETAL LIVER, SIGNAL = 0.82
agggaagaggaaggtgatgggcagttaggggtgaatggaggtatacatccatttaagaaaacttttggattcactatttgagtatgcattatgttccctgaaataaatgtagctgtgcctcttcctgttaccagctctccacttctgtgtctcactgacacttgtttaataaacacaagttgagttaatgaatgagtcctgggtagagttcatggtaaaaaataaagattactaagtgttaaagaaaggtgttaatagcaagtgagcaccccactgaggatttctccctgttatagaaatcaaagggggctggaagaaatggagagacttcacaccagctgtcagaagcattttatgccaaggacaaacattcacatttgtcctgtcccagggatgtctcaaaaccatttccaggtaatagcaaggataccctctatagtggagactggtgtatctggcacgcttccaactgaaaat

SEQ ID NO: 3965 - DNA, 395 bp, Homo sapiens
  MAP TO AC011231.2; EXPRESSED IN BRAIN, SIGNAL = 2.4; EXPRESSED IN BONE MARROW, SIGNAL = 1.5; EXPRESSED IN LUNG, SIGNAL = 1.4; EXPRESSED IN HBL100, SIGNAL = 1.5; EXPRESSED IN HEART, SIGNAL = 1.2; EXPRESSED IN PLACENTA, SIGNAL = 1.5; EXPRESSED IN HELA, SIGNAL = 1.4; EXPRESSED IN ADULT LIVER, SIGNAL = 1.6; EXPRESSED IN BT474, SIGNAL = 1.3; EXPRESSED IN FETAL LIVER, SIGNAL = 1.6
cgggatttctcagagctgtcagggtgttagggttcattgtttatctacaagagaggaggtatatcattatgccgtgatttcctaagttacttgataatggtaccctgtttttatagtgcacctgatagcactagtgttccacggagcatagccttggaaataattaatttattataactctgaggagctggttgcctgttgaacaattataggagctaatagggaagaggtatgtcttcattcaacttatattggtcatatatttgtgatctgtataagactgtgctacactacatggggtacacgctgttatatgagaagcagctcctgcccacaaggattttctggtgcatcaaatatatcaagataatctatgtgtgggttttgcatgtgtg

SEQ ID NO: 3966 - DNA, 477 bp, Homo sapiens
  MAP TO AC011363.1; EXPRESSED IN HEART, SIGNAL = 0.92; EXPRESSED IN LUNG, SIGNAL = 3.6; EXPRESSED IN BRAIN, SIGNAL = 1.1; EXPRESSED IN FETAL LIVER, SIGNAL = 0.92; EXPRESSED IN ADULT LIVER, SIGNAL = 0.95
acctgtttttcagattcccctaagaattccaagggatgcatgaggtcattgaccgttaatttcacagagagtctgtcctgtgagctgacctcaactttctatgaaatgcctttgctacctgctagtgaggatcccaagggagggaacctgcctggtttctgaatggtagaaactcatctcttttcaggtgctgatccccatctctttgtatgtctccattgagctggtgaagctcgggcaagtgttcttcttgagcaatgaccttgacctgtatgatgaagagaccgatttatccattcaatgtcgagccctcaacatcgcagaggacttgggccagatccagtacatcttctccgataagacggggaccctgacagagaacaagatggtgttccgacgttgcaccatcatgggcagcgagtattctcaccaagaaaatggtatagaagctcccaagggctccatccctctttctaa

SEQ ID NO: 3967 - DNA, 433 bp, Homo sapiens
  MAP TO AC007249.2; EXPRESSED IN BONE MARROW, SIGNAL = 1.5; EXPRESSED IN ADULT LIVER, SIGNAL =   1; EXPRESSED IN LUNG, SIGNAL = 1.1; EXPRESSED IN BRAIN, SIGNAL = 1.1; EXPRESSED IN HEART, SIGNAL =   1; EXPRESSED IN HELA, SIGNAL = 1.2; EXPRESSED IN HBL100, SIGNAL = 1.3; EXPRESSED IN PLACENTA, SIGNAL = 1.6; EXPRESSED IN BT474, SIGNAL = 1.3; EXPRESSED IN FETAL LIVER, SIGNAL = 1.2
tcggaataagtgtcccttgcaggtgttcagaccacaagtcacctttcacctgttggtcactgtcacatgagttggggccacaagcctctctgagtaccactgttaaactttctaaagttgtgttcgtaatgataccggaagagcaagacaaaggaccaacaggaatgcagtttggaaccagggtcagtatcgcctgcttaccagcatggggccacactgtccctggtgaggttgtccctgtgcccacctagatggctcagaaacagcaggcacccagagcaccaggaacgctgtgggggtgagagggtgggggaatacaccaagcgcttctccacgtggacgtgccccacagcagctagagccagtccccagtgcgtcaccgcatggccctcggccagtcacccttcctccaggactgcttcctccacggtac

SEQ ID NO: 3968 - DNA, 464 bp, Homo sapiens
  MAP TO AC007073.2; EXPRESSED IN PLACENTA, SIGNAL = 3.2; EXPRESSED IN HBL100, SIGNAL = 3.6; EXPRESSED IN HEART, SIGNAL = 3.8; EXPRESSED IN ADULT LIVER, SIGNAL = 4.7; EXPRESSED IN FETAL LIVER, SIGNAL = 3.3; EXPRESSED IN BONE MARROW, SIGNAL = 3.8; EXPRESSED IN LUNG, SIGNAL =   4; EXPRESSED IN HELA, SIGNAL = 3.9; EXPRESSED IN BT474, SIGNAL = 3.4; EXPRESSED IN BRAIN, SIGNAL = 3.7
aacgataatcacgaggcaggacttttttatgtaaaaaagcagtgtattatagaatttcattttaaagtcgatacagtctatttttgtaggccatgatttgtggctgttttaaacttcgtaataagtggatgtaaggctttgtaacacatatcttttgtttatgggtgacattgtgttaccattaccagacatattaaattggtaaatctttcttctttcagggttgtgcctcttgggtccatgcaaactgtgagtggctatactttcagaggctttatgtcacatacaaataattacccttgtgcttacctcaatgctgcatcagccatcggaatgaagatgcaggatgtggacctgttcataaagagacttgacaggtgtttaaaggcagtaagaaaagaacgaagtaaagagagtgatgacaattatgacaaaactgaagatgtggatattgaagaaatggc

SEQ ID NO: 3969 - DNA, 448 bp, Homo sapiens
  MAP TO AC011236.2; EXPRESSED IN FETAL LIVER, SIGNAL = 1.4; EXPRESSED IN BONE MARROW, SIGNAL = 1.2; EXPRESSED IN HBL100, SIGNAL = 1.3; EXPRESSED IN BT474, SIGNAL = 1.2; EXPRESSED IN ADULT LIVER, SIGNAL = 1.7; EXPRESSED IN BRAIN, SIGNAL = 1.3; EXPRESSED IN LUNG, SIGNAL = 1.3; EXPRESSED IN PLACENTA, SIGNAL = 1.4; EXPRESSED IN HEART, SIGNAL = 1.2; EXPRESSED IN HELA, SIGNAL = 1.7
tcactcaccacagttctggccagatcacctcacaaatggggtagtcatatggcaaggttggaggctatgaatggcacaaaagtatgagttcctacttactaaagctggtataattacttttgccatgcagtgcccaacctgccagcagcagaggccaatgctgagtccccagcacggtatcattctttgaggagaccaaccacccactttctgccaagatgattaccaggccctttccactctagaaggagaattgcttcatcttgactggaattaacacatgttctagatatagtcttaccttttctgcctgcagggccttggacaacactctgagaactcacagagtgatctaccggtatggaattctgaatagcattgcctctgaccaagaaacccaacttacagcaagagagtgtggcaatggccacatgacaatgggatccac

SEQ ID NO: 3970 - DNA, 393 bp, Homo sapiens
  MAP TO AC007204.1; EXPRESSED IN BT474, SIGNAL = 3.4; EXPRESSED IN LUNG, SIGNAL = 2.3; EXPRESSED IN FETAL LIVER, SIGNAL = 2.1; EXPRESSED IN ADULT LIVER, SIGNAL = 2.5; EXPRESSED IN BONE MARROW, SIGNAL = 2.8; EXPRESSED IN BRAIN, SIGNAL = 2.5; EXPRESSED IN PLACENTA, SIGNAL = 2.6; EXPRESSED IN HEART, SIGNAL = 2.1; EXPRESSED IN HELA, SIGNAL = 2.3; EXPRESSED IN HBL100, SIGNAL = 2.5
tcatgttcatgcccttaattttatactttattatctagaaaaatatcatatatgaactgatgttgtggatctaatgctgccctttttttctcagataatacattagagaatatttctgtgttgaagattattttattggataattttagtcagtcctataagtcagaaccacttctctttactctctcatttcaccttaagtaaaattaaaaattccacccatggccacttggtgaaaatgtgtgtgtgtgtttttcagggaccattgcaatttagagatgtggccatagaattctctctggaggagtggcattgcctggacactgcacagcggaatctatataggaatgtgatgttagagaactacagtaacctggtcttccttggtgagga

SEQ ID NO: 3971 - DNA, 425 bp, Homo sapiens
  MAP TO AC007016.5; EXPRESSED IN LUNG, SIGNAL =   2; EXPRESSED IN BT474, SIGNAL = 2.1; EXPRESSED IN ADULT LIVER, SIGNAL = 1.7; EXPRESSED IN FETAL LIVER, SIGNAL = 1.7; EXPRESSED IN BONE MARROW, SIGNAL = 2.1; EXPRESSED IN HELA, SIGNAL =   2; EXPRESSED IN BRAIN, SIGNAL = 2.1; EXPRESSED IN PLACENTA, SIGNAL = 1.7; EXPRESSED IN HEART, SIGNAL = 1.8; EXPRESSED IN HBL100, SIGNAL = 1.9
ctggaaagacgaacactggagtgatttgttgcaaatgcacattctcttgttcaaactgattcaatcatgccaaaccacacccctcccaacacagaaagttcatttacgtctgtgtgtttctcttccagagccaaagatgtttgtcttgctctatgttacaagttttgccatttgtgccagtggacaaccccggggtaatcagttgaaaggagagaactactcccccaggtatatctgcagcattcctggcttgcctggacctccagggccccctggagcaaatggttcccctgggccccatggtcgcatcggccttccaggaagagatggtagagacggcaggaaaggagagaaaggtgaaaagggaactgcaggtaatgaatgagaagttgcataaaacaccctccttcacccccaccttaaaa

SEQ ID NO: 3972 - DNA, 1969 bp, Homo sapiens
  MAP TO AC005822.1; EXPRESSED IN HELA, SIGNAL =  13; EXPRESSED IN ADULT LIVER, SIGNAL =  13; EXPRESSED IN BT474, SIGNAL =  11; EXPRESSED IN BRAIN, SIGNAL =  11; EXPRESSED IN LUNG, SIGNAL =  14; EXPRESSED IN BONE MARROW, SIGNAL = 9.8; EXPRESSED IN PLACENTA, SIGNAL =  12; EXPRESSED IN HEART, SIGNAL = 9.4; EXPRESSED IN HBL100, SIGNAL =  11; EXPRESSED IN FETAL LIVER, SIGNAL =  12
tcccataccttactacaaccctatgagacaggtattattaataaccccgctttacaaatgagggaactgaggcaaaaagaacttaaatagatgggcaaggcctcccagcttgtaagacggagtcaggatctaaagtcagccagctctgaggctgatgctcctaaccgctatctgctgccctccttgtgagaaatcctgtctttggcttaggtcagttcaaagtgtttctatcatttacaaccagaaaagccttcagtgagactgtctcattttttcccaactcttccacttttcaaagaacccctccagggctccctcctgcagagaacaggactaggcagcactggcccagaagtggagcagtaagaaggtggggaacggggggagggagaggaggagaaggaggaagaggaagagggagaggaggaggaggaaggggagggggaggaggaggagtagcagtagtaggaggaggaggaagaggagggagaggaggaggaagaggaggggtaggaggaggaagaggaggggtaggaggaggaagaggaggaaggaggaggaagaggaggaggaagaggaggaagaagaggagaaaggaggagaagaaggaagaggatcaggaagaggaggaggaggaagaggaggaggaagagaaggaagaggaggaggaggaagaggagaagaaggaagaggaggaggaagagaaggaagaggaggaggaagagaaggaagaggaggaggaagagaagaaggaaaaggaggaagaggaggaggaggaagaggagcagaagaaggaagaggaggaggaagaggaagaagaggagaaggagaaagaagaggaggaggaagaggaagaggaggaggaagctggacttgacactgagacacacataccctaactcctccagtggctggaaccctgagaagtaacctgggagccatagctagccacattccctaccatgcggcagggggaagagcagtctgtgcagagggaacacagagggaggcagggtagagcagcgaggagggaaggagggacctctgcaccgtgcttatctatagttctagcaccttggtctaacttggctgcccgtgggcaccacaagacacctcgatatctgtagaacacattttcttccttgctggagccagcccgcctgggcttctgttatgtgcagcagaatcctaacccgcccagaaggctcaatggctgtgtgctgaatcaatgctttgcagtcctcccccgatccctgaagatggcaggagtgggatgtggcacagtcaagtgactatgagtgcaggtcagggcagcagcctctccagaccttcccagtgaggctgcccaggtcctggggcagaacgtgtttgaggggcttctcattaatctgtcaggaaagatgacgtgctgacctgcaggctgacctgggaggggtaccagcacccgacactgctctggctctcagccatcaggcagtgataccatctgccatcttcactccccaggcacctctgtaactgctccaggaccccgacaagcacagccctccactgccctccattcaaggctatccctccctcatccataaattcattcatacattcatcaaatgttgactgtccccctcattacactggacaccattccagatgcagagactgtgtgccggcttttctgtttcctcttgccccacagtccactctgcccttctctgctcagaaggctgggctctagagactgcatcactgggctctcttccccctggcttccacttgggttcagctaatgggagcaatggcagcaagaccagagggcaggaggagagacggatgggggagtttattctgattcccccacttcggcatgtgcagccgccggcctccaagacagccttgctgctctcggctcctggcatctgtgcccctgtgtaatgtccttccacattgtagcagggctggtctaagtgag

SEQ ID NO: 3973 - DNA, 471 bp, Homo sapiens
  MAP TO AL035534.1; EXPRESSED IN BT474, SIGNAL =   1; EXPRESSED IN BONE MARROW, SIGNAL = 1.2; EXPRESSED IN HELA, SIGNAL = 0.92; EXPRESSED IN ADULT LIVER, SIGNAL = 0.93; EXPRESSED IN PLACENTA, SIGNAL = 1.3; EXPRESSED IN HEART, SIGNAL = 1.3; EXPRESSED IN BRAIN, SIGNAL =   1; EXPRESSED IN LUNG, SIGNAL =   1; EXPRESSED IN FETAL LIVER, SIGNAL =   1; EXPRESSED IN HBL100, SIGNAL = 1.2
tgccacttctatggtctgaatgtttgtgtcaccccaaaattcacgcgttaatacctcatcaccaatgtgatgacattaggaggtagagccttagggagatgattggaattagtgctcttatacaagaggccagtgcctcaattgtgaacatctcatcctctaaaactgtgagaagtaaatttctgtttattaaccacccaatctaaaatatttgttataacagcctgaatgaactaacagaataaaatctataatatacatatcattttaatagatgtggaaaaagtgtttgacaaaattcaacaacattttagtgatacaagctctaaacaaactaggcatagaaagactttacctcaacataataaaggccatagatgaagagcccacagttgacatcatacttactggtgaaaacttggaagtttttcttctatgatttggaacaaagcaaggatgccctcttttgtc

SEQ ID NO: 3974 - DNA, 462 bp, Homo sapiens
  MAP TO AL035409.15; EXPRESSED IN BT474, SIGNAL = 0.9; EXPRESSED IN BONE MARROW, SIGNAL = 0.96; EXPRESSED IN LUNG, SIGNAL = 1.1; EXPRESSED IN ADULT LIVER, SIGNAL = 0.68; EXPRESSED IN BRAIN, SIGNAL = 1.2; EXPRESSED IN PLACENTA, SIGNAL = 0.85; EXPRESSED IN FETAL LIVER, SIGNAL = 0.78; EXPRESSED IN HEART, SIGNAL = 0.9
tttggtgagggtttatgcaagtaaaatgaaatgcaataaagctgttatactgcacttttaaccaatgaaggccaggagctgtgtagcctcttcctcaaaaataaggccctgaaatatccatataattatctccatgcttcttttcactttgtcttgtaaagtcagcttgagcagcccagtcacgcagaggaccctacaagtgaactctagcaatgacatgagcagtggagcccacaacaaaagcctgtagcaaaagctttgctttgggtgagtcagccagtgatgacttatcctcaccctcccctgcatcttcttccctgtgcctttgtacctgtctttgccagtctcctgcttgaagagctcatcaaactgcagcatcttgtggcgagtaatcatgaaggccttcagccggggcagcacctggctcaggagatgcaggttgttgtagacctggcccttgcc

SEQ ID NO: 3975 - DNA, 467 bp, Homo sapiens
  MAP TO AC007377.3; EXPRESSED IN LUNG, SIGNAL = 0.68; EXPRESSED IN BRAIN, SIGNAL = 0.8; EXPRESSED IN HEART, SIGNAL = 0.86; EXPRESSED IN FETAL LIVER, SIGNAL = 0.57; EXPRESSED IN HELA, SIGNAL = 0.92; EXPRESSED IN PLACENTA, SIGNAL = 0.69
tgccccatacattacttttcctcaactgaacttttgcatgagcttagattgtgagatgttataatcacttgctctcacagtgatatgctgccttacatgccaagtgtctgtctggctcttccctccagcatcgtgatctcacccagggggctttagtaggtcattagggcttccttcctccttggctttcttatggcaggatccagggatttccaaattaaacagaacacagtgctcactctctgatacttccgtttcacagacgaatatgatgacaagcagccactgaccagcaaagaggaagaggagaggcgcattgcagaaatggggcgccccatcctgggagagcacaccaagttggaagtgatcattgaagaatcctatgaattcaaggtatgctcaccaacactgcccaccaggagccagtctcaccttgggacagaaactgttcatagggttggccaaag

SEQ ID NO: 3976 - DNA, 1974 bp, Homo sapiens
  MAP TO AL096814.11; EXPRESSED IN HEART, SIGNAL = 3.3; EXPRESSED IN ADULT LIVER, SIGNAL = 1.8; EXPRESSED IN BRAIN, SIGNAL = 2.7; EXPRESSED IN BONE MARROW, SIGNAL = 2.7; EXPRESSED IN PLACENTA, SIGNAL = 2.7; EXPRESSED IN HELA, SIGNAL = 3.3; EXPRESSED IN HBL100, SIGNAL = 2.6; EXPRESSED IN BT474, SIGNAL = 2.7; EXPRESSED IN FETAL LIVER, SIGNAL =   3; EXPRESSED IN LUNG, SIGNAL = 3.3
tccaagggaactgagacaccaacactgtgtggtcccctggcatgtgactcaaggtcttgaccattacgtgaatcatttagggcatgatgtggtactctggccatctccttagtagattataagctccatggccaaaggacttaatagagattgattttgtattccaagtgcttggcacagacagtgcgtgacacatgtaggttaatgtttgtggaattagtaaagaacaaaagggttgagggggcttggagagaggattgagcactgcagactcagccctgaccctgtagcacactgggtattgagagaaacttccaatgggagaatacctggggccacatggcactgggagacagctgctgatgctgaggccccatgttgttgaggtggatcccactgggggataggagggggcgatgggggagggtgctgctgacccgggtcagatctgagctcgctgggtctcccattcctgtgtcaggaggccccaggtccccatgggagctcagcatggcctgggcctgtctgtcactagagtaggtcttcagctgactgtcctcacgctgctggtgctgggacaggtggctctgctggtagagggggtggctgtagggctgctggggctcctggtagtagtactgggacatggagcccaggggaatcagctggacagtgtgtgcctgctctggggtatactggtgagggtccctgtgataagaaggaggctgcaggtgcatctgttgctgctgctgctcttgcaagtgctgcatcatgggttggggctgataatactgaggtatctgcattgaaccctgccgctgctgcagctgtagctgctgcggctgctgctgctgtggcggcggctgtggctgtgatgggcgaatttgttgcggctgcgtctgtatttcttgcatggagatacgctgttgcccggcttgctgctgttgctgcggtgggtaatactggtgctgctgcatctgttgcatgtgctgtgacagcatctgtggggcctgcagtggctgtcctccctgcactggcacctgagccagaggctgctggtagtcataatacaggtgcccttgggtagggtgctgcccgacctgaagagctggtttggacagcccaccagtgaaaccagggtgaggctgctggggcacctgctggtagcgggaagggatagccggtgctgggggctccatgggcttctgagacagcagctggcggagagcactgtcaggggctccatccatcactgctgactgagtgtgcagcacctgggccatattgttgacctgaattcgcaggttttggttggcaaacacctgggtgaaagagtccagcttgtgtaagacaccgctggtaagcttctgggtccggatctcgctggcctgggagtaggtgtattggtagccatcagtgggctcagcctgggctggtgccccccacatcatgtttgagttggccaggtttccacgtagctggacatggtttccaggccctgcatgacttccccaccctccctgcctcgaggtatccatttggccaaggtttttggagccaacaggcaagcccagaccatcccgtgtatcttgagggaagtggggggagattggcgaggcctgaggggcatccattccgccccctgtaactgcattcccatagttgtggttcagcccgctgtggacgccaagtggtggctgttggtagaaaaggttctcactaccatgggccacatggttggtcttgtacagttgctggtcacccatgctgtctgccttggttgtgaacgtccagccacaaaaccataaaaaaggtaaataaaacaaacccaaaaggactgaaaccctgagaagctgagagaaaagtgtcagcactactccacggctgacatgtctgtgaacgtggctggagccaggtgttcctgttggcctgtaccactcatgtgcagggcggggggtttcacatcctctccct

SEQ ID NO: 3977 - DNA, 464 bp, Homo sapiens
  MAP TO AC007462.2; EXPRESSED IN HELA, SIGNAL = 0.9; EXPRESSED IN ADULT LIVER, SIGNAL = 1.5; EXPRESSED IN HEART, SIGNAL = 0.83; EXPRESSED IN BT474, SIGNAL = 0.84; EXPRESSED IN HBL100, SIGNAL = 1.1; EXPRESSED IN FETAL LIVER, SIGNAL = 1.4; EXPRESSED IN BONE MARROW, SIGNAL = 1.8; EXPRESSED IN LUNG, SIGNAL = 1.4
aagcatgaaaataaaacacatgattcacattatatcatggcatatctgctagtgcctaatttatatcacagcagtgagggtttgaagatggaattaactgatctataagatgaagttctgtgtcttaatgttctaataggtcctgatttacagcacatcatcaaaatgataaaagaatttcatacaaaacattgcattctgctatattaagagaatattcctgacaaattgacctggttgtaaaatagaatacgtgctatatgttgtcagtgctacaacacttaagctaaacctccaggatgatggaatagaagatgcaacggttgaaggtttagattttgtagcagaggctgaatttgaatgtggatttaaagaaagagtagagcttgttcattttgacctttgtctatttgagactgtattcatgtcaacagatatgtgcatcgcaatgtagaagatggggt

SEQ ID NO: 3978 - DNA, 479 bp, Homo sapiens
  MAP TO AC009298.1; EXPRESSED IN BT474, SIGNAL = 0.8; EXPRESSED IN BONE MARROW, SIGNAL = 1.2; EXPRESSED IN FETAL LIVER, SIGNAL = 1.5; EXPRESSED IN HELA, SIGNAL = 0.64; EXPRESSED IN ADULT LIVER, SIGNAL =   1; EXPRESSED IN PLACENTA, SIGNAL = 1.1; EXPRESSED IN HEART, SIGNAL = 0.86; EXPRESSED IN BRAIN, SIGNAL = 0.76; EXPRESSED IN LUNG, SIGNAL = 0.87; EXPRESSED IN HBL100, SIGNAL =   1
aacctgatctgtgtggggtcatttctatatactcccatagcaccttgtgctgacattgctcataggatttatcacaattcagtacaactcaacaagtattgaatgaatgccaatgagacatggttctaggcacttaggaatcattactgaacaaatcaaagatgcctacccttctaaggaaagatagataataaactacaatacataaataaatgttgtagtatgttatactgataagtgctatgggaaaaagaaaccgtggagtggattacagggaatgggatggaagggagcacagaagagattcaggttgcagtctaaaatagggtggccatggtaggcttcagtgagaacatgagatttcatcaaaatcttgatggacgtgaggaagttaactctgtagatcctggaggaggaggattccaggcaaagggaagagctaaagcaaagatccctccagcaggagcatgatgatgaga

SEQ ID NO: 3979 - DNA, 386 bp, Homo sapiens
  MAP TO AC004916.2; EXPRESSED IN BONE MARROW, SIGNAL = 0.81; EXPRESSED IN FETAL LIVER, SIGNAL = 0.62; EXPRESSED IN BRAIN, SIGNAL = 0.97; EXPRESSED IN ADULT LIVER, SIGNAL =   1; EXPRESSED IN PLACENTA, SIGNAL = 0.79; EXPRESSED IN BT474, SIGNAL = 0.75; EXPRESSED IN HEART, SIGNAL = 0.78; EXPRESSED IN HELA, SIGNAL = 0.98; EXPRESSED IN LUNG, SIGNAL = 0.86; EXPRESSED IN HBL100, SIGNAL = 0.93
gagtcaccttagaatgcccgctttcctctccagggagcaggaggaggagggatacccgaataaccccacaggctcagtcctgcttcagccccagaccgtcctcctggaggtaagcgggaaggaccccagcgtccgcgtgaggcactgttcccaccgtgtgcacagatgagaatgtcaggcagcgctaggcgggagactctgtcccactccagactcatctgccctcccccagaccacccccatacctttgtccagcacgggcccgaagatggccaggctgtcgtggacggtggtgcagttccaccggcggccgcggaactggtgctggcactcctggatgccaatcttgatgccctcggccacgctgggcatgatctccacgtagt

SEQ ID NO: 3980 - DNA, 479 bp, Homo sapiens
  MAP TO AL079295.1; EXPRESSED IN PLACENTA, SIGNAL = 0.74; EXPRESSED IN BT474, SIGNAL = 0.66; EXPRESSED IN FETAL LIVER, SIGNAL = 0.95; EXPRESSED IN ADULT LIVER, SIGNAL = 0.69; EXPRESSED IN HBL100, SIGNAL = 0.76; EXPRESSED IN LUNG, SIGNAL = 0.61; EXPRESSED IN HEART, SIGNAL = 1.1
ccttgtaccatgctgaatgctagtacaggtagtgtccctcatctgtgggaaatatattccaagacccccaagtagatgcctgaaactttgggtagtactgaattctatatatactacgattaagtttaatttgtaagttaggcacagtaagagattaatgataactaataataaaactgaataattatatactataataaaagttacacgaatgtggtttctttatctctctcaaaatataatacttttgaagtgtgattgaccttgggtaactagagatacagaaagtgaagccatggataagggggactactatactgataaactggaaaccactgaacaaatacaagacgaggctaattgtggtatagcaagttttagggatggacaaaccacagttcaaattctaactctgacaattgcaaactgtgtgactttgcaagttactgaaatatctgctttctcatctgtaaaatgaa

SEQ ID NO: 3981 - DNA, 1983 bp, Homo sapiens
  MAP TO AE000658.1; EXPRESSED IN FETAL LIVER, SIGNAL = 8.5; EXPRESSED IN BT474, SIGNAL = 7.1; EXPRESSED IN ADULT LIVER, SIGNAL = 8.3; EXPRESSED IN BRAIN, SIGNAL = 6.3; EXPRESSED IN BONE MARROW, SIGNAL = 7.8; EXPRESSED IN LUNG, SIGNAL =  11; EXPRESSED IN PLACENTA, SIGNAL = 8.3; EXPRESSED IN HELA, SIGNAL =  11; EXPRESSED IN HEART, SIGNAL = 5.6; EXPRESSED IN HBL100, SIGNAL =  15
gatgatggagtggaagacgagtgatcaacgatgagtacaaaatacggaaaaaaaacaccccttttctttaccatttggtgatgacccatgctctggagtggccagcctaactgtccagtggcttccagatgaaatcagaccagaagggaaagatttcagcattcatcgacttgtcctggggacacacacattggatgaacaaaaccatcttgttatagccagtgtgcaacccctaatgataatgcttagtttgacgcgtcacactacgacagtgagaaaggagaatttggaggttttggttcagttagtggaaacattgaaatagaaatcaagatcaaccatgaaggagaagtaaatagggcccgttacatgccgcagaactcttgtatcatcaaaacaaagactccttccagtgatgttcttgtctttgactatacaaaatatccttctaaaccagatccttctggagagtgcaacccagacttgcgtctctgtggacatcagaaggaaggctatgggctttcatggaacccaaatctcagtgggcatttacttagtgcttcagatgaccacactgtctgcctgtgggacatcagtgccattccaaaggagggaaaagtggatgcaaggaccatctttacggggcatacagcagtagtagaagatgttttctggaatctgcttcatgagtctctgtttaggttagttgctgatgatcagaaacttatgatttgggatactcgttcaaaaaatacttccaaaccaagccactcagttgatgcttacactgctgaagtgaactgcctctctttcaatccttatggtgagttcattcttgctacaggatcagctgacaagactgttgccttgtgggatctgagaaatctgaaacttaaggtacattcctttgagtcacataaggatgaaatattccaggttcagtggtcacctcacaatgagactattttggcttccagtggtactgatcatggactgaatgtctgggatttaagtaaaatcacagaggaacaatccccagaagatgcagaagacaggccaccagagttgtttattcatggtggtcacactgccaagatacctgatttctccttgaatcccagtgaaccttggatgatttgttctgtatcagaaaacaacatcatggaagtgtggcaaatggcagagaacatttctaacggtgaagaccctgaagggagtgtggatccagaaggacaagagtcccagacgtatctttacttcttgtgattttagactccccttttttcttctcaatgctgagagtgatttaacactggttttgagacacaaactttgttcagctatccctctatataataggtaccaccaataataccattagccctaacagtgggtgttttctaaatattaatggtggggcttgattcagcaaagccacagacttattacactgaagttttcttcaggaattttctagtaacaaaaccaggtctaaagtagctacagaaacgggaatattatgtgtgattatttttcttcttatgctatatccgcaagtttttcagactcatttaagtaaaggctagagtgagtaaggaacagagccaaatgaggtaggtgtctgagccatgaagtataaatactgaaagatgtcacttttattcaggaaataggggagattcaagtcatatagattcctactcgaaaatcttgatacctgactttccagcatgcacatgaagaccagtagaccaggaaacaggtagacgagtttcctcttggttccttcagttaagtcagaactacacgttcctctttccccatatatttttgcttgttcgtgtatttcttaagctgttttcatgctgtttctttcctttctgtggaatggttttttttttttttttttaacttaggactaccaagttgtaaagatgtatgtttttacctgacagtaataccacaggtagactgtcaagttga

SEQ ID NO: 3982 - DNA, 483 bp, Homo sapiens
  MAP TO AL049548.6; EXPRESSED IN BT474, SIGNAL =   1; EXPRESSED IN BONE MARROW, SIGNAL = 1.1; EXPRESSED IN FETAL LIVER, SIGNAL = 0.73; EXPRESSED IN HELA, SIGNAL = 0.66; EXPRESSED IN ADULT LIVER, SIGNAL = 0.89; EXPRESSED IN PLACENTA, SIGNAL =   1; EXPRESSED IN HEART, SIGNAL = 1.1; EXPRESSED IN BRAIN, SIGNAL = 0.88; EXPRESSED IN LUNG, SIGNAL = 0.93
tcagtggaattgggaccttcatcacctaaaatatttgtgttttatttattcaagaaacattcaaactattttctagctattttgaaatataggatagattattgtaacctatagtccccctactaatctattgaacactaagtctcatttcttctatcaaactgtatatttgtacccattcttagtgctattcctgtttattatgactgagggaaaatattttgcgatgatcggtgtcaaagaaaaatgcaggcctcgttggctcctgtgctttcactgcattcttctcgcactcttcttaggatctctgccaggccctggagtcactgagcagcgcgatcactgccttctcagccagtgccaggaaggttgtgaacagagattcctgtgttcaggaggctgcggctctacagcagcaatacgaggacatcctaaggagggcgaaggagagacagacggcgctggagaatctgctggcccact

SEQ ID NO: 3983 - DNA, 469 bp, Homo sapiens; identical to SEQ ID NO: 3319
  MAP TO AP000199.1; EXPRESSED IN BONE MARROW, SIGNAL = 0.95; EXPRESSED IN FETAL LIVER, SIGNAL = 0.8; EXPRESSED IN BRAIN, SIGNAL = 1.3; EXPRESSED IN ADULT LIVER, SIGNAL = 1.1; EXPRESSED IN PLACENTA, SIGNAL = 0.98; EXPRESSED IN BT474, SIGNAL = 0.73; EXPRESSED IN HEART, SIGNAL = 1.2; EXPRESSED IN HELA, SIGNAL = 0.99; EXPRESSED IN LUNG, SIGNAL = 1.3; EXPRESSED IN HBL100, SIGNAL = 0.81

SEQ ID NO: 3984 - DNA, 369 bp, Homo sapiens
  MAP TO AE000661.1; EXPRESSED IN PLACENTA, SIGNAL = 3.9; EXPRESSED IN HBL100, SIGNAL = 4.4; EXPRESSED IN HELA, SIGNAL = 4.8; EXPRESSED IN HEART, SIGNAL = 3.8; EXPRESSED IN BT474, SIGNAL = 4.8; EXPRESSED IN FETAL LIVER, SIGNAL = 4.6; EXPRESSED IN ADULT LIVER, SIGNAL = 5.4; EXPRESSED IN BRAIN, SIGNAL = 3.9; EXPRESSED IN BONE MARROW, SIGNAL = 4.8; EXPRESSED IN LUNG, SIGNAL = 5.2
attatttttctgccccaccgtctaggctagaatgtctacttcctgcttctgtgcctatagtcatcttagtctttgtctaagaacttggtcaaaccagaacctttaggtattgtgactccatcagttaatccctatggatattttgcttcttagtaacattctgggataacatttgtagactgctttggttattaacaaaaccaacaacatggagctttaatgcactctctaacttgagttctttgtcttgtctcttttacagctgcgttttctctgtgacaccaggaatcagcatttccattcaaatacagcaaactttaaaccgctttttgacaggaggaaacactttctgcctaatgaaggggatga

SEQ ID NO: 3985 - DNA, 470 bp, Homo sapiens
  MAP TO AC008012.8; EXPRESSED IN HEART, SIGNAL = 1.4
gcgtagatgatttgatgggctagagaattattcctgaaagttccttgcttgcattattaaccaaattatcaagcctttcttaaaccggttatacttttctggccataccattttccaggtcacaagaagcatattcatgggtacaaccccacatggaaaaggattaatgtagctagacggcccaagttgaaatcaaggccctccgaactttttaaaaagttcatccttgcccatcatcagttataaaataagtacattcctacaagtatcccttcagaggtccattacaaaccggaaagaatgattgcaatgcaggtgccgttcgttattcagctgtccattagctctaaaatttggaagcttttgctgtatgagaccacagagatcacctgggtggtggttgtcaacctggctgcatttaagaatcacctgtggggcttttaaaaaatactgatgcctggtttccactt

SEQ ID NO: 3986 - DNA, 442 bp, Homo sapiens
  MAP TO AP000128.1; EXPRESSED IN PLACENTA, SIGNAL = 0.62; EXPRESSED IN BT474, SIGNAL = 0.65; EXPRESSED IN BONE MARROW, SIGNAL = 0.68; EXPRESSED IN FETAL LIVER, SIGNAL = 0.57; EXPRESSED IN ADULT LIVER, SIGNAL = 0.73; EXPRESSED IN LUNG, SIGNAL = 0.6; EXPRESSED IN HEART, SIGNAL = 0.78
tgcctgttaacaaccactgctgccaactgaaagggctcccaatgaccaaagctggaagaagttaagcaataaaataaataacattatatgagattataatgcaaaatataaaataagcattcataaactcatactcattatattactttcctaaggctgccataacaaattaacacacagtctgtgacttagacaatagaaatttgttttctcacaattctcaaggataaaaatctgaaattaagctgttggctgggctacactccctctgagactctaggaggagaatccattctttgtctcctccagcttctggtggctccagatgtccctggtcttgtgtctgcataactccaacctctgcctccatctccacacggccttctcctgggtgaacctcctcttctgtgtcttataaggatgcttggcattggatttagga

SEQ ID NO: 3987 - DNA, 392 bp, Homo sapiens
  MAP TO AF001548.1; EXPRESSED IN LUNG, SIGNAL = 1.4; EXPRESSED IN HEART, SIGNAL = 1.3
ttcagctcagcagatgttggttccgcctgacaacttgacctgtggggttctgagtgttcgcaagaatctccccgccccacctcccatcctctgtaccatctgcctcctgcttgcccacagcatggggttaacggctgaagttgggcagcaaagcctgaactgtgttttcctgttggcagggcaaattcatccgcatcaacttcgacgtcacgggttacatcgtgggagccaacattgagacctgtatcctttccctgagcctgggccaaatgggtacccctgccccctaccaatctcctgcccagaggctgggagagtccaagagccacctctatctttccagcctcttaggtttcttccagaacaaatctccccttaacagcaggcattgt

SEQ ID NO: 3988 - DNA, 422 bp, Homo sapiens
  MAP TO AC007014.1; EXPRESSED IN FETAL LIVER, SIGNAL = 1.5; EXPRESSED IN ADULT LIVER, SIGNAL = 1.8; EXPRESSED IN BRAIN, SIGNAL = 1.1; EXPRESSED IN BONE MARROW, SIGNAL = 1.3; EXPRESSED IN LUNG, SIGNAL = 1.6; EXPRESSED IN HBL100, SIGNAL = 1.4; EXPRESSED IN HEART, SIGNAL = 1.5; EXPRESSED IN BT474, SIGNAL = 1.3; EXPRESSED IN PLACENTA, SIGNAL = 1.5; EXPRESSED IN HELA, SIGNAL = 1.5
tggagctcaggacatgtgagcaggatctgagagatgacagcagagatatacagaggacaagatggaaaagcttcaagagaagtcacaacactggccatcaggtgttttccctcagcagtgtaccaaatggaacgccaaagctccttcctgcagaccacaaacatgctacttagtccaaagcttgatgatcatttaaaactagagattacacgtaacaatgcgtttttcccgcttctctagaaacatgaaaaaacctagtaatcctacatccatattcctgcagaacagcagcagcctggggtagaacaggagctgctcgccaaggtggcatacactctccaatttgccacacccctcgccactctctactgccctcacctggggcctgagtcattcatggatgttcatcgcccaacttctgt

SEQ ID NO: 3989 - DNA, 417 bp, Homo sapiens
  MAP TO AC007221.1; EXPRESSED IN BT474, SIGNAL = 1.7; EXPRESSED IN FETAL LIVER, SIGNAL = 1.8; EXPRESSED IN ADULT LIVER, SIGNAL = 1.9; EXPRESSED IN BRAIN, SIGNAL = 1.3; EXPRESSED IN BONE MARROW, SIGNAL = 1.4; EXPRESSED IN LUNG, SIGNAL = 1.7; EXPRESSED IN HBL100, SIGNAL = 1.5; EXPRESSED IN PLACENTA, SIGNAL = 1.6; EXPRESSED IN HELA, SIGNAL = 1.9; EXPRESSED IN HEART, SIGNAL = 1.6
ctgcctcctcttctccttccttcctctccttctccttctccttgaaaatttacgtcttgggttaggatgaaggtagtaaacttaacaggggattaaagggtagtatttacaaaagttattgttaaagcccttgacttcagcatgtgttctctttgcttattgatcagcacacctatgctagcattgactggcatgcccatattagcattgtttagcatgctcatactagcgttcatcagcaggtttatactagcattgatcagcacacccatactagtattggtaagcacgtccgtactagcattgatcggcaggcttatactagcattgataagaacccccatactagcattgatcagcatgcccatgctagcattgatcagcatacttatattagctttgatcagcatgcccata

SEQ ID NO: 3990 - DNA, 471 bp, Homo sapiens
  MAP TO AL035530.11; EXPRESSED IN HEART, SIGNAL = 0.86; EXPRESSED IN ADULT LIVER, SIGNAL =   1
aacgctttgtcacaccaaggccacctaatggttccttcacaagcgcctcacactttcagatccaggtatgtttgtggtgtgtcttcctttgcagatgctgtctggaaagtgaagagaaggctaatcaaggaccgatctggatagaaagggacacacacggaccaagcgtctaattgggggttgcccaggtctcactggtgcctggcttcccttggagcatttccattgcagttcacagtcaatccaagaatcagcgaaattctcattttcttttttccaggtcttccaagagctacagagtcgaacagaagctgcatctatctggcgtgcaggctgtcacctgtgacagagaggaaaggcaggatggggacaaagaccaggatctcactatcagtttaggaaattctctggtcttcatgctggcttctgacccttgtgtcgccgagtttccgtgagtgccagcagtttcaa

SEQ ID NO: 3991 - DNA, 401 bp, Homo sapiens
  MAP TO AC007228.1; EXPRESSED IN HEART, SIGNAL = 1.1; EXPRESSED IN BT474, SIGNAL = 1.4; EXPRESSED IN ADULT LIVER, SIGNAL = 1.6; EXPRESSED IN LUNG, SIGNAL = 1.4; EXPRESSED IN BRAIN, SIGNAL = 1.2; EXPRESSED IN BONE MARROW, SIGNAL =   1; EXPRESSED IN PLACENTA, SIGNAL = 1.1; EXPRESSED IN HELA, SIGNAL = 1.2; EXPRESSED IN HBL100, SIGNAL = 1.1; EXPRESSED IN FETAL LIVER, SIGNAL = 1.3
gacctaaatgcccagctgtctaagactgactgaacgtatcaaggcctatcgatatgttggaaaccaggcagctcttcaaagctgaggactgtttgtaggcactgccatgaaaagatgtcccacaacatactgttaggttaaaacactcacttttgtaatcagagcgtggtcctatttctttaacagcttttctggaggtattattgacctgtaattaaccacgcatatataaagtgaagagtttgatgcattttgacatagtgcatacccaggaaaccatcaccatgatcaagataaaggacatatctatcatccccaagagattcctcatcctcctttattacccctctctccccttcctcaacccccatccccagggatcccctggtctgctttatgtc

SEQ ID NO: 3992 - DNA, 430 bp, Homo sapiens
  MAP TO AC007034.2; EXPRESSED IN BONE MARROW, SIGNAL = 1.4; EXPRESSED IN HEART, SIGNAL = 1.9; EXPRESSED IN BT474, SIGNAL = 1.4; EXPRESSED IN BRAIN, SIGNAL = 1.3; EXPRESSED IN LUNG, SIGNAL =   2; EXPRESSED IN PLACENTA, SIGNAL = 1.5; EXPRESSED IN HELA, SIGNAL = 1.6; EXPRESSED IN HBL100, SIGNAL = 1.5; EXPRESSED IN ADULT LIVER, SIGNAL =   2; EXPRESSED IN FETAL LIVER, SIGNAL = 1.9
agtgtgggattcaatggaggattttgaccagagatttttgaggattgcgatcaataagcttggtggtaagcttgagaattcagagtattctggggacaccatgggacaagtcactactaagtaactggactcggctacagtcacaggctcccttgaggcctggttcctctcctcctaatcaggctctgttagagtcacaggctcccttgaagcctggttcttttcctcctaaatggatgcggttagagtcacagcctcccttgaagcctggtttcttcctcctaattggactcggctagagtcacaggctcccttaaagcctggttcctttcctcctactcagacccaattagagtcacagtctcccttgaagcctggtccacagttgcgatggcagcctgaatttcaggcccatgaaagacctgctcag

SEQ ID NO: 3993 - DNA, 465 bp, Homo sapiens
  MAP TO AP000114.1; EXPRESSED IN FETAL LIVER, SIGNAL = 0.98; EXPRESSED IN ADULT LIVER, SIGNAL = 0.7; EXPRESSED IN BONE MARROW, SIGNAL = 1.3; EXPRESSED IN HBL100, SIGNAL = 1.9; EXPRESSED IN HEART, SIGNAL = 0.81; EXPRESSED IN PLACENTA, SIGNAL = 0.64; EXPRESSED IN BT474, SIGNAL = 0.87; EXPRESSED IN LUNG, SIGNAL = 0.64; EXPRESSED IN HELA, SIGNAL =   1
gctttgacatgtcctgaacgtaggacaggtaacagtgaatggctgtagattctggtaggcgtgagaagtaagtcccctgcatgttgaagagagaagacaaaaacttagcctatgaatagaaaaccaaaacataaaaatcaacctggagaatgacaccagctctacaataatgaccaagtagcaaaccaaggtaattcattcccttttagctctaagtaatcagagactaaaaccactaaatgcttgctcaggcatttccaagcaggacagtttaaacatgagggagtttacctaaagtctggtcaccacaaccatcaggtgctggagaggagtactggagggaagattttgccacgattttcctcacaaggctaaatccattgctatgaagaccagatgaagctattccaacaacaacatcaccctcagtgattctttccaggtgagggagtttctgatctcgct

SEQ ID NO: 3994 - DNA, 416 bp, Homo sapiens
  MAP TO AC007552.4; EXPRESSED IN LUNG, SIGNAL = 0.88; EXPRESSED IN HELA, SIGNAL = 0.66; EXPRESSED IN BT474, SIGNAL = 0.65; EXPRESSED IN ADULT LIVER, SIGNAL = 0.71; EXPRESSED IN PLACENTA, SIGNAL = 0.79; EXPRESSED IN HEART, SIGNAL = 0.82; EXPRESSED IN BRAIN, SIGNAL = 0.77; EXPRESSED IN FETAL LIVER, SIGNAL = 0.67; EXPRESSED IN BONE MARROW, SIGNAL = 0.7
ccaaattccaataatctccagtgttgagatattttttccatacagcctaaagtgcacatatttagacatttctccacccatctcctttgcacacgaaaagttggtaaacgacctcattatactagtagcctttcatattcttcattattaatcactcttaaacctcttcttcaatcttctcctcatgtttaatttctcccttatcttatcttcataactcagtgccattctcccttcataacaacagaagctgacattggaggagtatcagccaatgtgtaccgctctttccctactgtggtccactgtcacccctaactattttatgaataggattcctatttctagagaagaaaacgcagacttggagaggttgagtaagttgcctaggaatgtgaagctggggtgtagcagaa

SEQ ID NO: 3995 - DNA, 460 bp, Homo sapiens
  MAP TO AL049835.3; EXPRESSED IN HEART, SIGNAL = 0.8; EXPRESSED IN PLACENTA, SIGNAL = 1.1
aggcaagaacaagaatgatgcctcaccaactgggaatctcaataaaaagacaaatatcataaaaagaaaccaaatacaaattctaacaccgaaaattacaacggaaatgaaaaattcactagtgggactcaacagcagatgtgagctgaaaataaggtgattaacattatctagtctgaggatcagaaagaaaaaaaataaaggaaaataacaacatggcttaaataaaggaaaataacaacatggcttaagcaacctgtggaataccatcaaacacactgagatatgattaatggtggtcccagaaggagaggagagaaagaagcaaagagattatttgaggaaacaatgcctaaaaacttcccaaatttgatgaaagacatgaatgcacacaagaagttcaacaatcccaagcaggataaactaaaaaagactgacacgaagatacattataatcaaa

SEQ ID NO: 3996 - DNA, 400 bp, Homo sapiens
  MAP TO AC007248.1; EXPRESSED IN HELA, SIGNAL = 1.4; EXPRESSED IN ADULT LIVER, SIGNAL = 1.3; EXPRESSED IN LUNG, SIGNAL = 1.1; EXPRESSED IN BRAIN, SIGNAL = 0.99; EXPRESSED IN BONE MARROW, SIGNAL =   1; EXPRESSED IN PLACENTA, SIGNAL =   1; EXPRESSED IN HEART, SIGNAL = 1.2; EXPRESSED IN HBL100, SIGNAL = 1.1; EXPRESSED IN BT474, SIGNAL = 1.1; EXPRESSED IN FETAL LIVER, SIGNAL = 1.4
tctgtccacactcactccccacatgatgtcatccagttaactggtttgaaacaccatctctatactgattacactcttgcagttacacctgccgtccacacttttcccctgaacttcaggttctcatgtccacctgctgactcaatgccttcacttgtctatattccagacatcacaaaaataacctgtcaagaatgaatccctgttcttctcccaaaatctgctcttccaaccatcattctcatcttggttgatggcaacttcatcttttttcagctgcacatatcaaaatccttggaggtatccttatacctctctttctccagcacatcaatctcaagccaccaataagtcccagtgaacctactttccaaatacagccagaactcagccatgtgac

SEQ ID NO: 3997 - DNA, 406 bp, Homo sapiens
  MAP TO AC012275.1; EXPRESSED IN BT474, SIGNAL = 1.3; EXPRESSED IN FETAL LIVER, SIGNAL = 1.3; EXPRESSED IN BONE MARROW, SIGNAL = 0.99; EXPRESSED IN BRAIN, SIGNAL = 1.4; EXPRESSED IN LUNG, SIGNAL = 2.2; EXPRESSED IN PLACENTA, SIGNAL =   1; EXPRESSED IN HBL100, SIGNAL = 1.8; EXPRESSED IN HELA, SIGNAL = 0.95; EXPRESSED IN HEART, SIGNAL = 1.2; EXPRESSED IN ADULT LIVER, SIGNAL = 1.2
ctggttgtcctgctttcctcaggttttcttctgccatctatgacagcttcttgatctgtccccaggtgggtggctgtgtttgacaggtgttgctcatgacagttggggtcctcctcagcatcagtctcgacatgactgcaactggtgggtcctcaggatcctcccggaatctcttctttggcatctggctcatgataaggtttcaggtgtcttgatggtatccaaattggctgcttgttttggcctggagaaacgcaagcataacctctacccaaaattattttacctatttcccaactttttgttattggatctctccaccaaaccagttgttctgcttctgtctttgcagctggtttctgtagatgctgttcagctgctgataacatctggtctttaggcaggc

SEQ ID NO: 3998 - DNA, 458 bp, Homo sapiens
  MAP TO AE000659.1; EXPRESSED IN BT474, SIGNAL =   9; EXPRESSED IN FETAL LIVER, SIGNAL = 9.7; EXPRESSED IN BRAIN, SIGNAL = 4.8; EXPRESSED IN LUNG, SIGNAL =  20; EXPRESSED IN HBL100, SIGNAL =  18; EXPRESSED IN HEART, SIGNAL = 7.7; EXPRESSED IN ADULT LIVER, SIGNAL = 1.1; EXPRESSED IN BONE MARROW, SIGNAL = 5.1; EXPRESSED IN PLACENTA, SIGNAL = 5.1; EXPRESSED IN HELA, SIGNAL = 7.4
gcttgaattcccagagttcgaagtggtgggactcaccattctggccagggagcttttggaaacatgtgtcgtggaggctgaatgtttgcaccaaccaaaacctggctccattggcatagtagagtgaatacaaccccaaaacgatatgtcatctcttctgccctggctgcctcagccttaccagcactggttatgtctaagggtcatcgtattgaggaagctcctgaacttcctttggtagtcgaagataaagttgaaggctacaagaagaccaaggaggctgttttgcttcttaagaaacttaaagcctggaatgatatcgagaaggtctatgtctctcagcaaatgagatccagcaagagcaaaacgagaaaccatcaccgtatccggcgcaggggcgccgcatcatctgtaatgaggataatggtatcgtcaaggccttcagaaacatccctgga

SEQ ID NO: 3999 - DNA, 470 bp, Homo sapiens
  MAP TO AL035563.18; EXPRESSED IN LUNG, SIGNAL = 0.73; EXPRESSED IN PLACENTA, SIGNAL = 0.65; EXPRESSED IN FETAL LIVER, SIGNAL = 0.6; EXPRESSED IN HELA, SIGNAL = 1.4; EXPRESSED IN BRAIN, SIGNAL = 0.78; EXPRESSED IN HEART, SIGNAL = 0.85
tttcagacaaagtagacatcagaccaggaaaagttatcagagataaagagcagcattacataatgataaagtggccaatcctccaagtggacataaaattctttaacatacatgcacctaacaacagagcatcaaagcatgtgaggcaaaactggacagaattgtaaagagaaataaattcattcactattatagttggaaattaaacactccttgtgttagcctatttgcactgctataaagaaatatgtgagactgggtaattgataaagaaaagaggtttattttgatgtatgtttctgcaggctatacaggaagtatggtgctggcatctgcttctggtgagagcctcagggagcacatcatggcagaagacgaagaaggagctggaatatcacatggcaagagaggaagaaatggtagggggaagtgtcactctctttcaaacaaccagatttcatgtgaactca

SEQ ID NO: 4000 - DNA, 422 bp, Homo sapiens
  MAP TO AC007066.4; EXPRESSED IN ADULT LIVER, SIGNAL = 7.7; EXPRESSED IN FETAL LIVER, SIGNAL = 7.5; EXPRESSED IN BRAIN, SIGNAL = 4.7; EXPRESSED IN BONE MARROW, SIGNAL =   5; EXPRESSED IN HBL100, SIGNAL = 4.8; EXPRESSED IN BT474, SIGNAL = 4.9; EXPRESSED IN LUNG, SIGNAL = 6.4; EXPRESSED IN PLACENTA, SIGNAL =   6; EXPRESSED IN HEART, SIGNAL = 4.9; EXPRESSED IN HELA, SIGNAL = 5.4
acacacacacacacacacgggaaccccgtaactgagccacttcagatatgacatccattaagagggcctttgcttctaactgtgtaagggtcgttggctgtagtctgacttgcacaagaagtacacatagcccctgagaggcgctttagtcctctttggaatacactgttggagagactataaattacacagttgcagaaactgttactaatagcaagccaggtggtcaagaaggatgcgaagcggttgctgtggccagtggagctttccaacaagaagtagatgatatatggcaaccagaggatgtaaaatacactagtgattcgaaacaggaccatggcatagcgcttatcaggacaggcctgcacttccccagtctccccactctggctgctgaagcgggcttgcctttcgctgatatc

SEQ ID NO: 4001 - DNA, 1954 bp, Homo sapiens
  MAP TO AC006115.1; EXPRESSED IN LUNG, SIGNAL =   2; EXPRESSED IN HELA, SIGNAL = 1.6; EXPRESSED IN PLACENTA, SIGNAL =  12; EXPRESSED IN HBL100, SIGNAL = 1.4; EXPRESSED IN HEART, SIGNAL = 1.9; EXPRESSED IN ADULT LIVER, SIGNAL = 1.4; EXPRESSED IN BT474, SIGNAL = 1.3; EXPRESSED IN BONE MARROW, SIGNAL = 1.3; EXPRESSED IN BRAIN, SIGNAL =   6; EXPRESSED IN FETAL LIVER, SIGNAL = 4.9
atgtgtgctatggctttcccacatgcagacactgacatctgaaggggaaagcttaagactgtggaatctgcacattcggtctcttttcaatctgagtttagagatgttaagtcaggtgtgtaacacactaaggttaagtctcctactgacattatcatggattggtttggattctctgtggtttggtaagggtcaagtcctaggtgaaggttttctaacctttaccccatgccctcagccagtgtgggtattctggtgtctggcgagggacaggcggtcattgaagagctgcccacagacgtcacatttgaagtacttctcatcagcttgattggcaccacctgtgctggtgctggcacgttcgatgtagcctgagcactccccaaaggcatttgcaggctcaaatatgatcatgctggcatgagttttcaggtgttcactgaatgctgtgctggaagtgaaggtttctgtgcattcatggcagtcatagtatggttcttctacctgaatctcttgatcttcaccttcttctgggtcttcaattcccacaccgtcaggctcgtcggcatctccctctggctcttcagcttttccctctggctcttcagctctttcttctgggtcttcaatacctgcaccatctggctcatcagcatccccatttggctgctcggcctctccatttggctgtccagcctctccaatgggctctgcagcctctccatctggcccttcagcctctccgtttggctcagcagcctccacttctggctcagcagcctccacttctggctcggcagcctccacttctggctcagcagcctctacgtttaagccctgaatcctcagaactacttgtggaacatggacattggcttcaacttcctgggctgctgctgctgcagctgctgctgcttcatcttcttcttcttcttccagatgaagctccttatgtttagtgaggactgtgctatgaataaaggacttaccacaatccttgcattcatagaatggtatagctcctttgaggggctcagtaagaaatgaggtgtgagtataggaggacccgtactcatagggctcattcttatgaacagttacgtgatctgcaagttctgctgggttgacgaaagattctccacagactgcacattcaaagagtctctcttcggtctgacttctctgaaactcagtgagggctaagcctggaatgatagcttcctcagccatctggctctgctccagtaaatcatcttccctatgaagtctcatatgctcattaagggcagagctatgaatgaagccttgtccacacaaaaggcatcgaatggccgacccagcaagagcaggattcctctctgcagcacgattcctccgtggcttcatgggcaagagggcaataaaaccatcatcacaccccttcatggaatacaactggtcttgttcatggattctctgatgctcgaaaaggaatgagctatgaataaaagattccccacactttggacattcatacagctgctctccagtgtaatctctctgatactcgctgatggaatgggtgtgaattacagaatgtgtgtactcccgactgtcaaccaggcacttcctgctgtggactttctgatggtctgtgaggtctgtgagatccacaaagcccaggccacagtcctcacattcatagattttgtcatcagggtcatccttctgagggtcttccatgtctgagccttgaatgacagggtcttcaattgtctcctgaccatgggtctcctcgctgtgggtctcctccccatcagtattctcgccttgagactcctcgccatgagacttctcttggtcatagattttctggtttgtgttgaggtcttcgctggtagcaaaaaattgtctgaagtccttacatttgttccgcgcttgctctttagcatactgctcttgggcgtaacttgtt

SEQ ID NO: 4002 - DNA, 497 bp, Homo sapiens
  MAP TO AC007073.2; EXPRESSED IN HELA, SIGNAL =  14; EXPRESSED IN ADULT LIVER, SIGNAL =  14; EXPRESSED IN LUNG, SIGNAL =  14; EXPRESSED IN BRAIN, SIGNAL =  11; EXPRESSED IN BONE MARROW, SIGNAL =  11; EXPRESSED IN PLACENTA, SIGNAL =  11; EXPRESSED IN HEART, SIGNAL =  10; EXPRESSED IN HBL100, SIGNAL =  10; EXPRESSED IN BT474, SIGNAL =  10; EXPRESSED IN FETAL LIVER, SIGNAL =  12
caaacatttggtctatagcattaggtgtacagatatctctttgagtcactgctttcaattattttgggtatatacaaagaagtggaattgctggctcatagggtaattccatgtttaatttttcaaggaaccaccatactgttttccatagtgactgtgccatttcacactcccaccagcagtgtataagagtacaagcggagatgcgtttttagctgtagttgcactaatgtcctctcctttattttggagcacaggtcagtccatcgtgggctgtaaggccattctcatcgatgatcaggtctttgtggtggtagcccagctcttcggtggctctcacatttacaaatacgacgagagttggaccaaatttgtcaaattccaagacatagaggtctctcgcatttccaagcccaatgacatcgagctgtttcagatcgacgacgagacgttctttgtcatcgcagacagctcaaaggctggtctgtccacagttt

SEQ ID NO: 4003 - DNA, 483 bp, Homo sapiens
  MAP TO AL035702.7; EXPRESSED IN HBL100, SIGNAL = 0.8; EXPRESSED IN FETAL LIVER, SIGNAL = 0.66; EXPRESSED IN LUNG, SIGNAL = 0.85; EXPRESSED IN HELA, SIGNAL = 0.59; EXPRESSED IN BRAIN, SIGNAL = 1.1; EXPRESSED IN PLACENTA, SIGNAL = 1.3; EXPRESSED IN HEART, SIGNAL = 1.3
gcacatttctctaatttggatttctacaatatccatatcttggtttatgaaaggtagggaagagacttcaggtactgcaatcccccttttccacttaccttggctctgccagtactttgaagaatgtgcactaaggcacaagccaactcctctttatttctcacactaattactggctcaaggacagaacacagcatggtgtagttgctggtgacaaattctgcaaattctttgtattgctccataggcagaatggtgatagtttggaaacgtgatttaatccgaatagaaggtcctcctgtctttcctttgttgggtgtaggtgtactcactggataccacttttctacaaattggcgaccagtcacactggcagtggggatgttgactagccctacataattattcttgtccttttttttctttttttccacatccttgtaaatgtgaactgtgatactatgaagaggtggaaggctgaag

SEQ ID NO: 4004 - DNA, 435 bp, Homo sapiens
  MAP TO AC007272.2; EXPRESSED IN BT474, SIGNAL = 7.7; EXPRESSED IN ADULT LIVER, SIGNAL = 7.8; EXPRESSED IN BRAIN, SIGNAL = 5.9; EXPRESSED IN LUNG, SIGNAL =  10; EXPRESSED IN BONE MARROW, SIGNAL = 7.5; EXPRESSED IN PLACENTA, SIGNAL = 7.1; EXPRESSED IN HEART, SIGNAL = 6.1; EXPRESSED IN HELA, SIGNAL = 9.4; EXPRESSED IN HBL100, SIGNAL = 7.1; EXPRESSED IN FETAL LIVER, SIGNAL = 6.8
ctgtgtacaaggtggccaagcatacccagaactttggtgtgcccatcatagccgatggtggcatccagaccatggggcatgtggtcaaggccctggccctaggagcctccacagtgatgatgggctccctgctggccgccaccatggaggcccccggcgagtgcttcttctcagacggaatgcagctcaagaagtaccagggcatgggctcactggatgccatggagaagagcagcagcagccagaaacaatacttcaacgacggggataaggcgaagatcacgcaggatgtcttgggctccatccaggacaaagggtccattcagaagttcgtgccctacctcatagtgggcatccagcatggctgccaggatatcggggcccacagcctgtctgtccttcggtccatgatgtactcaggggagctcaagtttg

SEQ ID NO: 4005 - DNA, 1865 bp, Homo sapiens
  MAP TO AL021579.1; EXPRESSED IN PLACENTA, SIGNAL = 4.3; EXPRESSED IN HBL100, SIGNAL = 3.7; EXPRESSED IN HEART, SIGNAL = 1.6; EXPRESSED IN FETAL LIVER, SIGNAL = 2.9; EXPRESSED IN ADULT LIVER, SIGNAL = 2.1; EXPRESSED IN BT474, SIGNAL = 4.3; EXPRESSED IN BRAIN, SIGNAL = 1.9; EXPRESSED IN BONE MARROW, SIGNAL =   3; EXPRESSED IN LUNG, SIGNAL = 3.1; EXPRESSED IN HELA, SIGNAL = 5.9
ccacattttctttatccattcagctattggatatttaggctgtttccacctcttggctattgtgagtaattctcctctaaactttttatatagcgagagaaagattctcattatggttaagagtcattgctttctgttttagagggattattttgctatatacttacgcatgggaaagattgctttgttgattatacctttgaattcttatcatcataggtctgaagctgcgttggaccaggaacagattactgctgcttattctgtagaacataatcaattagaggctcacccaaaggcagactttatcagagaatcaagtgaggcacaagtacaaaagtttttaagcagatctgtggaagatgttagacctcaccatactgatgcaaataatcagtctgcttgttttgaagcacctgatcaaaagaccttatccgctcctcaagaggagcggatttcagctgtagaaagtcagccttcccggaaaagaagtgtttcccatggatctaaccatacgcaaaaaccagacgagcagagaagtgaaccatctgcaggcattcctaaagtaaccagcagatgcattgattcaaaagaaccaatagaaaggccagaggagaaaccaaaaaaggaaggctttatacgatcttctgaaggaccaaaacctgaaaaagtatataaatctaaatcagaaactcgttggggcccacgaccaagctctaacagaagggaagaagttaatgatagacctgtgagaagatcaggtcccattaaaaaacctgtacttagagatatgaaagaggaacgggaacagaggaaggagaaagaaggagaaaaggccgaaaaggtcactgaaaaagtagttgtaaagcctgaaaagacggaaaagaaggatcttcctcctcccccaccaccacctcagccaccagcaccaattcagccacagtcagttccaccaccaattcaaccagaagcagagaaatttccttcaacagaaactgcaactttggctcaaaaaccatctcaggatactgagaagcctctggaacctgtgagtactgttcaggtagagcctgcagttaagactgtaaaccaacagactatggcagcaccagtagtcaaagaagaaaaacaacctgagaaagtcatcagcaaagaccttgttatagagaggcctcgaccagattcaagaccagcagttaaaaaagaatcaactttgcctcccaggacctattggaaagaagctagagagagagattggtttccagatcaaggatacagaggtcgaggccgaggtgaatattactccagaggtcgaagctatagaggttcttatggagggcgtggcaggggtggtaggggacacactcgagattatcctcagtatagagacaataagccaagagcagagcatataccctcagggcctctcagacagcgagaagaaagtgaaacacggagtgagagctctgattttgaagttgtccccaaaagaagacgacagcggggttcagagactgacacagacagtgaaattcatgaaagtgcaagtgacaaggacagtttaagtaaaggcaaacttcccaaaagagaggaacggcctgaaaacaaaaaacctgtaaagcctcattcttctttcaagcctgataatcatgttcgaatagataatagactgctagaaaagccttatgtaagggatgacgataaagctaaaccaggctttcttcctaaaggagagcctacaaggagaggcagagggggaacattcaggcgtggtggaagggatcctggaggccgtccatcacgcccttccactttacgaagaccagcttatcgggacaatcagtggaacccaaggcagtcagaag

SEQ ID NO: 4006 - DNA, 465 bp, Homo sapiens
  MAP TO AC008165.2; EXPRESSED IN ADULT LIVER, SIGNAL = 0.72; EXPRESSED IN PLACENTA, SIGNAL = 0.67; EXPRESSED IN HEART, SIGNAL = 0.97
ttgaaaacggtgatgaactccagtacttgtaagaacctgagctcctcggtaagccccaccggggacccgggggatctggtcatgggtggggctcaggcctggccaattagccaacgtgagcaggggcggcactgacagcaggggcctcaggcatcttgcatcttcccaaagtccagggtgggagactcaccaggcctccaacatttaaagcaggcagccatccaaaccccttctggggcctcccgtcacctgtgaggtgaacggcaggctccagagcagcatttgagcatcactgagattcggccctgagctgcccagctcacctttgcttccccaggcccgattcttctgggcttgctccccagccctgtcatcttcatcacccaactggcacttgggcagagcattcgattgttcgagctactgaaacaaagcacccagatgggcagcatgaaacacagcatt

SEQ ID NO: 4007 - DNA, 394 bp, Homo sapiens
  MAP TO AC007735.2; EXPRESSED IN HELA, SIGNAL = 0.59; EXPRESSED IN PLACENTA, SIGNAL = 0.69; EXPRESSED IN HEART, SIGNAL = 0.81
aagccagaattaggaaatgggatactctagggaatcataatgtgttttattgcctagaaacaaaatatgagtggcgtgatggacattggaggcactctccagttttacctttgaggataaattaatccaactgctgggaatgtgctcagaagatagactgcagctgtcatcctttcagggattgcctcatcagagagtcaaggtcttcctcagatgactcacctgcaatgactgagaggagttacgaagctctgaccatcctgactccactcaggaaaactgctcacttaagctccaaactcctcattgtcattggccagtgctgttgtcaggaccgaatcacaggttagtttccctctctggctacacctgctcttttcatcccttctgcagc

SEQ ID NO: 4008 - DNA, 445 bp, Homo sapiens
  MAP TO AF001549.1; EXPRESSED IN HBL100, SIGNAL = 6.1; EXPRESSED IN PLACENTA, SIGNAL = 2.2; EXPRESSED IN HELA, SIGNAL = 2.9; EXPRESSED IN HEART, SIGNAL = 2.2; EXPRESSED IN BRAIN, SIGNAL = 2.1; EXPRESSED IN LUNG, SIGNAL = 7.3; EXPRESSED IN BT474, SIGNAL = 2.8; EXPRESSED IN ADULT LIVER, SIGNAL = 2.2; EXPRESSED IN FETAL LIVER, SIGNAL = 2.6; EXPRESSED IN BONE MARROW, SIGNAL = 3.1
actctcccaaaacatcgtggggcctgattcttcctctttgttccaatggccctgggtgactcaagtgcccattcaatgaccaggacacagaggtcttagagagatgctccttgaggccccaggtgcgagcctgtaccctgccggagcatgaggcaagggacagggcatcgtctgtggggatagtgggggtagtgggggtagtggtcagccagatttggtgactctacttgctcaccagacgatcctacacctgccacctccgatggatccactgcctctgtgcctgcctgtactgctgatgctccagtggataactcagcatcccagcctaggcccaatgccactgaagatggacctgccccctggggacccaggagtcctaccactcagctgtccccaggagtgcccagaccctcattcttatccaggacctaggagccctacc

SEQ ID NO: 4009 - DNA, 432 bp, Homo sapiens
  MAP TO AC007220.1; EXPRESSED IN PLACENTA, SIGNAL = 4.5; EXPRESSED IN HELA, SIGNAL = 6.6; EXPRESSED IN HEART, SIGNAL = 2.2; EXPRESSED IN ADULT LIVER, SIGNAL = 1.8; EXPRESSED IN FETAL LIVER, SIGNAL = 4.5; EXPRESSED IN BRAIN, SIGNAL = 2.3; EXPRESSED IN BONE MARROW, SIGNAL =   3; EXPRESSED IN HBL100, SIGNAL =  16; EXPRESSED IN BT474, SIGNAL = 7.4; EXPRESSED IN LUNG, SIGNAL = 8.5
tgaatacgggaaggacaagggtgaggaggacagtgagcatgtgctgaagacactagaggagagggtctggtgaaacatttgatcttagacaagcacctaggtaaagaaataatgggagaagatttctaagccccaccatgtgcttaagagtcatcttcaccattggtgctgtctctgtcatcctctccttcctcagcctctttttcatcatccttgatcaactccagctggtcatcccccaatcttcattatcctcatcatccagtaggtccctctcctcagcagagtcatctgcaccaccttcagactctatcttcacatgagtctcacgtgagctgctgctctgcttctcttctgacttaccattcttcatctctactgcttgtttgctctgtttcttttccattttttccgggtcttccaggagagaat

SEQ ID NO: 4010 - DNA, 479 bp, Homo sapiens
  MAP TO AL034373.13; EXPRESSED IN PLACENTA, SIGNAL = 0.79; EXPRESSED IN HBL100, SIGNAL = 0.94; EXPRESSED IN ADULT LIVER, SIGNAL = 0.71; EXPRESSED IN BRAIN, SIGNAL = 0.96; EXPRESSED IN HEART, SIGNAL =   1; EXPRESSED IN HELA, SIGNAL = 0.8; EXPRESSED IN BT474, SIGNAL = 0.69; EXPRESSED IN FETAL LIVER, SIGNAL = 0.7; EXPRESSED IN LUNG, SIGNAL = 0.88
tacccactggctactgcactagtgtgagaaggaagatattaaataaaagaaaaagataatgcctaggaccttgggcaaagcatgcagtgaattaatgtgtatttagtggaaaatgataatggtgaataaatgaatgcactcatgtattatatgtataacaaatcttaaacattattaatgtgggtaaaagttcaggagtcagaatgaagccatcaggcaagggggacattgaatatatagtctgatttgaaaagcatatttggccaatgagttggaggaatacaaacctgtgaaaggcagttgaggccagtttatgaatgtccttgaagtccagctttgataaatggattttactctgaagggagacaccaaagtatctgaacatggagctatctagttgaaaggaaagtttcaggataatgaatttttcaggaatatgcatgatggatgagcgtacggcattcctggagaaaaaggga

SEQ ID NO: 4011 - DNA, 434 bp, Homo sapiens
  MAP TO AC007222.1; EXPRESSED IN HELA, SIGNAL = 1.9; EXPRESSED IN ADULT LIVER, SIGNAL = 1.6; EXPRESSED IN BRAIN, SIGNAL = 2.2; EXPRESSED IN LUNG, SIGNAL = 1.7; EXPRESSED IN BONE MARROW, SIGNAL = 2.2; EXPRESSED IN PLACENTA, SIGNAL = 1.7; EXPRESSED IN HEART, SIGNAL = 2.1; EXPRESSED IN HBL100, SIGNAL =   2; EXPRESSED IN BT474, SIGNAL = 1.9; EXPRESSED IN FETAL LIVER, SIGNAL = 1.9
ttcacgggaatgtgaaacagaactgactttgagtctgaaacaaattacaaatcttatgggcctccaactagctctatgggcatgtttctcgacttctctgcagtttcatttctacatttacgaagtagaggtaacagcaagaccacaaagacatagcattgttaggagtatggcacgagctagtttgtatactaccccagtacagtacccagcaaacagaaggagctcaatacatacttctacttttgatgctggaggtgatggtggtgatggtggtggtgatagtggtggtgactgtggtggtgacggtagcgatgatggtgatgatgtgaaaatggtggtggtggtgattgtgaatggtgacggtggtagtagtggtgatgaaggtgatggtggtagtgctggtggtagtgacggtgctgatggtgatgtag

SEQ ID NO: 4012 - DNA, 1959 bp, Homo sapiens
  MAP TO AL022334.1; EXPRESSED IN BT474, SIGNAL = 1.9; EXPRESSED IN BRAIN, SIGNAL = 2.1; EXPRESSED IN LUNG, SIGNAL = 1.7; EXPRESSED IN HBL100, SIGNAL = 2.3; EXPRESSED IN HELA, SIGNAL = 2.7; EXPRESSED IN PLACENTA, SIGNAL = 2.2; EXPRESSED IN ADULT LIVER, SIGNAL = 2.4; EXPRESSED IN FETAL LIVER, SIGNAL = 2.2; EXPRESSED IN BONE MARROW, SIGNAL = 2.7; EXPRESSED IN HEART, SIGNAL = 2.3
tgctcagaaagccaaatgagttaactttgtagcagactgagaacagggcctgcctctccagctggagcctggcataaggagagcagttggtaaatgttaggctagaaggcctattgttcctccattgccatggaacctttgctgcttcagcttctctcccacataatagtttgctctgcgtgtttcccagggctgttggaaggatcaaatgtgatagaggatggaggagacacctgtcaaatcctgtctgaagggagaaagctgaaggaagttgtgttgcctttgtgtctccatttggaccacactgggcccaggccaagggactcaataaacacctaaaaaggagcaaaaggtccataggcttgagagatgatgatgatgacaacaatgatggtggctatgatgatgacgctgacggtgatggtgatgatggtggtgatgatggtaataatgatagtgatgatggtggtgatggtgatgatgatgatggtggtgatggtggtaagggtggtgatgataatggtgataatgatgatgatggtgatgatgggaatgatggtgatgatggtgatgatgacagtgatgatgatgatggtgatgatggggatgatgatgacagtgatgatggtgatgatggtgatggtgatgatgatgatagtgatgatggggaagatgatgacagtgatggtggtgatgatgacgatagcgatgatggggatgatgacagtgatgattgtgatgatggtgatgatgatgatggtgatgatggggatgatgatcacagtgatgatggtgatggtgatgatgatgatggtgatgacggggatgatgatgagagtgatgatggtgatgatggtgatgatgatggtgatgatgacggtgatgattatggtgatgaaggcaatggtgatgatgaggatgatggtgatagtgatggtaatgatggtgatgatgacattagaaagagggatgcagtccaagccttaagaagacaacagggcatcataaaaaaagatcaaaggatagttgttcaaacacccagatatctttaagtccaggctctgcctctaactagtcaagtgactttgggcaagttgtggaatatctctgagtgtcagttctgccacctgtaaaaccgaaacaagaaccctgccctgcatgcttcacaggtagcctccatggggatcacaagcattttcatacacacaggcagctgtggttactgctgctgtatccgagagcagatcctagcccaggcagctgttgctatcagtcagacttagttcaagctctgttatttccttgctcaggtgttgtcagcctcagttttctcatctacaaatgactctaataatgcttctccacgtagggttgtggtctggctaaaatgggtccatgtaattacagggatccacccagtgcctgcaaagagtgggggctccataaatggtcttcattgtgattgcaagcctctggtccactccagctctttctctcctggctgcccactcagcttggcccaacctggttgatcacagtcatcatagttccctgcaaaaatattctgtggtgcattctcaaggactagatgaggtcacaaagggctgccctgtatggttgtgtaggttgcttactgtgcaagggcactcagctgaggaaatagcttgtgcctttcctttcaaaactgagagctttccctcaaagctgagagctttaaagacggctgcctctgcctgggaaaggaacctttcttttatttgcataaaaacaacacatgggctggaaggcacctgaatcacccgtggtgggattaaaccagcttggaaatgtagactcggatgggtctcagagagcacccaacattcttgttggacagaggaagaaactgaccactatttattcattcatccaacttttactgcccactgattgacaagtaccacctctcctctcaagagg

SEQ ID NO: 4013 - DNA, 1958 bp, Homo sapiens
  MAP TO AC006547.9; EXPRESSED IN PLACENTA, SIGNAL = 5.3; EXPRESSED IN HEART, SIGNAL = 2.7; EXPRESSED IN BT474, SIGNAL = 3.1; EXPRESSED IN LUNG, SIGNAL = 2.7; EXPRESSED IN BRAIN, SIGNAL = 2.7; EXPRESSED IN HELA, SIGNAL = 4.7; EXPRESSED IN HBL100, SIGNAL = 3.8; EXPRESSED IN ADULT LIVER, SIGNAL = 3.1; EXPRESSED IN FETAL LIVER, SIGNAL = 3.6; EXPRESSED IN BONE MARROW, SIGNAL = 3.3
gacagactcgcttagtcgccagtcacttaagctgagtgcattgtgatttccaataattgaggcagtggttctaaaagctgtctacattaatgaaaagagcaatgtggccagcttgactaagccgccagcgcacagcgcggcaggacgcgcccgggtctcagcggacttgtgcatgttagctgtgtagatttatgtgagggcttgtaaaactctggtcttgtaaactagtcttaagcgcttttaatatggagacagatgagagcccctctccgctcccgtgtgggcccgcaggagaagcggtgatggagagccgagctcgccccttccaagcgctgccccgtgagcagtctccaccacctcccctgcaaacgtccagtggtgcagaggtaatggacgttggctctggtggtgatggacagtccgaactccctgctgaggaccccttcaacttctacggagcttctcttctctccaaaggatccttctctaagggccgcctcctcatagacccgaactgtagtggccacagcccgcgcaccgcccggcacgcacctgcggtccggaagttctcccctgaccttaagttgcttaaggatgtaaagattagcgtgagctttaccgagagctgcaggagtaaggacaggaaggtgctgtacacaggagcagagcgcgacgtgcgggcggagtgcggtctgctccttagccctgtcagtggggacgtgcatgcttgtccctttggcgggagtgttggtgacggggtaggcatagggggtgagagtgctgataagaaggatgaggagaatgagctggatcaggaaaagagagtggagtatgcagtgctcgatgagttagaagattttactgacaatttggagctagatgaagaaggagcaggcgggttcacggctaaagcaatcgttcagagagacagagtggatgaagaggccttgaatttcccctacgaggtatgttggcagcccctcctctagagggctcttagcaaaacccaaagagagatttgggaattgcagcatcttttgaaagcagggaaattaaaaaaaaaaaaaacaaaaaccaaaatcccctctgaggtggaataatgttaatgtggagaagagaaagatgtaaggagtccagatttttaaagtttcctaatgaaaagtttggcccatgggtaggccctgcatccctgatctagcgcgtggggcagcaggtgctgctgagttacgctccttggcagtgtgtgcccctggaccaggtgtgttggtgtcagctggtagcttcatcctgtttgtttttcagatgatcatgcaccctaagggcacatctaggccccctgagagcacctcctttctgtgtctgttctcaggaatgctgttgagctctcctgttgcaggagcatgagcgccaggggctctggtgtctgaacagcgtgttttgcaggatgactttgacaacgatgtggatgctctgctggaagaaggcctttgtgcccccaaaaagaggcgaacagaggaaaaatatggcggagacagcgaccatccgtccgatggagagacaagtgtgcagccgatgatgaccaagattaaaacagtgctcaaaagtacgtgtgtgggtcagaagcagtgggtgttccagggcagtggaggggtggttgcttccttagcagaaatgctttgagagagctctggtgccaggtagtgggctgggtggaggcatgtttgaggacaggacagaaatatctgaggagggaaacacaggatgggaggacgtcctgatgcatgacccagatgcggatcctggtgtgtgctatggaaaccacagagcagcaggcactgtgcagaggaatgggaggggacttctgagggggtcaggaggggatgttggtatatgccaggagccagcatgaccatcagctggagggtgtggagaccaagggcaaggtgggtacacagtga

SEQ ID NO: 4014 - DNA, 473 bp, Homo sapiens
  MAP TO AL049838.2; EXPRESSED IN FETAL LIVER, SIGNAL = 0.89; EXPRESSED IN ADULT LIVER, SIGNAL = 0.75; EXPRESSED IN BRAIN, SIGNAL = 0.83; EXPRESSED IN HEART, SIGNAL = 0.94; EXPRESSED IN PLACENTA, SIGNAL = 0.75; EXPRESSED IN HELA, SIGNAL = 0.95; EXPRESSED IN LUNG, SIGNAL = 1.1; EXPRESSED IN HBL100, SIGNAL = 0.98; EXPRESSED IN BONE MARROW, SIGNAL = 1.7; EXPRESSED IN BT474, SIGNAL = 0.6
ggggtagctgtgtcgatttcttaaaataaaacaacaatgaagtttgctgcattgaatgagtcttcattttatgaaggatttctctatatatgcaatgctgtttgagagcattttacccagaatggaaattctttcaaaactagagttaatcctctcaaaccctgccactgcttggtgagctaaggtcatgtaatattctaagtcctttgttgtcatttcaacactgttcacaccaggagtaaattctatctcaagaaaccactttctttgctcatccataagaagcaacttttcatccattcaagtcttatcatgagactgcagcaattcagtcacatcttcaggctccatttataattctaattctctttctatttctaacacatatgcagttacctcctccaatgaagtcttgaacccctcaacgtcatccataagggttagaatcaacttcctccaaactcctgttaatg

SEQ ID NO: 4015 - DNA, 375 bp, Homo sapiens
  MAP TO AP000038.1; EXPRESSED IN PLACENTA, SIGNAL = 0.82; EXPRESSED IN FETAL LIVER, SIGNAL = 0.76; EXPRESSED IN LUNG, SIGNAL = 1.1; EXPRESSED IN HELA, SIGNAL = 0.69; EXPRESSED IN BT474, SIGNAL = 0.62; EXPRESSED IN BONE MARROW, SIGNAL = 0.79; EXPRESSED IN ADULT LIVER, SIGNAL = 0.71; EXPRESSED IN BRAIN, SIGNAL = 0.96; EXPRESSED IN HEART, SIGNAL = 0.93
tggattgtcactaaatgactagatacgttatatatacatacttcccaaacttagggaaatacctatcttccatttattcactagtatccactgtgaaaggaagtatcaaagaaggcataaaagcacattaaacagaattctaagacacatctattaatttaaaccatctattaacttttaaaaggccatttaaaagctttatgaagagaggaaaaagaggatattctgtaatgttatgatagatctagatataccttcgctttcccttcaagagctccagttcctgcatatatcttactgattgaatcaccattcacggaccacattgaccgaaaaacttcttgaaagcgagtcaccaactgaggcttttcagct

SEQ ID NO: 4016 - DNA, 470 bp, Homo sapiens
  MAP TO AC007564.9; EXPRESSED IN BT474, SIGNAL = 0.64; EXPRESSED IN FETAL LIVER, SIGNAL = 0.61; EXPRESSED IN BRAIN, SIGNAL = 0.86; EXPRESSED IN HEART, SIGNAL = 0.97; EXPRESSED IN PLACENTA, SIGNAL = 0.66; EXPRESSED IN BONE MARROW, SIGNAL = 0.71; EXPRESSED IN HBL100, SIGNAL = 0.69; EXPRESSED IN LUNG, SIGNAL = 0.9; EXPRESSED IN HELA, SIGNAL = 0.85; EXPRESSED IN ADULT LIVER, SIGNAL = 0.71
cttctaataacccataggtgaaggaaaaaatcaaatcacaaatattaataataacagaaaatatttgaaccgagtgataagtaaaatacaataaaaattcatggaaacagctaaatcagtgcttatattatgaaatcagtgtttatattctgaaaaaaagaaaagtccaaaatcaatgatctatgctctctcttaagaaacttagagaacaaattaaacacaaagattacagtacagaacaatgaaattgaacaaagatgaacaatagagaaaaatcaatgaaaccaaaagctgatttttgaaatgattaataaaattgagaaatctctagctagacttaccaataagaaagagaaaacacaaattaccaatatcaagattgaaagagaagccatcaatacaaatccaaaggatatttacaaaaataagggaataggataaacaactccatgtcaataaatttggtcaca

SEQ ID NO: 4017 - DNA, 487 bp, Homo sapiens
  MAP TO AL080317.11; EXPRESSED IN ADULT LIVER, SIGNAL =   1; EXPRESSED IN HBL100, SIGNAL =   2; EXPRESSED IN HEART, SIGNAL = 0.85
aggcacttcaattttgctccatttatcactcacatatgttaatactgtgtatataaatggataacttctaaaagttaggttaatcttttaaaatgtagcaaaactttattttgcttggaatatggagtatacgccatatgaaaaacagatcactaaaggggaattttaaaacatcaatttagttcataaggtattttatatcatgaacaatagtaataaataatttctgattgaaggacaataatgataaaagttaataaaacaactgcaataactaaaaaattacctctttttggcacaatgttcttcaatattgctgtcccatctctgggacatcaccaaactaagctccatttcctctttttcaatctgtggttcattttcttcatcatcactattttgtggatatttattatttccaaaggagcgacatggtgatggcatcctatttctttccccccgatatccatcactttccaaaccagca

SEQ ID NO: 4018 - DNA, 405 bp, Homo sapiens
  MAP TO AL008635.1; EXPRESSED IN ADULT LIVER, SIGNAL = 1.2; EXPRESSED IN BT474, SIGNAL = 1.1; EXPRESSED IN FETAL LIVER, SIGNAL =   1; EXPRESSED IN BONE MARROW, SIGNAL =   1; EXPRESSED IN BRAIN, SIGNAL = 1.1; EXPRESSED IN HEART, SIGNAL = 0.98; EXPRESSED IN PLACENTA, SIGNAL = 1.2
tgtcaggaataagcacacggaggcccacctagattcccctctggtgcatccctttggtgcactcagagtcatggtttcctcatccattgaagagcagaggtactccggcctcagtggctacaagaatctagtgacgatgggacaatgtgtatagagcagtctcacacagggccaggccctgtgcccaggaagtgtctgtcatcttcctcctccccatctcatccggccctgcacccccctcctctcccacccacggtttgagtttacccattcaggaccccctcatgactttatgactcctggtttcttctcagagaaagccacagatggctccctgcagagcgaggactgggccctcaacatggagatctgcgacatcatcaacgagacggaggaagggtaagg

SEQ ID NO: 4019 - DNA, 440 bp, Homo sapiens
  MAP TO AC007255.2; EXPRESSED IN HELA, SIGNAL = 1.9; EXPRESSED IN HEART, SIGNAL = 1.7; EXPRESSED IN ADULT LIVER, SIGNAL = 1.7; EXPRESSED IN FETAL LIVER, SIGNAL = 1.9; EXPRESSED IN BRAIN, SIGNAL = 1.3; EXPRESSED IN PLACENTA, SIGNAL = 2.1; EXPRESSED IN HBL100, SIGNAL =   2; EXPRESSED IN BT474, SIGNAL = 1.7; EXPRESSED IN LUNG, SIGNAL = 1.8; EXPRESSED IN BONE MARROW, SIGNAL = 1.6
tttacaagtaaacatgaaaggctgtaatagtctaattttttccaatacaatcagagtaatacagattagatacccacatacatacatgtgtgtatctagtacagtgctacatacaatatagcacatggattaagatgatgctaggtaccccatttgcgctgctgtgattattacacatcttatgcctgtatcaaaatatctcatataccccataaatatatacacctactgtgtacccacaaaaattaataaagatgatgctaggaagaaagccaggttgcttcctacgatgacgaaattcatgtccatcaagctcatgaacacaggaaaggaagtaagggaacggtccatgggaatcttaaatatcagttctctttgcaaagcagggaaggatgaagactggatttccattgagatctccactgctacatgggcaaatg

SEQ ID NO: 4020 - DNA, 454 bp, Homo sapiens
  MAP TO AC007739.1; EXPRESSED IN HEART, SIGNAL = 0.87; EXPRESSED IN PLACENTA, SIGNAL = 2.5; EXPRESSED IN HBL100, SIGNAL =   1; EXPRESSED IN LUNG, SIGNAL = 0.78; EXPRESSED IN HELA, SIGNAL = 1.2; EXPRESSED IN BT474, SIGNAL = 0.72; EXPRESSED IN BONE MARROW, SIGNAL = 0.86; EXPRESSED IN FETAL LIVER, SIGNAL = 0.67; EXPRESSED IN BRAIN, SIGNAL = 0.85
ttgtgatgttgagtgtgattcagaatgaattctgaatatttaaggatggttagcgtgcatattccttctttccctcagcaatattgaatttaataagtgaataattgagaagttgcttcattgggctgtagttaaacagatcgctacatccctcttactgccactggcataaagcagttaactctgaatcaccaacctaggaaagaaaaaaaattttcctccaagaaaaatttgtcattaatacacctgtttagaaagtcagttaaacaagatgaagacagggcagatttctccacgctatattattttatcattcctgacctgccttaccagcagcttgatactgaattttttactcatggtcagagcagtaattcctccaattcccctgttaacacagatactcttgcagttcaggaaattaaatcatacactgaaggtgtttgttgtctca

SEQ ID NO: 4021 - DNA, 466 bp, Homo sapiens
  MAP TO AP000101.1; EXPRESSED IN BT474, SIGNAL = 0.85; EXPRESSED IN HBL100, SIGNAL =   1; EXPRESSED IN BRAIN, SIGNAL = 1.3; EXPRESSED IN HEART, SIGNAL = 1.3; EXPRESSED IN ADULT LIVER, SIGNAL =   1; EXPRESSED IN PLACENTA, SIGNAL = 1.2; EXPRESSED IN BONE MARROW, SIGNAL = 1.1; EXPRESSED IN FETAL LIVER, SIGNAL = 1.6; EXPRESSED IN LUNG, SIGNAL = 1.2; EXPRESSED IN HELA, SIGNAL =   1
aggcgacaaatagcatgtccaaatgccaccttctgaatcacttataattctgccaccaaactgaatagaaaatgccagacccaggttacatgggctcctcctttaggaaataggccatttgaaattttttcacaatctctgttcttacatgggctgtggaaaggtcatctgagacatcccaattatcacccttaatggtttccagtctgcactcatctgacctgatatccgtgatatgtgacacctccccacctccttcggcttcctgcatcccttttcagttgcacaaccccctcctgtgtcccagtctcatacgaccaacagatgtcccacttgcacttcatgctggagatgcacaaatgcgcgctcatccccgcccactacaggttgggctccctccgctgacaccttagttgctgtccctgtagcatcatgcactgagtcctctgggcacaaaacctcaact

SEQ ID NO: 4022 - DNA, 485 bp, Homo sapiens; identical to SEQ ID NO: 1116
  MAP TO AC007685.1; EXPRESSED IN ADULT LIVER, SIGNAL = 0.92; EXPRESSED IN PLACENTA, SIGNAL = 0.7; EXPRESSED IN BONE MARROW, SIGNAL = 1.6; EXPRESSED IN HBL100, SIGNAL = 1.1; EXPRESSED IN FETAL LIVER, SIGNAL = 0.76; EXPRESSED IN LUNG, SIGNAL = 1.5; EXPRESSED IN HELA, SIGNAL =   1; EXPRESSED IN BT474, SIGNAL = 1.6; EXPRESSED IN BRAIN, SIGNAL = 0.82; EXPRESSED IN HEART, SIGNAL = 0.8

SEQ ID NO: 4023 - DNA, 379 bp, Homo sapiens
  MAP TO AL021877.1; EXPRESSED IN PLACENTA, SIGNAL = 1.7; EXPRESSED IN HBL100, SIGNAL = 1.5; EXPRESSED IN BT474, SIGNAL = 1.6; EXPRESSED IN ADULT LIVER, SIGNAL = 1.4; EXPRESSED IN FETAL LIVER, SIGNAL = 1.5; EXPRESSED IN BONE MARROW, SIGNAL = 1.2; EXPRESSED IN LUNG, SIGNAL = 1.6; EXPRESSED IN BRAIN, SIGNAL = 2.6; EXPRESSED IN HELA, SIGNAL = 2.1; EXPRESSED IN HEART, SIGNAL = 5.2
ttgagcccttgccatagttctagtccccaatcaccacccaactgatgccatatttcttgtagcgggcagtgtcagggaaggggccaaactcgtgggtgacagcatcgtgcacagagttggccttgccattttcaatgttgatggcaccactgagcaagttgttggagatggtgtccaagtgcccacggaacttgagtcaggggccggcagctgagatgtggtcagtggtaccccatgcgggggtgctggtaggtgtcctgccctgggccaaactctgcttggggaagctcatctgcatccggagcctccagcttgaacttcttgccatccttgcctgtcaggtagttggtctctgggttgaacttgagggttcccacaa

SEQ ID NO: 4024 - DNA, 401 bp, Homo sapiens
  MAP TO AC007274.1; EXPRESSED IN PLACENTA, SIGNAL = 2.4; EXPRESSED IN HELA, SIGNAL = 2.3; EXPRESSED IN HBL100, SIGNAL = 2.3; EXPRESSED IN HEART, SIGNAL = 2.1; EXPRESSED IN ADULT LIVER, SIGNAL =   3; EXPRESSED IN BT474, SIGNAL = 1.7; EXPRESSED IN FETAL LIVER, SIGNAL = 2.5; EXPRESSED IN BONE MARROW, SIGNAL = 2.1; EXPRESSED IN LUNG, SIGNAL = 2.5; EXPRESSED IN BRAIN, SIGNAL =   2
ttccccagaggtgttgtttcacctcaccctagctatacattaattggttccatggtagagaagtgacacaggtatgtttatgttgccattcacattttcactgttgacagaatgctagtgcatcttgtggctctcccgcatactctttccttactgtaggagaagttcatcacatatatttttggccagattatctacaaaagcagttgtttgtactgattcagtaatagatacaacagcaatgctaacagttgccataatgtctatggctgagcctgtaaagaccataagtgtaaatgtgaatcttttgtgtctgacctgggacagggcactttctaaggtggcaagggcagaagaatcttgccaattgcatgtcaaattggctggtagaagtgcctcag

SEQ ID NO: 4025 - DNA, 487 bp, Homo sapiens
  MAP TO AL031684.11; EXPRESSED IN HEART, SIGNAL =   1; EXPRESSED IN ADULT LIVER, SIGNAL = 1.2; EXPRESSED IN BRAIN, SIGNAL = 0.91; EXPRESSED IN BT474, SIGNAL = 2.2; EXPRESSED IN BONE MARROW, SIGNAL = 1.1; EXPRESSED IN HBL100, SIGNAL = 0.85; EXPRESSED IN FETAL LIVER, SIGNAL = 0.9; EXPRESSED IN HELA, SIGNAL = 1.2; EXPRESSED IN PLACENTA, SIGNAL = 1.3; EXPRESSED IN LUNG, SIGNAL =   1
ggaagacaatttttccacggagtgggggtgggggaaaggttttgggatgaaactgttccacctcgggtcatcaggcattagattttcataagaatcaggcaacctagatccctcgcatgtgcagttcacaatagggttcctgcttctatgaaaatctaatgcccagctgatctgacaggaagtggagctgaggcggtaatgctggcttgccccctgtttctgtggggcttactgtgtggactgtttcctcgggttggggacccctgcattaagaaatgtaaaatgaagattatattttcagggatcatttctatagtttgtcactagggaagttcctctgaatgtgtagagcaccagaaacatgaggaagaggcacagggttctctcctgagtgtgaagctggctcttggcgctgctttcctgcaactgctatttgccattcgtgattgtggagagtcagagggagaggatgatgcagtctgagtgg

SEQ ID NO: 4026 - DNA, 468 bp, Homo sapiens
  MAP TO AP000121.1; EXPRESSED IN HEART, SIGNAL = 1.1; EXPRESSED IN ADULT LIVER, SIGNAL = 0.94; EXPRESSED IN PLACENTA, SIGNAL = 0.59; EXPRESSED IN LUNG, SIGNAL = 0.74; EXPRESSED IN HELA, SIGNAL = 0.66; EXPRESSED IN FETAL LIVER, SIGNAL = 0.66; EXPRESSED IN BRAIN, SIGNAL = 0.7
agggacagatatgggggaaccactgacagtctatcacaaaagaacgtgattttagagaaacagtgaaacagtgtcattaatccacccctcaccccttacaacagccaaaaagaaatccagtggtatccatcacaataaagagtatgagaggaatgtgattagaaaatcaggttgccaggcaggatgtgtccagttttagccagtggtggggttcatggggaaggcttcgtctcaggaaggtgtgtgttgggttgttctatggccagatggttttcaacgacatagcacgacctgtagctctccaggacccgggcctggacataggccttgtccttctcttgccaggcatcggactcgatgtagacgttgaatgggtcgttcgagtgctccagcttcttggagcggatgtagctcagcatgatgcccagggtgaagaagccgaagaatcccagtaccatgaggacgtag

SEQ ID NO: 4027 - DNA, 466 bp, Homo sapiens
  MAP TO AL035090.10; EXPRESSED IN HELA, SIGNAL = 0.68; EXPRESSED IN ADULT LIVER, SIGNAL = 0.65; EXPRESSED IN HEART, SIGNAL = 0.87; EXPRESSED IN PLACENTA, SIGNAL = 0.83
aagcacatcaatgcaggtttcctttaacgtatttggagacactataaaaaatatcctatattaatattttgtgtttcaatgaagtatgaaattatcaccctcctgtcctccaatgataactgaagatatcatattgcatttaaataaactgcctggagttgttttaggatagcctatcaacatatactcaacatatcctgagacacaaacttaagtttaattaacacatgtcttctcacacagagcttcaggaaaaaaaatggcataaaacgacaagctacacaaaaagaacatgctagtattaaggagatctgttccaaattctatctttattattttaatactcaaaacccttttgatgaatttctaccatgtgctgggtaccgtactcaggtccatgaaatacaaaagtcaaataatacagcttctgttctatacaccagagactaaggaagctttgccatgg

SEQ ID NO: 4028 - DNA, 378 bp, Homo sapiens
  MAP TO AL021917.1; EXPRESSED IN BONE MARROW, SIGNAL = 1.3; EXPRESSED IN LUNG, SIGNAL = 1.5; EXPRESSED IN HELA, SIGNAL = 0.99; EXPRESSED IN HEART, SIGNAL = 0.99; EXPRESSED IN FETAL LIVER, SIGNAL = 2.1; EXPRESSED IN ADULT LIVER, SIGNAL = 1.3; EXPRESSED IN BRAIN, SIGNAL = 1.1
atgcttcctatccctcgtccttcacttcgcttatatctctggtggccagaggaaaggagttctttacttgagcatgtagggtacagcaggaattcttcctaaaggaaaacctgtgtcttactcaagggcctcagagaagctaagttgggaggcagtgcaggcaattgctagtgagcagccaggagtgtctgcagtgcttttgcaagagggactctgcatctgctctagatcctacagagaaatgttctcagaacaaaacctggaggctcacctgcaaccttcagctccaccagggctttttcatagaagtcaccatcttggaaataacacaagtactttccactgtcagaggctgtgacgttgtgtattcggagagca

SEQ ID NO: 4029 - DNA, 377 bp, Homo sapiens
  MAP TO AP000087.1; EXPRESSED IN BT474, SIGNAL = 1.3; EXPRESSED IN HELA, SIGNAL = 1.1; EXPRESSED IN ADULT LIVER, SIGNAL = 0.89; EXPRESSED IN PLACENTA, SIGNAL = 1.3; EXPRESSED IN BONE MARROW, SIGNAL = 1.1; EXPRESSED IN FETAL LIVER, SIGNAL = 1.2; EXPRESSED IN LUNG, SIGNAL =   1; EXPRESSED IN HBL100, SIGNAL =   1; EXPRESSED IN BRAIN, SIGNAL = 1.1; EXPRESSED IN HEART, SIGNAL = 1.2
ttcttgaatatccttcacccagattccccaaatgttaacttttactacatttgctttattcgatgtagtttttctctaccatttgggaacatataaactaaattattttttggtgacttctgcgttttcatttagatttacaatttttttttatccactgttcaggaattgaaccaaagttaaacatccttgaaattgttaaacctgcggacactgttgaggttgttattgatccagatgcccaccatgctgaatcagaagcacatcttgttgaagaagctcaagtgataactcttgatggcacaaaacacatcacaaccatttcagatgaaacttcagaacaagtgacaagatgggctgctgcactggaaggctat

SEQ ID NO: 4030 - DNA, 477 bp, Homo sapiens; identical to SEQ ID NO: 294
  MAP TO AP000056.1; EXPRESSED IN PLACENTA, SIGNAL = 1.2; EXPRESSED IN BT474, SIGNAL = 1.1; EXPRESSED IN LUNG, SIGNAL = 1.6; EXPRESSED IN HELA, SIGNAL = 1.2; EXPRESSED IN ADULT LIVER, SIGNAL = 1.2; EXPRESSED IN BRAIN, SIGNAL = 1.4; EXPRESSED IN BONE MARROW, SIGNAL = 1.1; EXPRESSED IN HBL100, SIGNAL = 0.87; EXPRESSED IN FETAL LIVER, SIGNAL = 1.2; EXPRESSED IN HEART, SIGNAL = 1.4

SEQ ID NO: 4031 - DNA, 471 bp, Homo sapiens
  MAP TO AL021939.1; EXPRESSED IN HEART, SIGNAL = 1.3; EXPRESSED IN ADULT LIVER, SIGNAL = 1.7; EXPRESSED IN FETAL LIVER, SIGNAL = 1.7; EXPRESSED IN LUNG, SIGNAL = 1.4; EXPRESSED IN BRAIN, SIGNAL = 1.4; EXPRESSED IN HELA, SIGNAL = 1.5; EXPRESSED IN HBL100, SIGNAL = 1.5; EXPRESSED IN PLACENTA, SIGNAL = 1.4; EXPRESSED IN BT474, SIGNAL = 1.4; EXPRESSED IN BONE MARROW, SIGNAL = 1.5
agtttcaaagcccttggtccttgcttcagatctgcttatcttctgggaatttccagcgtcctttgcttgggggtgcctgcagctgactatgactccattaatatagggtggattcacccctgagatgtcccagggccaagcctctcacttcaggctttgttcatgagggtttcagtttgtagtgtggggaagatattttgttcctgggtatctacagcaagccttctgaaatgtgtgtaacagtccagaacagtcactgtcagtctctgctgccaagcttgtcggtgcctcgtgtcagcgctgactcacccaaaggccggtgcaaatcatcatcatcacgactctgaggcttctgccaaacaaatcataggctgcttgctcttcggggaagaatcgtaattctgattgcagctggccattcatcaggtgctgggaatctgcctaatcttgtctgttggcctaggatatgcc

SEQ ID NO: 4032 - DNA, 443 bp, Homo sapiens
  MAP TO AC008179.1; EXPRESSED IN PLACENTA, SIGNAL = 0.91; EXPRESSED IN BT474, SIGNAL = 1.3; EXPRESSED IN BONE MARROW, SIGNAL = 0.8; EXPRESSED IN FETAL LIVER, SIGNAL = 1.4; EXPRESSED IN LUNG, SIGNAL = 0.91; EXPRESSED IN HELA, SIGNAL = 0.68; EXPRESSED IN ADULT LIVER, SIGNAL = 1.2; EXPRESSED IN HBL100, SIGNAL = 1.4; EXPRESSED IN HEART, SIGNAL =   1
tcctttaagggaaaaggaaatcaaactgttggttttctatttattcagaagaaaaaataaaggaaagtgtttggaaaatatttctgatattaagtgaattatttctcatctgctacctagagtttacaaacaactgacttatccttgtcaatctgtggaaatgagaaaataaaatcagcgtctggccttcgtgggatactcataacacccgaatgaggtccagagtaatcctagatcgggggatgtcaatgttgagtacttggacttccactctttctccggggcccagtccaaggcttcttctcttctttgtttttgaaagttttgcttctgttacatttcgtatgggaatcagcccagatttccccactcctatatccacaaaaattccaaagagagtggcattctcaactttgcctgtaagaactgtcccaatctgcaga

SEQ ID NO: 4033 - DNA, 475 bp, Homo sapiens
  MAP TO AC007625.2; EXPRESSED IN PLACENTA, SIGNAL = 0.92; EXPRESSED IN BT474, SIGNAL = 0.99; EXPRESSED IN HBL100, SIGNAL = 0.86; EXPRESSED IN LUNG, SIGNAL = 1.3; EXPRESSED IN HELA, SIGNAL = 1.3; EXPRESSED IN ADULT LIVER, SIGNAL = 1.2; EXPRESSED IN BONE MARROW, SIGNAL = 1.2; EXPRESSED IN FETAL LIVER, SIGNAL = 0.97; EXPRESSED IN HEART, SIGNAL = 1.2; EXPRESSED IN BRAIN, SIGNAL = 1.3
cgaagttacagagacgaggcatagaaagacaaaagcttcatgatctaattcaaatgtgaaatataaacaagctaatctcacagaattagagaatagagtggtgattactagaggctacaaaagaaaaggacctttaatgttcttaccacaaagaaatcataaatgcatgaggtgatggttatgctaaatacatgatttgatttttatacaacacatgcatgtattgaatcatcaaactttacttcataaatatataaaattatgatgtgttgattgaaaataaaatttaaaaaataacaaaatggaaaatttcttatttgttgttttgcccattatcttgccaaggcagtcaaataagatcactagtaaagatgatggaatatcagctaatgtcatggtaaataccctcagaaccaagtgtgtgcttgctacttagccaccttcacagattatgggaaacccatggtattttaaa

SEQ ID NO: 4034 - DNA, 461 bp, Homo sapiens
  MAP TO AC008174.1; EXPRESSED IN HEART, SIGNAL = 0.81; EXPRESSED IN ADULT LIVER, SIGNAL = 0.72; EXPRESSED IN BRAIN, SIGNAL = 0.71; EXPRESSED IN HELA, SIGNAL = 0.71
tctgtttcagtggtagcatccttagatttttttgtgcctgtttcaaatgatgctaaaaggtgactatctgatttacaacttctgagcttagggtatgaatatagcaagttggttttattatatttatgtttagagattatagattgtccttttatgtgacatgttttccccacaactgttttttccacatgtgcaggaggaggttttataggtgtggttggtctccttactgacgtgtcaactacaaatgcacagggttctgcctgaaatgttttagttgttgcagatgtgtagcttctatatgtaaagtcttcactgcacgtgctacagaaacttgaactatctgaagagaggatggagtcatcagatactgggtatgtattattttgcaatcttttttcatactttgtgatggctgggtacaatatactggtcactgtagccacaacccaggtcattac

SEQ ID NO: 4035 - DNA, 398 bp, Homo sapiens
  MAP TO AL078476.2; EXPRESSED IN PLACENTA, SIGNAL = 0.92; EXPRESSED IN BT474, SIGNAL = 0.88; EXPRESSED IN LUNG, SIGNAL =   1; EXPRESSED IN HELA, SIGNAL = 0.79; EXPRESSED IN BRAIN, SIGNAL = 0.7; EXPRESSED IN FETAL LIVER, SIGNAL = 0.74; EXPRESSED IN HEART, SIGNAL = 1.3; EXPRESSED IN BONE MARROW, SIGNAL = 0.79; EXPRESSED IN ADULT LIVER, SIGNAL = 1.3
tgactttttagagagggttggcatagaaagataaggagtcaaagaggaaggtaagaaaagagaaaggatgagaaagtaaatatacaagaaaatgtaaccagaggctcaaaaaaaagtaggacagtaaaataaacattttgacctatttatatgactcatcaaaataacttgctatgagattttcatcattaactgacatttagattagagaaaatatacatgaagcaagcctcaccccaggcaatacaacagctccgattccacttttcagctttgacctgcctcggccacctcgccccgacagtcctgcacctcgaggtctccgctttcttggaaatccagacccatggccctatgtaacagattaggaaaagtcaacattctgtgacagcccaaaa

SEQ ID NO: 4036 - DNA, 405 bp, Homo sapiens
  MAP TO AL008710.1; EXPRESSED IN BT474, SIGNAL = 5.1; EXPRESSED IN FETAL LIVER, SIGNAL = 5.8; EXPRESSED IN LUNG, SIGNAL = 5.9; EXPRESSED IN BONE MARROW, SIGNAL = 5.5; EXPRESSED IN HEART, SIGNAL = 4.5; EXPRESSED IN PLACENTA, SIGNAL =  16; EXPRESSED IN ADULT LIVER, SIGNAL = 7.4; EXPRESSED IN BRAIN, SIGNAL = 5.1; EXPRESSED IN HELA, SIGNAL =   6; EXPRESSED IN HBL100, SIGNAL = 4.8
tgcagcagacctgtagcatctaataccttaccattgctcaccaaggcagtaagtttaacttaagagactaatcaaatcacttcaccttgtctgatctcagttccctagctgcaaagtaggagtagaaataatgcctacctaggaaggttgtagtgaggattaaatgagatgataattaatgtaacatatttagcatagtacctaacacataataagtgttcctttatagaacgtgttcttctactttatcccagcctgcatcctgagaacatgtctttctatcattcatgctttcaacccacaaacaactaccaataacaaagtgatacggtttggatctatgtccccaccaaatctcatgtcgaattataatctccaatgcctggtgggaggtgactggatcat

SEQ ID NO: 4037 - DNA, 450 bp, Homo sapiens
  MAP TO AC006344.2; EXPRESSED IN BONE MARROW, SIGNAL = 0.97; EXPRESSED IN BRAIN, SIGNAL = 0.71; EXPRESSED IN PLACENTA, SIGNAL = 0.6; EXPRESSED IN BT474, SIGNAL = 0.66; EXPRESSED IN LUNG, SIGNAL = 0.78; EXPRESSED IN HELA, SIGNAL = 0.69; EXPRESSED IN FETAL LIVER, SIGNAL = 0.69; EXPRESSED IN HEART, SIGNAL = 0.78
tggtttctatgggttaggggtcttgattaattaaacgataatataaaatataaattaactgtatagctgaaccagcattacaatttgggagagaaatactgtccattccacatattattctctaactacacttaaaaaaaattctctataacaatcgtatggaagaaaaaccctcacagacttttagacatcgtagcttcacattaagaaaatttaagtgtaaaatggtaggtagaaaagagatatttttggattacttactcaagttggtcataattaacacacatcagtggaacttctgtactacaacgctggtgaaatttataaccacatgtttgacagcggaaaccctggaaaagcagctttcgacaaaagtcacaaaatgctaaggtgaaaaacgtttttcgtacctgcaaagtaaaaaatcacagagatttcaaaaactcacaa

SEQ ID NO: 4038 - DNA, 461 bp, Homo sapiens
  MAP TO AP000326.1; EXPRESSED IN BONE MARROW, SIGNAL = 0.64; EXPRESSED IN ADULT LIVER, SIGNAL = 0.72; EXPRESSED IN PLACENTA, SIGNAL = 0.68; EXPRESSED IN BT474, SIGNAL = 0.6; EXPRESSED IN HBL100, SIGNAL = 0.67; EXPRESSED IN LUNG, SIGNAL = 0.81; EXPRESSED IN HELA, SIGNAL = 0.64; EXPRESSED IN BRAIN, SIGNAL = 0.81; EXPRESSED IN FETAL LIVER, SIGNAL = 0.77; EXPRESSED IN HEART, SIGNAL = 0.89
ctctggccagggactaaggcgccatgagcatgtgtgctttgtttgggtgttggtgtgctctgactcatgctctcagtggccctcgaaggcaccaggtgaaagaagagggtcagacaaccactagccacagctgtggcagcctcggttcaaaaatgtaaaatctgccatgcaggcagtttcaaagacttaacctatgcccttgtataattattatttttacttcttttatagcaacgttcattttctaacctgaaggtggttcaggtgatgttctaatctgcttttgagtttgaaaatgcatctaccagatgattcatggtggctgccgaggtggtgaataccgaggatcccaaaatgaaaaattacggagggaaacttagaaaagtagtactctctcacagccagagtggtgctggtgaccctccagtccaggctaaaacaggtaagcaaaatatttgcct

SEQ ID NO: 4039 - DNA, 461 bp, Homo sapiens
  MAP TO AC008157.1; EXPRESSED IN ADULT LIVER, SIGNAL = 0.73; EXPRESSED IN LUNG, SIGNAL = 0.67; EXPRESSED IN HEART, SIGNAL = 0.78
  unsure 142
  unsure 219
  unsure 263
  unsure 365
gagtgaccccaagactttgccatttacaacattatctttacggtggtgagaacacttaacgtgagatctaccctcataacagatgtttaagtatacaatacaatattgttaagtataggcacaatgttgtacaccagatctnctagaactcgcttctcttgtgttactgaaactttgtaactgttgacttgcaaatccccattgccccctttccccttnctcctggcagccaacattccactctctgcttctaggtatttggnctattttagatacctcatgtaagaaggatcattgtatttgtctttctctgactggcttatttcacttagcataattcccccaggttcatccatgttgtcacnatattgcaggatttctttctttgttagggtggctattactaaaaaaacaaaaacaaaaaaacaaaacaaaaggcaacaggtgttggtgagcatgtt

SEQ ID NO: 4040 - DNA, 391 bp, Homo sapiens
  MAP TO AC007879.2; EXPRESSED IN PLACENTA, SIGNAL = 0.9; EXPRESSED IN BRAIN, SIGNAL =   1; EXPRESSED IN HEART, SIGNAL = 0.98; EXPRESSED IN BT474, SIGNAL = 0.9; EXPRESSED IN BONE MARROW, SIGNAL =   1; EXPRESSED IN ADULT LIVER, SIGNAL =   1; EXPRESSED IN HELA, SIGNAL = 0.89; EXPRESSED IN LUNG, SIGNAL =   1; EXPRESSED IN FETAL LIVER, SIGNAL = 0.89; EXPRESSED IN HBL100, SIGNAL = 0.99
atgctcagccatgtccttgccttctgcacacggtagtgcattcactgcctgagaattcaaggctaaaacaaaaagaggagcttttgttccaacagataagtacttacctttttcaaaaaatgcataagctgtcctgggtgtttagcagttattcgcacagctttccaaagactcacagcatttaaaagctaactctacagagattcaacagcttcttccagatcccaccacagtggaaaagaactccggtgtcctggctccctgtccagctcttctctctccccttccagctgccagttcagctttaagaagttcattctccacattcagatgcaggcaaatgcgtttgacttgagcatattgatttcaggcaggtgagagtggatgtagc

SEQ ID NO: 4041 - DNA, 398 bp, Homo sapiens
  MAP TO AL021978.1; EXPRESSED IN PLACENTA, SIGNAL = 5.6; EXPRESSED IN BT474, SIGNAL = 4.5; EXPRESSED IN FETAL LIVER, SIGNAL =  18; EXPRESSED IN BONE MARROW, SIGNAL = 4.7; EXPRESSED IN HEART, SIGNAL = 4.6; EXPRESSED IN ADULT LIVER, SIGNAL = 5.7; EXPRESSED IN BRAIN, SIGNAL = 4.9; EXPRESSED IN LUNG, SIGNAL = 6.4; EXPRESSED IN HELA, SIGNAL = 6.1; EXPRESSED IN HBL100, SIGNAL = 6.1
ctccttaggggacagaagggtcaccgcagggcctgaggctgcctctggcatcgctcagctcagtgtcttccagggcagttcccaagttctgcaggccccaggtgcctggaacaaaaaccacacccccctttcatgacgggcacattccacagctgttggcggcaattctgattcacaatatttttatgacagggctttttcttccctacgttattttgcagggcctgaatccagtacctgtcagaatgagattaccctccaggttccaaatccctcagaattaagagccaagccaccttcttcttcctccacctgcaccgactcggccacccgggacatcagtgagggtggggagtcccccgttgttcagtccgatgaggaggaagttcaggtggaca

SEQ ID NO: 4042 - DNA, 454 bp, Homo sapiens
  MAP TO AL009172.1; EXPRESSED IN PLACENTA, SIGNAL = 1.8; EXPRESSED IN HBL100, SIGNAL = 2.2; EXPRESSED IN HELA, SIGNAL = 1.9; EXPRESSED IN BT474, SIGNAL = 1.9; EXPRESSED IN FETAL LIVER, SIGNAL = 1.9; EXPRESSED IN LUNG, SIGNAL = 2.2; EXPRESSED IN BONE MARROW, SIGNAL = 2.5; EXPRESSED IN HEART, SIGNAL = 2.3; EXPRESSED IN ADULT LIVER, SIGNAL = 2.1; EXPRESSED IN BRAIN, SIGNAL = 1.9
ctttctgcctgatcacctgcattcttccatccctgcttagtctacctcattcctctatcctctatgcctgatcacccgctatttgtcctctcttctctgaattcctctcttcctcctgcctgatcactccccatccctctcctctctgtcctccatctccctattgttcccctgtgcctgatcattccccagggcttcgctccttcataactcatcctcctttgttcttcaccatagatgtcaaaggatgaggtgggtggttgtccgctcgtgcacaatgtctttgagttcacgggtaatttttgttgcctccccaaatgcctgtgcaaccaccactacagctgggagaagctgaggcgtgccgtggacctggagtgcatgcaggctgttaggtgccatgccgagggggctgagggatggggtaggatcctggactccctctcgcatattcagg

SEQ ID NO: 4043 - DNA, 450 bp, Homo sapiens
  MAP TO AP000150.1; EXPRESSED IN PLACENTA, SIGNAL =   1; EXPRESSED IN LUNG, SIGNAL = 0.72; EXPRESSED IN HEART, SIGNAL = 0.94; EXPRESSED IN BT474, SIGNAL = 1.3; EXPRESSED IN FETAL LIVER, SIGNAL = 0.62; EXPRESSED IN HELA, SIGNAL = 0.61; EXPRESSED IN BRAIN, SIGNAL = 1.2
taagatgcccttgatgatcctctatttaaaggagacatgtaaacaggttaacttagagtagagatggtgaatatgtgaacctgaggaaaggaagaaatagattaaattatctggagagaggaaaagtcagcagaatggggacgagaatctttcggagctcagtgttctgataggagttatttccttgggcataggttccaagtatttttctaatataccatagaagccaggaaaactttcttctgttatctcaaatgatttaattactgacttgagtttgtgttgtctccttagacttgtgcaccatggacaattttgctgagggagatttcactgtggcggattatgccttgttagaagattgccctcacgtggatgattgtgtctttgctgctgaatttatgagcaatgattatgttcgtgtgactcagctttactgtgatggggtgg

SEQ ID NO: 4044 - DNA, 461 bp, Homo sapiens
  MAP TO AC007314.3; EXPRESSED IN BT474, SIGNAL = 1.3; EXPRESSED IN BONE MARROW, SIGNAL = 1.2; EXPRESSED IN HBL100, SIGNAL = 2.2; EXPRESSED IN LUNG, SIGNAL = 0.93; EXPRESSED IN HEART, SIGNAL = 0.88; EXPRESSED IN PLACENTA, SIGNAL =   1; EXPRESSED IN FETAL LIVER, SIGNAL = 1.1; EXPRESSED IN HELA, SIGNAL = 1.2; EXPRESSED IN ADULT LIVER, SIGNAL = 0.95; EXPRESSED IN BRAIN, SIGNAL = 0.82
acttcaatagcgacgctcccctcaggcctcctgggtgcttccctcacatcacctcctgcacggccttacctcccctgcttccctcgtcccctccaccctctgcacctccatcatccaaagacagaaatgtcatctttagggcaatgtgccagagaggaaaagcaagggcttggttacatgtcaactgtgcgctcaggcagtgctactcacttcatcagtttctgctttgtggcagaatctttgaagcttctaaattcttctcctgctttgatctcataaaactggggctttaggactgtctgctggtcctccttgagtcgttcctgccgcttcactttttcctcctgctggaggagtctgcgttgcttcctgacctcttcaacccaggctttttcatcatctgaactctccgaactttctgcatcacttggttttccttccggctcttcctcctcttcctg

SEQ ID NO: 4045 - DNA, 422 bp, Homo sapiens
  MAP TO AL022308.1; EXPRESSED IN FETAL LIVER, SIGNAL = 8.5; EXPRESSED IN ADULT LIVER, SIGNAL = 9.6; EXPRESSED IN BONE MARROW, SIGNAL = 8.5; EXPRESSED IN HELA, SIGNAL = 8.4; EXPRESSED IN HBL100, SIGNAL = 8.4; EXPRESSED IN BRAIN, SIGNAL = 7.4; EXPRESSED IN LUNG, SIGNAL = 8.7; EXPRESSED IN PLACENTA, SIGNAL = 9.4; EXPRESSED IN HEART, SIGNAL = 7.2; EXPRESSED IN BT474, SIGNAL = 7.7
atcatgccttcttccacctgctttgttcttgccattctggcagccgattgaatggtgtccacccacactgggttgaatcttgatcctccagtccactgactcaaatgtcaatctcctctggcaacaccctcacagacacacccaggaacagtgcttcaccagccatctgggcatcctcaagccagtcaagttgacttgtaatattaaccattgttgggatgatcagacccaacaccaggtcgtgggggcgacaaagtccagtggagtcaaaggaatgagaaaaagacagtttgagagaagaagtgggaccaggggggccatcgtgagtgtggaggctgtgaaggcccagagctctgggagcccacgctatttattggtgctcaaacaaacaaacaaacaggtggtgaggatgtaggggttga

SEQ ID NO: 4046 - DNA, 467 bp, Homo sapiens
  MAP TO AC007784.7; EXPRESSED IN BRAIN, SIGNAL = 1.3; EXPRESSED IN HEART, SIGNAL = 1.2; EXPRESSED IN PLACENTA, SIGNAL = 0.82; EXPRESSED IN HBL100, SIGNAL = 0.82; EXPRESSED IN FETAL LIVER, SIGNAL = 0.95; EXPRESSED IN HELA, SIGNAL =   1; EXPRESSED IN ADULT LIVER, SIGNAL = 1.1; EXPRESSED IN BT474, SIGNAL =   1; EXPRESSED IN BONE MARROW, SIGNAL = 1.1; EXPRESSED IN LUNG, SIGNAL = 1.1
tccactgaattccatttaaacctataatggtcattgtaaggcattgtttagtgcatatctatagatgtgccaccaatgcaatgaggttcacaccatctaactgccaatttggaattttattcttaacctcatggttaagactgtcagcagtctgcttaataagtctaaatttaaatgttctcacctactgtacaaatgtggccacacaacctttctaatgaaaaaaaaaatgcagtttacaaagctttttaaagtgaaatttaccatggtgctggcaaaaggtgtcagactggcaactgcaaaattgaatcctctatttagccttagaatggtgaattataggtatcttacaaatgctgcctgcaccatcaccattatgatcaccatcgtcaacaccaaagccacaaaaagcccaagaggtgctcagacccagaagaagctactgaagaagccaatcaaattcaaaa

SEQ ID NO: 4047 - DNA, 490 bp, Homo sapiens
  MAP TO AC005674.9; EXPRESSED IN HBL100, SIGNAL = 0.96; EXPRESSED IN BRAIN, SIGNAL = 1.3; EXPRESSED IN PLACENTA, SIGNAL = 1.1; EXPRESSED IN BT474, SIGNAL = 0.82; EXPRESSED IN BONE MARROW, SIGNAL = 1.2; EXPRESSED IN FETAL LIVER, SIGNAL = 1.1; EXPRESSED IN LUNG, SIGNAL = 1.2; EXPRESSED IN HELA, SIGNAL =   1; EXPRESSED IN ADULT LIVER, SIGNAL = 1.1; EXPRESSED IN HEART, SIGNAL = 1.1
ggcaattccagaggacaggcccagctgtggtccacagccagtaatgctcccagcagctataagtcaagcttgtcagttctgggccatgcaccaccattcactgcaggtgacgcaggtgtgggggaagccctaggacagtggccgtcaaatagctctacattagagtcacctggagagcttgaacaaccccagcacctaagccgcacccccagaccaattaaccccaaatctctgagagtaaggaatgagtatcagtagtttgtaaaaactctccaagtgattccaatgggcagccaagttcaagaatcactacccgggggatgtgtgtgagatgaatgagaggagggcttgcctcaaaaccttggataagtatcccgagaagctggaggagaaccagggagagtgtgtcatggaaggtaaggggtgggggggtggtgtttagaaagaaataagtggccacctacagcaagaacatacatgcctgagtggg

SEQ ID NO: 4048 - DNA, 447 bp, Homo sapiens
  MAP TO AL024509.1; EXPRESSED IN PLACENTA, SIGNAL = 5.9; EXPRESSED IN HBL100, SIGNAL =  11; EXPRESSED IN HELA, SIGNAL = 5.8; EXPRESSED IN BT474, SIGNAL =   4; EXPRESSED IN LUNG, SIGNAL = 5.6; EXPRESSED IN HEART, SIGNAL =   2; EXPRESSED IN ADULT LIVER, SIGNAL = 2.9; EXPRESSED IN FETAL LIVER, SIGNAL =   4; EXPRESSED IN BRAIN, SIGNAL = 2.3; EXPRESSED IN BONE MARROW, SIGNAL =   4
cctgaacaagaagggtttcctatttaagctgcagtaacttttctaactatggataattgttccttttatggcagatttttccagttcctctaatgcatttgagacgactgtctcaaagtaacctgctgctttcctggtaactcctcactttaactcctgctaggaactgaagcccttttttgctgctttttagaaccttctgttattatatccaccacttttaccaccagatccataatcaccaccatagggactgcccgagcttcttccacccagaaagcctcctttcatgggtccataatttgattgctgttgtccactataatttccaaaatcactatacttcccaccaccatcatagttaccactgtcaaaatttcctccttcattgcaaccatcacatcctccaccattgccaccatatccaccaccttggttttcatgtcc

SEQ ID NO: 4049 - DNA, 485 bp, Homo sapiens
  MAP TO Z85987.13; EXPRESSED IN FETAL LIVER, SIGNAL = 0.86; EXPRESSED IN HELA, SIGNAL = 0.6; EXPRESSED IN ADULT LIVER, SIGNAL = 0.83; EXPRESSED IN LUNG, SIGNAL = 0.91; EXPRESSED IN HEART, SIGNAL = 1.2
aggatgtttgcaagggagtgattacaatgatgaataatgaaatctaagctgagtgtattagttttgtattgccacataaccaattactacaaatttaacagctgtaaaaaaacacatattgtctcccagtttccatgggttagaaatccaggcacagcttaactagattctctgctcagggtcacacaggctgcaatcaggatgttgtccaggaccacagcgtcatatgaggtttaggtcctctttcaaacttacatggttgttggcagaatttaattctttgtggttgtagaactaaggccctcagaccctaggggctgcctaccatgtggccatctccataggtagtacacaatagcatagcagcttcttgcttcttcaaggccatcagtttgagttctttgcatgctagcaagatggagccatagctatatctagagagagacagagagagaggtaggggcagggcaaatcagaggagtgaa

SEQ ID NO: 4050 - DNA, 416 bp, Homo sapiens
  MAP TO AL022344.1; EXPRESSED IN BONE MARROW, SIGNAL = 4.7; EXPRESSED IN BRAIN, SIGNAL =   5; EXPRESSED IN HELA, SIGNAL = 5.9; EXPRESSED IN HEART, SIGNAL = 3.5; EXPRESSED IN PLACENTA, SIGNAL = 8.7; EXPRESSED IN HBL100, SIGNAL = 4.8; EXPRESSED IN BT474, SIGNAL = 5.4; EXPRESSED IN FETAL LIVER, SIGNAL = 4.3; EXPRESSED IN ADULT LIVER, SIGNAL = 8.2; EXPRESSED IN LUNG, SIGNAL =   7
tgaggtcgctaacaactagggtaagaattaatcttttatttgtaaaattgtggaaaaggaaaaataaattattgctagttttgcttttgtacctcaaactgcaaaagctacagccacagtgtgtggtaagtgctaaggtagggtttggtattatccatggtttaagagatccacggaggtcttccaaagtacgccccacaggtaaagggggagtactgcagtcttttaatgctaattccaatatctggatgatgtatttattctattgactgcatgctttaatatcattataagcttgatgatttaaacatcaggtgtgcacctgctcattgcagtcatcatcatcatcatcatcatcatcatcattatttttgtttgtttgggtttttttgagatgaatcttgctttatggccca

SEQ ID NO: 4051 - DNA, 404 bp, Homo sapiens
  MAP TO AL030998.1; EXPRESSED IN BONE MARROW, SIGNAL = 5.4; EXPRESSED IN LUNG, SIGNAL = 5.8; EXPRESSED IN BRAIN, SIGNAL = 4.9; EXPRESSED IN HELA, SIGNAL = 6.2; EXPRESSED IN HEART, SIGNAL = 4.6; EXPRESSED IN PLACENTA, SIGNAL = 5.5; EXPRESSED IN HBL100, SIGNAL = 5.8; EXPRESSED IN ADULT LIVER, SIGNAL = 7.7; EXPRESSED IN BT474, SIGNAL = 6.9; EXPRESSED IN FETAL LIVER, SIGNAL = 6.3
ccattaattccttgattctaaggcttactttcttttttcacattttcacatatctgaaataaatatacagtagcttcaccaaactatagaagcatagctcccacccatacatcttacaaacactgtatatatttcattattcttttttaaagtcaaacagttgttattaaataagtaagcattgtgggtatgagattagaaaacagcaaatatggaattctctttaggactctaaaaatgttacggcaaactccagatgaaatgctggcttctgactcaactagccttcttcccaggaaatctgccactgagtatgtacagctcggagcaatcaggagctggctgctaccacaccctgggaaaggggcctcaagaggctacttcctgacctcaagagtgctccc

SEQ ID NO: 4052 - DNA, 458 bp, Homo sapiens
  MAP TO AL022324.1; EXPRESSED IN HELA, SIGNAL = 2.5; EXPRESSED IN PLACENTA, SIGNAL = 2.1; EXPRESSED IN HBL100, SIGNAL = 2.2; EXPRESSED IN HEART, SIGNAL = 1.9; EXPRESSED IN BT474, SIGNAL = 1.7; EXPRESSED IN ADULT LIVER, SIGNAL = 2.2; EXPRESSED IN FETAL LIVER, SIGNAL = 2.3; EXPRESSED IN LUNG, SIGNAL = 2.4; EXPRESSED IN BONE MARROW, SIGNAL = 2.3; EXPRESSED IN BRAIN, SIGNAL = 2.2
cagagtaaggccgagtcagggctacagagtccgatggccacccctcccctgaacggctaggaggagggagggcagctggcaaaggcctgcaggagcccagagcgtgttcttccaagtggagcctctgctgtgggagccccagccacggggtcagacagaaaaggggtcccgcccaagctcagccctcagcagcccttgacctcaggcagtttgactcccttcaatgggcttcagtttcctcctctgtacaggggggtgataacagtctctccccacaggttggttttggggattaaatgagaatgcctagggagtgccaggcccacggggaccctcacctacccacagccattgctgttatctcctgggttcttgcctgggcctgtgggtgacacactgtgtgatcctgggcaagtgcctttccctccctgggcccagcctttgctctggtcaaggaa

SEQ ID NO: 4053 - DNA, 400 bp, Homo sapiens
  MAP TO AC007597.2; EXPRESSED IN HEART, SIGNAL = 1.4; EXPRESSED IN FETAL LIVER, SIGNAL = 1.2; EXPRESSED IN BRAIN, SIGNAL = 1.3; EXPRESSED IN BT474, SIGNAL = 1.5; EXPRESSED IN BONE MARROW, SIGNAL = 1.4; EXPRESSED IN HBL100, SIGNAL = 1.2; EXPRESSED IN HELA, SIGNAL = 1.3; EXPRESSED IN ADULT LIVER, SIGNAL = 1.1; EXPRESSED IN PLACENTA, SIGNAL = 1.2; EXPRESSED IN LUNG, SIGNAL = 1.4
cttacaaacagtctcccgccattcccgcaccatgggactttagtgttgtgtgtaacaacagtataacctgctgttagcccattatcaactgactgctatgctaaaccaaaattataataatattgcttgtagaagttagaatataatttattccccctctccttgataatttagcaaaaatccaatataatttcttcttttctgcttttagttacatcccagggaagatgcttgcatccccaatacaaactatggtgttctcttaatagaattttttgaattatatggacgacacttcaattatttaaagactggcatccggataaaggatggtggttcatatgtggccaaagatgaagtacagaaaaatatgctagatggctacaggccatcaatgctt

SEQ ID NO: 4054 - DNA, 395 bp, Homo sapiens
  MAP TO AL034408.2; EXPRESSED IN HELA, SIGNAL = 4.3; EXPRESSED IN HEART, SIGNAL = 3.7; EXPRESSED IN FETAL LIVER, SIGNAL = 4.4; EXPRESSED IN BT474, SIGNAL = 3.7; EXPRESSED IN BONE MARROW, SIGNAL =   5; EXPRESSED IN PLACENTA, SIGNAL = 4.3; EXPRESSED IN HBL100, SIGNAL = 4.4; EXPRESSED IN ADULT LIVER, SIGNAL = 4.4; EXPRESSED IN BRAIN, SIGNAL = 3.9; EXPRESSED IN LUNG, SIGNAL = 3.8
tgcaaaggccttgtacatccattattttactggatcctcatgactgctctaaaaagtaggcattattatccctattttacagatgagatatcttagggttctgagagatctctgtgcaaacattgagtgctttatgcttcaaaagttctttttattattgttatctcctcccctttcttgactgctatgccaaattcagggtggtaggtacattctttttgcactgaccaccttctccctgttcagtgtcttctcacaaagtaaattcaccttagatcttcccgatccttctggcagttaccaaggaagtttccaaactggcaggagaaaacatggtcatgaatctccagcaggaagttttcattaaactcaaaggcacagggaaactgttccat

SEQ ID NO: 4055 - DNA, 438 bp, Homo sapiens
  MAP TO AL031678.2; EXPRESSED IN BONE MARROW, SIGNAL =   1; EXPRESSED IN HBL100, SIGNAL =   1; EXPRESSED IN HEART, SIGNAL = 0.97; EXPRESSED IN BT474, SIGNAL = 0.92
gtgatgttcagtcacggtgctgtcaccctagctgtgtagttgagacagggacacagctggagatgggctgggttgacagccacctgtgccctgcagcaaacttccactggcacaacagctgcccgtgatggttttgttccctccggaaacagtcctgggaggtggatgttaggtgctagggagcaatcctatcattcaggcagaactggctgccagtgcgggggaggtgaggacttttctcctctccagcctcagagccatcctcccacaatagaacctctcgcggcactgccccgccagcgtccctcctaccttctgggtacttgtacttgtccgtgacgtccatgcgagcattgctgcccaccgccttggtgctgatgtacctgccaatggtgtgactgttcacggaattcttccactgtttgccagtggtgttgt

SEQ ID NO: 4056 - DNA, 372 bp, Homo sapiens
  MAP TO AL034418.2; EXPRESSED IN BT474, SIGNAL = 3.1; EXPRESSED IN BONE MARROW, SIGNAL = 2.6; EXPRESSED IN LUNG, SIGNAL = 2.4; EXPRESSED IN BRAIN, SIGNAL = 2.2; EXPRESSED IN HELA, SIGNAL = 2.1; EXPRESSED IN HEART, SIGNAL =   2; EXPRESSED IN FETAL LIVER, SIGNAL = 2.5; EXPRESSED IN ADULT LIVER, SIGNAL = 2.5; EXPRESSED IN PLACENTA, SIGNAL = 2.1; EXPRESSED IN HBL100, SIGNAL = 2.3
catcataattttactgacatccaaaataattataaagaaatgagagctaaagatttaactttctttaaataaacctaaaatggaagaatttttatatcacattatctaacaccgaaaaatgatgaaatatgagctgaaatatacagaaaacaaattacctcttcacttgtctctgtcttaattttagggtctttctcttgacttgagctaggaatggtggagctggtgcactgactcattttattatccactccttccacttggggctgtagttctttagagagtgcatcactaggatcatccctgtccagcaggtatctaagaagtgcattattctccttcttcttaggacttagctgctcctgcttgaca

SEQ ID NO: 4057 - DNA, 494 bp, Homo sapiens
  MAP TO AC007590.1; EXPRESSED IN PLACENTA, SIGNAL = 1.2; EXPRESSED IN HBL100, SIGNAL = 0.76; EXPRESSED IN FETAL LIVER, SIGNAL = 0.75; EXPRESSED IN HELA, SIGNAL = 0.87; EXPRESSED IN BT474, SIGNAL = 0.69; EXPRESSED IN BONE MARROW, SIGNAL = 0.8; EXPRESSED IN LUNG, SIGNAL = 0.82; EXPRESSED IN ADULT LIVER, SIGNAL = 0.91; EXPRESSED IN BRAIN, SIGNAL = 1.1; EXPRESSED IN HEART, SIGNAL = 1.2
gagctagactcattttgggggaagagtaacttccagattgagcccaagcttagaatagaatgccttgggtaaaaaatatggggatccatatgcttccctgtaacactgtgaggcatcctccctgatttaactcgagaatattgctgttaactatttcatacacgtgtttggatggggcaacaacgctcttagctggaatggaatcttaagatcctggtagggatcttaaaagtgatccgttgatttctctatttttaggtaaaagacatcatttatgttctttagggtctgcaactcccaatggaatgttggagaccatagcacattccatcatcccagtaccttcgatggttcctttccatttggccatagcattttctccttttccttttcctcttgcatttttcgcttctgccctcttctgcaatcccagcttcctcttcccagctgagaccgacacaagagaacaataaggctgtccctactgactgtga

SEQ ID NO: 4058 - DNA, 351 bp, Homo sapiens
  MAP TO AL035662.23; EXPRESSED IN HBL100, SIGNAL =   1; EXPRESSED IN HELA, SIGNAL =   1; EXPRESSED IN HEART, SIGNAL = 1.3; EXPRESSED IN BT474, SIGNAL = 1.2; EXPRESSED IN BONE MARROW, SIGNAL = 1.1; EXPRESSED IN BRAIN, SIGNAL =   1
ggcgaagatctacctccttggacttgtctggcccttttaggatcaggtcttgagaaagcagaagtcttggagtttagttgccccgacccatgtctagaaagcatcccacgttttagtttctcctttgcaatatggggatagaaattgtaccaaaccacaggatttctgcaaggatacttaaaataatgaatgtagatgctccacgtgcatgctgtgtgctctgtggtgagggggtggggatggcagtggtgatgacagtgttgttgggggccagggatgtgatggtaatattggtgattatgatgggggtaatagtagtaataggtgggctggtgattgtggttgtggtga

SEQ ID NO: 4059 - DNA, 360 bp, Homo sapiens
  MAP TO AL031769.1; EXPRESSED IN BT474, SIGNAL = 1.2; EXPRESSED IN ADULT LIVER, SIGNAL = 1.6; EXPRESSED IN FETAL LIVER, SIGNAL = 1.2; EXPRESSED IN BONE MARROW, SIGNAL = 1.3; EXPRESSED IN BRAIN, SIGNAL = 1.3; EXPRESSED IN HBL100, SIGNAL = 1.2; EXPRESSED IN HELA, SIGNAL = 1.3; EXPRESSED IN HEART, SIGNAL = 1.1
ggaatgataaccctggcaactgacagtatcaagatcccaggcctgggatagcaactccttcttcctctcatgggagcatctagcaacaaagtaaggaactagaagtggggatgatctgggaagacaggaataaaattgccttccctatcaagtgtacactgtaaacattctcttcccccacaagccattgggcttacctcctgcttctctatctgtttctcctgactacatctttctgccttaaactcaaaagcagaaaagatttcaaatgatacaggtcctacagaaacggtcctgattagctttcctaggatataggaaaccatgctgaccatgcttggcagatgtccccacttctct

SEQ ID NO: 4060 - DNA, 435 bp, Homo sapiens
  MAP TO AL035704.9; EXPRESSED IN PLACENTA, SIGNAL = 3.2; EXPRESSED IN HBL100, SIGNAL =   3; EXPRESSED IN BT474, SIGNAL = 3.2; EXPRESSED IN BONE MARROW, SIGNAL = 3.7; EXPRESSED IN LUNG, SIGNAL = 4.2; EXPRESSED IN HELA, SIGNAL =   4; EXPRESSED IN HEART, SIGNAL = 3.5; EXPRESSED IN ADULT LIVER, SIGNAL = 3.6; EXPRESSED IN FETAL LIVER, SIGNAL = 4.1; EXPRESSED IN BRAIN, SIGNAL = 3.5
tgggaggtttagggctaaggttctttccagaagggattccttcctgaccttttacccctgtgatgtaacattgggaactcactggacttcagtcctctctggacttcggtctcctcttctataaaactgtcaagacttcataataggccctggcagattagaccccagccatgattctcttcagtatccttacctcctaggtctcccttgccctcccatcccttacccctccacaggaccctagagatcacccagctgacctgtacatggtgtactcattgggggccccagaagccgggtctgagccattcttcttcccaaagttccctgtccagagcacagtatcattgtggatgacaactgcagacatggcagccacgcctggggcagacattgcctggcgcaggatctggtccaccttgagggaaaagaacg

SEQ ID NO: 4061 - DNA, 415 bp, Homo sapiens
  MAP TO AL049539.19; EXPRESSED IN PLACENTA, SIGNAL = 5.1; EXPRESSED IN HEART, SIGNAL = 6.2; EXPRESSED IN FETAL LIVER, SIGNAL = 5.2; EXPRESSED IN BT474, SIGNAL = 5.1; EXPRESSED IN BRAIN, SIGNAL = 5.2; EXPRESSED IN BONE MARROW, SIGNAL =   5; EXPRESSED IN LUNG, SIGNAL =   5; EXPRESSED IN HELA, SIGNAL = 5.6; EXPRESSED IN HBL100, SIGNAL = 4.8; EXPRESSED IN ADULT LIVER, SIGNAL = 5.1
tgacctctgggattccactcttcggagttgcagttaactggggtatcagctgaatcaacgaggaggattctagagtgaacttccacaccataccccaggcccctaagcccactcctccttgtttagccatctgtcctcaggatggatgtcccttgcttccacagggaggccacgtatcagggaaattgcaggtctgcaggggcagatgttggcagctcttgcccttgcctgttcccccaccttagcagagccaaccctcactactccccagccttccccgactctgctctgttcaaccctgcaggggccaagttccccatcaagtggacagctcctgaagccatcaactttggctccttcaccatcaagtcagacgtctggtcctttggtatcctgctgatggagatcgtcacct

SEQ ID NO: 4062 - DNA, 454 bp, Homo sapiens
  MAP TO AL022241.2; EXPRESSED IN BRAIN, SIGNAL =  17; EXPRESSED IN BONE MARROW, SIGNAL =  18; EXPRESSED IN HBL100, SIGNAL =  18; EXPRESSED IN HEART, SIGNAL =  13; EXPRESSED IN PLACENTA, SIGNAL =  17; EXPRESSED IN FETAL LIVER, SIGNAL =  20; EXPRESSED IN LUNG, SIGNAL =  19; EXPRESSED IN HELA, SIGNAL =  18; EXPRESSED IN ADULT LIVER, SIGNAL =  17; EXPRESSED IN BT474, SIGNAL =  16
ccaaccccactaatctgactgtcaaaacaataaacaaaaacccaacaaataaaaaacgaatttcactgtatttagcatatatcatttcatctatcttgtttactaaccttagtttctgtgtctgtaaaattgatctaatataattggcctaaataatttagtataatccaagactgacgacataattccaagacaacacattcattactggaattgctttgatgttataaaagctaagagtaaaagataagaatgggccaacttctcaaaccaacttctaagctttcctgaaattaccaattttccttgtaatctgagatgaagaaacatagcatatcatcagtcataataactgatggaaaaggcctggagacttgggagtaaatgctcaaggataacgacatagcattctcccgcaggtcagcagggggtgtcacatcaccagcctttgtgt

SEQ ID NO: 4063 - DNA, 427 bp, Homo sapiens
  MAP TO AL035460.13; EXPRESSED IN LUNG, SIGNAL = 0.99; EXPRESSED IN HELA, SIGNAL = 0.96; EXPRESSED IN PLACENTA, SIGNAL = 0.93; EXPRESSED IN HEART, SIGNAL = 1.4; EXPRESSED IN BT474, SIGNAL =   1; EXPRESSED IN FETAL LIVER, SIGNAL =   1; EXPRESSED IN BONE MARROW, SIGNAL = 0.99
tgagagcatccagaatggtgaccatcccaggctgggaggccagggcagagggggccagagggacctccctggaccccagcagagctccctgctctccgtcctccaagaagagcaggttagccagcatgaggcactggtgagatgtggacagagcaggcccctgtagcccagctgctccacaagggcccttccttcctgccacagtgaggcagggtggatcactcacctggaagcccctctccgtgggctctggggcaggcctggggtggggagcttggggggcgcagcacgggggcgaaggcgctcctctgtttgacggcggagatcatgttgacaggcgagaaggagaacacgctggtggtgggggcagcggccgggagggacatggaggaggcagccgccagcggggggctagagggcatgactc

SEQ ID NO: 4064 - DNA, 349 bp, Homo sapiens
  MAP TO AL022313.1; EXPRESSED IN PLACENTA, SIGNAL = 5.8; EXPRESSED IN ADULT LIVER, SIGNAL = 5.2; EXPRESSED IN LUNG, SIGNAL = 5.6; EXPRESSED IN BRAIN, SIGNAL = 5.5; EXPRESSED IN BONE MARROW, SIGNAL = 5.1; EXPRESSED IN HBL100, SIGNAL = 6.8; EXPRESSED IN HELA, SIGNAL = 6.1; EXPRESSED IN HEART, SIGNAL = 6.2; EXPRESSED IN BT474, SIGNAL = 5.4; EXPRESSED IN FETAL LIVER, SIGNAL = 5.9
aatgtaggtggcagacgagccaggcacgaggtttcagattggaagggaccaagatgaggaccaaggtgtggctgcctgactaggaacgctgtgggctggcccaggctctcgccacacatcctgggagaactgccataggccctagaaggagggatgaaaggcgtatgggagggaagacagcggtccccggatcagcagcagcaccaccatcctctgatggcccctgggcagtccgccagctcggaagcactcagggctggagcctgggctctaagcatgggccccaggagccagacaggagggaggcagcaggaagggctggcatggaagggctgagttctattggggt

SEQ ID NO: 4065 - DNA, 429 bp, Homo sapiens
  MAP TO AL035530.11; EXPRESSED IN FETAL LIVER, SIGNAL = 1.4; EXPRESSED IN BT474, SIGNAL = 1.4; EXPRESSED IN ADULT LIVER, SIGNAL = 1.2; EXPRESSED IN BONE MARROW, SIGNAL = 1.1; EXPRESSED IN LUNG, SIGNAL = 1.3; EXPRESSED IN BRAIN, SIGNAL = 1.1; EXPRESSED IN HBL100, SIGNAL = 1.2; EXPRESSED IN PLACENTA, SIGNAL = 1.6; EXPRESSED IN HELA, SIGNAL = 1.4; EXPRESSED IN HEART, SIGNAL = 1.3
gggctgtgttattggtgtcccaattacaaaggccagtttcttagctcctcaagaccttgtggttaaccagtctcactctgtgtcagttgccactggaagtgtctgaatgagcatttcacaatattacttgtgaaaatgcaccttcctcattttaaaggaagtctggtttcggcagaaactctcagcttgctacactgaagaccattagcctttttgaaaactaacatcccttcactttattccagggttgcagataagctcccccggcccaacctcctgctactcaagcacttggtctatgtgctgcacctcatcagcaagaactctgaggtgaacaggatggactccagcaatctggccatctgcattggacccaacatgctcaccctggagaatgaccagagcctgtcatttgaagcccagaaggac

SEQ ID NO: 4066 - DNA, 451 bp, Homo sapiens
  MAP TO AL022316.2; EXPRESSED IN BONE MARROW, SIGNAL = 4.1; EXPRESSED IN HBL100, SIGNAL = 4.2; EXPRESSED IN PLACENTA, SIGNAL = 3.7; EXPRESSED IN LUNG, SIGNAL = 4.1; EXPRESSED IN HEART, SIGNAL = 3.4; EXPRESSED IN HELA, SIGNAL = 3.9; EXPRESSED IN ADULT LIVER, SIGNAL = 4.1; EXPRESSED IN BT474, SIGNAL =   3; EXPRESSED IN FETAL LIVER, SIGNAL =   4; EXPRESSED IN BRAIN, SIGNAL = 4.2
acacccctgtctgactgaccatgtggacactgtgcccagtgatagttacagtggctcatagtgcatgggcacagctgggtcccaggcagctctctcagtacattctaccctcactgaacatctatgaggtgggtactgttaggttgctcaatctgcacacaaggagattcagacacagagaagtcagacacctcggccagggctgcacagtggctaagggacagagcaggaactcaaacgcaccagtcctcttaaccagcaggccagctgccaccaggagatggctgggattccacagcaggtggctcacttccatgtcccatttgcccccccacttcaccagtgatgggagggtcagatggagcaagaagccaggcttggtgccccagcgcctgtgtacctgggagagggggctctgcttggcggtgggtgagctgccatcctcattctc

SEQ ID NO: 4067 - DNA, 369 bp, Homo sapiens
  MAP TO AL078623.24; EXPRESSED IN PLACENTA, SIGNAL = 1.9; EXPRESSED IN ADULT LIVER, SIGNAL =   2; EXPRESSED IN HBL100, SIGNAL = 1.8; EXPRESSED IN HELA, SIGNAL = 2.2; EXPRESSED IN HEART, SIGNAL =   2; EXPRESSED IN FETAL LIVER, SIGNAL =   2; EXPRESSED IN BT474, SIGNAL = 1.9; EXPRESSED IN BRAIN, SIGNAL = 2.3; EXPRESSED IN LUNG, SIGNAL = 2.2; EXPRESSED IN BONE MARROW, SIGNAL = 1.7
tccttctcacccatctcaccaccatctgcccaggggagccacatgtcccaaattttggagagaaaataattgaggctcatttccaggacagaggggcaagctgggtctaaagagccaagcagaaaggcttcccaaaatcgctaggttgggaggggtcagagacgtgtggctgccccagctgttctgactctgccccagcttttggctccacccccttaaagcaccttcagaggttcccatggcgacagtaaacaagtctccactgccttggccatgtgctgtgttcaccccactcctgatcttgttggctgctcaggggctgacagcccagatgtgcagctgtgatgagcagaaacagggaggaatgga

SEQ ID NO: 4068 - DNA, 365 bp, Homo sapiens
  MAP TO AL035633.15; EXPRESSED IN PLACENTA, SIGNAL = 2.9; EXPRESSED IN ADULT LIVER, SIGNAL = 1.8; EXPRESSED IN BONE MARROW, SIGNAL = 1.9; EXPRESSED IN HELA, SIGNAL = 2.5; EXPRESSED IN HBL100, SIGNAL =   2; EXPRESSED IN HEART, SIGNAL = 2.1; EXPRESSED IN BT474, SIGNAL = 2.2; EXPRESSED IN FETAL LIVER, SIGNAL = 2.4; EXPRESSED IN BRAIN, SIGNAL = 2.3; EXPRESSED IN LUNG, SIGNAL = 2.6
tgcaggtggtggtgtgatactaaagtatttgtaggtatagatccactactcaactgcattttctccctaaaaatgtgtctggattatttcaaaataaattagatttagaatttcagtgatgctgacctgtaatttatggatgcatatatgtttttactttgtaaatatagttcatttacccccaaaatgcaaggcagacggatggggacttcaggaagatccatcatgaagagcaccagtgtcagtggagagatgtacacactggagcataatgacggcagccagtcagacacagctgtgggtacagttggagcaggtggaaagaaacggagatccagccttagtgccaaagtggttgccatagt

SEQ ID NO: 4069 - DNA, 356 bp, Homo sapiens
  MAP TO AL078638.6; EXPRESSED IN LUNG, SIGNAL = 1.4; EXPRESSED IN HBL100, SIGNAL = 0.95; EXPRESSED IN PLACENTA, SIGNAL = 1.1; EXPRESSED IN ADULT LIVER, SIGNAL = 1.1; EXPRESSED IN BRAIN, SIGNAL = 1.1; EXPRESSED IN BONE MARROW, SIGNAL = 1.1; EXPRESSED IN HELA, SIGNAL = 1.6; EXPRESSED IN HEART, SIGNAL = 1.5; EXPRESSED IN FETAL LIVER, SIGNAL = 1.1; EXPRESSED IN BT474, SIGNAL =   1
ctttcacactctccttgggggctacttctgcgctccccttgggaggtgcttccaggctcccctctggggctgcttccacgctcacctctggcagtgcttccagactcacttccgggggtgcttccaggctcgcctccggggatgctactatgctcaccttgggaactgtttccaggtccaccttcgggagtgcttctatgctcaactcgggggatgcgtccatgctcatctcagaatcatatgtgctcaccacaggcgacacgtccacgctcaccacagggaatgagtccgtgctcacctcaggggccatgcccacacctgccttgggggacgcttccatgcttgtgttgcagaat

SEQ ID NO: 4070 - DNA, 401 bp, Homo sapiens
  MAP TO AP000351.3; EXPRESSED IN BONE MARROW, SIGNAL = 1.3; EXPRESSED IN HBL100, SIGNAL = 0.94; EXPRESSED IN HELA, SIGNAL =   1; EXPRESSED IN HEART, SIGNAL =   1; EXPRESSED IN BRAIN, SIGNAL =   1
cagaaccctgaacttctgcctcctgcctgggtgtggggtctcaccctggctgctcttgggctctaaggctgaacatactgcctgggcccctgtggtccattcacttaggggctggggaatggaccatgtctctgatacttctgcccatggttccagcattcgggtcggcagtgacaactgggaaagttgtatgcccacaactttttcatccttgtccctacagccggtggctctcggctatgaactgtttgagggacggccacgactggcagcatggcgtggacgagtggaggctttcctgggtgctgagctatgccaggaggcccacagcatcatcttgagcatcctggaacaggcggccaagaaaaccctcccaacaccctcaccagaggcctatcagg

SEQ ID NO: 4071 - DNA, 372 bp, Homo sapiens
  MAP TO AL034430.1; EXPRESSED IN HELA, SIGNAL = 1.5; EXPRESSED IN PLACENTA, SIGNAL = 1.5; EXPRESSED IN HBL100, SIGNAL = 1.5; EXPRESSED IN HEART, SIGNAL = 1.3; EXPRESSED IN BT474, SIGNAL = 1.9; EXPRESSED IN ADULT LIVER, SIGNAL =   2; EXPRESSED IN FETAL LIVER, SIGNAL = 1.6; EXPRESSED IN BRAIN, SIGNAL = 1.3; EXPRESSED IN BONE MARROW, SIGNAL = 1.2; EXPRESSED IN LUNG, SIGNAL = 1.7
ttcttgctgttcttcatcggaagagtgttgcacatcaatctattcaccatcagcatcctgctcctcactgagactggtattttcccatccatcttcatcattttcagcattctcttctttctcaccttccagaacttctgctcctggaatgtaatctttagcatctaattctccatattcttgtactcttgcttctatggaggcctcagtaggcttaccctggaatttcttctgcagcatctgaggattcagtgttcggaagagctgaatcaaagttctagcacacatcattacattcttatccttgtgtgttttatactgagccaggtcttggagaagttcttcagtcatggccagagaacatcgagctgt

SEQ ID NO: 4072 - DNA, 418 bp, Homo sapiens
  MAP TO AL096712.17; EXPRESSED IN HEART, SIGNAL = 0.96; EXPRESSED IN FETAL LIVER, SIGNAL = 0.96; EXPRESSED IN ADULT LIVER, SIGNAL = 1.1; EXPRESSED IN BONE MARROW, SIGNAL = 1.1
catggatgagggcctatgtcggaaacaagttcaaaataatcctaaaataatctcaaataaaccatcaaaccacaaaacatatcaatgtggtcattcttgtgacaaagcaggtctttttaggtgagatctgtgaccatcttaagagataaattccaggcagcaaccgctgttaaaagtagttttagctgtgtatgccaaaggcactctctattttctagcaagacatacctactggctggactcttgggaaaaacaaacagacagacggcagataagaaagagcaatagcttgttcagcttggtactaatgcttcttacccacatattctgagaggaagacgacaaagaatggagtgaccaggtcattaattccctggacatacccactggcagggtggcggatggcccaaataaatag

SEQ ID NO: 4073 - DNA, 397 bp, Homo sapiens
  MAP TO AL035703.19; EXPRESSED IN HBL100, SIGNAL =   2; EXPRESSED IN HELA, SIGNAL = 2.1; EXPRESSED IN PLACENTA, SIGNAL = 2.4; EXPRESSED IN HEART, SIGNAL = 2.2; EXPRESSED IN BT474, SIGNAL =   2; EXPRESSED IN FETAL LIVER, SIGNAL = 1.9; EXPRESSED IN ADULT LIVER, SIGNAL = 2.1; EXPRESSED IN BONE MARROW, SIGNAL = 1.9; EXPRESSED IN LUNG, SIGNAL = 2.2; EXPRESSED IN BRAIN, SIGNAL = 1.9
acactagcctgcctctgagcttttgggatttctcttacttatagaatgtgttccacttttctaaaggcaatgaagagcctccagctctgggtcctggtgaggagcgcagggccagagaggcacttgcctaaaggcccacagcacgtccccggcagagctctgatccctggatgggtctgaggcaggggaagctgggggaccaggacgctgcgggacggagtttctccgcctacctgcctggttcgtggtgatgttgaccacagcggcccggcggggctcggggctcaggtcggacacgccattgacggcctcgatccagaaggagtagttcatgtgggccagcaggttggccaccagcaggctggcctgcaccaggcttgtctgctggggcacaaag

SEQ ID NO: 4074 - DNA, 350 bp, Homo sapiens
  MAP TO AL049637.33; EXPRESSED IN FETAL LIVER, SIGNAL = 1.2; EXPRESSED IN ADULT LIVER, SIGNAL = 1.4; EXPRESSED IN BONE MARROW, SIGNAL = 1.2; EXPRESSED IN HELA, SIGNAL = 1.2; EXPRESSED IN HBL100, SIGNAL = 1.3; EXPRESSED IN BT474, SIGNAL = 1.3; EXPRESSED IN BRAIN, SIGNAL = 1.1; EXPRESSED IN LUNG, SIGNAL = 1.4; EXPRESSED IN PLACENTA, SIGNAL = 1.2; EXPRESSED IN HEART, SIGNAL = 1.2
tgggaagccatactttctccaaaagctaaggagagaatggtgtgcagaacaaagaaggactcctgtttgtcttgtagttgcctgcaccatgggacttttcttgaactactttgttcagctttaatgatggcacatctcccacctggatatacttcctgagataggtatgggaacttacgtctctcctaggaaaggtgctcagtaacttgtactcatcccatggaaatcctttggaagctacaaaatcaaagacaatctggagcttgttgctggccaggaaacgccgctccaagaactcgccactgggggtccggatccgcagtttgctcacaggctcagcattttcttcc

SEQ ID NO: 4075 - DNA, 405 bp, Homo sapiens
  MAP TO AL035088.1; EXPRESSED IN PLACENTA, SIGNAL = 1.8; EXPRESSED IN HEART, SIGNAL = 1.9; EXPRESSED IN HBL100, SIGNAL = 1.8; EXPRESSED IN BT474, SIGNAL =   2; EXPRESSED IN ADULT LIVER, SIGNAL = 2.2; EXPRESSED IN FETAL LIVER, SIGNAL = 2.2; EXPRESSED IN BONE MARROW, SIGNAL = 2.5; EXPRESSED IN LUNG, SIGNAL =   2; EXPRESSED IN BRAIN, SIGNAL =   2; EXPRESSED IN HELA, SIGNAL = 2.2
ccagaatgctcagtctgttgctatgaaacttggagtgtaaattaccatgaataccattaatctgttcactaggagattaatttgcaatttgttggcaaatcacatgtgggtcttgtagcaagagcgtgggtggtgttttcgtgccaacgtgtggccctgcctgtgtttctggatgtgtgtgtgtgtgcatgcacgtgcatgtggcattgggattgtcactctatgggaactcatgtcctgggttttctcactgctccccgatcttacctggctcccctagcataccctgggtccttggtcacattctcatagttggaggctgctatcagaacacttctcggctcagtgccagccagtttaagagacattagctctttctgaaacaggattgcaaaggtgtccact

SEQ ID NO: 4076 - DNA, 372 bp, Homo sapiens
  MAP TO AL049542.5; EXPRESSED IN PLACENTA, SIGNAL = 1.4; EXPRESSED IN HELA, SIGNAL = 1.3; EXPRESSED IN HEART, SIGNAL = 1.3; EXPRESSED IN BT474, SIGNAL =   1; EXPRESSED IN HBL100, SIGNAL = 1.3; EXPRESSED IN ADULT LIVER, SIGNAL = 1.6; EXPRESSED IN FETAL LIVER, SIGNAL = 2.1; EXPRESSED IN BRAIN, SIGNAL = 1.4; EXPRESSED IN LUNG, SIGNAL = 1.5; EXPRESSED IN BONE MARROW, SIGNAL = 1.4
ctgcaggagtaccacagccgcgcccgggagagcgagctggagcaggaggtccgcaggctgaagcaggtgggcaggcctgggcctccctccctcacactcctgcagaagcttccacaagactggttgggaagggggggccgtggagggtcagcatctgagctggaggcctttttccccgggcagtccttgtccctgctcagccaccagcaggggccacagcccagtagtgatgttgctgtgccttcaggacaaccgcaacctgaaggagcagaacgaggagctgaacgggcagatcattaccctcagcatccagggcgccaagagcctcttctccacagccttctccgagtccctggctgcagagatcagctc

SEQ ID NO: 4077 - DNA, 367 bp, Homo sapiens
  MAP TO D87675.1; EXPRESSED IN BT474, SIGNAL = 1.3; EXPRESSED IN BONE MARROW, SIGNAL =   1; EXPRESSED IN PLACENTA, SIGNAL = 2.9; EXPRESSED IN BRAIN, SIGNAL = 3.3; EXPRESSED IN LUNG, SIGNAL =   2; EXPRESSED IN HEART, SIGNAL = 1.4; EXPRESSED IN HELA, SIGNAL =   3; EXPRESSED IN HBL100, SIGNAL = 1.6
cgagaatgttaaatgctcttgtggaagtgaaaagcagccgatctaagtaattacccattaagaaaggagtaggagaaatgtttagaaggcagacctgcaaaaaggtgactcacagtacgttcacatgaccggatgcattagtggaacctctaacccatcgccaatggaagaagcagtgttttgcacaaacttgaaaaagagtttttcattttcctcccacagcctcgtcacgtgttcaatatgctaaagaagtatgtccgcgcagaacagaaggacagacagcacaccctaaagcatttcgagcatgtgcgcatggtggatcccaagaaagccgctcagatccggtcccaggtaagcgtggggtata

SEQ ID NO: 4078 - DNA, 425 bp, Homo sapiens
  MAP TO AL049748.1; EXPRESSED IN BT474, SIGNAL =   1; EXPRESSED IN FETAL LIVER, SIGNAL = 1.1; EXPRESSED IN ADULT LIVER, SIGNAL = 1.1; EXPRESSED IN BONE MARROW, SIGNAL = 0.96; EXPRESSED IN HBL100, SIGNAL =   1; EXPRESSED IN BRAIN, SIGNAL = 1.2; EXPRESSED IN LUNG, SIGNAL = 1.2; EXPRESSED IN PLACENTA, SIGNAL = 1.2; EXPRESSED IN HEART, SIGNAL = 0.98; EXPRESSED IN HELA, SIGNAL = 1.2
caccttttctccgacagctctccatcgccgaagtttgttctctcgacagcctgttcaatcggattgtgacgtgcttttgtgcaaacttctttggcttcccatcccgtagccagttccaagtccttattttggtctacaaggccctgtacaatgtgctcccctggtagtttatttggtgtctgtctttctgtactaaaatgcaggcacctggaggtcaaagactttgttctgttggctgctgtatctccatttgcctggtgcattgtaagcattcagtacctatttgttgaattactgctttccattttggatgtaaatgatgcacttttcagccctgccttcctccacattgccacccctagtaacaacagtggacatgagtgtggagcgctgttggtggcacttgcccattttcactcctttca

SEQ ID NO: 4079 - DNA, 420 bp, Homo sapiens
  MAP TO AC007687.16; EXPRESSED IN FETAL LIVER, SIGNAL = 2.5; EXPRESSED IN ADULT LIVER, SIGNAL = 2.5; EXPRESSED IN HBL100, SIGNAL = 2.4; EXPRESSED IN HELA, SIGNAL = 2.4; EXPRESSED IN PLACENTA, SIGNAL = 2.3; EXPRESSED IN HEART, SIGNAL = 2.1; EXPRESSED IN BT474, SIGNAL =   2; EXPRESSED IN BRAIN, SIGNAL = 1.8; EXPRESSED IN LUNG, SIGNAL = 2.5; EXPRESSED IN BONE MARROW, SIGNAL = 2.6
cctgttttaaccaagcagcctgtttattaatttttacaactgagttttgacaatacccaacgtatttatccgtgtgcaacaagaaatgccagcaactgcacagatttctccatgttcagctagtaggtagcaattccactatttagcatcccatgactgggttaaatcagaacagatagtgcgaacaagttagtctaaaagtctaactctataaaagggaccacttgtaccaattgagcaaacagttatgtaagggatgttgctaaagttagccaccgggtggactaaaggatctcttaggctgcataaagatctgggtatggcatgatgacataatggatccaatgcttcatcaagttattcacagaagctactgattgtgaagttacagcattatcctgccaagtgaaagaggtaggc

SEQ ID NO: 4080 - DNA, 378 bp, Homo sapiens
  MAP TO AC010092.2; EXPRESSED IN FETAL LIVER, SIGNAL = 1.2; EXPRESSED IN LUNG, SIGNAL = 1.3; EXPRESSED IN BRAIN, SIGNAL = 1.1; EXPRESSED IN HELA, SIGNAL = 1.7; EXPRESSED IN HBL100, SIGNAL = 1.2; EXPRESSED IN PLACENTA, SIGNAL = 1.2; EXPRESSED IN HEART, SIGNAL = 1.1; EXPRESSED IN BT474, SIGNAL = 1.1
aaaaagttcttaaacttgtacatttgcttctcttcctcaacttaaaaaaaaattgatccatacttaaaaagcaatgaacgctgatttttggcaaaaattgcctattaataatatccttacaatcttattaagccagaaacaaccattgttaaaacatctttccacactgcttcatgaacctccagtaacagttcacagttgatacgtaccagcacatgccaaacattttcatttgccccatcaaagctgcagaaacgaatgctcactcccaataagccctggccgccccacaggttacttggtgtgactgaggtctctcgcagttccaatgttttgctgctatagataagcatctttacaggcttttcaacgtttgct

SEQ ID NO: 4081 - DNA, 468 bp, Homo sapiens
  MAP TO AL032818.2; EXPRESSED IN BT474, SIGNAL = 2.4; EXPRESSED IN FETAL LIVER, SIGNAL = 2.1; EXPRESSED IN BRAIN, SIGNAL = 2.8; EXPRESSED IN BONE MARROW, SIGNAL = 4.4; EXPRESSED IN LUNG, SIGNAL = 2.5; EXPRESSED IN HBL100, SIGNAL = 2.2; EXPRESSED IN PLACENTA, SIGNAL = 2.4; EXPRESSED IN HELA, SIGNAL = 2.2; EXPRESSED IN HEART, SIGNAL =   2; EXPRESSED IN ADULT LIVER, SIGNAL = 2.2
gatggctgcaccagaagaactgactgacagaatgaacaaaaagatgcaaagagccattctattgacttgtcatagccgtaagtcagtccataaaatacaatgaagaatgaggatatgctagaagtagcaaaaaccaaaaaccatgcaacataaacacaccaccaaggtaggacgatccggggctttttcttaagctgctggagatccttttgggaagggtgctgttcggaatggacatcctgatcatcttctatgttgttattggaatttgtatttggcccgagggtctccggggtcttgatttgtgctttcctatgcctgtgcttgggtttggaggttgccttaggagaagcctttggaagcctgggctttcctttagatgcaggttttgcaacctccctggggtgcaccttagcagtttcgtaagcatgccactttctcaagtattcttcccagtgctcacttgct

SEQ ID NO: 4082 - DNA, 423 bp, Homo sapiens
  MAP TO AC007029.2; EXPRESSED IN BRAIN, SIGNAL = 1.2; EXPRESSED IN HBL100, SIGNAL =   1; EXPRESSED IN PLACENTA, SIGNAL = 1.5; EXPRESSED IN HEART, SIGNAL = 1.1; EXPRESSED IN ADULT LIVER, SIGNAL = 1.2; EXPRESSED IN BT474, SIGNAL = 1.2; EXPRESSED IN FETAL LIVER, SIGNAL = 0.98; EXPRESSED IN BONE MARROW, SIGNAL = 1.5; EXPRESSED IN LUNG, SIGNAL = 1.7
agaatgagttagggtggggcaggtagcaggtaatcagaatgagggtggaacaggtaattagaatgaaccagggtggagcaggtaatcaaaaaagttgctttatgaggaagttaagtttaaaactagaaggcaaagaattgaacatactgacatattgattctttgaaaagaatttagaactcatatctaacaacccttcctcttgcattttcttacagctctttcttttcaaacttttttttaacatgtcttggcttagttgttttgcttgattttccaaaagaagaagctctggataaggcggaggatagctgagggaggttttagtagctgccatttttatgagcctctgcaccaacccacagatgcatggtgtgacacagcacctgacaagaataagtacacccattacagctatgaggg

SEQ ID NO: 4083 - DNA, 389 bp, Homo sapiens
  MAP TO AC007247.2; EXPRESSED IN PLACENTA, SIGNAL = 9.4; EXPRESSED IN HBL100, SIGNAL =  11; EXPRESSED IN HEART, SIGNAL = 8.4; EXPRESSED IN LUNG, SIGNAL = 9.9; EXPRESSED IN BRAIN, SIGNAL = 8.7; EXPRESSED IN BT474, SIGNAL = 8.9; EXPRESSED IN ADULT LIVER, SIGNAL =  10; EXPRESSED IN FETAL LIVER, SIGNAL =  10; EXPRESSED IN BONE MARROW, SIGNAL =  11; EXPRESSED IN HELA, SIGNAL =  11
gcaggaggattgcttgagtctagaaatttgagaccagcctgggcaacaagtgaaacccctctatctctaccaaaaacaaaaattattttgggaaaattttacatattgaaaagcaaataataactactgctttaattaatgaggattatcctgtaagttttctattttttcccacctttatatcatttagaaatatccatcatagaagaagttcagatcaatgattgctttgcagacgttgaagttacagttggaaaagccgccttaactccaactgcgaggttaagtctaggtcttgttctcagttgtgctgccattgtgtttttgccagcagacgttctggtagaagagagtgaaggctgttatatccaggacaaacacaaaaaccg

SEQ ID NO: 4084 - DNA, 415 bp, Homo sapiens
  MAP TO AC007052.4; EXPRESSED IN HELA, SIGNAL = 1.5; EXPRESSED IN BRAIN, SIGNAL = 2.5; EXPRESSED IN PLACENTA, SIGNAL =   2; EXPRESSED IN HBL100, SIGNAL = 1.8; EXPRESSED IN HEART, SIGNAL = 2.2; EXPRESSED IN ADULT LIVER, SIGNAL = 2.1; EXPRESSED IN BT474, SIGNAL = 2.1; EXPRESSED IN FETAL LIVER, SIGNAL = 1.8; EXPRESSED IN BONE MARROW, SIGNAL = 2.1; EXPRESSED IN LUNG, SIGNAL = 1.7
attacaagcctgcaactgggccaagcacaataaggatacccccaaaatcgataaatagataacattaatttaaaattttaaaattggaaacaggaattcgatcctcaaggagttcatgctctcataggaacatttgaaatacatgtgaacacactcatgcatgaatgtatatatacatgtatatgcatatgtgtgtattcatgaagaagtgtgtgtgtgtgtgtgtgtgtgtgtgtgtgtttctgtatatgcaaatgaaaatggaatgttgtttaggggacgaggagaccggcagtgggagcatgcagaacttcattgaacagctgggcctgaaggttctggataggagaagcgggtggaggatggttattctaggcaggcagttgtggtgcaaagaagggcctagcaggtttgt

SEQ ID NO: 4085 - DNA, 453 bp, Homo sapiens
  MAP TO AL033375.2; EXPRESSED IN HELA, SIGNAL = 5.3; EXPRESSED IN FETAL LIVER, SIGNAL =   4; EXPRESSED IN ADULT LIVER, SIGNAL = 4.1; EXPRESSED IN BT474, SIGNAL = 4.1; EXPRESSED IN LUNG, SIGNAL = 5.1; EXPRESSED IN BRAIN, SIGNAL = 4.3; EXPRESSED IN PLACENTA, SIGNAL = 4.7; EXPRESSED IN HEART, SIGNAL =   4; EXPRESSED IN HBL100, SIGNAL = 5.4; EXPRESSED IN BONE MARROW, SIGNAL = 4.1
ccctttcagagatcacagaccttgtggagagaataaaggtgcacacacttagttctagcccagtgggccagcgtcagagcaaaagtttaatttccaagtgcagcacagtgcctaccactcaattgtcccttcacccaagcctactcagactcaagaccaagtcctagaaagagaggggtgctttaaaaagggtaggaaaaaaaattttaagcattgttttactgaaacccctatgggatcctgagtgcacaacattggtgacttgggcagcactggcacttaaaattttggtcattgtaggaaatggcattcttgggcagtgtcttcttcagagaagtgggtggtagcttcccgggggagtcacaggctttagagccatgttcagtgcttttggcatgaacctgggccccgttggtgtctacatcagtagattcagaggctggcattgttgta

SEQ ID NO: 4086 - DNA, 420 bp, Homo sapiens
  MAP TO AL033380.10; EXPRESSED IN BT474, SIGNAL = 2.6; EXPRESSED IN HELA, SIGNAL = 1.9; EXPRESSED IN FETAL LIVER, SIGNAL = 2.9; EXPRESSED IN BRAIN, SIGNAL = 2.4; EXPRESSED IN LUNG, SIGNAL = 3.7; EXPRESSED IN BONE MARROW, SIGNAL = 2.4; EXPRESSED IN PLACENTA, SIGNAL = 3.7; EXPRESSED IN HEART, SIGNAL = 2.2; EXPRESSED IN HBL100, SIGNAL = 2.7; EXPRESSED IN ADULT LIVER, SIGNAL = 3.5
acctgcatgacgttctctcccctgccctggagctctgggggttccaccatggcagcattctccatatctgactcccactctctgtccactgtgagggctaggccagctcttccccaagagctcagcaatgtgcccagcactctgcagacctgtgtggccagtgggtggcttccttttggatgtggccatccggtccctccccactcaaactcctcctgcatctcttgtccctgcacacccaccacctcattaacccaagcctcaggaaccacccttagcccacattttaagatgaaaagtttgagatctggggaagtgaagccaagctcacagcatcacatacctgggagacggtgcagccagattcaaagccaggtctgcctggctcctgggatcattcctttgggcaggactgatcat

SEQ ID NO: 4087 - DNA, 427 bp, Homo sapiens
  MAP TO AC010888.2; EXPRESSED IN FETAL LIVER, SIGNAL = 1.3; EXPRESSED IN LUNG, SIGNAL = 1.7; EXPRESSED IN BRAIN, SIGNAL = 1.2; EXPRESSED IN HELA, SIGNAL = 1.7; EXPRESSED IN PLACENTA, SIGNAL = 1.6; EXPRESSED IN BT474, SIGNAL = 1.3; EXPRESSED IN ADULT LIVER, SIGNAL = 1.4; EXPRESSED IN BONE MARROW, SIGNAL = 1.1; EXPRESSED IN HEART, SIGNAL = 1.3; EXPRESSED IN HBL100, SIGNAL = 0.92
agctgacattgattccaggggacccaaaacatcaatattggtcctccagttaaagtagggtttgtgaatgtcaggtaattaatggattgttagttcaggtctgagttacagtgtatccaatgcattcctggactcatcttgcagtcatttccccagagccagaatgcataattggcatagacatacttagctgctggctaaatccccacattggctccctgacttgtagggtgagggctactatgatggaaaagccaaatggaagcctttagagctgcctccacctagaaaaacagtaaatcaaaaacaatatcacatccctggagtggctgcagagattagtgccaccatcaaggacttgaaagacgcaggggtggtgatttccataacatccatattcaagtctcctggttcgttgtgcagaaga

SEQ ID NO: 4088 - DNA, 442 bp, Homo sapiens
  MAP TO AC007249.2; EXPRESSED IN BONE MARROW, SIGNAL = 3.1; EXPRESSED IN LUNG, SIGNAL = 2.5; EXPRESSED IN BRAIN, SIGNAL = 2.6; EXPRESSED IN HELA, SIGNAL = 3.5; EXPRESSED IN HBL100, SIGNAL = 4.3; EXPRESSED IN PLACENTA, SIGNAL = 2.4; EXPRESSED IN HEART, SIGNAL = 2.6; EXPRESSED IN ADULT LIVER, SIGNAL = 2.4; EXPRESSED IN BT474, SIGNAL = 2.5; EXPRESSED IN FETAL LIVER, SIGNAL = 2.7
caacactaagcttttggcccattctgccattgtacaagctacaaatgcttgttcagcagctgaggggcactcttgagtagcgtgtctgaagagtgaataaaaatccatataaaacaaatattcaaatagtttccataggaacacagataagtgtgacccatatcctagtcttccatatggctgcatcatggcgaccctactcttacaaagacatttcaaaactagcagtaattaagttacatggtccccccaaatcccttaattcaagctaaacttgcagttaacagctaccagagtgctatctacacattaatactagccgaagcacaggctgctctgtggcgtttcatcccactctcccaggcacaagacacaggcagggtgctggcatcctgttcctctacttcgggtgggaagtcggggttctggaattgctgcatga

SEQ ID NO: 4089 - DNA, 450 bp, Homo sapiens
  MAP TO AC010896.2; EXPRESSED IN LUNG, SIGNAL = 5.4; EXPRESSED IN HEART, SIGNAL = 4.2; EXPRESSED IN HELA, SIGNAL = 5.7; EXPRESSED IN HBL100, SIGNAL = 4.3; EXPRESSED IN PLACENTA, SIGNAL = 4.4; EXPRESSED IN ADULT LIVER, SIGNAL = 5.2; EXPRESSED IN FETAL LIVER, SIGNAL = 5.2; EXPRESSED IN BT474, SIGNAL =   5; EXPRESSED IN BRAIN, SIGNAL = 4.4; EXPRESSED IN BONE MARROW, SIGNAL = 4.5
ggacatacaaacggctcttaaacactagaaaagctcattcatagtaagagaaaggcaaattaaaactgtacagacacatcatttcttacctatcagattggcaaaaagtcaaacgtttgacaatatactatgttggtaaaactgtaaattaacaagcactttcatacactgctggtaggaacagaaaatcacacaacccatatgtaggggaatatggtaattttaagcaaaacagcacacatttgtcctctactagcaattctacttctagggacctcttcctcaacaccctggcaaaaaatatgaaaagactgatgtacaagactattcactgcagcaatttgtacaacagcaaaaactggaactaacccaaatgtctattgatagggggatggttggacacactacggtacatccacacaatgaagtgccaggcagctgtaagaggac

SEQ ID NO: 4090 - DNA, 353 bp, Homo sapiens
  MAP TO AC010385.2; EXPRESSED IN BONE MARROW, SIGNAL = 2.2; EXPRESSED IN BRAIN, SIGNAL =   2; EXPRESSED IN PLACENTA, SIGNAL = 2.1; EXPRESSED IN HEART, SIGNAL = 2.2; EXPRESSED IN HELA, SIGNAL = 2.3; EXPRESSED IN HBL100, SIGNAL = 1.9; EXPRESSED IN ADULT LIVER, SIGNAL = 2.8; EXPRESSED IN FETAL LIVER, SIGNAL =   2; EXPRESSED IN BT474, SIGNAL = 1.9; EXPRESSED IN LUNG, SIGNAL = 2.1
ttcaacagaaggtgcatgattcattgttaccatagcaaagaattttgcttggtatgagtgggcctattccatagaattcaaaggtggaacaagtaatttaagttggtcgttgtggagacaaaatagtatggtcggccatcatttattgtgtgctcacttgggtatggcacatttctaattctttcaatgttttagctaatttaattcttctaagcatcctaggaggcacataaccctatttcacaaaagaggtagtagagaaaaccaacaccagtgctattattgtctccactataaccttacctccagtactaccaccactatcaccctggcctcccactaccctatccact

SEQ ID NO: 4091 - DNA, 420 bp, Homo sapiens
  MAP TO AC010904.2; EXPRESSED IN FETAL LIVER, SIGNAL = 9.6; EXPRESSED IN ADULT LIVER, SIGNAL =  12; EXPRESSED IN LUNG, SIGNAL =  11; EXPRESSED IN BONE MARROW, SIGNAL = 9.8; EXPRESSED IN BRAIN, SIGNAL = 8.4; EXPRESSED IN HELA, SIGNAL =  11; EXPRESSED IN PLACENTA, SIGNAL = 9.8; EXPRESSED IN BT474, SIGNAL = 8.5; EXPRESSED IN HEART, SIGNAL = 8.4; EXPRESSED IN HBL100, SIGNAL = 8.8
gcactattcccctcatcagctatggttaagaaaactgaggcaaagaaagtttaagtaacacccccagggccactcaacaaagtggctattgggggaccgactgtagaatccaggctctcaatgaaattgaatagtttcttagttaaagcatttgatttttaacaaagctgtttaaaaatttaacatagaactaaggctctttcttataacattttaatttcttcattaaaccctagaaaatgaattaggcttgaacatcatgccatattattatataggttagcttcactgcttaattgaataaaaacaattccaatcaaagcatctcactttcgtcttttcagctcctgcatgttggtgtgttggtgcatgtcagactgccattcaacaaaaggcaagactctgcctccactctgggta

SEQ ID NO: 4092 - DNA, 388 bp, Homo sapiens
  MAP TO AL031776.6; EXPRESSED IN PLACENTA, SIGNAL = 3.9; EXPRESSED IN HEART, SIGNAL = 3.3; EXPRESSED IN ADULT LIVER, SIGNAL = 4.1; EXPRESSED IN FETAL LIVER, SIGNAL = 3.2; EXPRESSED IN BT474, SIGNAL = 3.1; EXPRESSED IN BRAIN, SIGNAL = 3.8; EXPRESSED IN BONE MARROW, SIGNAL = 3.2; EXPRESSED IN LUNG, SIGNAL = 3.7; EXPRESSED IN HBL100, SIGNAL =   3; EXPRESSED IN HELA, SIGNAL = 3.9
aatatggtggcaggcaagagagtttgtggaggggaactcccacttataaaaccatcagatctcatgagacttattcactaccacaagaatagtatggagaaaaccgtcccatgattcaattatccttacctggccccacccttgacacgtggggattattacaattcaaggtgagatttgggtggggacacaaccaaaccatatcatatatgctgctccagtccttcaaaaagtcacacacgcattttcactatgtcatctataggcactttttctgcagtgttagcatcaccttcatcatcactattatcacgatcccctttattcagaatcatttctcctccttcactgtcagtcagtaaatgaagacctggagcctcattatcaa

SEQ ID NO: 4093 - DNA, 444 bp, Homo sapiens
  MAP TO AC008844.2; EXPRESSED IN HELA, SIGNAL =  22; EXPRESSED IN PLACENTA, SIGNAL =  22; EXPRESSED IN HBL100, SIGNAL =  18; EXPRESSED IN HEART, SIGNAL =  16; EXPRESSED IN LUNG, SIGNAL =  22; EXPRESSED IN BRAIN, SIGNAL =  19; EXPRESSED IN BT474, SIGNAL =  17; EXPRESSED IN ADULT LIVER, SIGNAL =  27; EXPRESSED IN FETAL LIVER, SIGNAL =  22; EXPRESSED IN BONE MARROW, SIGNAL =  20
tagtgatctgggcagtggcaagagaagtagacagattggatcaggtgattaaagagtgaggttttgctctgcaaaacttcctgatgttctgggtttctgaaagcctcactcaattccatagatacataaaatctgacctctcattcacaggtaggaactattaatagcattcacggattgtgagtgtacaatgagattcaagtgcttcacactttgcctataggcaatgttgcaaacaagcatgttttctacgtgagtggtgtatgtgtgtgtgtctaccatgattttctcaacttactgcagccatttttctgtattatcattgtgctttttgatagcaatgaccttgacattctctttcagttgaagatttacagtagctttgacaacagtgatactactgttctactggctagccatttaggactgcaatttgatcagagg

SEQ ID NO: 4094 - DNA, 449 bp, Homo sapiens
  MAP TO AC010906.2; EXPRESSED IN HEART, SIGNAL = 2.9; EXPRESSED IN FETAL LIVER, SIGNAL =   3; EXPRESSED IN LUNG, SIGNAL = 3.4; EXPRESSED IN HELA, SIGNAL = 3.4; EXPRESSED IN HBL100, SIGNAL = 2.5; EXPRESSED IN PLACENTA, SIGNAL = 2.9; EXPRESSED IN ADULT LIVER, SIGNAL = 3.9; EXPRESSED IN BT474, SIGNAL = 2.6; EXPRESSED IN BRAIN, SIGNAL = 2.8; EXPRESSED IN BONE MARROW, SIGNAL =   3
tcaccataggcaaactgctgccggagaggggacgggacccctgcccctccatagggatgcagtcacaatgacgggggatgccgcttctctgaacgtggtctctttcatccagaccaagagccaaacccagggacaacacaaaccccagggggaaacaatgcgcatgcttcatccacacctgttgtgtggatggctgggcccatggggtcccagaccccgctgagcagcagcctcccatgcaaccctggaggtggtgatcactgtgaggaagacaggaccaagagaccacgctccaggccagacagcttccattttctgtgtcccagatcccacagaaagactggcacagttgtctgctggggtggcggtggagttttcagaggcacccctgctacatggcaaagctgcagcaggaaacttcgggcccagggagcaaggtctggttcttg

SEQ ID NO: 4095 - DNA, 480 bp, Homo sapiens
  MAP TO AC007386.3; EXPRESSED IN HELA, SIGNAL = 0.66; EXPRESSED IN BT474, SIGNAL = 0.7; EXPRESSED IN LUNG, SIGNAL = 0.65; EXPRESSED IN ADULT LIVER, SIGNAL = 0.77; EXPRESSED IN HEART, SIGNAL = 0.82; EXPRESSED IN PLACENTA, SIGNAL = 0.67; EXPRESSED IN BRAIN, SIGNAL = 0.83; EXPRESSED IN HBL100, SIGNAL = 0.67
tcattcttgcaggctcaatgcctaatttgtaatgggcttggttttataaccatgactgcctctaagcaggtgtgtaggggcagtgatgggcagcgacgcgtggagctggcagatggggcatggggcatctcgggcagtgggtgtgggcaggggctcttgtggtaccagctccttaccagggatagtgcggtccctgggcctgctgctgacagggattaagctctggctaaatccaaaaccttaagcatctcacctggggtgttctccaacaggcactgaagaagaatctcccccttctgtaagacactctccgtcagagactgatgttcatctatatctttcttaaattgcttaaggcgtatcagaaaaagaaaaggcagaagcttcgttactattgttttgtaaacgttatttgaaaagcacagcatgtagggaagccttattcccctctaatgtgtaagattcaccccatcaggtctg

SEQ ID NO: 4096 - DNA, 386 bp, Homo sapiens
  MAP TO AC010684.2; EXPRESSED IN FETAL LIVER, SIGNAL =   2; EXPRESSED IN ADULT LIVER, SIGNAL = 1.9; EXPRESSED IN LUNG, SIGNAL = 2.1; EXPRESSED IN BONE MARROW, SIGNAL =   2; EXPRESSED IN BRAIN, SIGNAL = 1.8; EXPRESSED IN HELA, SIGNAL = 1.9; EXPRESSED IN PLACENTA, SIGNAL = 1.6; EXPRESSED IN BT474, SIGNAL = 1.6; EXPRESSED IN HEART, SIGNAL = 1.9; EXPRESSED IN HBL100, SIGNAL = 1.7
agcttacctgggcaggagactttagaaggccagttgccttgcttccagctgaaggagtagaacaccagcagctctcagaccatacaaattgctagacaccttttcctgttgtggcatggtgcaatgaggagctcttacctatgcctggagacatgccatctaaggactcgttggctgcagtctgtgcagatcttcacatacaaggagatggccatagctgtggtgctctgcagatgtggcagtggcttcatcaggatgaacgaggggcccctggagatgatcaggctgctcacactgcaatacaagctactggaattaggtctgcttctggacaaggaacagcttgctggaatggacatccatgttcgtgtgaagggtagtggtca

SEQ ID NO: 4097 - DNA, 388 bp, Homo sapiens
  MAP TO AL031963.12; EXPRESSED IN ADULT LIVER, SIGNAL = 5.4; EXPRESSED IN BT474, SIGNAL = 8.2; EXPRESSED IN BRAIN, SIGNAL =  12; EXPRESSED IN HELA, SIGNAL =  18; EXPRESSED IN FETAL LIVER, SIGNAL =   8; EXPRESSED IN LUNG, SIGNAL = 8.9; EXPRESSED IN BONE MARROW, SIGNAL = 7.1; EXPRESSED IN PLACENTA, SIGNAL =  16; EXPRESSED IN HEART, SIGNAL = 6.2; EXPRESSED IN HBL100, SIGNAL =  11
ctcccctactgagcaccttgtgacccccactcctgccagccagagaacaaccccctccctttactataattttcctttacctacccaaatttcctcttaaagaagtggctggagctgaaggcatagtcagggtacatgtacctttttctctatcagacctcacagatcagtcagcgtttaggctgtttctcatcagaccccactaaacatatacaggaattccgatatctaactctgtcctacaatttaacctggagtgacctaaatgtcatcctgacttctaccctctccccagatgaaagggaaagagttttttctctagtccactctcacgctgataaccaccggcttcatgagccagacctccaggaaggcatcagagcagttc

SEQ ID NO: 4098 - DNA, 485 bp, Homo sapiens
  MAP TO AC010958.2; EXPRESSED IN HBL100, SIGNAL = 9.7; EXPRESSED IN HEART, SIGNAL = 7.8; EXPRESSED IN FETAL LIVER, SIGNAL =  10; EXPRESSED IN LUNG, SIGNAL =  11; EXPRESSED IN BRAIN, SIGNAL =   9; EXPRESSED IN HELA, SIGNAL =  11; EXPRESSED IN PLACENTA, SIGNAL =  11; EXPRESSED IN BT474, SIGNAL = 9.4; EXPRESSED IN ADULT LIVER, SIGNAL =  14; EXPRESSED IN BONE MARROW, SIGNAL = 9.8
acatgagatttggtggggacacacactcaaactagatcagttgatttttttttttttcatcaccttttctccttgaatttcagtttgggaagtttctgttgacttatcttcatattcactgattctttccttcattctgtctagtcaactaatgagcattctttatttctattgtgtttttgacttctagcattttttttttattattgtttccatctttctgctgatatcacctatctggtcttgcatgttgtctaatttttctgctaaagccagtttatccaggagtttctgctctgggtgagcagctctcaggtgctgtctctccctggatgtgcctgtctcttcagagcagggtgccagtttgtctggcagccttagttctctgatgggcccatgaaaggctgccctgctattctttgctgtaaggatgggggtggtgactgccaagcacgtcacatgacaccagttgaagttgcggaact

SEQ ID NO: 4099 - DNA, 378 bp, Homo sapiens
  MAP TO AC009294.6; EXPRESSED IN BONE MARROW, SIGNAL = 1.6; EXPRESSED IN LUNG, SIGNAL = 1.8; EXPRESSED IN HELA, SIGNAL = 1.6; EXPRESSED IN BRAIN, SIGNAL = 1.8; EXPRESSED IN PLACENTA, SIGNAL = 1.6; EXPRESSED IN HBL100, SIGNAL = 1.8; EXPRESSED IN HEART, SIGNAL = 1.5; EXPRESSED IN BT474, SIGNAL = 1.6; EXPRESSED IN ADULT LIVER, SIGNAL = 1.8; EXPRESSED IN FETAL LIVER, SIGNAL = 1.6
ttctgatagggattgcatcgaatctatagatcactttggatagcatggacattttaacaatatcaattcagtagaagctgttttgaatcttctgtgtggctgtcatggtggcaagggccaactggcaatgcagcctccttggggtcaccttcactgtgcacagcaatgtggggcagaatctgctctgctctgggccctgcccaggtgcccacagtggactatgctgggaacaatgggtcattctcatggactgtcttccactgagcctttgcagcccccaaggagagatcagcattgccattttgctccacatccttgggaagccaccaatgaccctctctacctccatccagcgcccgcttcacactcctatccaga

SEQ ID NO: 4100 - DNA, 399 bp, Homo sapiens
  MAP TO AC010877.2; EXPRESSED IN BONE MARROW, SIGNAL = 1.2; EXPRESSED IN BRAIN, SIGNAL = 1.2; EXPRESSED IN LUNG, SIGNAL = 1.4; EXPRESSED IN HEART, SIGNAL = 1.6; EXPRESSED IN HELA, SIGNAL = 1.8; EXPRESSED IN HBL100, SIGNAL =   2; EXPRESSED IN PLACENTA, SIGNAL = 1.4; EXPRESSED IN ADULT LIVER, SIGNAL = 1.3; EXPRESSED IN FETAL LIVER, SIGNAL = 1.5; EXPRESSED IN BT474, SIGNAL = 1.6
cctgcaggttactattgtgggtgtaaagccactgcagtgggagttaaacaaactgagtcaaccagcttcctagaaaaaaaagtgaagaagaaatttgactggacatttgaacagactttggaaactgcaattacatgcctgtctactgttctatcaattgatttcaaaccttcagaaatagaagttggagtagtgacagttgaaaatcctaaattcaggattcttacagaagcagagattgatgctcatcttgttgctctagcagagagagactaaacattgttgttagtttaccagatccgtgatgccacttacctgtgtgtttggtaacaacaaacaaatatcatggaggtccctggattgaaaaaagagcctctcccactcctcctaccaccgaag

SEQ ID NO: 4101 - DNA, 455 bp, Homo sapiens
  MAP TO AL033377.2; EXPRESSED IN BT474, SIGNAL = 5.3; EXPRESSED IN BRAIN, SIGNAL =   6; EXPRESSED IN BONE MARROW, SIGNAL = 6.1; EXPRESSED IN HELA, SIGNAL = 5.5; EXPRESSED IN ADULT LIVER, SIGNAL = 7.9; EXPRESSED IN FETAL LIVER, SIGNAL = 6.5; EXPRESSED IN LUNG, SIGNAL =   7; EXPRESSED IN PLACENTA, SIGNAL = 8.3; EXPRESSED IN HEART, SIGNAL = 5.5; EXPRESSED IN HBL100, SIGNAL = 6.7
cgatgtcatacagccactccttaaatacaaaggagaccaaaaattagtttttaaatttcccattctcagtgtacaggcacccaaaagaaaaggaggttagacatggcttggaacaagtcagccaagagtgttttcatatcaactcagaaatcaggaagcaaccttgtcttctttgtaatattggcttacctagatattaagacaatggccatccaaaaacaaatgaacaaaagacctatgaagagattgaagaagaaactgaggtccaaggaagtaaagtggctttctaaagacatttgagaggaaaatctgcagtagcccaaactaagctgagaaaagtcttaggtaaacaggacatggtaataaatctttttttctttctcatttcttcttttttaagctgttggattcaagatccagtcatattttatgtgacctgtgctgggtattttgga

SEQ ID NO: 4102 - DNA, 463 bp, Homo sapiens
  MAP TO AC010885.2; EXPRESSED IN FETAL LIVER, SIGNAL = 1.5; EXPRESSED IN ADULT LIVER, SIGNAL = 1.9; EXPRESSED IN LUNG, SIGNAL = 1.3; EXPRESSED IN BONE MARROW, SIGNAL = 1.7; EXPRESSED IN BRAIN, SIGNAL = 1.5; EXPRESSED IN PLACENTA, SIGNAL = 1.5; EXPRESSED IN HELA, SIGNAL = 1.6; EXPRESSED IN BT474, SIGNAL = 1.5; EXPRESSED IN HEART, SIGNAL = 1.7; EXPRESSED IN HBL100, SIGNAL = 1.7
tcttgaaggttggtggttggggacagagacctggtaatcaggcagacctgatttggaatctcagctgtaccactgattaacgtggcaattttagcaagaaacttagcttctctgaacaactacttcttgatatctaaagtgggaataataacccctactctgcagggttgctataagaattaaattcaataatgcatataaaggaattatactttctaccacatggtaattgctcaataaaatgtttttattagtggtaatcatgtatccataagcatagtaattgatatatgctgactcacctgaaaaaatggcaagtagaatttggaaatgacagcctcttttcttccttttttccttctttgcttccatccttccttcctttcctctttctttcctttcttcttttttccatctctctctcctccttttctttctctcttctttgtttctttctgaggca

SEQ ID NO: 4103 - DNA, 444 bp, Homo sapiens
  MAP TO AC010149.2; EXPRESSED IN PLACENTA, SIGNAL = 2.2; EXPRESSED IN HELA, SIGNAL = 2.3; EXPRESSED IN HBL100, SIGNAL = 2.4; EXPRESSED IN HEART, SIGNAL = 2.2; EXPRESSED IN BT474, SIGNAL = 2.1; EXPRESSED IN ADULT LIVER, SIGNAL =   3; EXPRESSED IN FETAL LIVER, SIGNAL = 2.7; EXPRESSED IN BONE MARROW, SIGNAL = 2.4; EXPRESSED IN LUNG, SIGNAL = 1.8; EXPRESSED IN BRAIN, SIGNAL =   2
agcctcctagcacagacagcctagtagagaaggttggagaatgaatctaggaacaaatgaaagatatctgacacctctctggagatttccttttcaagaagtttctgcagcacagattctaggtataagatatggcagggccaagggagaggatgcctatagcctgtgctctctgcttactcagcaaagttgagaaacaagaacttgttttctgatttttctgtgatctgattgactcatagaggcccaacactttgtgcttaaggtactcatttccattaactgtagcaaaccgtgctcattatcaagttcccagtggctcagatggaaaccctaagttttgaggtgaatgagattctgtcactcatggggcacttcagccaacagatgatcacccctgctatcactattggtgggagggcatgcctttggctattgagtcca

SEQ ID NO: 4104 - DNA, 363 bp, Homo sapiens
  MAP TO AL033384.2; EXPRESSED IN HBL100, SIGNAL = 2.3; EXPRESSED IN HELA, SIGNAL = 1.8; EXPRESSED IN PLACENTA, SIGNAL = 1.7; EXPRESSED IN HEART, SIGNAL = 1.7; EXPRESSED IN ADULT LIVER, SIGNAL = 2.1; EXPRESSED IN FETAL LIVER, SIGNAL = 1.8; EXPRESSED IN BT474, SIGNAL = 1.6; EXPRESSED IN BRAIN, SIGNAL = 1.9; EXPRESSED IN BONE MARROW, SIGNAL =   2; EXPRESSED IN LUNG, SIGNAL = 1.9
ctcttctttttgggaccctgtattctaaatttttaaagtactcagtacaaactttaaacttgaatgtatcaaaaaaaaaaaatagctgcacctaagcatctctcttccagacaggatgaagctgtggaaagaaggacccttcatgaggggcagagtgctggcaacttcagaatgcttgaaggggaggaatgaaatatggcagagagtgaaaatatcagattaaagatactctctatgccttagaatagtgtttaccaatatggtcggcaaatatggttcaatgaatgtcatcactctgcataggttcagaagtggtatgtcacttacctttccttttaaaatccaaagcaggagccagtacct

SEQ ID NO: 4105 - DNA, 403 bp, Homo sapiens
  MAP TO AC007551.1; EXPRESSED IN PLACENTA, SIGNAL =   2; EXPRESSED IN HEART, SIGNAL = 1.8; EXPRESSED IN BRAIN, SIGNAL =   2; EXPRESSED IN HELA, SIGNAL =   2; EXPRESSED IN HBL100, SIGNAL = 1.9; EXPRESSED IN BT474, SIGNAL = 2.3; EXPRESSED IN ADULT LIVER, SIGNAL = 2.2; EXPRESSED IN FETAL LIVER, SIGNAL = 2.5; EXPRESSED IN LUNG, SIGNAL = 1.7; EXPRESSED IN BONE MARROW, SIGNAL =   2
cttatggattgatgaggcccccaaatcaacatttcaatatacccacttgtttcattcacaggggaagttttcatagcctggggcaatattccttcataagatttgggatgagagaggtggcagatgtggaaatgtgctgctcagatccccctgcaagaaaggctgtctccttagctgggaggagtgtggctagcagacaccctccagctgttacgttcctcaggatctgcctcagctttccagccaaggtcatgctcttcttggggcagcctcaggcaataactgaaaaacagctgatgtacatgggcttggccatttccacccaacaggagaacttctaagatgcaatcttggctctggagcttccccactgagctggccaactttgtggggtctgcgttac

SEQ ID NO: 4106 - DNA, 414 bp, Homo sapiens
  MAP TO AC009492.2; EXPRESSED IN BONE MARROW, SIGNAL = 3.7; EXPRESSED IN HELA, SIGNAL = 4.8; EXPRESSED IN PLACENTA, SIGNAL = 5.5; EXPRESSED IN HEART, SIGNAL = 2.8; EXPRESSED IN BT474, SIGNAL = 3.5; EXPRESSED IN BRAIN, SIGNAL = 3.2; EXPRESSED IN HBL100, SIGNAL = 1.9; EXPRESSED IN ADULT LIVER, SIGNAL = 4.5; EXPRESSED IN FETAL LIVER, SIGNAL = 4.1; EXPRESSED IN LUNG, SIGNAL = 4.4
ctgagttccgttcctgtgtgtctctgtggtagggccttgaatagaggactagaaggagaagaataagaagaaaagtgtatatcaggtgcttttaaaaaaatcaattcaaacgaaaattgcagaagggtgcctggacagctaggctgacagtgaccagagctggagagagaggctctgcctggtaacagagctctgattggccagacctgtgcaaggactaggcctatagggacggctctgagctgtgcttctgcaggcagctgaacttggcaggcacaagcaagccctgcaaagacacgctcaaaacaatccagagtacagacagctgctggcgtgaagaagctgtgagtactgacagcacttggggttgtgagcctgccacttaactctacagcctactgcctctgcctcttg

SEQ ID NO: 4107 - DNA, 393 bp, Homo sapiens
  MAP TO AC010892.2; EXPRESSED IN BRAIN, SIGNAL = 1.9; EXPRESSED IN PLACENTA, SIGNAL = 1.9; EXPRESSED IN HBL100, SIGNAL = 2.1; EXPRESSED IN HELA, SIGNAL = 1.8; EXPRESSED IN HEART, SIGNAL = 2.1; EXPRESSED IN BT474, SIGNAL = 1.9; EXPRESSED IN ADULT LIVER, SIGNAL = 2.1; EXPRESSED IN FETAL LIVER, SIGNAL = 1.9; EXPRESSED IN BONE MARROW, SIGNAL =   2; EXPRESSED IN LUNG, SIGNAL = 1.9
tccatctccacttctatttttattcctagttggaatatgagaaatttctcccacacattcagattggaattattgttcttcaacaaagaatttcaataaacactttgagagtttagcttcaataatttataaaacggtataaaccctgttaaagtcttcagagaaatagaagggatagatggtgatgccttttagtgccatttctttcatcccctgcagcagcacacatctgttggctgcaacagagcagcccaagaacactggccgaaagcagcacaaacagccggaacatgttcacccagtaaacccccaaagagtcgacatttgttttattgctgcttttaaaaacctagccgtaaatagaatcagaagggggaagggcatcgatacttc

SEQ ID NO: 4108 - DNA, 464 bp, Homo sapiens
  MAP TO AP000124.1; EXPRESSED IN ADULT LIVER, SIGNAL =   1; EXPRESSED IN HEART, SIGNAL = 0.84
acctgcaccatagcttgagggttctcccaccttcttggccccttccagaccgtgtctcccaagaaatccctcaggtgtctaatcccatcttggtatctgtttctggaagacccaaactacacagcactcaaaccattttagttccatctcctttttgctaaatatatagtttaaaggctgtgtttaaggattacctagaaatcattttagggtataatgacatgttatttatttattttaaaattatgtttgctccacttggtgaaaatttctgtaagtacctctgagatcatggatcctggggcttcactgagcatcaacctttggggaactgcttctaatgctgataaaagtgtcaggatctttccttgttgactgggactggcattttttatgtgagggcaggagaacagcgttagcatctctgcaggtgttgtgctgccccaaaccagcatctttcttca

SEQ ID NO: 4109 - DNA, 381 bp, Homo sapiens
  MAP TO AC010899.2; EXPRESSED IN LUNG, SIGNAL =   1; EXPRESSED IN BRAIN, SIGNAL = 1.1; EXPRESSED IN HBL100, SIGNAL = 0.97; EXPRESSED IN HEART, SIGNAL = 1.2
aaggggattgacatcctttgaaattatccagcaagggtacaaggaggaagtggcttttgaactaggcaaaaataggcaggtttttgatagctctcggggaaggaggtacattcaaaactgctgccctttctgaaatgttcaagtgtctttctctctccaagtggcttcagaacactgaaaactgtgacccattcagaagttctacctcctaagactttcccaaaggtgacccttatgcaattgtcattcccagtgccttcccggatcattggagatggggctaactccacagtccttctggtctctgtctcgggcagtgtggtgctggtggtaattctcattgcagcttttgtcatcagccggaggtaagcactgaagcca

SEQ ID NO: 4110 - DNA, 404 bp, Homo sapiens
  MAP TO AC010491.2; EXPRESSED IN HBL100, SIGNAL = 3.1; EXPRESSED IN HEART, SIGNAL =   2; EXPRESSED IN FETAL LIVER, SIGNAL = 2.4; EXPRESSED IN ADULT LIVER, SIGNAL = 1.6; EXPRESSED IN LUNG, SIGNAL = 2.2; EXPRESSED IN BRAIN, SIGNAL = 2.1; EXPRESSED IN PLACENTA, SIGNAL = 1.7; EXPRESSED IN BT474, SIGNAL = 3.1; EXPRESSED IN BONE MARROW, SIGNAL = 1.7; EXPRESSED IN HELA, SIGNAL = 3.9
cttctggtgaggtagccctgaattcttttgaaaacctaaatcctgactgcttgggacatgcaggacttgtatataaatatatattgggagaagagaagttcacctttattgagaaatgtaacaatactcgctctgtcacattattaaacaaaggaccaaataagtacacactcactcagctccaaagatgcagtaagggatggcttgagggctgtcaaaaatcctattgatgagggctgtgtgtttccaggtgctggtgctgtggaagtagcaatggcagaagccctgattaaatataagcccagtgtaaagggcagggcacagcttggagtccaagcatttgctgatgtgttgctcattattccaaaggttcttgatcagaactctggttttgaccttcagga

SEQ ID NO: 4111 - DNA, 381 bp, Homo sapiens
  MAP TO AC010906.2; EXPRESSED IN HELA, SIGNAL = 5.7; EXPRESSED IN HBL100, SIGNAL = 5.5; EXPRESSED IN HEART, SIGNAL = 5.1; EXPRESSED IN FETAL LIVER, SIGNAL = 5.3; EXPRESSED IN BONE MARROW, SIGNAL = 6.5; EXPRESSED IN LUNG, SIGNAL = 5.1; EXPRESSED IN BRAIN, SIGNAL = 4.2; EXPRESSED IN PLACENTA, SIGNAL = 4.7; EXPRESSED IN ADULT LIVER, SIGNAL = 6.1; EXPRESSED IN BT474, SIGNAL = 5.1
cggtgatgatggcagatgatcaatcctgaaaggtaataaaaatgcccagggtacagcccagaaatgcctgtgatagtcccagaggtgcctggagcatgcctctgttcgctccctccaggccccagcctggcagtctcccgctctgggtgcttgggccatggccacagccttccccctacttaaggcctctgttcccactccccacttgtgggcctgctggacacctgctcccctgctccttccttgccaccccattgccagcctctgccaggcctcacctcactgcgttgaaattgagtgttttggtggccagtattgagctcacagagggagtggagctttgctcccctgtggaggagcactcagaaatgctggtgacca

SEQ ID NO: 4112 - DNA, 345 bp, Homo sapiens
  MAP TO AC012354.2; EXPRESSED IN BONE MARROW, SIGNAL = 2.4; EXPRESSED IN HBL100, SIGNAL = 3.4; EXPRESSED IN HELA, SIGNAL = 4.4; EXPRESSED IN HEART, SIGNAL = 2.4; EXPRESSED IN BRAIN, SIGNAL =   2; EXPRESSED IN LUNG, SIGNAL = 3.1; EXPRESSED IN PLACENTA, SIGNAL = 2.5; EXPRESSED IN BT474, SIGNAL = 2.1; EXPRESSED IN ADULT LIVER, SIGNAL = 2.3; EXPRESSED IN FETAL LIVER, SIGNAL = 2.4
tggtcatgtgacaaagctccagccaattgaataagagtaaaagtgccgttttcttggtcagaggcgccaatttgactcacaggcagggcatgatggtggtgggtacagacacctcactggcgatctcctccctcctgtccctgctgctcttcactgggatgcagatgtagatccatcagctggcctccaccgagtggcttaccatccagggtggcctgcatggctcaggtctcttcgtgctctccctcactgccttcaagattctggagaatcttgtgtttggcaaaggatcccaagcaaagaccttccctgagattctcctgtgcctcctgttggctctctttg

SEQ ID NO: 4113 - DNA, 432 bp, Homo sapiens
  MAP TO AC010680.3; EXPRESSED IN BONE MARROW, SIGNAL =   1; EXPRESSED IN HBL100, SIGNAL = 0.94; EXPRESSED IN HEART, SIGNAL = 3.8; EXPRESSED IN FETAL LIVER, SIGNAL =   1; EXPRESSED IN ADULT LIVER, SIGNAL =   1
ctcttgggagaaaccagagcatgatggaggcagccgaattctaggctacattgtggagatgcagaccaaaggcagtgacaaatgggccacgtgtgccacagtcaaggtcactgaagccactatcactggattaattcagggtgaagaatactctttccgtgtttcagctcagaatgaaaagggcatcagtgatcctagacaactgagtgtgccagtgatcgccaaagatcttgtcattccaccagccttcaaactcctgttcaatactttcactgtactggcaggtgaagacctaaaagttgatgttccattcattggccgccctaccccagctgtaacctggcataaagataatgtaccactgaagcagacaactagagtaaatgcagagagcacagaaaataattcactactgacaataaaggacgcctg

SEQ ID NO: 4114 - DNA, 440 bp, Homo sapiens
  MAP TO AL049633.3; EXPRESSED IN BRAIN, SIGNAL = 3.2; EXPRESSED IN BONE MARROW, SIGNAL = 3.3; EXPRESSED IN LUNG, SIGNAL = 3.6; EXPRESSED IN HBL100, SIGNAL = 3.5; EXPRESSED IN PLACENTA, SIGNAL = 3.1; EXPRESSED IN FETAL LIVER, SIGNAL = 4.1; EXPRESSED IN ADULT LIVER, SIGNAL =   5; EXPRESSED IN HEART, SIGNAL = 2.9; EXPRESSED IN HELA, SIGNAL = 3.5; EXPRESSED IN BT474, SIGNAL = 3.3
tgattgaatcccaggtccacccaggaaccggagaggccaggctcctccccacctccgcaactggcaggaacttcccaaggccccgtcccatcctcccagtgctcaggtcagtcggaagttctctggggagccatttttacttggctgtctcagtgagacagttttctacctagttttcaaatctgagcaagaaaagcctagaaatctgttgaggggagatgaggagagtgacaggatagtggtctctacctgggggttgagtcagaggctggggcatgcttagtgaatgtctgacgccatcccatgtttattcaatatcttggacaaaggttttgggctcctattttgtgccagcttgcatgccagactctggggagacaaaggttttgagctcctatcttgtgccagtgtgcatgccaggctctggggacacaaaggta

SEQ ID NO: 4115 - DNA, 458 bp, Homo sapiens
  MAP TO AC010930.2; EXPRESSED IN BT474, SIGNAL = 1.4; EXPRESSED IN ADULT LIVER, SIGNAL = 1.2; EXPRESSED IN BRAIN, SIGNAL = 1.3; EXPRESSED IN BONE MARROW, SIGNAL = 1.6; EXPRESSED IN LUNG, SIGNAL = 1.3; EXPRESSED IN HELA, SIGNAL = 1.3; EXPRESSED IN PLACENTA, SIGNAL = 1.3; EXPRESSED IN HBL100, SIGNAL = 1.5; EXPRESSED IN HEART, SIGNAL = 1.7; EXPRESSED IN FETAL LIVER, SIGNAL = 1.5
agtcaccctggttggaaatgaaaatctagtctacagttcccgaagcagtatcactcacaagagtaaaaatctaaaactaagagctcctgtctcctggataccccagatccctgaatatgttaacccctaataatgcctgctccgtgcctacctctttccggctcactggcatccctggcctggaatccctgcacatctggctctccatcccctttggctccatgtacctggtagctgtgctggggaacataaccatcctggcagtggtaaggatggagtacagcctgcatcagcccatgtacttcttcctgtgcatgttggctgtcattgacttggtcctgtcaacctctaccatgcccaaactactggccatcttctggtttggtgcccacaacattggtgttaatgcctgtttggcccagatgttcttcattcattgctttgccactgttgagtca

SEQ ID NO: 4116 - DNA, 466 bp, Homo sapiens
  MAP TO AF002223.1; EXPRESSED IN PLACENTA, SIGNAL = 1.7; EXPRESSED IN HELA, SIGNAL = 1.7; EXPRESSED IN ADULT LIVER, SIGNAL = 1.6; EXPRESSED IN FETAL LIVER, SIGNAL = 1.8; EXPRESSED IN BRAIN, SIGNAL = 1.5; EXPRESSED IN HEART, SIGNAL = 1.5; EXPRESSED IN BT474, SIGNAL = 1.3; EXPRESSED IN LUNG, SIGNAL =   2; EXPRESSED IN BONE MARROW, SIGNAL = 1.5; EXPRESSED IN HBL100, SIGNAL = 1.6
tttaaagaacttcgtggccctttaataaggaaccatatttactcctgtagtttttctccagtataagattttttcttttctttttatttttttaatgtgatgctaatatttcctagtgattctcagctgattgcctgccattcttgcttggtttattgaccagaacttccaaagctctccccagaattattttacattgttttacatttaattgaaattcaatgtagcctggtctaatgtgccttttttttctgaagatgctgcttgctggggcagtaagaattgctgataaaatagaatctgggaaaacatctgtggtggtgcattgcagcgacggttgggaccgaacagcccagctcacatctctggctatgctaatgttggacagttactacaggaccattaaaggatttgaaactctcgtagaaaaggagtggataagctttggacacaggtttgcactggt

SEQ ID NO: 4117 - DNA, 447 bp, Homo sapiens
  MAP TO AL035088.1; EXPRESSED IN BT474, SIGNAL = 1.3; EXPRESSED IN LUNG, SIGNAL = 1.4; EXPRESSED IN BRAIN, SIGNAL = 1.6; EXPRESSED IN BONE MARROW, SIGNAL = 1.3; EXPRESSED IN HBL100, SIGNAL = 1.2; EXPRESSED IN ADULT LIVER, SIGNAL = 2.5; EXPRESSED IN FETAL LIVER, SIGNAL = 1.4; EXPRESSED IN PLACENTA, SIGNAL = 1.2; EXPRESSED IN HEART, SIGNAL = 1.3; EXPRESSED IN HELA, SIGNAL = 1.4
atgttctgctccccaaaccatgttccctggtgcaagactaagtggacctggatgaagggatacatttttcatctgataaagctatagtgtttgtggggctgcattcacccagaaggagtaactttttctgagctttttacacaaaggcactgagtagactactgccatcagccagtgccctatggcaacccatccctaggctcctaacttcccccactgaggctcttccagtgtaccctggacccaggctgagaccttttgttcttggcagccactttctgagcacaaaagcagaaaatccagtgaggcaggtctcttggggtctggggctcaccctcatgatggctcccagaattctgggctttctcagccctggattttctgcccttgtgctctacccacctgtttggctcagccaccacatcttggatgctcgttttcttcctg

SEQ ID NO: 4118 - DNA, 442 bp, Homo sapiens
  MAP TO AC010683.2; EXPRESSED IN FETAL LIVER, SIGNAL = 1.3; EXPRESSED IN BT474, SIGNAL = 0.92; EXPRESSED IN ADULT LIVER, SIGNAL =   1; EXPRESSED IN LUNG, SIGNAL = 1.3; EXPRESSED IN BONE MARROW, SIGNAL = 1.2; EXPRESSED IN PLACENTA, SIGNAL = 1.1; EXPRESSED IN HELA, SIGNAL =   1; EXPRESSED IN HBL100, SIGNAL = 1.1; EXPRESSED IN HEART, SIGNAL = 1.2
ccttcaggaagccactagtccacttcctgttagaaaagattctgaacttctttcccagataagttgaagaacctgttttctgacctggttagaaattgaaaactcaatcgaaagattggcaaagaaaattgtggaaatctatgaaagtagaaaaaaatgaaaaatacaagagaaaagaaaagaaacttgaaggaccagtaccgagaatataatatctgaacaagcaagtttcatgaaaaagaggacaaaaaacattgagggaggaaatcatcaattaaaaaatttaagagaatttcctagaactgaagaacattggtcagaacgtcaagatggatggaaacagagtcacacccaggcacatcactgagaaatttcagaacactaggggtaaagggaaaaacaaacacagttccagagagaggggggaaaatcgtatgcagag

SEQ ID NO: 4119 - DNA, 1955 bp, Homo sapiens
  MAP TO AC007228.1; EXPRESSED IN HEART, SIGNAL = 1.1; EXPRESSED IN BT474, SIGNAL = 1.3; EXPRESSED IN FETAL LIVER, SIGNAL = 0.98
tgtaagaaccataaaaacatgtacctctgcttgtgggtttcaataactatgtgattcacattttcattttcgaaatttccattattctagcatttaataaaggagacatttactttcttaatatctttcagacttggagtgtgtgtgggtgaccaaatcattatctttaaaccaggatatttatgaagaaaaattacccccggcaatcataatggaaagacttaaaagctatgaccttgaatgttcaacattagggaaaaactggaaatgtgaagacttgtttgagagggagcttgtaaaccagaagacacattttaggcaagagaccatcactcatatagatactcttattgaaaaaagagatcactctaacaaatctgggacagtttttcatctgaatacattatcttatataaaacagatttttcccatggaagagagaatatttaattttcatacagataagaaaagcttaaaaacacattcagttgtgaaaaaacacaagcaagaccgtggagaaaagaaacttttaaaatgtaatgactgtgagaaaatattcagcaaaatctcaacccttactcttcaccaaagaattcatacaggagagaaaccctatgaatgtattgaatgtggaaaggcctttagccagagtgcccaccttgctcaacatcagagaatacacacaggagaaaaaccttttgaatgtactgaatgtgggaaagccttcagccagaatgctcatcttgttcaacaccagagagttcatactggagagaaaccttatcagtgtaagcagtgtaataaagcattcagccagcttgcacaccttgctcaacatcagagggtccacactggagagaaaccctatgaatgtattgaatgtgggaaggcttttagtgattgctcatccctagctcatcatcgaaggattcacactgggaaaagaccttatgaatgtattgactgtgggaaagctttcaggcagaatgcttctcttatacgtcatcggcgatattatcatactggagagaaaccctttgactgtattgattgtgggaaggctttcactgatcacataggacttattcagcataagagaactcatactggagagagaccttacaaatgtaatgtgtgtgggaaggcttttagccatggctcatctctgacagtacatcagagaattcatacaggagagaaaccttatgaatgcaatatctgtgagaaagccttcagccatcgtgggtctcttactcttcatcagagagttcatactggagagaaaccctatgaatgtaaagaatgtgggaaagctttccggcagagcacgcatctggctcatcatcagagaattcatactggagagaaaccttatgaatgtaaggaatgcagcaaaaccttcagccagaatgcacacctcgcgcaacatcagaaaatacacactggggagaaaccttatgaatgtaaggaatgtggtaaggccttcagtcagattgcacaccttgttcagcaccagagagttcatactggtgagaagccttacgaatgtattgaatgtgggaaggcctttagtgatggctcatatcttgttcaacatcagagactccacagtggcaaaagaccgtatgaatgtcttgaatgtgggaaggcattcaggcagagggcatccttgatttgtcatcagagatgtcatactggtgagaaaccttatgaatgtaatgtttgtgggaaagcctttagccatcgtaaatcccttactctgcatcagagaattcatacaggagagaaaccttatgagtgtaaggaatgtagcaaagccttcagccaggttgcccatcttactctacataagagaattcatactggagaaaggccctatgagtgtaaagaatgtggaaaagccttcaggcagagtgtacatcttgctcatcatcagcgaattcataccggagagt

SEQ ID NO: 4120 - DNA, 419 bp, Homo sapiens
  MAP TO AL049691.17; EXPRESSED IN PLACENTA, SIGNAL = 1.8; EXPRESSED IN HEART, SIGNAL =   2; EXPRESSED IN LUNG, SIGNAL = 1.7; EXPRESSED IN BRAIN, SIGNAL = 1.8; EXPRESSED IN BONE MARROW, SIGNAL =   2; EXPRESSED IN HBL100, SIGNAL = 3.3; EXPRESSED IN HELA, SIGNAL = 1.8; EXPRESSED IN BT474, SIGNAL = 1.8; EXPRESSED IN ADULT LIVER, SIGNAL = 2.4; EXPRESSED IN FETAL LIVER, SIGNAL = 1.9
gcacagagcatggcaagtagaagcactccagattctcaagtttacacatgtactgcgttgatataaatttataattccatcaataaactttaacaaaaaattgcacctttattgtttgatagtatccaaatccgagggcaaaaaattccagaagtcttagaatccagtacaaaaatcccctggcaattagaaagacaatgcttttcttctgaatatttcagggcacagtgcagagtctgtgttatttccctctcagactccaaggacattgagcagagctctggattggactatgggtccactgcaggggaggtggtagagatgaacaagatggaaggattatctggacactccaagagggacaggggtagggaggtaaaaaacttcagagaagagaagctgaggtgggaatgggtaga

SEQ ID NO: 4121 - DNA, 400 bp, Homo sapiens
  MAP TO AC010951.3; EXPRESSED IN HBL100, SIGNAL = 1.2; EXPRESSED IN HEART, SIGNAL = 1.3; EXPRESSED IN FETAL LIVER, SIGNAL = 1.3; EXPRESSED IN ADULT LIVER, SIGNAL = 1.2; EXPRESSED IN LUNG, SIGNAL = 1.5; EXPRESSED IN BRAIN, SIGNAL = 1.1; EXPRESSED IN PLACENTA, SIGNAL = 1.2; EXPRESSED IN BT474, SIGNAL = 1.1; EXPRESSED IN BONE MARROW, SIGNAL = 1.3; EXPRESSED IN HELA, SIGNAL =  11
gcatccattggtcacaagctacagaaatctcaagtaaaattgtctcatgagggtaacttcatgaaacagttactgagttcacattgggttcccaggactcattctatctgacatctctgctttccttcatgatggttttatctcaggctccacctggtggcaagaaagctgccagagacctctagctatattcttcaaattctaatccaaaaggaaagtgtcaattttccatagctctttcaagtgaacagacagctaccatctgctgcagggccacatcctcccaagttctactctgtgcaggatgagagtgcctcttctctgtaaccatattacacaacccaaggttcagtctgattgcaccaatttgagtgacagtcccatccctgaacaaattgct

SEQ ID NO: 4122 - DNA, 443 bp, Homo sapiens
  MAP TO AC010732.2; EXPRESSED IN HELA, SIGNAL = 7.7; EXPRESSED IN HBL100, SIGNAL = 8.1; EXPRESSED IN HEART, SIGNAL = 5.9; EXPRESSED IN FETAL LIVER, SIGNAL = 7.8; EXPRESSED IN BONE MARROW, SIGNAL = 6.8; EXPRESSED IN LUNG, SIGNAL = 7.6; EXPRESSED IN BRAIN, SIGNAL = 5.7; EXPRESSED IN PLACENTA, SIGNAL = 6.8; EXPRESSED IN ADULT LIVER, SIGNAL = 6.9; EXPRESSED IN BT474, SIGNAL = 5.6
ttagagccacctcccacaacaactgtaatgccaaagtttcttccctatcttcccctcttcttctgcaataccagtttaaaaatggctacgtagtttctctcatacaaatgtgacattgttaaagcaatcctctatccatggacctcaaattatgtgttgcaagcagttttattttagaaggaatccaggcatctgggaatgagtccagttttctgttggtgcagattttagagctgattggttaagagcatcagtggtgaggctggggcgtcttgctttgaacgatagccttgctgtgctgtgtgaccttgggcagatctcccagggtctgtgttttctcgtctgtaaaggtggggataatgattgcatgtaggttgctgtaaggataaactggcttgttccatataatgcttgtagagtactgcctgacacagagtaaagct

SEQ ID NO: 4123 - DNA, 411 bp, Homo sapiens
  MAP TO AC007095.2; EXPRESSED IN BT474, SIGNAL = 5.2; EXPRESSED IN FETAL LIVER, SIGNAL = 7.3; EXPRESSED IN BRAIN, SIGNAL = 7.1; EXPRESSED IN BONE MARROW, SIGNAL = 6.5; EXPRESSED IN LUNG, SIGNAL =   8; EXPRESSED IN HBL100, SIGNAL = 7.1; EXPRESSED IN HELA, SIGNAL = 7.7; EXPRESSED IN PLACENTA, SIGNAL = 7.7; EXPRESSED IN ADULT LIVER, SIGNAL = 8.6; EXPRESSED IN HEART, SIGNAL = 5.9
ggcactattttacattcccaccatcaatatttgagggttcttatttattcatatccttgctgacatttgttattatattgttacaggattccttcagggccactttgccagctgaaaattgtggccactgctgcctctgcccaggccttgcttggggactgctgggctccctccacctgcttggcctggcaggctgcatttggcttgcagccagcccgaagctccatctcagcctgcagctggactgagcatgccacaagtggcttccatgtcagacactggcgtctagacaaagggaacatggtggtgcccaaaaactcagagatgccagcaatcatggagacacaaagggtgttacagctcttgcttggggaatcccaaggtctgagtccccaggaaatgtcagagctc

SEQ ID NO: 4124 - DNA, 423 bp, Homo sapiens
  MAP TO AC010960.2; EXPRESSED IN BRAIN, SIGNAL =  14; EXPRESSED IN BONE MARROW, SIGNAL =  17; EXPRESSED IN LUNG, SIGNAL =  20; EXPRESSED IN HELA, SIGNAL =  18; EXPRESSED IN PLACENTA, SIGNAL =  16; EXPRESSED IN HBL100, SIGNAL =  18; EXPRESSED IN HEART, SIGNAL =  12; EXPRESSED IN FETAL LIVER, SIGNAL =  20; EXPRESSED IN BT474, SIGNAL =  14; EXPRESSED IN ADULT LIVER, SIGNAL =  18
cattgaacaacctaagccaggttaaaagacaaataatatactgggaaaatacatttaaaacttttatataatgcaggttcagtatcctaaatgtagagaaagcttctaagtgtagcaagaaaggaaaaaaatggaaagacagtttactcaaaaagaaattcgcatataccgttggcaaggctatgggcaagcagacactctcacttattgctagtagcaatgcaaagtatataaatccccctagagaggaacctgacactattaatcaaaaatacaacttcacttagcctttcaccgagcaccttattttcagaaatctaccccaaagatacctcggcaaaaaacaaaaagactttttacaaagctatcaatggcattattgttaataacagcaaaaaagtagaaatgcccatcaatagcaga

SEQ ID NO: 4125 - DNA, 449 bp, Homo sapiens
  MAP TO AC011281.2; EXPRESSED IN BT474, SIGNAL = 5.3; EXPRESSED IN ADULT LIVER, SIGNAL = 6.1; EXPRESSED IN BRAIN, SIGNAL = 6.4; EXPRESSED IN BONE MARROW, SIGNAL = 5.9; EXPRESSED IN LUNG, SIGNAL = 7.8; EXPRESSED IN HELA, SIGNAL = 6.4; EXPRESSED IN PLACENTA, SIGNAL = 6.6; EXPRESSED IN HBL100, SIGNAL = 6.3; EXPRESSED IN HEART, SIGNAL = 5.1; EXPRESSED IN FETAL LIVER, SIGNAL =   7
cctccttttcttcctcctgcttggacgactgtcttccgcctcaactgtggagcctcgccgaccgttagtcctcacagacacctcaggggcaaccgacgcagcgccacctcatcgtgtccgccatcttggggcgacgccccaaaattccagggctaggagcctcatcccggcggacgccagaaaacaggtagggatagatattttcatttaatatgaaacgcaggattggaagggatttttttttccctaatggaaattttaggatttttaatttttttcatgtattttctgttgaaattcatctctcttattattgctgttttgaaggtaatgcttcttatcttgctcattcaggtagaattttttgttctttgttttctgaagtcttcctatgatatgtctgtgtgaattgaaaattattagaaatcatttttcctagatttcgcaga

SEQ ID NO: 4126 - DNA, 282 bp, Homo sapiens
  MAP TO AL035660.11; EXPRESSED IN HEART, SIGNAL = 0.87
gtgccaaatgacgatcactgtcatcttcctgctctataattacaatatccaatcccccatgagatccatgttggtgtctgcctttttgttcatgactgagtaggtctgttctctatttgtagattggccagactctccttttgcattttcaccatgccatggctcttgcttaggatttggtgcctggatttgagacttgcctgctactagcttttcagtttggctataaatactgcgttgggatacatctttctgcacaccattttctccatagtggagtcg

SEQ ID NO: 4127 - DNA, 448 bp, Homo sapiens
  MAP TO AC012067.1; EXPRESSED IN HBL100, SIGNAL = 8.7; EXPRESSED IN HEART, SIGNAL = 9.8; EXPRESSED IN FETAL LIVER, SIGNAL =  13; EXPRESSED IN BT474, SIGNAL = 9.1; EXPRESSED IN ADULT LIVER, SIGNAL =  12; EXPRESSED IN LUNG, SIGNAL =  14; EXPRESSED IN BRAIN, SIGNAL =  11; EXPRESSED IN PLACENTA, SIGNAL =  14; EXPRESSED IN HELA, SIGNAL = 9.8; EXPRESSED IN BONE MARROW, SIGNAL = 9.3
tccgtaaaatttccccaatctattatggtatatattgatttttgcttttcataacttcaatatcataatttgtaacagaaaatttggtgcttaaatatgtactgtcttgtattgactatactatttccttttttatattcatattttttcccaacgaaaccaaaagttttttgatggcaggcaaaaagttttatgcattttcttttggtataccatagctagcataggcagttaccacaagagtcaggacattctaggcaatttaaaaacaaagaaagaagtaaaagcagaagaaggaagaggaggaggaggaggaggaaaaggaggaggaggaagaggagggcgaaaaggaaggaaggaagaagaagaggaagaagaagaagaagaggaagaggaagaggaagaagaagaagaggaagaagaaagaggaggaggaggaggtggaaag

SEQ ID NO: 4128 - DNA, 469 bp, Homo sapiens
  MAP TO AL035534.1; EXPRESSED IN BONE MARROW, SIGNAL = 0.64; EXPRESSED IN FETAL LIVER, SIGNAL = 0.61; EXPRESSED IN ADULT LIVER, SIGNAL = 0.75; EXPRESSED IN HEART, SIGNAL = 0.86
cactctgtcagtgttgtgaaaggaaatacctgttacagattggaaaggtgctgaaaaataggaaagactcttaattgggacactaatttattcaataacagtttgttgccatccaatgaactatgacaacaatgcctcggttacatctttggacatttattgataaaggtaactatggcaacaaaagaagaggtcaggagaatcctagccagcgtgttcctgactgctttgtttagatcagcgttcgcacttcagtcaggcctctgttagggttatgaggcatcttccccaagtgacggcatagttgcttcagataatgctcagatgagttctgacggcgtggaacagtggtcttaacactctcatcttctgtaagaatacaaatttctacttttctagaaagatatttagcaccattgtcaagatttcttaaaatgttttttatacccaagcctttcatctttatatc

SEQ ID NO: 4129 - DNA, 414 bp, Homo sapiens
  MAP TO AC012071.2; EXPRESSED IN HELA, SIGNAL = 3.9; EXPRESSED IN HBL100, SIGNAL =   3; EXPRESSED IN HEART, SIGNAL = 4.1; EXPRESSED IN FETAL LIVER, SIGNAL = 4.3; EXPRESSED IN BRAIN, SIGNAL = 4.2; EXPRESSED IN LUNG, SIGNAL = 4.3; EXPRESSED IN BONE MARROW, SIGNAL = 4.1; EXPRESSED IN PLACENTA, SIGNAL =   4; EXPRESSED IN ADULT LIVER, SIGNAL = 3.5; EXPRESSED IN BT474, SIGNAL =   5
agaacatcaccaccattcccagccaaagatccaaaacaatcagaaggtgtaatcatccattgatgctgaggagggatggagtagcatggtgtctgcagaagaaagcaggaatttttggattgctactgtgaagcaaaagagatgggaccaggaaataagtgaaaagactgtccaaggatatagaggaagttactgaagttgggagcaaaattagtaatgatcttgagccaaacttaagacttcttcttaccagctcccttctcgcaccacctacctccaagcagtcgtcaagacctgccctttctcgctctgcaatagctcccaatgtgtcctcttctttactttctggatgcagctccctaattcagcttatcttctctctagcttgaaggcagcagtgggtgcagtgaaata

SEQ ID NO: 4130 - DNA, 1966 bp, Homo sapiens
  MAP TO AL031058.1; EXPRESSED IN LUNG, SIGNAL = 1.1; EXPRESSED IN HELA, SIGNAL =   5; EXPRESSED IN HBL100, SIGNAL = 1.3; EXPRESSED IN PLACENTA, SIGNAL = 8.1; EXPRESSED IN HEART, SIGNAL = 8.2; EXPRESSED IN ADULT LIVER, SIGNAL = 1.1; EXPRESSED IN BT474, SIGNAL =  14; EXPRESSED IN FETAL LIVER, SIGNAL = 1.6
ggtctgcaacttacagttccttctatagaaaaaaatagtaagtatgaagccatttattgaagtggcaacatatacagaatttttcccacaaatttgtaaaataacaagctcacagtgtatccagggacaatatagaaagaaaaaataagcaaggcttttttttttaaagatagatacacaaaagaaagttaagtcgtgatagtaatatgatatgattcaaaacattattttttcccatttctttcttcttcaattccaggcatctaataggattcaggaatcaaagaatcagtgtactcaggtggtacaggaaagagagagccttctggtgaaaatcaaagtcctggagcaagacaaggcaaggctgcagaggctggaggatgagctgaatcgtgcaaaatcaactctagaggcagaaaccagggtgaaacagcgcctggagtgtgagaaacagcaaattcagaatgacctgaatcagtggaagactcaatattcccgcaaggaggaggctattaggaagatagaatcggaaagagaaaagagtgagagagagaagaacagtcttaggagtgagatcgaaagactccaagcagagatcaagagaattgaagagaggtgcaggcgtaagctggaggattctaccagggagacacagtcacagttagaaacagaacgctcccgatatcagagggagattgataaactcagacagcgcccatatgggtcccatcgagagacccagactgagtgtgagtggaccgttgacacctccaagctggtgtttgatgggctgaggaagaaggtgacagcaatgcagctctatgagtgtcagctgatcgacaaaacaaccttggacaaactattgaaggggaagaagtcagtggaagaagttgcttctgaaatccagccattccttcggggtgcaggatctatcgctggagcatctgcttctcctaaggaaaaatactctttggtagaggccaagagaaagaaattaatcagcccagaatccacagtcatgcttctggaggcccaggcagctacaggtggtataattgatccccatcggaatgagaagctgactgtcgacagtgccatagctcgggacctcattgacttcgatgaccgtcagcagatatatgcagcagaaaaagctatcactggttttgatgatccattttcaggcaagacagtatctgtttcagaagccatcaagaaaaatttgattgatagagaaaccggaatgcgcctgctggaagcccagattgcttcagggggtgtagtagaccctgtgaacagtgtctttttgccaaaagatgtcgccttggcccgggggctgattgatagagatttgtatcgatccctgaatgatccccgagatagtcagaaaaactttgtggatccagtcaccaaaaagaaggtcagttacgtgcagctgaaggaacggtgcagaatcgaaccacatactggtctgctcttgctttcagtacagaagagaagcatgtccttccaaggaatcagacaacctgtgaccgtcactgagctagtagattctggtatattgagaccgtccactgtcaatgaactggaatctggtcagatttcttatgacgaggttggtgagagaattaaggacttcctccagggttcaagctgcatagcaggcatatacaatgagaccacaaaacagaagcttggcatttatgaggccatgaaaattggcttagtccgacctggtactgctctggagttgctggaagcccaagcagctactggctttatagtggatcctgttagcaacttgaggttaccagtggaggaagcctacaagagaggtctggtgggcattgagttcaaagagaagctcctgtctgcagaacgagctgtcactgggtataatgatcctgaaacaggaaacatcatctctttgttccaagccatgaataaggaactcatcgaaaagggc

SEQ ID NO: 4131 - DNA, 409 bp, Homo sapiens
  MAP TO AC011330.4; EXPRESSED IN BT474, SIGNAL = 6.4; EXPRESSED IN ADULT LIVER, SIGNAL = 9.4; EXPRESSED IN BRAIN, SIGNAL = 6.2; EXPRESSED IN BONE MARROW, SIGNAL = 6.9; EXPRESSED IN LUNG, SIGNAL =  13; EXPRESSED IN HELA, SIGNAL = 8.4; EXPRESSED IN PLACENTA, SIGNAL = 9.9; EXPRESSED IN HBL100, SIGNAL = 5.2; EXPRESSED IN HEART, SIGNAL = 6.7; EXPRESSED IN FETAL LIVER, SIGNAL = 8.7
tattcactctgaggccctggacacataatactgtctcctacctcttttcctggaggcttcctctttttctttccttttcttttctgagtcctcagccttccccatgactccttaggtcttaatagtaacagaatataacccagtaacacctatcacttccctgtccattaattctccataactttcctccttcccctcttctcccaccccccaccccagctccgcattgtggtctccagtttcctacggcagagtggtcggcatgtgagccacctggacttcgttcatctgacagcgctgggttatactctctgtggactgcggccagaggagctccagcacatcagcagttgggagttcaggtcatttgtgaaggggctgagggtggtggtgctgaggtaaaggtgga

SEQ ID NO: 4132 - DNA, 379 bp, Homo sapiens
  MAP TO AC012073.1; EXPRESSED IN FETAL LIVER, SIGNAL = 4.8; EXPRESSED IN BT474, SIGNAL = 3.4; EXPRESSED IN ADULT LIVER, SIGNAL = 4.6; EXPRESSED IN BRAIN, SIGNAL = 3.7; EXPRESSED IN BONE MARROW, SIGNAL = 4.3; EXPRESSED IN LUNG, SIGNAL = 5.3; EXPRESSED IN HELA, SIGNAL = 4.3; EXPRESSED IN PLACENTA, SIGNAL = 4.3; EXPRESSED IN HBL100, SIGNAL = 3.5; EXPRESSED IN HEART, SIGNAL = 3.9
acctcacaggagtcccttccccgctccaggtgatatctgttctatgatggggttggaccaagcagcctagagcacactgtagcttcaacatctgctggcagcttcctccgccaggctgatgaatgctgtgggaggccttgcttctagtccctggaaaacctcttgaagcccacagcacctagcgggtcccacaaagatgcagccctccacagcctgctctgccatcagagcccgcgccccgggccggcgtacctgacgttctcgtgacggtacatgtacatggtgttgaactgctgctggtccttctggctctcgtctttcttcatgtctttcagcatctcgtcagccacgtgcttgggcaggatggaaagcatgaggt

SEQ ID NO: 4133 - DNA, 367 bp, Homo sapiens
  MAP TO AC007460.1; EXPRESSED IN BONE MARROW, SIGNAL = 1.3; EXPRESSED IN LUNG, SIGNAL = 1.6; EXPRESSED IN PLACENTA, SIGNAL = 1.4; EXPRESSED IN HBL100, SIGNAL = 1.5; EXPRESSED IN HELA, SIGNAL = 1.5; EXPRESSED IN HEART, SIGNAL = 1.3; EXPRESSED IN ADULT LIVER, SIGNAL = 1.5; EXPRESSED IN BT474, SIGNAL = 1.7; EXPRESSED IN FETAL LIVER, SIGNAL = 1.4; EXPRESSED IN BRAIN, SIGNAL = 1.2
aggaagctccccctctattcctagtttactgagagtttttatcaagaatggtgttggattttgtcagatgcgttttctgcatctattggtctgatcacgtgatttttcttctttagtttcttgatgtgattgattacattgttttttttgaatgttgagccagccttgcatacctgggataaatcccacttagtcttggtgtatagttctttttttaaaattttaatttaatttatttatcttacaatccagacttcaaggaggtatagttcttgtataccttgttggatttgatttgctaatactttattgaggatatttgcatctgtgttcataagagatatttgtctgcagttttcccttcttg

SEQ ID NO: 4134 - DNA, 411 bp, Homo sapiens
  MAP TO AC009721.9; EXPRESSED IN FETAL LIVER, SIGNAL = 8.7; EXPRESSED IN LUNG, SIGNAL = 8.9; EXPRESSED IN BONE MARROW, SIGNAL = 9.8; EXPRESSED IN PLACENTA, SIGNAL =  11; EXPRESSED IN HELA, SIGNAL = 8.7; EXPRESSED IN BT474, SIGNAL = 7.5; EXPRESSED IN ADULT LIVER, SIGNAL = 8.6; EXPRESSED IN BRAIN, SIGNAL = 9.1; EXPRESSED IN HEART, SIGNAL = 7.3; EXPRESSED IN HBL100, SIGNAL = 9.6
agaattgtcttgggccacacataaaatacgctaacacaaatgatagctgatgagctaaaaaaaaaaaaatttttttttttaaatcatgaaaaactctcataatgtttttaaaaaaagtttacgaatttgtgtcagaccgcattcgaagccgtcctgggccacatgccgcccacgggctgtacaagcttgcctgaaggtatacttaatagagtataccttaaggctttgtctcccctatcctagtaaaaccattctttttctttaaaatagctcaatcgcatgcttaccctgtgatgccggatgtaacatagtctttccccaagtagttataaccatggcgaacgaggtcctcacacacatccttcactttactgcctccaaacgcagtgccgtagtggaatctgccgtcca

SEQ ID NO: 4135 - DNA, 422 bp, Homo sapiens
  MAP TO AC007163.2; EXPRESSED IN BONE MARROW, SIGNAL = 1.5; EXPRESSED IN ADULT LIVER, SIGNAL =   2; EXPRESSED IN BT474, SIGNAL = 1.3; EXPRESSED IN BRAIN, SIGNAL = 1.4; EXPRESSED IN HEART, SIGNAL = 1.5; EXPRESSED IN HELA, SIGNAL = 1.5; EXPRESSED IN HBL100, SIGNAL = 1.5; EXPRESSED IN FETAL LIVER, SIGNAL =   1
ggaagcaatgcatgatggagtgactagatataagaaggctggatcctaaacacacagaatgccatagaagtcctggactgcccacttctagactttttgaatgtgagaaacttctgtcttttccactccttggaaccaaagataatttcagctcatgcaagtaatgttttccaaagaaagttgatttttccagagcaaaccagtggcaaggaaaaacaattagatccttcattaagatttttacaaaggtacttttaattctacaaccgtagggagagaccggccagccctgtttaccttgatcgtgaagattacaggttccagatcttcataggtgagctttatcttttcagctgctcgttttgcctgtacgtctgtttctgcaaccacagcacagatgatctggcccacacagactacct

SEQ ID NO: 4136 - DNA, 441 bp, Homo sapiens
  MAP TO AC007489.2; EXPRESSED IN PLACENTA, SIGNAL = 9.1; EXPRESSED IN HELA, SIGNAL = 8.6; EXPRESSED IN HBL100, SIGNAL = 7.6; EXPRESSED IN HEART, SIGNAL = 6.6; EXPRESSED IN ADULT LIVER, SIGNAL =  12; EXPRESSED IN BT474, SIGNAL = 6.9; EXPRESSED IN FETAL LIVER, SIGNAL = 9.2; EXPRESSED IN BRAIN, SIGNAL = 7.4; EXPRESSED IN BONE MARROW, SIGNAL = 6.9; EXPRESSED IN LUNG, SIGNAL =  11
cagactccaaatcccagcagaaattttttattagtcactggatctactttcttaggtccactcagcctaatttattttgaatgcgtgtttgccagttaagtttaacatatccagttaacgatagctgaatattctctaaaaacaatcttataatgaagctacggttctttgtagaatattgaaaattacttttggcatgcaagttcgtttccttaattcctcttttagtgtgcaaataacctttgaaaacctgcttctaggtgtttatgtgtcaggacagtatcaaaaattattcaattgccaagtcacatgtcaacacttctactacaaagcctctgagaaccctgattctcactactctgctgccctctagtggaaacctgacaaatcctcgccttcatttcaatttatttatttcaatggaagcatcgaatggaaaac

SEQ ID NO: 4137 - DNA, 226 bp, Homo sapiens
  MAP TO AP000219.1; EXPRESSED IN LUNG, SIGNAL = 0.82; EXPRESSED IN HELA, SIGNAL = 0.92; EXPRESSED IN BRAIN, SIGNAL =   1; EXPRESSED IN HEART, SIGNAL = 0.88; EXPRESSED IN BONE MARROW, SIGNAL = 0.87; EXPRESSED IN PLACENTA, SIGNAL = 0.86; EXPRESSED IN BT474, SIGNAL = 0.85; EXPRESSED IN ADULT LIVER, SIGNAL = 0.81; EXPRESSED IN FETAL LIVER, SIGNAL = 0.72; EXPRESSED IN HBL100, SIGNAL = 0.71
ttccagaatcagtgggatgccaggcgggcatagcgtccttgctccgcccgggccatgcggagctgggtcccatgcagctccatgaccgggggctccgacacctcttttctgctcctgctgggtctaggtgtaattccagtgctgggggaagaagttaccctcagataaacggtcggtgtaattccagtgctgggggaagaagttaccctcagataaaccgtcggtg

SEQ ID NO: 4138 - DNA, 394 bp, Homo sapiens
  MAP TO AC012111.1; EXPRESSED IN FETAL LIVER, SIGNAL = 1.2; EXPRESSED IN BT474, SIGNAL =   1; EXPRESSED IN ADULT LIVER, SIGNAL = 1.1; EXPRESSED IN BRAIN, SIGNAL = 1.1; EXPRESSED IN BONE MARROW, SIGNAL = 1.2; EXPRESSED IN LUNG, SIGNAL = 1.1; EXPRESSED IN HELA, SIGNAL =   1; EXPRESSED IN PLACENTA, SIGNAL = 0.89; EXPRESSED IN HBL100, SIGNAL =   1; EXPRESSED IN HEART, SIGNAL = 1.1
aggtggcagaagagagatggagaaggaaaacacatcaaggacattttaaaaatgcaaattattatgttttaatagctaagagtgaattatatttctgttcaggtgaaattcatggtcaaaacattcagtcagtcctgggctataataatttggctatcatgcaagggaattacttacaaaatgctggtttgtcaccgctttgagacacattgaatgtcacacccactcccaaggggattttcttttgcagactttctagaagcattttattaagcaccgccacgtgccaaaggcagtgcgaagccctccagtgcactgagttgacagacaactccacgcccgtgggtggggctttgttctcccacgcccgtgagccagtaaagggcagcctagg

SEQ ID NO: 4139 - DNA, 405 bp, Homo sapiens
  MAP TO AF127936.1; EXPRESSED IN PLACENTA, SIGNAL = 1.7; EXPRESSED IN HELA, SIGNAL = 1.8; EXPRESSED IN HEART, SIGNAL = 1.5; EXPRESSED IN ADULT LIVER, SIGNAL = 1.8; EXPRESSED IN FETAL LIVER, SIGNAL = 1.8; EXPRESSED IN HBL100, SIGNAL = 1.6; EXPRESSED IN BT474, SIGNAL = 1.5; EXPRESSED IN BRAIN, SIGNAL = 1.6; EXPRESSED IN LUNG, SIGNAL = 1.8; EXPRESSED IN BONE MARROW, SIGNAL = 1.8
atgaagagcaccgaaaatggtaaatatatgaataaatatagaatgagattgtcttcttttttaagtttcttaaaagataattggctctctgctcctttctgttccacaaacagccatgtgttcttgtgaagtgccaggcacatacctaagacataatggtaaaggtccaagtcaccagatttgtccacatagagcacctggactctagggcggctttaaaacttcaacaaagagtcatcatcaatgactccttcattgtataaacaacatggtgtacatattccagtatgatttaatacatggcaatttcagtggcactgttgaggctgagaacaagaagcttgtccacaatgggaaggccatctctattttccagaagccatatgctgcctacatcaaatgggt

SEQ ID NO: 4140 - DNA, 479 bp, Homo sapiens
  MAP TO AP000199.1; EXPRESSED IN HELA, SIGNAL = 0.99; EXPRESSED IN BRAIN, SIGNAL = 1.2; EXPRESSED IN HEART, SIGNAL = 1.1; EXPRESSED IN PLACENTA, SIGNAL = 0.9; EXPRESSED IN BONE MARROW, SIGNAL = 1.1; EXPRESSED IN BT474, SIGNAL = 0.88; EXPRESSED IN ADULT LIVER, SIGNAL = 1.3; EXPRESSED IN LUNG, SIGNAL = 1.3; EXPRESSED IN FETAL LIVER, SIGNAL = 0.66; EXPRESSED IN HBL100, SIGNAL = 0.83
cgccttccttcttctcagacccaacatttaacagtgactgtgtatccatcacaccattcccgcacagccccaccctccacagcggaaggaaaagctcccatcgaaagacgcagaagggaaagaaacaataatataggaagtgttttgtatttatagaggacataggcaggcagatgagtgaatgacttcagtactctcagctcttcaaaatcattatcaaacatttcacatcttcaagctgctgatagggtaaactcttcctttcattataacagggttttcatatttggtttgtttcatttaggaagaaccctatgttatgtacaggaaatctgataagcctctatatggaaatgacagatttgaaggatattgcctagacctgttgaaagaattgtcaaacatcctgggtttcatttatgatgttaaactagttcccgatggcaaatatggggcccagaatgacaaaggggagtgga

SEQ ID NO: 4141 - DNA, 457 bp, Homo sapiens
  MAP TO AC010857.2; EXPRESSED IN HEART, SIGNAL = 1.3; EXPRESSED IN ADULT LIVER, SIGNAL = 1.9; EXPRESSED IN FETAL LIVER, SIGNAL = 1.3; EXPRESSED IN BONE MARROW, SIGNAL = 1.8; EXPRESSED IN LUNG, SIGNAL = 1.4; EXPRESSED IN BRAIN, SIGNAL = 1.9; EXPRESSED IN PLACENTA, SIGNAL = 1.3; EXPRESSED IN HELA, SIGNAL = 1.4; EXPRESSED IN HBL100, SIGNAL = 1.5; EXPRESSED IN BT474, SIGNAL = 1.5
gctccagttcctggactttgaagaatgcttccctcacctgttatgtctgccatggccagccctagccccagatgaaggttcattctgaaaagcaaaggggccatgtgtcagtcagagagagggtagactttctgtggggtaggctggataaatatggcaggggccacggaagaccaaggctcctcatatactcatcttgagccagtcaagatgtggctgccaagggcttaccatgctaccccttttcacctacatcagaggtttcctcatgtgtcagcaacatgtgtacccctgcatccaatatagaaattccaggggaatcttccatctgtgctttccttttccaaatgatggccacttcctctgtttcaactgtttctctatttgttggtttgttaagaatcaataaatcacactttctatatttgaacactccttccatcattgactacctctg

SEQ ID NO: 4142 - DNA, 482 bp, Homo sapiens; identical to SEQ ID NO: 1598
  MAP TO AC010136.2; EXPRESSED IN HEART, SIGNAL = 2.7; EXPRESSED IN FETAL LIVER, SIGNAL = 5.5; EXPRESSED IN ADULT LIVER, SIGNAL = 1.6; EXPRESSED IN LUNG, SIGNAL = 6.3; EXPRESSED IN BONE MARROW, SIGNAL = 1.2; EXPRESSED IN HELA, SIGNAL = 1.4; EXPRESSED IN PLACENTA, SIGNAL = 2.6; EXPRESSED IN BRAIN, SIGNAL = 1.3

SEQ ID NO: 4143 - DNA, 407 bp, Homo sapiens
  MAP TO AC007189.6; EXPRESSED IN PLACENTA, SIGNAL = 2.3; EXPRESSED IN ADULT LIVER, SIGNAL = 2.5; EXPRESSED IN BT474, SIGNAL =   2; EXPRESSED IN FETAL LIVER, SIGNAL = 2.7; EXPRESSED IN BONE MARROW, SIGNAL = 1.9; EXPRESSED IN LUNG, SIGNAL = 2.4; EXPRESSED IN BRAIN, SIGNAL = 2.1; EXPRESSED IN HELA, SIGNAL = 2.1; EXPRESSED IN HBL100, SIGNAL = 2.3; EXPRESSED IN HEART, SIGNAL = 1.9
accaggaacagaaggaccaggactcctacagaaccaaatgtcctattagccaaatatccatctggccaaggtgtgttggaggaaccggagtctctctcctcatccatgtaagaatatcactagtgtgtctgctattttgcctgctaaccaagagcagaaagttttaggtccatagtaatcctgttatatttaccttttctctttatagagatatttcaagaacaaggatccattccctgcctagctatggcttagaaaatcttaagaagctgagggccaggtcgacttacaacttaaaaaagctgcctactctggaaaagcttgtcgccctcatggaagccagcctcacctatcccagccattgctgtgcctttgcaaactggagacggcaaatgtgagtccatcct

SEQ ID NO: 4144 - DNA, 404 bp, Homo sapiens
  MAP TO AC010885.2; EXPRESSED IN HELA, SIGNAL = 3.5; EXPRESSED IN BRAIN, SIGNAL = 3.7; EXPRESSED IN HBL100, SIGNAL = 3.6; EXPRESSED IN HEART, SIGNAL = 3.2; EXPRESSED IN FETAL LIVER, SIGNAL = 3.7; EXPRESSED IN ADULT LIVER, SIGNAL = 4.5; EXPRESSED IN BONE MARROW, SIGNAL =   4; EXPRESSED IN LUNG, SIGNAL = 4.3; EXPRESSED IN PLACENTA, SIGNAL = 4.3; EXPRESSED IN BT474, SIGNAL = 3.2
atgactcccacatcagcaccccaattaaatagactttttcctgtttatcacctttcctttaatttcctcattcaaagcattattcagttgtcctctcctcttgctgcttaagcctctcaccagctctcagtcaatgctcccagatgcagctttcattgcatgtgatgttgtttaatttcacttgtcttatctataatcacatcaagccatttatttgttaataggctgtttggtggcttcacagttggaattgctgtacatcacatttcatttccacaaggacatcctttatgccggtctgccttatgtggcattcgtctcttcctcttgccaggctgggccagcttctcccgctgtaccttccacatcagctgttcattttccccctgctgctgtcactgata

SEQ ID NO: 4145 - DNA, 431 bp, Homo sapiens
  MAP TO AC007502.2; EXPRESSED IN BT474, SIGNAL = 0.94; EXPRESSED IN BRAIN, SIGNAL = 0.99; EXPRESSED IN BONE MARROW, SIGNAL = 1.2; EXPRESSED IN LUNG, SIGNAL = 1.2; EXPRESSED IN FETAL LIVER, SIGNAL = 1.4; EXPRESSED IN ADULT LIVER, SIGNAL = 1.5; EXPRESSED IN PLACENTA, SIGNAL = 1.1; EXPRESSED IN HEART, SIGNAL = 1.3; EXPRESSED IN HELA, SIGNAL = 1.1; EXPRESSED IN HBL100, SIGNAL = 0.98
tcatgctttctggtctgcacaccttgttattgctgatctctctacctgtaccaccatctaaggtgtggagagatttatagcaactgatctataattctcatgatgccccagtaatcctctgccatatggcataattctgtagggctttttttttcccccaattaggctgtaagttccttggtgggtgtgctcatacccctaaatctctcttaccagcaagcaccagtgccaatacatgggtgtaaggcagatactgccaagtgtttgcatctacgcatctgcttacatcatctagttgtgtgcttacatcatctacccatgtgcttacatcatctacccatgtgcttgcatcatctatccatgtgcttacatcatctacccaagtgcttacatcatctacccatgtgcttacatcacctacccatgtgctt

SEQ ID NO: 4146 - DNA, 373 bp, Homo sapiens
  MAP TO AC008069.2; EXPRESSED IN BT474, SIGNAL =   1; EXPRESSED IN BONE MARROW, SIGNAL = 0.77; EXPRESSED IN HBL100, SIGNAL = 2.3; EXPRESSED IN FETAL LIVER, SIGNAL = 0.69; EXPRESSED IN BRAIN, SIGNAL = 0.74; EXPRESSED IN HEART, SIGNAL = 0.83; EXPRESSED IN PLACENTA, SIGNAL = 0.77
gtggagctgaagaaagagggtcacccttggcagggagaggagccttctatgtaagtcacattggtgggtgtgaacttttgtttcccattcctaaccaatcaaccaatcagctcagcaattttttttaaaaaaattgttatttatttattcatttttgtattagagacagcatattgctatgttgcccaagctgttctgaaattcctggcctcgagcaatcctcccacctctgccttccctggaattataggcatgagccacaataccctgctagctcagacttttgaaaacatctatcctgactgtgttgctgaacagctcattaaaataagaataataataataataaaggacattcataacaagacttcca

SEQ ID NO: 4147 - DNA, 474 bp, Homo sapiens
  MAP TO AC009225.1; EXPRESSED IN BT474, SIGNAL = 0.66; EXPRESSED IN FETAL LIVER, SIGNAL = 0.64; EXPRESSED IN HELA, SIGNAL = 0.91; EXPRESSED IN BRAIN, SIGNAL = 1.2; EXPRESSED IN HEART, SIGNAL = 1.2; EXPRESSED IN PLACENTA, SIGNAL = 0.81; EXPRESSED IN BONE MARROW, SIGNAL = 0.93; EXPRESSED IN HBL100, SIGNAL = 0.69; EXPRESSED IN LUNG, SIGNAL = 0.88; EXPRESSED IN ADULT LIVER, SIGNAL = 0.93
gccagtaatgaaggctggagggccagcaggcatcctagattgtgagttgatcttgaggatggaagttatgggctctaaaggtagatattgtgactacagaaccatcagcatcccagcatgggatatcctaactccatgcttcttatctaacagacaaaggaacccacagaaatcttgttcaagtcactattttctgatatttaacttaactgaaccaaaaaagggataaggataaatgtcagaccaaagactacactaaaggctgaaatgagtacgtacgagatgaggtgcacagcatcagcatgctgcttaatgcgctgccggtattttgagaactcatggagcatctgcacagggttggtggtgatgtcaatctgatccttctcagtccaggtctctacagccaccaggacaaccctggtgttgagctgctccttgtaaatctgagggtatacaacaggacaggtgcaggag

SEQ ID NO: 4148 - DNA, 469 bp, Homo sapiens
  MAP TO AP000179.1; EXPRESSED IN LUNG, SIGNAL =   1; EXPRESSED IN HELA, SIGNAL = 1.3; EXPRESSED IN HEART, SIGNAL = 1.2; EXPRESSED IN BT474, SIGNAL = 0.99; EXPRESSED IN FETAL LIVER, SIGNAL = 0.96; EXPRESSED IN ADULT LIVER, SIGNAL =   1; EXPRESSED IN BRAIN, SIGNAL = 1.1; EXPRESSED IN PLACENTA, SIGNAL = 0.85; EXPRESSED IN BONE MARROW, SIGNAL = 1.1; EXPRESSED IN HBL100, SIGNAL = 1.2
tgtgttgtgagtctgtgacaccacatgtttatgtgtttcccttttgtttaaataaaccataccgaaaccaagtatattttgattaggaatctatgatccttccttctgatgtcattcatcaaatgttaataataagtgagaattttccactaaaatgctttcaaggtcatggaggcaaaaaatgaatacattcctacagcacagggacaaagcatcattttctatagaaagttggtaatggaaatttctatcacatttttcctcatcaaacttaacagcagcattaacttttcttctcttcatcaagccatgtaaggaacaacttacttcactttcaggtcgtttctctccacttaggagctggaaaatttcgacacactcaacagaaatctttatatacccttccacaacatcatacacatcttctcgtggtagcttcttggcagcagacacaaacgcttccaagcct

SEQ ID NO: 4149 - DNA, 454 bp, Homo sapiens
  MAP TO AF045448.1; EXPRESSED IN BT474, SIGNAL = 4.5; EXPRESSED IN BONE MARROW, SIGNAL = 4.2; EXPRESSED IN LUNG, SIGNAL = 4.5; EXPRESSED IN HBL100, SIGNAL = 3.3; EXPRESSED IN HELA, SIGNAL = 2.7; EXPRESSED IN ADULT LIVER, SIGNAL = 5.3; EXPRESSED IN FETAL LIVER, SIGNAL = 3.9; EXPRESSED IN BRAIN, SIGNAL = 4.7; EXPRESSED IN PLACENTA, SIGNAL = 4.2; EXPRESSED IN HEART, SIGNAL =   3
agtttccctcctcatccctggacggcaagtgactgtccccttctaaataagcagtttttgtctctgtagaagctgaactagaggaaatatgacctcctgggcatgaggccagctgaagtaggcaaccatactgaaaacaaggggtctatataagaagttcacattctgaaaggggagaccctccattcccttccctacttgcttctagaacactggcagccagatttatctcccactttccatcacccccacctccactaccatcaccaccaccaacaccaacatcaccaccactaccatcaccaccaccatcacccacctcaccaccactaccaccatcaccaccatcactgtcaccaccaccaccatcaccaccaccatcatctccaccatcaccaccacaatcaccacctctaccactccaccaccaccatcaccaccatgaccattacca

SEQ ID NO: 4150 - DNA, 472 bp, Homo sapiens
  MAP TO AP000114.1; EXPRESSED IN LUNG, SIGNAL = 1.6; EXPRESSED IN HELA, SIGNAL = 0.76; EXPRESSED IN BRAIN, SIGNAL = 0.9; EXPRESSED IN HEART, SIGNAL = 0.81; EXPRESSED IN PLACENTA, SIGNAL = 0.83; EXPRESSED IN BONE MARROW, SIGNAL = 0.75; EXPRESSED IN BT474, SIGNAL = 0.71; EXPRESSED IN ADULT LIVER, SIGNAL = 0.96; EXPRESSED IN FETAL LIVER, SIGNAL = 0.77; EXPRESSED IN HBL100, SIGNAL = 0.84
ctgctcacaaacatggttccactgtttcttttcagttggtgtcattggattcccaagttttttcctagacactaaaattgcctctctgagttgctcaatagtatcgcttatttccttttgcttaaggatccattctggttggtatccattatcgatcagtattcggttcaggttgtgagtcatgggatcaatgtaagaacagtcagaaaactttttcagaggttttcctttcccactgagattgtcaaagtctccttttgccatggattcttgaatgaggtcctccactaaacgttctatagcttgcgttatcttttgctgtttgctctgtcttatatttttaacaattacactatcaggaaaatactggctttgtagtttctgcttttgatattccatcacttgttcagcagcacggtctgccctaaattgcctataatgcttctctcgttgagttggagtcccaaaacca

SEQ ID NO: 4151 - DNA, 391 bp, Homo sapiens
  MAP TO AC007111.1; EXPRESSED IN HBL100, SIGNAL = 3.7; EXPRESSED IN HELA, SIGNAL = 3.1; EXPRESSED IN PLACENTA, SIGNAL = 2.2; EXPRESSED IN HEART, SIGNAL = 2.2; EXPRESSED IN ADULT LIVER, SIGNAL = 2.3; EXPRESSED IN BT474, SIGNAL = 2.3; EXPRESSED IN FETAL LIVER, SIGNAL = 2.4; EXPRESSED IN BONE MARROW, SIGNAL = 2.3; EXPRESSED IN BRAIN, SIGNAL =   2; EXPRESSED IN LUNG, SIGNAL = 1.7
gagactggtccaccttcacctttgggaatgatctgcttgaggcccatggcagtttgggtccctgctggggcacacccagacggtgctcctggaagcctcccgtgaaggcgcctggagtccagggtggtggggctgccggctggcctgtgccacacgttggcaggctctgcctcttccatgtgcaacaggcctgggctcacatcagagaactcaggccaagaactcgggctggggtagggagctgaactagcacctaccgaggtcagaatgacaccgcggaagctcttgtcattctccagcttctccaggctgatgaccagctccgtcagaaactccaggctcaggctgttcactggggggttcttgaatttcatcacagcgacccctaatt

SEQ ID NO: 4152 - DNA, 470 bp, Homo sapiens
  MAP TO AC008038.1; EXPRESSED IN HEART, SIGNAL = 0.82
tgtgcttatgtccacttttaaaccacaggcaacctggatttcctagtaagttagatgattctgcaaattatattaatattagaatcatttcttacaatacgaattaatggattcagcatttttacactgtctaatacaaaagtgtgtgcagaattcctaatagaaatagttagacattgtaattctcactgccatcacaatacagaagaaaatctctttacaatcttttgcattacgcctagaaaatacttcatcattagagacctaaatgtctctcacatattcctggaagaaatccaaagtgacaaaattcaacttgagtactttgagaatgacagtaacaaacaaaaacaggactgtacagaaatgtgcaaaagacacaaggaagttgaataatattaattctatgattatcgttatcttatacacaatggaaagtaagcaaatattctttcatggcaacagctgat

SEQ ID NO: 4153 - DNA, 409 bp, Homo sapiens
  MAP TO AF121782.1; EXPRESSED IN HEART, SIGNAL = 1.7; EXPRESSED IN BT474, SIGNAL = 1.9; EXPRESSED IN BONE MARROW, SIGNAL = 1.8; EXPRESSED IN PLACENTA, SIGNAL = 3.5; EXPRESSED IN HBL100, SIGNAL = 1.9; EXPRESSED IN HELA, SIGNAL = 2.2; EXPRESSED IN ADULT LIVER, SIGNAL = 2.1; EXPRESSED IN FETAL LIVER, SIGNAL = 1.9; EXPRESSED IN BRAIN, SIGNAL = 1.9; EXPRESSED IN LUNG, SIGNAL = 3.6
agatggtggtgagccacttccaagatggcggcaagcctcgtgttctctgacctggggttcttggcctcacgaattccaaggaatggaatcttgggccatgcggtgagtgttatagctctattagaagctgtgggtcatgggagagaaccatggaagccagtgactagtgtttagctcgattaggatgaacccaggcacttagccatgcaggaacaatggcgagcctttagcctgattggaagtggcaatgggcgcctcactggatcaggagcacagcagatactctgccggatctggaggaatggaagtcagcggcgggtctgcgatggtggcaaacagcagtggtggacggtgagtgaaagctcagctcgagccgtaacaaacacggaccagaagagtgcagttgcaa

SEQ ID NO: 4154 - DNA, 449 bp, Homo sapiens
  MAP TO AC009305.1; EXPRESSED IN FETAL LIVER, SIGNAL = 0.78; EXPRESSED IN ADULT LIVER, SIGNAL =   1; EXPRESSED IN HEART, SIGNAL = 0.8
ggcaggaagagtacaggtgggtgaggaagatatgagaaggggaataataatatgccagaaaagagatatgtgttataaaaatgatttgcctaaagtactatagaaggagagtttatttctgcctgaagacagagaaggctctaaagaagatgaggtgcttgggctgttcttggaaagatggacaggatttgagcagaatggggtggtctgaggggcactgcaggccaggggagatgaagatacagggtcctacctgtcacactcagggctgcaggggtagagtaaaagtttcatcatggctgtccctcatggtacatgaggatgtacgaatgagtagtgatgatgaggtcagagaggtacatgcattggtcgtgggcagggcttgggatcccatgctacggcattcatattgtgaactataggcaagatgatgggaagaaggtgagcag

SEQ ID NO: 4155 - DNA, 461 bp, Homo sapiens; identical to SEQ ID NO: 800
  MAP TO AP000108.1; EXPRESSED IN PLACENTA, SIGNAL = 1.1; EXPRESSED IN BT474, SIGNAL =   1; EXPRESSED IN BONE MARROW, SIGNAL = 1.3; EXPRESSED IN HBL100, SIGNAL = 0.92; EXPRESSED IN FETAL LIVER, SIGNAL = 1.1; EXPRESSED IN LUNG, SIGNAL = 1.1; EXPRESSED IN HELA, SIGNAL = 1.2; EXPRESSED IN ADULT LIVER, SIGNAL = 1.1; EXPRESSED IN BRAIN, SIGNAL = 0.98; EXPRESSED IN HEART, SIGNAL = 0.99

SEQ ID NO: 4156 - DNA, 469 bp, Homo sapiens
  MAP TO AC009721.9; EXPRESSED IN BT474, SIGNAL = 4.5; EXPRESSED IN FETAL LIVER, SIGNAL = 5.3; EXPRESSED IN BRAIN, SIGNAL = 4.1; EXPRESSED IN BONE MARROW, SIGNAL = 4.3; EXPRESSED IN LUNG, SIGNAL = 5.9; EXPRESSED IN PLACENTA, SIGNAL = 4.7; EXPRESSED IN HBL100, SIGNAL = 4.2; EXPRESSED IN HELA, SIGNAL = 5.5; EXPRESSED IN HEART, SIGNAL = 4.5; EXPRESSED IN ADULT LIVER, SIGNAL = 5.8
gactaagccaagcaggttgcctgtcccaggctgattgacatccatgtaacacacttgtgagttcaatatttgcctctcagagaaaataagtgacttcatgaaaattaagtactgaggaaattcaagtgagacattgaatttcttactttacaatgtttttgaattgtttgaaattttgatagcaaagtattacagtgaagttgaagttgtcaaagtaccaaagtaagtaagtactttgataacttaaaaaaaataactaaaatgctttaaaactgtgcataaattacttaaagttggggtggtagggaggacaagcctgatgaggctggactcacctttccaaagctggcagcattgacaggttgggtatcattcttctcgcagaaatccaggtaatgcatatagagggcactgcgagggatgcagaccccctctgcaatctcatagttctcctccagcctagggaaat

SEQ ID NO: 4157 - DNA, 455 bp, Homo sapiens
  MAP TO AC008940.2; EXPRESSED IN BRAIN, SIGNAL = 2.8; EXPRESSED IN BONE MARROW, SIGNAL = 2.5; EXPRESSED IN LUNG, SIGNAL = 4.8; EXPRESSED IN PLACENTA, SIGNAL = 4.2; EXPRESSED IN HELA, SIGNAL = 3.5; EXPRESSED IN HBL100, SIGNAL = 3.5; EXPRESSED IN HEART, SIGNAL = 3.4; EXPRESSED IN BT474, SIGNAL = 4.3; EXPRESSED IN ADULT LIVER, SIGNAL =   2; EXPRESSED IN FETAL LIVER, SIGNAL = 3.3
ttcctttgtgtgagtgcagagaataagcagaagacaagattctgtagcacaggtagtaggtaggacatgctgcctgatgggtcagtaccctcttggccaccttctaccacttgggcctgctgatctttagccacactgatgctctcgaatggttctcttgcttggtcccctgtaggacaggtctcataaccaagtttatgaaatggctggacaagattagaagttcaagctttggccatggaaaacaacagatctattggtctgtgccagaaacagatcacaaaaatctctctgctctcatgagcagcagcagcagcagcagcagcaacatttcaccaagagtgcaggtccaatccgatggggatatcagcttcatgggaggctgggggaggacagcaaggaagatcagaaacaaacatgtttagaaaaatgtccccatttttccacctcaggaa

SEQ ID NO: 4158 - DNA, 386 bp, Homo sapiens
  MAP TO AF064860.1; EXPRESSED IN PLACENTA, SIGNAL = 0.92; EXPRESSED IN HEART, SIGNAL = 0.94; EXPRESSED IN FETAL LIVER, SIGNAL = 0.97; EXPRESSED IN ADULT LIVER, SIGNAL = 1.2; EXPRESSED IN BONE MARROW, SIGNAL = 1.1; EXPRESSED IN BRAIN, SIGNAL = 0.96; EXPRESSED IN LUNG, SIGNAL = 1.2; EXPRESSED IN HBL100, SIGNAL = 1.1; EXPRESSED IN HELA, SIGNAL =   1
agctgggctgtcaggtagctcttattttccatgtccattctgttctattctactagtaactgtctgtcttttccagcatttcccaagtcttcccttaccctttatggtgattctgcagaaggaacaagctggtaaaagcacttttgggagactggggaaaggaatacaaatattcctgtgttaactattttctggccccaagtaggctattggtgacctttggtatgttcagataagcagtgggaatggaggccggagtacagtgggttgaggttaattacgtgatggatgaagtggtgcgagtggtgagtacaggctgtctgttgcagaagcttgatttggaagggaaagaaaataagaggctgacaaggagacgccacgtaatt

SEQ ID NO: 4159 - DNA, 375 bp, Homo sapiens
  MAP TO AC007198.6; EXPRESSED IN LUNG, SIGNAL =  10; EXPRESSED IN HELA, SIGNAL =  10; EXPRESSED IN PLACENTA, SIGNAL =  11; EXPRESSED IN HEART, SIGNAL = 7.9; EXPRESSED IN ADULT LIVER, SIGNAL =  11; EXPRESSED IN BT474, SIGNAL = 7.7; EXPRESSED IN BONE MARROW, SIGNAL = 9.4; EXPRESSED IN HBL100, SIGNAL =  10; EXPRESSED IN FETAL LIVER, SIGNAL =  12; EXPRESSED IN BRAIN, SIGNAL = 8.8
aaaaggaaaaggtgagcagcccagtgtgcagcacttgaaactccacagacttcataggcttcttggcttgtggagctggagaagcttatgagaggccagtgagtctataccatggtctctccccgcgaggccatcgaggccttggggaaagaccatcccacaggttccctcaataccatgctccaggggatgacaacttcttccttctatcttctcatcccctgtggcctttggttgagattttgtcacacatgcatgccccctggccccagggccttctgtctcttcttcagactttacaatctttacattcatttcaatccccttaccaacacttctggaaaccccagcgttgccactgtgctcaaagctgag

SEQ ID NO: 4160 - DNA, 441 bp, Homo sapiens
  MAP TO AC007738.2; EXPRESSED IN FETAL LIVER, SIGNAL =  21; EXPRESSED IN ADULT LIVER, SIGNAL =  32; EXPRESSED IN BT474, SIGNAL =  20; EXPRESSED IN BRAIN, SIGNAL =  24; EXPRESSED IN BONE MARROW, SIGNAL =  20; EXPRESSED IN LUNG, SIGNAL =  24; EXPRESSED IN HELA, SIGNAL =  22; EXPRESSED IN PLACENTA, SIGNAL =  25; EXPRESSED IN HBL100, SIGNAL =  22; EXPRESSED IN HEART, SIGNAL =  21
aaaaatgaccatgggaaagcgcgctggagaaaaatgtttaagaagctgatggacattcataacatagtttttctttttatattcaagcaaaaaataactgtgccccatatagtgtagtcaatctgtacctgtgataatatatttggtaaagaaaagaataacaatgcagtttgtacattctgactttccccctccatcttagggaagaatatagagttattctacctggctagatccatgcagctatcagtgaggttggtagaagaattgaagtactctctgctggcagccaaaaccaagtcaatactcttttcgtagctgaccctgtagtggggtttccctttatgggctataccagctggaggattttctgaacaagcactgcagtgcatcatctgtccagccaggtggatgttttcaaggcgactagagcacagaagg

SEQ ID NO: 4161 - DNA, 395 bp, Homo sapiens
  MAP TO AC007321.1; EXPRESSED IN PLACENTA, SIGNAL = 6.3; EXPRESSED IN HBL100, SIGNAL = 6.1; EXPRESSED IN HEART, SIGNAL =   5; EXPRESSED IN BT474, SIGNAL = 6.2; EXPRESSED IN BRAIN, SIGNAL = 5.6; EXPRESSED IN ADULT LIVER, SIGNAL = 6.6; EXPRESSED IN FETAL LIVER, SIGNAL = 4.3; EXPRESSED IN LUNG, SIGNAL = 6.2; EXPRESSED IN BONE MARROW, SIGNAL = 5.2; EXPRESSED IN HELA, SIGNAL = 6.6
aatattcagcaggctgggtgcagacatttatgaaaagacacagcattacattttttaagacttgtgatgttaaagcatcttctgatcacaaagtagtagagaaattcactgatgagtttgccgaaacatgatgaaaatctgatgccagaacaagtctataatgctaatgaaacattgctgttttggtgttattgccctagaaatggatattgaaagtgtttttaacattgataatgaggctctagttcttcactcattgactgattgtgaagagtcaaaatggttccaaatcaaggtaagcatgatagtattgatgaccaagatgatgtcgatactgcaggaaaagtggctatagatgacatggtgaaaatgtatgatgggcttgttgaaggagt

SEQ ID NO: 4162 - DNA, 447 bp, Homo sapiens
  MAP TO AF153342.2; EXPRESSED IN FETAL LIVER, SIGNAL = 1.1; EXPRESSED IN LUNG, SIGNAL = 1.1; EXPRESSED IN BONE MARROW, SIGNAL = 1.4; EXPRESSED IN HEART, SIGNAL = 1.1; EXPRESSED IN HELA, SIGNAL = 1.7; EXPRESSED IN PLACENTA, SIGNAL = 1.1; EXPRESSED IN ADULT LIVER, SIGNAL = 1.5
atggaacagatgaaggcgacagtaactgaagcacagtgagcatggatggggcatagtctggggagaactgtggtatgagccaaagttggaaaggcaagtgccaatcaggtaatcccaggccacactggccactgtaaagagtccggatctcatcccaaagaaatcgggcaaccggcaaagtgctttaagccagagggggccacagctggttttgtgtttttaacagggcattatggagcagggaatgagaaagggtgagacaggccagttagtagactactggaggacctacgtggtcaagtggatagagagaaatgaggcctgtccgcacagcgagtgccgggccgatctggttcacagccatgacatctctgaccccagggtccacacttttaacaacaggtttgattaaagacgttttaattaagggaacactgcaattaaggc

SEQ ID NO: 4163 - DNA, 441 bp, Homo sapiens
  MAP TO AF091512.1; EXPRESSED IN ADULT LIVER, SIGNAL = 1.5; EXPRESSED IN FETAL LIVER, SIGNAL = 1.2; EXPRESSED IN BONE MARROW, SIGNAL = 1.3; EXPRESSED IN HEART, SIGNAL = 1.1; EXPRESSED IN HBL100, SIGNAL =   2
tcttctatgcagctgggtccagacatatgagagggacaaaccagtgagtgtctccgagttcctcctcttgggactctccaggcagccccagcagcagcatctcctctttgtgttcttcctcagcatgtacctggccactgtcctggggaacctgctcatcatcctggccataagcatagactcccgcctgcacacccccatgtacttcttcctcagcaacatgtcctttgtggacaactgcttctccaccaccgtccccaagatgctggccaatcacatactcaggactcaaaccatctccttctctggctgtctcatgcagatgtattttatcagtgagcttgctgacatggacaatttcctcctggctgtgatggcctatgaccgctttgtcgccgtgtgccgccccttacattacacagcaaagatgacccatcagct

SEQ ID NO: 4164 - DNA, 411 bp, Homo sapiens
  MAP TO AC007335.2; EXPRESSED IN PLACENTA, SIGNAL = 6.9; EXPRESSED IN HBL100, SIGNAL = 6.1; EXPRESSED IN HEART, SIGNAL = 5.9; EXPRESSED IN FETAL LIVER, SIGNAL = 8.4; EXPRESSED IN ADULT LIVER, SIGNAL =  12; EXPRESSED IN BT474, SIGNAL = 6.1; EXPRESSED IN BRAIN, SIGNAL = 6.4; EXPRESSED IN BONE MARROW, SIGNAL = 6.2; EXPRESSED IN LUNG, SIGNAL =   7; EXPRESSED IN HELA, SIGNAL = 7.6
caagaggagctggaggtctgtgacctcatgcccacacctgggggctcagttcttgcacactgaacaatggcaaagagccctttttgtcttcacctctcagggcctctgttttctcaacggtgaaatgggattgtgtctcttccagttctaggcgtctgtgagtctgtgctttttcttccttaaccccacactccagcaggtaaagaatatagccaaagtagaggatttgctgttgaacactacacatttacttcccaggtcgctatttcttctccctcctcctggtcttttccctgctccttctcttcctcctcttcctcctcctccttgtcttcctccttctcctcctcctccatgtcctcatccatctcattctccttctcctctttctcttcctcctctgcctccttt

SEQ ID NO: 4165 - DNA, 388 bp, Homo sapiens
  MAP TO AC009646.2; EXPRESSED IN FETAL LIVER, SIGNAL = 2.3; EXPRESSED IN BONE MARROW, SIGNAL = 2.2; EXPRESSED IN BT474, SIGNAL = 1.8; EXPRESSED IN BRAIN, SIGNAL = 1.7; EXPRESSED IN LUNG, SIGNAL = 2.4; EXPRESSED IN PLACENTA, SIGNAL = 2.6; EXPRESSED IN HEART, SIGNAL = 1.9; EXPRESSED IN HELA, SIGNAL = 2.3; EXPRESSED IN HBL100, SIGNAL = 2.1; EXPRESSED IN ADULT LIVER, SIGNAL = 2.6
gtccttcctgtctgctcctgcccctgtggcctctggcaagaggccttaccttcccttatatatgtgttctgaatgccctacaatcccattgtttttataagtaagtagattttactagagtttcagaaatagctataaaaaattgcaatgtagaattaaaattttaaactggatgcttaataggactgatcacagagttcaagggaaaaacaaagaaaaattaaatccttcacatgagctcttccttgcatacaccttgtagttagccttcttttccttgtataggatattttcccctctctgcctctcagagagctaccccttcaaacttctctacaacctccaaatctccttttcctctagaatttgtttgttcacccaccaagga

SEQ ID NO: 4166 - DNA, 392 bp, Homo sapiens
  MAP TO AC008015.5; EXPRESSED IN HELA, SIGNAL = 2.8; EXPRESSED IN PLACENTA, SIGNAL = 2.7; EXPRESSED IN HBL100, SIGNAL = 2.2; EXPRESSED IN HEART, SIGNAL =   2; EXPRESSED IN BT474, SIGNAL = 2.8; EXPRESSED IN BRAIN, SIGNAL = 2.1; EXPRESSED IN ADULT LIVER, SIGNAL = 2.9; EXPRESSED IN FETAL LIVER, SIGNAL = 2.6; EXPRESSED IN LUNG, SIGNAL = 2.2; EXPRESSED IN BONE MARROW, SIGNAL = 2.3
cgtagggggtactcaacaggcagtgcctttgttattattatcaaggtcgtcaatgcaatgtaggtgagactgtctctttcttgaccacagcccatatcctccttcaaaactgtgtcgttcaaggtttcccttgaagccactggaacacaaatgttggaggggcccaaagtgagggccatcacagatggcccagtggccaaatcgtctattggacatctctagaagcagacattgctcccgctgacccagggtccaatgggcccagttgtttgggctctcatctgggaagctgggatggcagtggtgttgcccagccacttcaccactccatacatcacagctgcctgaaggtacaacagaggtcactagagtccctatccctcatcccaaat

SEQ ID NO: 4167 - DNA, 424 bp, Homo sapiens
  MAP TO AJ011930.1; EXPRESSED IN BT474, SIGNAL = 4.7; EXPRESSED IN FETAL LIVER, SIGNAL =   6; EXPRESSED IN BONE MARROW, SIGNAL = 5.6; EXPRESSED IN LUNG, SIGNAL = 6.2; EXPRESSED IN HELA, SIGNAL = 6.3; EXPRESSED IN HEART, SIGNAL = 5.8; EXPRESSED IN ADULT LIVER, SIGNAL = 6.6; EXPRESSED IN BRAIN, SIGNAL = 5.2; EXPRESSED IN PLACENTA, SIGNAL = 5.4; EXPRESSED IN HBL100, SIGNAL = 5.4
agcagggaggaggaggtaacgatcggagggctgcttgattgatcacaggttcacattattgctcacaggcttcagatgtgcctcatcacaagaaacaccgcgcttgacgcgtaactgccctcagcatttcttcggggcagcagacgcagtttgtcagtttgccagcattctgcatttatgagaacagtttgctgtctactcatacagcctccagtggtatactgagtggatcacgaccctcactctttcggcctgcaacacttgtctagtcttagcatgtgatggggcctctgcttccctgctcccctcaacagctgtccagccgtcttaaggacacagtcaagaatatgaacaaagatagtgtttgcaatggttttcatggtagaaaagacctgactgccacagggaagactgatagggcctc

SEQ ID NO: 4168 - DNA, 413 bp, Homo sapiens
  MAP TO AJ229041.1; EXPRESSED IN PLACENTA, SIGNAL = 4.4; EXPRESSED IN HEART, SIGNAL = 3.4; EXPRESSED IN BT474, SIGNAL = 4.2; EXPRESSED IN BONE MARROW, SIGNAL = 3.8; EXPRESSED IN BRAIN, SIGNAL = 3.3; EXPRESSED IN LUNG, SIGNAL = 3.3; EXPRESSED IN HELA, SIGNAL =   4; EXPRESSED IN HBL100, SIGNAL = 3.3; EXPRESSED IN ADULT LIVER, SIGNAL = 3.8; EXPRESSED IN FETAL LIVER, SIGNAL = 3.6
tttgtgtaggaaaggcagggtatgtgcttgacactctctttactcatcagttctcaaaataacaaattggtttactagtcttctccaaaggcagtcagtgattttacagtgttcttatgaaattttggatgaaatctatttggtatgtttccatctgttacagttagtgtccttactcatgctcaccttgtgccatccttgaccagtggggcctcataagttgatttctgagtcctttgaagcactctggctgtctttgatggcttccttgctttccagtgtgacggtgcattgaagggccctcttctacataccctgtttcaggcccggagtcagccattactctgggatgtcctgttcctttgttttgggaaacgatatttggagcaccaagagaccctgtttccaccata

SEQ ID NO: 4169 - DNA, 469 bp, Homo sapiens
  MAP TO Z83826.12; EXPRESSED IN LUNG, SIGNAL = 0.68; EXPRESSED IN BT474, SIGNAL = 0.73; EXPRESSED IN BONE MARROW, SIGNAL = 0.86; EXPRESSED IN HBL100, SIGNAL = 0.96; EXPRESSED IN FETAL LIVER, SIGNAL = 1.3; EXPRESSED IN HELA, SIGNAL = 1.3; EXPRESSED IN ADULT LIVER, SIGNAL = 3.1; EXPRESSED IN HEART, SIGNAL = 1.1
cagatatatttaaaaggctacagcaacatctacccgctccttacagcctggtccagtgaggggtattccctcctctcaaagtccacctccaggcttcttgttctacttcaggtacctgattctctaggtgcagttttgaagtagttgaccatgtttgaagtggtagatgatttttctagtaattattcttagctgcctgattattttaaagttaataatgtgtaagacctcaaaagggctttaaaaacaacccaaaactacctggttgaaacgactgctcaaaaaataaactttcagttaaatgttcctttaatcttttttcctcttcttccttttgttgttcttttgctgatgggagaagagtagcaacaacctcttttcttcccaaagccttcctttggctttgctcggaaacttggagacggaatttgtctattacaccatagtgacaggatcgaacatctcgatg

SEQ ID NO: 4170 - DNA, 389 bp, Homo sapiens
  MAP TO AC007939.1; EXPRESSED IN FETAL LIVER, SIGNAL = 0.75; EXPRESSED IN LUNG, SIGNAL = 0.68; EXPRESSED IN PLACENTA, SIGNAL = 0.87; EXPRESSED IN BT474, SIGNAL = 0.72; EXPRESSED IN BONE MARROW, SIGNAL = 0.71; EXPRESSED IN HBL100, SIGNAL = 1.1; EXPRESSED IN HEART, SIGNAL = 0.9
  unsure 200
  unsure 352
tttgtgcttcctttggttttgtttatatggaaaacctggtttttttatggctttctgatttcttcaccttaactgcatcatttcttcctccactttttatctgaaatagatatgatttcagttcaatgtcttaaaatattggtttaacaaaatctatttgatctttaaagttgacagcaaatattctaaaattcttcggnttctccattttttttaggtatactctgaaactaatgattgataaagcaagtttaggtccaatagaagactttagagaactgattaagtaccttgaagaatatgaacgtgactggtacattggtttggtatctgatgaaaagtggaaggaagncaattttacaagaaaagccatacttgttttctctggg

SEQ ID NO: 4171 - DNA, 472 bp, Homo sapiens
  MAP TO AL049837.3; EXPRESSED IN BONE MARROW, SIGNAL = 1.1; EXPRESSED IN LUNG, SIGNAL =   1; EXPRESSED IN ADULT LIVER, SIGNAL = 0.91; EXPRESSED IN PLACENTA, SIGNAL = 1.1; EXPRESSED IN BT474, SIGNAL = 1.1; EXPRESSED IN HBL100, SIGNAL =   1; EXPRESSED IN FETAL LIVER, SIGNAL = 1.1; EXPRESSED IN HELA, SIGNAL = 1.1; EXPRESSED IN BRAIN, SIGNAL = 1.4; EXPRESSED IN HEART, SIGNAL = 3.1
gaaggttgccacattgactgacactttcatgaaagatttctctatagcatgcaatgctgtttgatagcactttacccacagtagaacttctttcaaaatagaagtcaatcccctcaaaccctgctgctgttttagcaactaagtttatgtaatatcccagatcttttgttgacatttcaacagtgtttatagcatcttcactgggagtagattgcatctcacgaagccactttcttttcttatccataggaaacaacttctcatccattcaagttttagtatgagattgcagcaatccagtcacatcttcgggcgccacttctaactctagttctcttactatttctgtcatatccacagtgacttccttcactgaagtcttgaacccctcaaagtcttccatgaggcttagaatcaacttcttccaaactcctgtaattgttgacattttgaccttctcccatgaatcaca

SEQ ID NO: 4172 - DNA, 423 bp, Homo sapiens
  MAP TO AL031005.1; EXPRESSED IN HBL100, SIGNAL =   3; EXPRESSED IN BT474, SIGNAL =   3; EXPRESSED IN BRAIN, SIGNAL = 2.7; EXPRESSED IN HELA, SIGNAL = 3.4; EXPRESSED IN HEART, SIGNAL = 2.6; EXPRESSED IN PLACENTA, SIGNAL =   3; EXPRESSED IN ADULT LIVER, SIGNAL = 3.4; EXPRESSED IN FETAL LIVER, SIGNAL = 3.1; EXPRESSED IN LUNG, SIGNAL = 3.5; EXPRESSED IN BONE MARROW, SIGNAL = 3.3
ctgcctctgtctcccaaaagtcccgcaattacgggcgttcatgcccggccacaggtgatatttgtatcaccattttatgaaggaggagaatgaacttaagaaaggttacgaaatttgcccaaggctacaaagctggtagtttgaaagaggctgggatttaaacctgtgcctgtaaccaggatgtcctgctgcctctcgtaaaagcccgcccaggtcccactctcctgagtcagactgtcatccccacccctgcccacctgcccaagaagagggctgtctgtgagaggcgtgccccaggccactgggggtcctcttaccatctgtcggtggtgttgatgagagtggagatctgctcaaggtattccttgtcatagaccacaataggctcggattcattgatctccacggggtagaagatggtgt

SEQ ID NO: 4173 - DNA, 456 bp, Homo sapiens
  MAP TO AC007347.2; EXPRESSED IN LUNG, SIGNAL = 1.9; EXPRESSED IN HELA, SIGNAL = 2.2; EXPRESSED IN PLACENTA, SIGNAL = 1.9; EXPRESSED IN HBL100, SIGNAL = 1.8; EXPRESSED IN HEART, SIGNAL = 1.6; EXPRESSED IN ADULT LIVER, SIGNAL = 2.5; EXPRESSED IN BT474, SIGNAL =   2; EXPRESSED IN BRAIN, SIGNAL = 1.7; EXPRESSED IN BONE MARROW, SIGNAL =   2; EXPRESSED IN FETAL LIVER, SIGNAL =   2
cactcattgtagttggggaggtagaatagggtagacggcaagaacttggactctatattcagatggtcctgggtggcaatctgtgctctcccacttactggtagagttactttcagcaagtcacttgtttagactctagtctcctcatctataaggcgggaataatattaacacagctgacacttgagcaacacaggtttacactgtgcaggtccacttatacgtggatctttcaaaataaaagctgcaccaagtatgcctgcctctcctgcctccccttccacctcttctgcctctgccacctccaagacagcaagacccacccctccactccctcctcctcctcctcctcctcttcagcctactcaaagtggagacaatgaggatgaagacctttaagatgatccacttccacttaatgaatagtaaatacattttctcttcttcgtgattttc

SEQ ID NO: 4174 - DNA, 449 bp, Homo sapiens
  MAP TO AC010092.2; EXPRESSED IN HELA, SIGNAL = 1.3; EXPRESSED IN ADULT LIVER, SIGNAL = 1.5; EXPRESSED IN BRAIN, SIGNAL = 1.1; EXPRESSED IN LUNG, SIGNAL = 1.7; EXPRESSED IN BONE MARROW, SIGNAL = 1.1; EXPRESSED IN PLACENTA, SIGNAL = 1.5; EXPRESSED IN HEART, SIGNAL = 1.3; EXPRESSED IN HBL100, SIGNAL = 1.3; EXPRESSED IN BT474, SIGNAL = 1.3; EXPRESSED IN FETAL LIVER, SIGNAL = 1.6
ttggattggttccatcagtgctttatccctgaagtcaggaagtaccttgccaataagggatcaccttttaaggttcttttgatactggacaatgcccctggccacctaggagcccatgagtccccaaacacaacaatatctaattcagcctctagatcaagaggtcttaaggaactttaaggctcgttacacatgatactctatggaaaggattgtcagtgctgttaaagaggacaccagtagacagaacatcatgaaagtctggaaggattacaccactgaagatgtcatcattgttttagaaaaagccatgaaagccatcaagcctgaaagagtacattgctgcaagagaaaaccgtgtccagttgttgcatatgactttgcaggatttatgacagaggcagtcaaggaaatcatgaaagagactgtggatatggcaaagaaggtgg

SEQ ID NO: 4175 - DNA, 463 bp, Homo sapiens
  MAP TO AC007353.1; EXPRESSED IN BRAIN, SIGNAL = 3.3; EXPRESSED IN LUNG, SIGNAL = 3.6; EXPRESSED IN HELA, SIGNAL = 3.4; EXPRESSED IN PLACENTA, SIGNAL = 4.6; EXPRESSED IN ADULT LIVER, SIGNAL = 4.8; EXPRESSED IN FETAL LIVER, SIGNAL =   4; EXPRESSED IN BT474, SIGNAL = 2.9; EXPRESSED IN BONE MARROW, SIGNAL =   3; EXPRESSED IN HEART, SIGNAL = 2.5; EXPRESSED IN HBL100, SIGNAL = 2.9
acttgtttggggttgagcagcaagaaggcttcttagtgactgagataattttggagatcctggcactcagaggatatctggggactcagaaggggttaagcttcacttcattaaagtgctaagatggtcaggaaggagaagaagagacaaatgaggttcacctgaagatgcatggaaggttgtggaaatgagggtctgtgggcactgttctggagagtctctcactcccatgcttcctctgcagggaactgtccaagagaagagtgcagcttgatgttgaaaaagaaactaaaagtcctccactgctttgcaaagcagtgaaatccaggagacctgtgatgcccaccatagaggtcctttcatggcttgcactgggtgcagcaagtggcacaagtctcaggcccctggagttcaatagtcatcactttggaaagcttagtgaacttccgaggtgagtcaaagg

SEQ ID NO: 4176 - DNA, 425 bp, Homo sapiens
  MAP TO AC010872.3; EXPRESSED IN FETAL LIVER, SIGNAL =  18; EXPRESSED IN BT474, SIGNAL =   4; EXPRESSED IN ADULT LIVER, SIGNAL =  12; EXPRESSED IN BRAIN, SIGNAL = 4.1; EXPRESSED IN LUNG, SIGNAL = 4.7; EXPRESSED IN BONE MARROW, SIGNAL = 2.2; EXPRESSED IN PLACENTA, SIGNAL =   5; EXPRESSED IN HEART, SIGNAL = 7.8; EXPRESSED IN HELA, SIGNAL = 2.8; EXPRESSED IN HBL100, SIGNAL = 2.2
gtacggttgagctgcatgtggaatccaggactgtttcaacataatctgctttgtttttcaaactggcactccaagtggcattatacacgggagagtctacctcacagcgtgcagtcagtgcttgacaggaggcatgacaattgcagcagtacagagaacttaatggaggatctcaatggtctgctcaggcacgatgatggtggcaactcaaagtctgcgatcttgttggctactgcatttagatccaaagcagcaatgccatctgaaacactttttggaagcgtgaactgggacacagttaactgagattcaggcacggttatctcaaaaaagggaatcaaggagtcttctggttgagaatattttgttaacacatcaacttcagggaattttacctcggggagtgttggtaggttgagggcaaa

SEQ ID NO: 4177 - DNA, 429 bp, Homo sapiens
  MAP TO AC008132.26; EXPRESSED IN HELA, SIGNAL =   3; EXPRESSED IN PLACENTA, SIGNAL = 3.8; EXPRESSED IN HBL100, SIGNAL = 2.8; EXPRESSED IN HEART, SIGNAL = 2.6; EXPRESSED IN FETAL LIVER, SIGNAL = 2.8; EXPRESSED IN ADULT LIVER, SIGNAL = 3.5; EXPRESSED IN BT474, SIGNAL = 3.9; EXPRESSED IN BRAIN, SIGNAL = 2.9; EXPRESSED IN BONE MARROW, SIGNAL = 2.5; EXPRESSED IN LUNG, SIGNAL = 3.1
ctccaggtgttggaactgtgcacagaggagggagcaggccccgagggaggcctggaggggctgccaatggtgaaggctgctgtgtcgagctgtttccttccggacccactccctctgggctgcgtccccggctggtccaagccctgatccctgggatctggggacatcttcccgtttgctgttccctgagaaccaggcctccctctggagaggatcacaagcttgggtttcactctgggcttgctcttgggaaccccccaggggcatggctctgaccgagatgttttcctccagcctgttgcccagtccccattcctcggaccctcagcttcacctccagtgtcatcggcagggtgagctggacgcctacgggtctgagaaggcgcccgggttcccagcatcggctggccaccctctgcctaagaaagc

SEQ ID NO: 4178 - DNA, 448 bp, Homo sapiens
  MAP TO AC006269.8; EXPRESSED IN BT474, SIGNAL = 0.68; EXPRESSED IN BONE MARROW, SIGNAL = 0.73; EXPRESSED IN HBL100, SIGNAL = 1.1; EXPRESSED IN FETAL LIVER, SIGNAL = 0.64; EXPRESSED IN PLACENTA, SIGNAL = 0.72; EXPRESSED IN BRAIN, SIGNAL = 0.79; EXPRESSED IN HEART, SIGNAL = 0.79
gtggcacaaaataccaacccccaacccccattcacacttctttaaactagcttgagcaaaaggattatttattgtgcaaagcctgttgacgtcttacagactcttaagcacaggagtgcagtggacctctgcaacctgaatgctgttgaaatttttttttttttttacgtccgtctgtttctgtgcatctacctctttcttcttttattcagacagctgcttttttctctcctgagaaaaaaaggattaattagactaatccagagtccctcatgaaacctgttgtgggtatgggttgggtttttggtggggagggcatcctcactcagcatactgaaatggaagaatgctatcctctctttaggttctgtggtattcatgcttttctctgtactactgatggtcacaaagttagcctaaagggaagtgcggaatatgggcatatgtc

SEQ ID NO: 4179 - DNA, 446 bp, Homo sapiens
  MAP TO AL021332.1; EXPRESSED IN FETAL LIVER, SIGNAL = 1.5; EXPRESSED IN BONE MARROW, SIGNAL = 1.4; EXPRESSED IN LUNG, SIGNAL = 1.3; EXPRESSED IN HELA, SIGNAL = 1.5; EXPRESSED IN HEART, SIGNAL = 1.5; EXPRESSED IN BT474, SIGNAL = 1.2; EXPRESSED IN ADULT LIVER, SIGNAL = 1.4; EXPRESSED IN BRAIN, SIGNAL =   1; EXPRESSED IN PLACENTA, SIGNAL = 1.3; EXPRESSED IN HBL100, SIGNAL = 1.1
ggtccagaaggcagactgagccctgtggctcaactaagggttcttggggccctgctatggcagggaatagggagggggagcagctaacctagcagggctctttcttcctctcccaccataaaagctcgggttttacctgttttatttattggggtctcctgttaagcttttactataaatggtactgacatggttgagatgttatgtaatccccagtgttgaaggtggggcatagtgggaggtgctgggatcaaggtgatggatccctcatggctggcttggagctgtcctcaagatagtgagttcttgtgagacctggttggttaaaagtgtgtggcacctttcccatttctctcatggtcctgctctcaccatttgatgtgccagctcccgctttgctttctgccatgactgcaaggttcctgaggtcctcaccagaagcacat

SEQ ID NO: 4180 - DNA, 486 bp, Homo sapiens
  MAP TO AL031116.1; EXPRESSED IN BONE MARROW, SIGNAL = 1.8; EXPRESSED IN PLACENTA, SIGNAL = 2.1; EXPRESSED IN HBL100, SIGNAL = 1.8; EXPRESSED IN BT474, SIGNAL = 1.9; EXPRESSED IN LUNG, SIGNAL = 1.9; EXPRESSED IN BRAIN, SIGNAL = 2.5; EXPRESSED IN HEART, SIGNAL =   2; EXPRESSED IN HELA, SIGNAL = 1.6; EXPRESSED IN ADULT LIVER, SIGNAL = 2.2; EXPRESSED IN FETAL LIVER, SIGNAL = 1.9
caaataggcattcttttcaggaagaaaattgtataagtaatccaatcacacctatcatattttttactactcacggtatataggtggcagcacggaggaagtgaaccagagaaagattttactctataactatgttacacacaaaaatgtttttttttctttgtattagtcagggctctccagagaaatagaactgttagaatgtgtgtgtgtgtgtgtgtgtgtgtgtgtgtgtgtgtggtgtgtgtgtgtgtgtgtgtgtgtgcatgtgtatggagagagagaaggagacagatttattataaggaattgtctcacatggttaggggcactgagaagtcccaagatctgcagttggccagctggagacccaggagagctgatggtgtaagttccaatctgaaaactagcaggttcaagatcaaagaagagctgatgtatcagtttgagtctacagacagaaacaaaagacctatttcccagctc

SEQ ID NO: 4181 - DNA, 423 bp, Homo sapiens
  MAP TO AC010136.2; EXPRESSED IN LUNG, SIGNAL =   4; EXPRESSED IN PLACENTA, SIGNAL = 3.3; EXPRESSED IN HELA, SIGNAL =   3; EXPRESSED IN ADULT LIVER, SIGNAL = 3.7; EXPRESSED IN BRAIN, SIGNAL =   3; EXPRESSED IN BONE MARROW, SIGNAL = 3.4; EXPRESSED IN HEART, SIGNAL = 3.3; EXPRESSED IN HBL100, SIGNAL = 3.1; EXPRESSED IN BT474, SIGNAL = 3.6; EXPRESSED IN FETAL LIVER, SIGNAL = 3.6
tgcagtctgctgtgtgtgagccatgccttcataataaatgaaaaaaagccaaggtaggagccatgcgggggctgcaggtccctggagctggactctccagctgccgtctggactcaggccatgggccccacctgagtctgggatgaacatcctgtcaccccacacctttctctgtccctgggccctcctccctcctctggaccctgaggggctcttgccatccttttccctgtccctgcctacctctcccccaggctcctctactccttccccaggaccccagccttctacccagggctgactctgtgcctctcctcccacagccagaggatctggaggcccccaagacacaccgcttcaaggtgaagaccttcaagaaggtgaagccctgtgggatctgccgccaggtcatcacccaggaag

SEQ ID NO: 4182 - DNA, 375 bp, Homo sapiens
  MAP TO AC010888.2; EXPRESSED IN HELA, SIGNAL = 1.9; EXPRESSED IN ADULT LIVER, SIGNAL = 2.7; EXPRESSED IN BRAIN, SIGNAL = 1.6; EXPRESSED IN LUNG, SIGNAL = 2.6; EXPRESSED IN BONE MARROW, SIGNAL = 2.4; EXPRESSED IN PLACENTA, SIGNAL = 2.5; EXPRESSED IN HEART, SIGNAL =   2; EXPRESSED IN HBL100, SIGNAL = 2.1; EXPRESSED IN BT474, SIGNAL =   2; EXPRESSED IN FETAL LIVER, SIGNAL =   2
tgacctgagtgagtcttacctcctacagacaaagggctgacattgtggaaaatcagacacaagcccttatcgtgtgagtggctgagctgcaacaaaaggtgcacactcagcctcaccaggtgtctactgttaaagtgagggcattgattggaaaagaatgggtccctgcaacttggaatggggatgtgtgggaagaccctgatgaggctggagccactgtgcccagtagtgacaacatccctacccacaaccacactaccatcagccttctcacctttctctgaggagaacaaccatgcactgcctgaggcaacagtgatggcctcccctgaggcagttgccatgccagacaatgctgattctcctcaggaccca

SEQ ID NO: 4183 - DNA, 428 bp, Homo sapiens
  MAP TO AC008496.2; EXPRESSED IN HEART, SIGNAL = 9.7; EXPRESSED IN BT474, SIGNAL = 2.2; EXPRESSED IN BRAIN, SIGNAL = 2.3; EXPRESSED IN LUNG, SIGNAL =   2; EXPRESSED IN HBL100, SIGNAL = 2.2; EXPRESSED IN HELA, SIGNAL = 2.2; EXPRESSED IN PLACENTA, SIGNAL = 2.3; EXPRESSED IN ADULT LIVER, SIGNAL = 2.3; EXPRESSED IN FETAL LIVER, SIGNAL = 2.6; EXPRESSED IN BONE MARROW, SIGNAL = 1.9
ggaggttgttgttttcattctgtttactcacacactgctctgtaaagtcaaggttttcttgtcgattttgctcacatgctgattgctatgcatgcagccatcattagtgcaaatgcgcgggagactttttgaataatgtatagcacctaaaggaatgaacagcagacccccccaaaattcaaatcgctgttcttgcaaattctgaaagccaaggatcacttgtgccttacagaatccgggggctctatccccaggtgcaaagtacattttccaggtttctccagggcaaaggcagggtggacaccctcattaaacctgtgcctgatgatgaagagcaactgctcgctctctgcgttgatgaagataagtctctggttgttgtagtccagcaggatgcccactctggctggacgctcagtcacatgaac

SEQ ID NO: 4184 - DNA, 473 bp, Homo sapiens
  MAP TO AC007857.1; EXPRESSED IN HELA, SIGNAL = 0.64; EXPRESSED IN BT474, SIGNAL = 0.87; EXPRESSED IN BONE MARROW, SIGNAL = 0.83; EXPRESSED IN FETAL LIVER, SIGNAL = 0.74; EXPRESSED IN LUNG, SIGNAL = 0.85; EXPRESSED IN BRAIN, SIGNAL = 0.97; EXPRESSED IN PLACENTA, SIGNAL = 0.87; EXPRESSED IN HEART, SIGNAL = 0.89
tgctttgcatatttagccctcaaagagctaagctgcaagaactccaacaagacttattgtttattgaatacccattatgtgtgaggcactatgttaatcaccttacatttattaactcatctaatcctcatgacactgtgaagtagatactattattaccccttttataggtgagcagactaatgaagtcagcctgctgggccttgggttgtcagagagagattctgtatgagggcaattatatttagggctatccccttggcagcctgtgtatgttgaaagtaaagaaaccacttgcatgatgatgatgaccttgatgatgatgatgaccttgatgattatgacaacaacaatgatgatgatgacaatggtggtgatgacattgatgatgacgacaacgatgatgacgacgatgatgatgacagtgatgatgatgagctgatatatgaagtactaaccatgtgctgggcagt

SEQ ID NO: 4185 - DNA, 368 bp, Homo sapiens
  MAP TO AL031132.1; EXPRESSED IN ADULT LIVER, SIGNAL = 4.8; EXPRESSED IN BT474, SIGNAL = 4.7; EXPRESSED IN FETAL LIVER, SIGNAL = 3.3; EXPRESSED IN BONE MARROW, SIGNAL = 4.3; EXPRESSED IN LUNG, SIGNAL = 4.7; EXPRESSED IN BRAIN, SIGNAL = 4.2; EXPRESSED IN HELA, SIGNAL = 4.6; EXPRESSED IN HEART, SIGNAL = 4.2; EXPRESSED IN PLACENTA, SIGNAL = 7.7; EXPRESSED IN HBL100, SIGNAL = 5.2
gaaagaaggggatgtctgggctggaatgtgaaggccaagtatggagtgaaacactcctctaaaatgattctccttacgaggttgaccctcagtccaccatcttgaatctgtaaggaaagctaagagatgaccctcaccagctggagcagaaggctcagttatgcaggctctcctgtcttctgccatcttacctccagaattatgttctggatatttgtatgtctcctgcttttctgatggtggacatatttgaagttcattcttattgattaggctttttccttgactacttaaaaatacaagtctgttcagatatgaggctctcttggatgacatcactgtgttgtccagtttggggcagtctgtct

SEQ ID NO: 4186 - DNA, 452 bp, Homo sapiens
  MAP TO AC010175.4; EXPRESSED IN FETAL LIVER, SIGNAL = 2.5; EXPRESSED IN BT474, SIGNAL = 1.9; EXPRESSED IN ADULT LIVER, SIGNAL = 3.4; EXPRESSED IN BRAIN, SIGNAL = 2.2; EXPRESSED IN LUNG, SIGNAL = 2.9; EXPRESSED IN BONE MARROW, SIGNAL = 2.4; EXPRESSED IN PLACENTA, SIGNAL = 3.3; EXPRESSED IN HEART, SIGNAL = 2.3; EXPRESSED IN HELA, SIGNAL = 2.3; EXPRESSED IN HBL100, SIGNAL = 2.1
ggctctttcctctcctgctcaataagttgccattggaactctgcaaggaaaaattctaaaagtttcagtggtgaatagagcataaatgagaaattaaagcattaatatttgttaggaagtaacttctcttctagcacaaaaacaatacaaaatatattattgttatcttataaatggcattacttagacaggaacccagcaattttggagtctacacaatcagaaggagctacagtgggtcttattcttaccaaatagtagaaggttaattctttttcatccctgagaatctgtttattcagaatgtagtgtgcttgaatctcctgggtttgtccacaggtcaaagtaccaataataggtttgaggtgaatataactcttgcttggggaaaaaaaatgctttgcagtatgagatgtttgcgtatgaaattcatcaagccaccagttatcaga

SEQ ID NO: 4187 - DNA, 423 bp, Homo sapiens
  MAP TO AC010896.2; EXPRESSED IN PLACENTA, SIGNAL = 6.6; EXPRESSED IN HBL100, SIGNAL = 5.7; EXPRESSED IN HELA, SIGNAL = 6.6; EXPRESSED IN HEART, SIGNAL = 5.4; EXPRESSED IN ADULT LIVER, SIGNAL = 7.9; EXPRESSED IN FETAL LIVER, SIGNAL = 7.8; EXPRESSED IN BONE MARROW, SIGNAL = 5.8; EXPRESSED IN BT474, SIGNAL = 5.8; EXPRESSED IN BRAIN, SIGNAL =   5; EXPRESSED IN LUNG, SIGNAL = 7.5
ctgctccaccttggtacctcctagagaagagatcggcagtgacttagaccatctaaaaaagcaaaaaacacagccacccccctatcacctacctggagggtgttgagaatggtgaagatgtaatgagggaccgtggagacttcctctaacagagtggccaggccagccccaggtgaggccaaagatgggtgtaagaatgagcagggctttgatcacccccagcagagcttggcgcttctctgctgggggtccctctgacagcgaaggtctcagcaacttcagcatggccatggctagtaccagcccattcacgcctatgatggccagcactggcccacgaaggtgtataacgcccctcccttcccatccaaccagcattccccctccctcaggtattgcccttgaggtaggtagagccccagg

SEQ ID NO: 4188 - DNA, 450 bp, Homo sapiens
  MAP TO AC007881.2; EXPRESSED IN BRAIN, SIGNAL = 1.1; EXPRESSED IN BONE MARROW, SIGNAL = 1.1; EXPRESSED IN HELA, SIGNAL = 2.1; EXPRESSED IN HBL100, SIGNAL = 1.3; EXPRESSED IN HEART, SIGNAL = 1.1; EXPRESSED IN BT474, SIGNAL = 1.1; EXPRESSED IN FETAL LIVER, SIGNAL = 0.98; EXPRESSED IN ADULT LIVER, SIGNAL = 1.1
gaaagtaaaggttggtggcgtccaatcttggcaagtaaaaagcccgtgatgctggcaacagtaatgttttatagtgctttatgaggagcaatgcatctttaatgcaccccttattaataatgcccataaaacgagcaaagaaacaacagctcacagggctccagacttgttgagggttgtagggctggaaagaaagtctgtcattccaaatcctatattcttttcactacataacctggggaactacatatggctcttaccaaaatatcttcagaatcatgaccttcactgactgacagtccatttaactgctgttgcaactgtcccatggcctgaggcaggtctcgtgagggaataaaccagtcttggtcttcttcatccagcatctcttggaagcagcggtccaagaagtcttgctcctgcagttcctcctccacctagcaagcaaag

SEQ ID NO: 4189 - DNA, 464 bp, Homo sapiens
  MAP TO AC006928.13; EXPRESSED IN HELA, SIGNAL = 0.63; EXPRESSED IN BT474, SIGNAL = 0.65; EXPRESSED IN BONE MARROW, SIGNAL = 0.69; EXPRESSED IN FETAL LIVER, SIGNAL = 0.63; EXPRESSED IN LUNG, SIGNAL = 0.72; EXPRESSED IN ADULT LIVER, SIGNAL = 0.69; EXPRESSED IN BRAIN, SIGNAL = 0.77; EXPRESSED IN PLACENTA, SIGNAL = 0.76; EXPRESSED IN HEART, SIGNAL = 0.8
ccccaatcttaaaaccaggcctttctatcactgtcttgctgagatggggcatggttctctgtggtgtgttgtctttctctttgcaatgactcgacagacccaatcacaagtgtgttccttgatggtctttgactactaataaaaattattatttttgtcattattgatcttggtatctaccactgcagttctggataccttgcaaatttgagacattgcctttaatatattcacctgagaaaaatctatcagagccgaaggcctcttaagctcaccattagaggtagtctgccggtctgcactgattactgcagctcgtagctgctttatctcattataaagccagcagtagtccacaggtagagccatgttgcatgagatcatgggccagatcagtcttcttggttgtatctgtctccttccattgttaccagtggtgaatctggactggtctgcagcaactt

SEQ ID NO: 4190 - DNA, 356 bp, Homo sapiens
  MAP TO AL031297.4; EXPRESSED IN PLACENTA, SIGNAL = 0.81; EXPRESSED IN LUNG, SIGNAL = 0.94; EXPRESSED IN HELA, SIGNAL = 0.84; EXPRESSED IN BT474, SIGNAL = 1.1; EXPRESSED IN BONE MARROW, SIGNAL = 0.87; EXPRESSED IN HBL100, SIGNAL = 0.86; EXPRESSED IN FETAL LIVER, SIGNAL = 0.84; EXPRESSED IN ADULT LIVER, SIGNAL = 0.72; EXPRESSED IN BRAIN, SIGNAL = 0.83; EXPRESSED IN HEART, SIGNAL = 0.95
aatggaacaacaaagccaggatgatggcatacctgtttatatcactgtttactgaatattttttggcccactattgagaggcctactgctcagaaaaaaagatttctttcaaaatatactgctcattgacaatgcacctgctcaaccaggcgctctgaaggagacgtataaggagatgaatattgttttcatgtttgttaatacaacagtcattctgcagcccatcaatcaaggaataattgtgactttcaagtcttactgtttaagaaatacgttttataaggctatagctgccatggatagtgattcctctgatgaacctggacaaagtaaattggaaaccttctgggaaggag

SEQ ID NO: 4191 - DNA, 395 bp, Homo sapiens
  MAP TO AL023280.1; EXPRESSED IN HBL100, SIGNAL = 1.2; EXPRESSED IN HEART, SIGNAL =   1; EXPRESSED IN BT474, SIGNAL = 1.7; EXPRESSED IN FETAL LIVER, SIGNAL = 1.5; EXPRESSED IN BRAIN, SIGNAL = 1.2; EXPRESSED IN HELA, SIGNAL = 1.4; EXPRESSED IN PLACENTA, SIGNAL = 1.2; EXPRESSED IN ADULT LIVER, SIGNAL = 1.3; EXPRESSED IN LUNG, SIGNAL = 1.5; EXPRESSED IN BONE MARROW, SIGNAL = 1.4
cccattcaaaatgttcccagtcccccacctttgtgacctcatacaaaggcttagctaatactgcaaagtttgggacccacagtctgcaaaaccccactgcccctaagaattctctcacctgccttctggtcttaggctccggtagattacaaatgacttgctttctttttgatcccaggctgcactccccctgccggatagtaaatcccaagtaacgtacctgctgtcggcagatctgaacttttttcttgaacaccttatacccacagtcctccaggtgccggagtagagcatctgttcccttggcgcacctgactgccgtagggtgtcccagaaaaaggtcatcaacgtactggagcaacatgcagcctaggtctctggtgggaaacttctgg

SEQ ID NO: 4192 - DNA, 461 bp, Homo sapiens
  MAP TO AC009598.2; EXPRESSED IN HEART, SIGNAL = 0.85; EXPRESSED IN BRAIN, SIGNAL = 0.99; EXPRESSED IN ADULT LIVER, SIGNAL =   1; EXPRESSED IN BT474, SIGNAL = 1.1; EXPRESSED IN HELA, SIGNAL = 0.94
  unsure 101
  unsure 202
  unsure 291
caagtccacagctctacctggtctaggaaggcaatatgttcaaatagaatttgctttttttaacaggtggtcctattctcggccttgagatccagggagantggagtgggaagagataagcctcatctgccccctgccactcagctctctcccatctgcccatgccctcccaccctgcacatgcacccaatgttgtttcttncccacagactcctgctgcagaatgtcagacatctcagcccacattcagagctcagattgctatgaatggagcaaggcaatgggggttanggggtgggaaagaggaactatgcggtcatcagctattcctccacagaggagctgtccacagtctgggatcaggatggatgtgcttctgctgcagagaagccgcttcccttcaaccgcaccacgtccctgcaaagggaagacaagacagctgcctcacacagagcagtgag

SEQ ID NO: 4193 - DNA, 475 bp, Homo sapiens
  MAP TO AC005534.2; EXPRESSED IN PLACENTA, SIGNAL = 0.9; EXPRESSED IN BONE MARROW, SIGNAL =   1; EXPRESSED IN HBL100, SIGNAL = 0.69; EXPRESSED IN LUNG, SIGNAL = 0.94; EXPRESSED IN HELA, SIGNAL = 1.1; EXPRESSED IN ADULT LIVER, SIGNAL = 0.96; EXPRESSED IN BRAIN, SIGNAL =   1; EXPRESSED IN BT474, SIGNAL = 0.77; EXPRESSED IN FETAL LIVER, SIGNAL = 0.9; EXPRESSED IN HEART, SIGNAL = 0.95
ggggcataaaagtagagaggcacagacaataagaatcactgcagagatcaacttactcagaaaacccctaggaatcagagacaaaaagacctaaatggtgtgagatgctaccatatttgtggatcagatgataacactgtaaatacagtatttccccgatctataaatccaattcaaaaaaaatctccagcagaattttatgtagaaaatgaggcagttttaggaaaaaaaaaaagaggaaacgtcttttcctagcagctattaagacatattgcaagactctattaatcaaaacagtgcaatactgacatagaagcagaagccttggaaggagagaacaaaacacgctttaatctcgtcgattttcccagtatcataagcaaaacaaactgtggtgacatctaaatgtgaaaggtaaaaggttaaaggtaaataaagaaaatgtaggaaaatctttgcactctcagaatggtga

SEQ ID NO: 4194 - DNA, 490 bp, Homo sapiens
  MAP TO AC007750.2; EXPRESSED IN PLACENTA, SIGNAL =   1; EXPRESSED IN LUNG, SIGNAL = 0.98; EXPRESSED IN HELA, SIGNAL = 2.2; EXPRESSED IN BT474, SIGNAL = 0.95; EXPRESSED IN BONE MARROW, SIGNAL = 0.96; EXPRESSED IN HBL100, SIGNAL = 0.8; EXPRESSED IN FETAL LIVER, SIGNAL = 0.9; EXPRESSED IN ADULT LIVER, SIGNAL =   1; EXPRESSED IN BRAIN, SIGNAL =   1; EXPRESSED IN HEART, SIGNAL =   1
catccttgtgtcatattttccagaaagaaagtaaagtcatggaaactatgagtgtaattattaaaatttataatttattgaaatgaataatttttatcattaaaatttatcattaaattacataatttatcattaaaatacatacatatttacatatatacaaatataaacttattcgtagggttctgtatccagaatatattaaaaacacatacaattcaacaataagaaaacagacagcacaatttcaaaatgggcaaaggatttgaagagacatctctccaaagaaaacatacaaatgtccaacaagcacatgaaaagatgctcagcatccttggtcatgaggataataccaatcaaaaccacaatgaggtacaactttatgccaacaaaaatggctataacaattccagaaaaaaacaaaaaataaatattggcaagaatgtggagaaactggaactcttgtgcatcgcaggtgggaatgtaaaat

SEQ ID NO: 4195 - DNA, 451 bp, Homo sapiens
  MAP TO AL031003.1; EXPRESSED IN HBL100, SIGNAL = 2.9; EXPRESSED IN HEART, SIGNAL = 2.4; EXPRESSED IN BT474, SIGNAL = 2.6; EXPRESSED IN FETAL LIVER, SIGNAL = 2.7; EXPRESSED IN BRAIN, SIGNAL = 2.8; EXPRESSED IN HELA, SIGNAL = 3.2; EXPRESSED IN PLACENTA, SIGNAL = 2.9; EXPRESSED IN ADULT LIVER, SIGNAL =   4; EXPRESSED IN LUNG, SIGNAL =   3; EXPRESSED IN BONE MARROW, SIGNAL =   3
ctctgctcctgggctgtaagcttcacaggtgcttctcattatttccttcccactttaggtgggacaggatgtcgagaggggctagaggggctagagcaagtagttcccctctccatgtggaaggctagtgggagctgaagctgggaatttcccttcccccaggtcagttaggctctggtaaaataaattctcctgagggcaggctgtgttaagaacagaacgttctggtgcatttcaaaatggttgcttcctcccatccctgccagaagcacaaggggattttctctgattttcactctaagaacctaatagggctcctggagataatactcacaaaagcgcgggggccctccgtgaatggcacccctagagtttttaattctcagagcttccagcaattcatcaattacagttcaggttttctgcccccagctggttcctggaggtttct

SEQ ID NO: 4196 - DNA, 462 bp, Homo sapiens
  MAP TO AC000054.10; EXPRESSED IN HELA, SIGNAL = 0.83; EXPRESSED IN BRAIN, SIGNAL = 0.74; EXPRESSED IN BONE MARROW, SIGNAL = 0.74; EXPRESSED IN FETAL LIVER, SIGNAL = 0.59; EXPRESSED IN LUNG, SIGNAL = 1.1; EXPRESSED IN HEART, SIGNAL = 0.88
cattgtttgtattaagaagtgagattgtaaaggaagtttattcttaaaaacctgttgaaaacatattgtaacaaatataatttgcttattttgtggatgcttaaacaatctcttctttacacagctgcaatatataaatgtgttaactcaaaatacattcttacctcccatccataactggggtctttcaggtttgacctctgctctcccacataaggcccaaacttttcacctacttcgatcttccttttggtccatattcctagtcctgccccaggcatatttgactctcgaagttcaaactcagcaggaatggggatatcatcagggatgtagatgggggctttgtaaggagaaccctcctttggagtgaatgcttcactggatgtggcaggagagcatggctcttgaatattgagggagggagtgctggctactccatctgcatctggcatttcttcc

SEQ ID NO: 4197 - DNA, 459 bp, Homo sapiens
  MAP TO AJ010597.1; EXPRESSED IN HEART, SIGNAL =   1; EXPRESSED IN ADULT LIVER, SIGNAL = 0.98; EXPRESSED IN PLACENTA, SIGNAL = 1.1; EXPRESSED IN BONE MARROW, SIGNAL = 1.1; EXPRESSED IN LUNG, SIGNAL = 1.3; EXPRESSED IN HELA, SIGNAL = 1.1; EXPRESSED IN BT474, SIGNAL = 1.2; EXPRESSED IN HBL100, SIGNAL = 1.6; EXPRESSED IN FETAL LIVER, SIGNAL = 1.2; EXPRESSED IN BRAIN, SIGNAL = 1.3
ggtacattgctgaaaaatgggaactcatttcttcatcatgcctcaaagtaaatattaaatttatctctttaacaattaattgcacacatacatgagaaatctttatgatacatattttattacaccgtgtacaaaaataatttcacattttagttgggttggaagtttgaaaagaacatagtgcagttgcaggggtgggatgaactgtggtgaggtaagtaaattggacagaaattgggcagaaagatacttcctttttttttttttttaacagttttttatctgtctgaagacagggaagaagaggaatctgaattggaaaacccccactatatctgttgggtttttgttgttgctgttcagtctggaaatgggtggtgtgtggtgagaggtcattaggtcatcagggcagaattgtttgcagagctgggagctacatcctcacggaagtgggataga

SEQ ID NO: 4198 - DNA, 408 bp, Homo sapiens
  MAP TO AL022395.2; EXPRESSED IN BONE MARROW, SIGNAL = 3.6; EXPRESSED IN LUNG, SIGNAL = 3.7; EXPRESSED IN HBL100, SIGNAL = 4.9; EXPRESSED IN BT474, SIGNAL = 4.8; EXPRESSED IN BRAIN, SIGNAL = 4.7; EXPRESSED IN HEART, SIGNAL = 5.7; EXPRESSED IN HELA, SIGNAL = 3.6; EXPRESSED IN PLACENTA, SIGNAL =   5; EXPRESSED IN ADULT LIVER, SIGNAL = 5.5; EXPRESSED IN FETAL LIVER, SIGNAL = 4.4
cattgagggtagagcctgttcattaccttatccatgcatttttctgcttatttaaattattttacttcaccaagccattcatttttttagaacatccttcaaagagttcatgcatcttactgaggacacctgaccttttgaagcttcataattcacatctagatgtcaccggtctttcccatgttaacagttctgaccatgttttattatatatgccttcggcgccgagccaggacagctacaagaggagaaatgatgaacacccatagagctatagaatcaaacagccagacttcccctctcaatgcagaggtagtccagtatgccaaagaagtagtggatttcagttcccattatggaagtgagaatagtatgtcctatactatgtggaatttggctggtgtacca

SEQ ID NO: 4199 - DNA, 470 bp, Homo sapiens
  MAP TO AC007740.1; EXPRESSED IN PLACENTA, SIGNAL = 0.82; EXPRESSED IN BONE MARROW, SIGNAL = 0.75; EXPRESSED IN FETAL LIVER, SIGNAL = 0.74; EXPRESSED IN LUNG, SIGNAL = 0.83; EXPRESSED IN HELA, SIGNAL = 0.64; EXPRESSED IN BT474, SIGNAL = 0.69; EXPRESSED IN HBL100, SIGNAL = 0.68; EXPRESSED IN BRAIN, SIGNAL = 0.8; EXPRESSED IN HEART, SIGNAL = 0.96; EXPRESSED IN ADULT LIVER, SIGNAL = 0.86
caggactgaagataatgttcgctacattctagatgcttagtcaagtaaccaaagcaaggaaataaaaggaccaatcacccttagagacaaatttccactcaccaaacatggtatgggcatttagttaaggtgctggaacattgctcaccaagtctggttcagggattgatcaattgtttaatgacccccttctacttttagaaggagaacattgagtttggattccctttccccgcctctttttctttatattttcttaggaaaaaatgatatatttggagaaatggttcatctttatgccaaacctggaaagtctaatgcagatgtaagagccctcacatactgtgacttgcataagattcagcgagaagacttgttagaggttttggatatgtatcctgagttttctgatcactttctaacaaacctagagttgactttcaacctaaggcatgagagcgcaaaggtat

SEQ ID NO: 4200 - DNA, 401 bp, Homo sapiens
  MAP TO AC010684.2; EXPRESSED IN BONE MARROW, SIGNAL = 3.4; EXPRESSED IN LUNG, SIGNAL = 6.5; EXPRESSED IN HELA, SIGNAL = 4.6; EXPRESSED IN FETAL LIVER, SIGNAL = 4.2; EXPRESSED IN ADULT LIVER, SIGNAL =   2; EXPRESSED IN BRAIN, SIGNAL = 2.4; EXPRESSED IN PLACENTA, SIGNAL = 2.5; EXPRESSED IN HEART, SIGNAL = 2.2; EXPRESSED IN HBL100, SIGNAL = 5.8; EXPRESSED IN BT474, SIGNAL = 4.9
gcaaacttgtcaggaggagcataagaagaagcatccagatgcttaggtcaacttctcagagttttctaagaagtgcttagagaggtggaagaccatgtctgctaaagagaaaggaaaatttgaagatacggcaaaggcggacaaggcccataatgaaagagaaatgaaaatctatatcccttctaaaggggagacaagaaagaagttcaaggatcccaaggcacccaagaggcctccttcagcctttttttctattctgttctgagtattgcccaaaacatcctggcctgtccattggtgatgctgcgaagagactgggagagatgtggaatgacactgctgcaggtgacaagcagccttaggagaagaaggctgcaaagccgaaggaaaaatgcgaaaag

SEQ ID NO: 4201 - DNA, 477 bp, Homo sapiens; identical to SEQ ID NO: 3311
  MAP TO AC007716.1; EXPRESSED IN BT474, SIGNAL = 1.1; EXPRESSED IN HELA, SIGNAL =   1; EXPRESSED IN ADULT LIVER, SIGNAL = 0.97; EXPRESSED IN PLACENTA, SIGNAL = 1.1; EXPRESSED IN BONE MARROW, SIGNAL = 1.1; EXPRESSED IN HBL100, SIGNAL = 0.97; EXPRESSED IN FETAL LIVER, SIGNAL = 1.1; EXPRESSED IN LUNG, SIGNAL =   1; EXPRESSED IN BRAIN, SIGNAL = 1.1; EXPRESSED IN HEART, SIGNAL = 1.1

SEQ ID NO: 4202 - DNA, 472 bp, Homo sapiens
  MAP TO AC007395.2; EXPRESSED IN PLACENTA, SIGNAL = 0.6; EXPRESSED IN BT474, SIGNAL = 0.61; EXPRESSED IN LUNG, SIGNAL = 0.61; EXPRESSED IN BONE MARROW, SIGNAL = 0.83; EXPRESSED IN HBL100, SIGNAL = 0.87; EXPRESSED IN FETAL LIVER, SIGNAL = 0.59; EXPRESSED IN HEART, SIGNAL = 0.8
ccaaagttcctatctccccagaactctacttcattgcttctggaactttactgtacacactgatcacctggggatcctgttaaaatgtagattccagtctcatttgtctggagtggggcctgagagtttgcatttccaataagctcccagcgatgctgatgttgctggtctccggatcttactttgggtagtgaggctgaaaacctgtatatccaactgcttccctgacatttctacatgcatgtcttacaggcgtctcagaccaaccctaaatgaccctcttagagctcttgatttctttactcaaacccatttctctctgcattttccttgtgtcatcatcccagttgcacaagccaaagattttggagttgtccttggtttctctttccttcactttttcatccagtctatcagcaaattctgctggctcagtcctccaaaacatatcccaaatctttctacttggctc

SEQ ID NO: 4203 - DNA, 426 bp, Homo sapiens
  MAP TO AC010873.2; EXPRESSED IN PLACENTA, SIGNAL =   2; EXPRESSED IN HEART, SIGNAL = 0.94; EXPRESSED IN ADULT LIVER, SIGNAL = 1.1; EXPRESSED IN BT474, SIGNAL =   1; EXPRESSED IN FETAL LIVER, SIGNAL = 1.3; EXPRESSED IN BONE MARROW, SIGNAL = 0.96; EXPRESSED IN BRAIN, SIGNAL = 0.97
cagctttccctaacgattgctttctttccctagtaattggtctaaattttgctagagggaagaagtacaggtacaggcaatgatggatgtttttgttttttgtttcttgtttttattttttttaatccactactagctaccacacacacaaaaaatgctgaaagttttccagtgcatttattagtcatgagaatgtgttggttatctgtggtctgtggggaattgggttgtaagagcatatactaacctctgccatgatgggcagtgagaatattccggtctactggttcagattgctccttgtggacttgaaaggacttggtggcttcatgaagcagacctggtaaaaataatggcattcctggagtgcctgccaggccaggcagacggttagtgtgcattcactcatttccttccaccagcaat

SEQ ID NO: 4204 - DNA, 444 bp, Homo sapiens
  MAP TO AL031770.12; EXPRESSED IN PLACENTA, SIGNAL = 0.87; EXPRESSED IN BT474, SIGNAL = 1.6; EXPRESSED IN LUNG, SIGNAL = 0.87; EXPRESSED IN HELA, SIGNAL = 0.71; EXPRESSED IN ADULT LIVER, SIGNAL = 0.67; EXPRESSED IN BONE MARROW, SIGNAL = 0.88; EXPRESSED IN HBL100, SIGNAL = 0.79; EXPRESSED IN FETAL LIVER, SIGNAL = 0.76; EXPRESSED IN BRAIN, SIGNAL = 0.85; EXPRESSED IN HEART, SIGNAL = 0.92
tgtcacacagccagaagaatcttaattttgtagtgaagattatctgaggttacagactcttattaagatcaacctcaggattacatttaggctctgatcctaattcacaaccgaggcttgtctagttcaatgtcatggctggaaaatatgaaggtcacagagacaggattctgggtaccttaaataaatccagtgaggactttgaaattccaagtggtggtaactagctggatgcagaagaaccctaagataaatccagtgaggactttgaaattccaagtggtggtaactagccggatgcagaagaaccctaagataaatccagtgaggactttgaaattccaagtggtggtaactagccggatgcagaagaaccctaagatccccgttagcccggcatcgcctgccttttacccccccccgcgccctggttactgctcactc

SEQ ID NO: 4205 - DNA, 457 bp, Homo sapiens
  MAP TO AC007880.1; EXPRESSED IN FETAL LIVER, SIGNAL = 0.96; EXPRESSED IN BRAIN, SIGNAL = 1.3; EXPRESSED IN HEART, SIGNAL = 1.1; EXPRESSED IN ADULT LIVER, SIGNAL = 0.8; EXPRESSED IN PLACENTA, SIGNAL = 0.75; EXPRESSED IN BT474, SIGNAL = 0.76; EXPRESSED IN BONE MARROW, SIGNAL = 2.3; EXPRESSED IN LUNG, SIGNAL = 0.91; EXPRESSED IN HELA, SIGNAL = 0.65
agatttagggtggatgctgcttatcttagattcttcaagatcgcaaggtcagcggggatgcgttagagtgatggtggtgcaaagtctgctaattgacaggtgtgggagtgggggcctcattccagtgagggctgagtcctgtccctatgctgtctcacaatctgctatatccatgcacactgttttgacccatgactcctcccccagcagttatggccttctggtgtcctaagttaaccttaaagaagcaacatagagctagtttgtcatgggaaattttgacagactcataaaggaaaagacatgataggtcacagcaatgccatgtctatactcatttccaagaaccacattgtaacccacatgtgtattggttgtgaaactcttaaactctttctccagggccagagtatgacttttgtgggtctccatttttgccttcatcatccctttcttc

SEQ ID NO: 4206 - DNA, 421 bp, Homo sapiens
  MAP TO AL022721.1; EXPRESSED IN BT474, SIGNAL = 2.5; EXPRESSED IN FETAL LIVER, SIGNAL = 2.2; EXPRESSED IN ADULT LIVER, SIGNAL = 3.2; EXPRESSED IN LUNG, SIGNAL = 2.7; EXPRESSED IN BONE MARROW, SIGNAL = 2.5; EXPRESSED IN PLACENTA, SIGNAL = 2.3; EXPRESSED IN BRAIN, SIGNAL = 2.5; EXPRESSED IN HEART, SIGNAL = 1.9; EXPRESSED IN HELA, SIGNAL = 2.5; EXPRESSED IN HBL100, SIGNAL = 3.4
ctcaaccaggggtgattttgccccctaggagacatttggcaatgtccgcagacatttgggttttacagctggggaggggagaagagtgtcactggcacttagtgtgtagaagccagggatgctgctcaacatcctacaatgcacaaacagcccatacaagagatgattatccagcccaacatgtttacagtgctagggctgagaaatcctacaccagaggaacaggaactaggaggcaaagagagtcaacagctatgagcatggagatgttttaggcaattaagggaaacaaaggaagagcatgctttgcttgcttgtttggaaaagggggtaatgagtagagagctctggattctgacaaacttgagaacagcatgtttatgaggagagaatgcagggcggcctgctcagctactgctgc

SEQ ID NO: 4207 - DNA, 491 bp, Homo sapiens
  MAP TO AC007870.3; EXPRESSED IN BT474, SIGNAL = 0.65; EXPRESSED IN HELA, SIGNAL = 0.64; EXPRESSED IN ADULT LIVER, SIGNAL = 0.84; EXPRESSED IN PLACENTA, SIGNAL = 0.71; EXPRESSED IN BONE MARROW, SIGNAL = 0.69; EXPRESSED IN FETAL LIVER, SIGNAL = 0.88; EXPRESSED IN LUNG, SIGNAL = 0.74; EXPRESSED IN HEART, SIGNAL = 0.93
atggtccaaatggctgaaactaaacaaccgcaactttatagcagaggagaagaggagaggaaaaaagatccatgcatatagagaaaagctgaaaagaattggaaagagggagagaaactatagcaattactgtcaactgtaaaatgagggggggtcccaagggggaaaatacaggaaataacacccctgttgacttctgccaacaagacccccttccattgtgtaaaacaaaggtgagtgaagtgtggctggtaatatttaagatattatgaattcattttgtagacaaaatttagactgggatgaggactcatctgtcatcttcgcatcttctgtcaagcgcatgttgcccttggcaatgggtctgctgttactaattttgtttttgtttagaagcttgcttttcctctttggttctctgagttgctgtgaataaaaaaaaaatttaatcacaaaggaaaaatgtctttgattgatttctgatggtggct

SEQ ID NO: 4208 - DNA, 466 bp, Homo sapiens
  MAP TO AC007304.11; EXPRESSED IN PLACENTA, SIGNAL = 0.99; EXPRESSED IN BT474, SIGNAL = 0.72; EXPRESSED IN LUNG, SIGNAL = 1.1; EXPRESSED IN HELA, SIGNAL = 0.78; EXPRESSED IN BRAIN, SIGNAL = 0.82; EXPRESSED IN HBL100, SIGNAL = 0.74; EXPRESSED IN FETAL LIVER, SIGNAL = 0.76; EXPRESSED IN ADULT LIVER, SIGNAL = 0.69; EXPRESSED IN BONE MARROW, SIGNAL = 0.84; EXPRESSED IN HEART, SIGNAL = 1.1
tccaggaaatgttaggtgggatcctgaaaaagctaaatcagaccctctgtgagtgctcaaatatctttcaaatgctagtggtattacagaagccaatccatcaatatcccatccaaatccatcgtgaatattacagtacacagcataattacctgccacttatatcccatccaaatctatcatcaatgccacagtaagttggggtttgccaccataccacttaccaccagcaatgggatttgcttattgctacttgtcaagcaagtgatgtagctccagactgtatcctaaagatctgcttcctaggattacttctcgtaccaactgtcttagcttgtgttccaccagaagcagatgctgagctaagtttttgcgtgtaagtagtttattgtgtaattgaccccaggaaatatcaataacagtgtgaagaaaggagacagggacagcaaggctgtctataaagggc

SEQ ID NO: 4209 - DNA, 477 bp, Homo sapiens; identical to SEQ ID NO: 3698
  MAP TO AC007385.2; EXPRESSED IN ADULT LIVER, SIGNAL = 0.99; EXPRESSED IN PLACENTA, SIGNAL = 0.76; EXPRESSED IN BT474, SIGNAL = 0.77; EXPRESSED IN BONE MARROW, SIGNAL =   1; EXPRESSED IN HBL100, SIGNAL = 0.68; EXPRESSED IN FETAL LIVER, SIGNAL = 0.71; EXPRESSED IN LUNG, SIGNAL = 0.9; EXPRESSED IN HELA, SIGNAL = 0.76; EXPRESSED IN BRAIN, SIGNAL = 0.82; EXPRESSED IN HEART, SIGNAL = 0.91

SEQ ID NO: 4210 - DNA, 414 bp, Homo sapiens
  MAP TO AL023096.1; EXPRESSED IN HBL100, SIGNAL = 5.1; EXPRESSED IN HEART, SIGNAL = 4.1; EXPRESSED IN ADULT LIVER, SIGNAL =   6; EXPRESSED IN FETAL LIVER, SIGNAL = 4.5; EXPRESSED IN LUNG, SIGNAL = 4.8; EXPRESSED IN HELA, SIGNAL = 4.6; EXPRESSED IN PLACENTA, SIGNAL = 4.6; EXPRESSED IN BT474, SIGNAL = 4.2; EXPRESSED IN BRAIN, SIGNAL = 4.3; EXPRESSED IN BONE MARROW, SIGNAL = 5.6
ttaatccaccatctcctgccagcattttttgtgagaccaggtgtgcttaaccgggaaagagggggtggcatgaacggtttcaggagttggtaaaccctagaaactgggagaaaattgtctttttctggcaagagaccataactttcctcacctcctcaaagcgatctgtaatatcctacaggattacaaattgctgtttttagacagagctgcatctggagacctgtttttcgggattctaaggcccctctttcaacctccttccctgctgcccctgccattgccaatgctgaaatggcgaggcctcccttccacttacctcgcccactgcggcccacgaagcgaaggtcgttgaacctggccacctggttcttcatgacggccgaggcattgcgcagctcagcggagtagttc

SEQ ID NO: 4211 - DNA, 465 bp, Homo sapiens
  MAP TO AC007745.2; EXPRESSED IN PLACENTA, SIGNAL = 0.88; EXPRESSED IN BT474, SIGNAL = 0.76; EXPRESSED IN LUNG, SIGNAL = 1.4; EXPRESSED IN HELA, SIGNAL = 0.74; EXPRESSED IN ADULT LIVER, SIGNAL = 0.67; EXPRESSED IN BRAIN, SIGNAL = 0.76; EXPRESSED IN HEART, SIGNAL =   1; EXPRESSED IN BONE MARROW, SIGNAL = 0.94; EXPRESSED IN FETAL LIVER, SIGNAL = 0.65; EXPRESSED IN HBL100, SIGNAL = 0.72
tttgaagtaccttttctgcaaccaaatctaattaaaagtaaaattcacagtatatggtagattgatataactatgcattaaaatgactgctataatataaatgtatgcatgtgtgttgatatgtgtttatatacagatgtgtagtacatgtgcatataacatggagagcttaggttttgcttatgaccattccaattaaaatgatatccatggttgttaaagcagattgtcataaacctatgaatggctttccttgacattattttggcttgatgctctcgtgatgctcccaaaagtagataaagaaggtgctatgccatacattcttttcctggcctagtaccattgccacagagacctgctggccaaagataaccttagctgtgggtactacagaaatgagaagcagcatcatgaggaatgtaggcattttcactatctccctttgtctttcttatggttttc

SEQ ID NO: 4212 - DNA, 451 bp, Homo sapiens
  MAP TO AC005674.9; EXPRESSED IN HELA, SIGNAL = 0.65; EXPRESSED IN FETAL LIVER, SIGNAL = 1.1; EXPRESSED IN LUNG, SIGNAL = 0.77; EXPRESSED IN HEART, SIGNAL = 0.78; EXPRESSED IN PLACENTA, SIGNAL = 0.66; EXPRESSED IN ADULT LIVER, SIGNAL = 1.1; EXPRESSED IN BONE MARROW, SIGNAL = 0.69
catccagttccttctcccagactccctgttggaggagtccaccatagcaaggaagattcggaggagagtgctcgttattaatgctgtaggtgctcaagaattgtgactttctctccctcgctttttcctttctcataaagagcattgcttcagggctgtggccataaagaaggtggcccaactgtctcagggtcaaagccggtttttaatcatgatgccattgccggttcccagtgccacattcccctgttgtggttagaaatggaataatagctctctctctctcttttaccctggactagggtttggtcattgagcacctgggacggagacccctcctcattggtggctttgggctcatgggcctcttctttgggaccctcaccatcacgctgaccctgcaggtgagacgatgttcttgtcacatttgagggagataagcatggagctg

SEQ ID NO: 4213 - DNA, 442 bp, Homo sapiens
  MAP TO AL023284.1; EXPRESSED IN BONE MARROW, SIGNAL =   7; EXPRESSED IN HEART, SIGNAL = 4.4; EXPRESSED IN ADULT LIVER, SIGNAL = 4.9; EXPRESSED IN BRAIN, SIGNAL = 4.7; EXPRESSED IN LUNG, SIGNAL = 7.1; EXPRESSED IN HELA, SIGNAL = 6.8; EXPRESSED IN HBL100, SIGNAL = 8.6; EXPRESSED IN PLACENTA, SIGNAL = 8.1; EXPRESSED IN BT474, SIGNAL = 7.3; EXPRESSED IN FETAL LIVER, SIGNAL = 7.7
gggagaacatgatggcagtcttcaaatacatgaagacctcagaaagatggaaaaaactcagatctttctctagtgggcagcactaggccggatggtccaaaattatggggagacagccctgtctttctacaaagcatattctgagcatgcatgatgtcgggtaatgggtgctgctctgtgcagagaggctgacagacacccactgggtgctgcggactggacttctgcactgactgagagaataggagaggccttagaagttgtccaatccaactcaaaattcaatttctatgagccaggcacaatctcttccactgtggcttacttggtcctttgaagaacaaagtgttaccacaatcatactgtagaaggcagcagttcgtgtcctcctgggtgtcagatatttctgatgactacagaagggagttggaggcaagcttac

SEQ ID NO: 4214 - DNA, 457 bp, Homo sapiens
  MAP TO AC005519.2; EXPRESSED IN BT474, SIGNAL = 0.77; EXPRESSED IN BONE MARROW, SIGNAL = 0.67; EXPRESSED IN PLACENTA, SIGNAL = 0.76; EXPRESSED IN HBL100, SIGNAL = 0.8; EXPRESSED IN FETAL LIVER, SIGNAL = 0.71; EXPRESSED IN LUNG, SIGNAL = 0.66; EXPRESSED IN HEART, SIGNAL = 0.98
agctggatctagggctggtgctagagcaggagcaggctctagcttcaaagctgccattggagctgactctagctctagagctgacaccaaagctgaatatagctctgtggctggcactacaactggcttaagctctggaacaggtgatggagctagttctagagctagcactggctttagctctggaggtggtgccaaagctggcacttcacctggcctaggctctggagctggtgctagagctggctctagcttctcatctggtgctggagctagtgatggagctggctctagctgtgctgctggtgctggagctggcactagctctggacctagaacttcctttagtgccagcgttggtgctgaacctgcttctggctctggagctggcactaaatctggctatagctcacgagtggatgccagagttggtgctggagtaggtgcagagctgtct

SEQ ID NO: 4215 - DNA, 471 bp, Homo sapiens
  MAP TO AL023656.8; EXPRESSED IN HELA, SIGNAL = 0.97; EXPRESSED IN LUNG, SIGNAL = 0.9; EXPRESSED IN BRAIN, SIGNAL = 0.78; EXPRESSED IN HEART, SIGNAL = 0.86
actgagtttatttgtgtgaaatatggttaatcataagagctagtttataatctgttgtgctgccatggttttattatcactttaaatatgtgaagtatttaatactgtatagcaaatttcttatcaactatagcaatctctcaaaatttacatcactaacacacaatgttgtattacataaaaatggtctgcatgtgatggctttatcatgaatttaaaaggataattatattggggaataccttcatctcttggaggcatattgccatcatataaattctgtacattgtctaaatatcagtttaccaggcaccttcacatgtctgatcgcattcagtcttccgtagaaccctatgacataggtattatcatacttgttttgctgagtatcagtatgttgataaaactgagtatcagcatgttggtttttcataaatgcacaaatatattaggttgcagaaatgggtcttt

SEQ ID NO: 4216 - DNA, 448 bp, Homo sapiens
  MAP TO AL031406.1; EXPRESSED IN HBL100, SIGNAL = 4.1; EXPRESSED IN FETAL LIVER, SIGNAL = 4.5; EXPRESSED IN LUNG, SIGNAL =   4; EXPRESSED IN BONE MARROW, SIGNAL = 3.8; EXPRESSED IN HELA, SIGNAL = 3.9; EXPRESSED IN HEART, SIGNAL = 3.8; EXPRESSED IN PLACENTA, SIGNAL = 4.1; EXPRESSED IN BT474, SIGNAL = 3.8; EXPRESSED IN ADULT LIVER, SIGNAL = 5.4; EXPRESSED IN BRAIN, SIGNAL =   5
  unsure 357
  unsure 368
  unsure 428
tggtccttcacttctctgggcctccattccctcagtagctaaagggagatgatgaccctttttgcatggacgtcttttgagggctctgctcgcagaagcaaagcacccagctctgccaggcatgtagcacgtgcttagtaatagttgtcacttacaagctgtcctcgtcccaatgtcctgcctgtcagtcccttggctctgagtccctgggactgagccacccagcaaagtctcatgctgtgggtgggcttgggtcacctcaggagcccctgtgaccgggccagccacaggtccataacaggagtcacaaagcccattagtgcagagtgcactgtaggcgacgtgctgttagtgtgngcggtgcgtgngcgctgttcacacctgccattgtatctaagggaggggtggggcaaaacgggggctgcacngccattgtggtcttggaact

SEQ ID NO: 4217 - DNA, 458 bp, Homo sapiens
  MAP TO AC007776.1; EXPRESSED IN HELA, SIGNAL = 1.3; EXPRESSED IN PLACENTA, SIGNAL = 0.59; EXPRESSED IN LUNG, SIGNAL = 0.73; EXPRESSED IN HEART, SIGNAL = 0.92
  unsure 389
  unsure 404
  unsure 424
  unsure 433
cctgttagctttaacttcagggagtaacattttcttatcttgcccctaagagctcttcttccctccacattttctagttttccacttagaaaaactctgtggtccttcaggtgtaagccaaaacgtttgttcccttaggaagcctgccctccgactccaagaccaaagtggacccctcagctatggctcccttaacacctgcgttgtaattacatccaatgaatgaaggctgaaattctggaagtgcgctatttggaggctgtagtcccctctgcaccagcaacacacatctttctctgctttttttctccagagctaagtgaagcccaacagaagctgctggtgaaatccatggagaaaaagatcctacccgtgcagctaaagctggntgagggaaaaacagncagatgctggggagagtctngggagtagnctgcagccagtggagatgcagattt

SEQ ID NO: 4218 - DNA, 379 bp, Homo sapiens
  MAP TO AL033504.3; EXPRESSED IN HBL100, SIGNAL = 1.4; EXPRESSED IN ADULT LIVER, SIGNAL = 1.9; EXPRESSED IN FETAL LIVER, SIGNAL = 1.6; EXPRESSED IN LUNG, SIGNAL = 1.3; EXPRESSED IN HEART, SIGNAL = 1.7; EXPRESSED IN HELA, SIGNAL = 1.3; EXPRESSED IN PLACENTA, SIGNAL = 1.2; EXPRESSED IN BT474, SIGNAL = 1.4; EXPRESSED IN BRAIN, SIGNAL =  13; EXPRESSED IN BONE MARROW, SIGNAL = 1.5
tttagctcttcatggcaggcagcatttgatcattgacaactctgttttcttcattgtttcctgactaaaatctccacagcctctataaatatgtaaattacccaaatcactagttttccattatttctgcccctaagctgtttaaaatgtttctatattcctacatttgcagtgcaaaacagagcagcaggtgacagctgagtttgactctattatggaacctctatttagcagctacttgtttcaaagtttctgacaataaattttgtcctagggtgggctccgtgtcctgtgctgaggctggcaaaggtcagaatccaacggaacaggaatgcaaagatgtttgtgtgtggatgcagggcctgtggacatctcatgc

SEQ ID NO: 4219 - DNA, 369 bp, Homo sapiens
  MAP TO AL109657.7; EXPRESSED IN BRAIN, SIGNAL = 6.5; EXPRESSED IN FETAL LIVER, SIGNAL = 0.93; EXPRESSED IN BT474, SIGNAL =   1; EXPRESSED IN HBL100, SIGNAL = 1.3; EXPRESSED IN HELA, SIGNAL = 1.2; EXPRESSED IN HEART, SIGNAL = 0.94
agtgaatgtatagttgtctttccaagtatattatgcatcatgattttctgacagttggttgcattagatgttatttgttaaattatgtgattattaatttggcagaataaaagtggttgtcataaaatgttaatttagacactatatatttattttttaacatttatatatataaaaatttgaatcattttgttttcttgtatttattacagattcattatattttaaaaccagatggagtgtttatcggtgcaatgtttggaggcgacacactctatgaacttcggtgttccttacagttagcggaaacggaaagggaaggaggattttctccacacatttctcctttcactgctgtcaatgacctgg

SEQ ID NO: 4220 - DNA, 475 bp, Homo sapiens
  MAP TO AC007746.1; EXPRESSED IN BONE MARROW, SIGNAL = 3.7; EXPRESSED IN ADULT LIVER, SIGNAL = 1.1; EXPRESSED IN PLACENTA, SIGNAL = 1.1; EXPRESSED IN BT474, SIGNAL = 1.1; EXPRESSED IN LUNG, SIGNAL = 1.5; EXPRESSED IN HELA, SIGNAL = 1.3; EXPRESSED IN BRAIN, SIGNAL = 1.3; EXPRESSED IN HBL100, SIGNAL = 1.1; EXPRESSED IN FETAL LIVER, SIGNAL = 1.2; EXPRESSED IN HEART, SIGNAL = 1.4
gctactactattcattcatgccaccttacaattggctattgttttatttttgatggtggatatcttacaggtcggtcaaaggatggcacttgtctagggtactgactcgtttcagttttaattgattgaaggagacattatttatcggtttcagcagtagagatgatttgaaacatactgaattaaagctacatttatctgtcactaagtttattacctgtcagctggaaccagtggatggtatggcttgttgaccttggcatagagaccctctaagtggtctctttctggagacagtggatggccatcccgagggtaaccaaatggtccagctcgagggggagatggagatctaaagacatttgctgatgtgcatggttcccgaaagtggttcactctggcataattggggtccatttcatcatcatccatatcatacactgatccaattgcaccagtagcataatcaagaaga

SEQ ID NO: 4221 - DNA, 364 bp, Homo sapiens
  MAP TO AL033523.12; EXPRESSED IN BT474, SIGNAL = 3.9; EXPRESSED IN FETAL LIVER, SIGNAL = 4.1; EXPRESSED IN BONE MARROW, SIGNAL = 3.1; EXPRESSED IN HEART, SIGNAL =   3; EXPRESSED IN ADULT LIVER, SIGNAL = 4.9; EXPRESSED IN BRAIN, SIGNAL = 2.9; EXPRESSED IN LUNG, SIGNAL = 4.2; EXPRESSED IN HELA, SIGNAL = 3.2; EXPRESSED IN HBL100, SIGNAL = 3.1; EXPRESSED IN PLACENTA, SIGNAL = 4.1
gtggctaaggtcaggtctgctggactcctccattctaaagtttctatctttccctttgtaattaataataattgggggtggggagagatactttgagactatgaaaatatcctatttaccctgaaactttggctcaatcttgttgacatccatcagcagatcatgtctgcaacaattactgtggtgttctaagagtgattttcagcggcagctgaaggctggtgagtcagagccacaatgtttcagatccagggctttgcgcagaagctggatatggaggagatgaaatggaagttgtgtgaggatgtgatctcctccatatggaacttcctcatctacatggccctgctgcaaatcattcctt

SEQ ID NO: 4222 - DNA, 475 bp, Homo sapiens
  MAP TO AC009306.1; EXPRESSED IN HBL100, SIGNAL = 0.91; EXPRESSED IN BT474, SIGNAL = 0.79; EXPRESSED IN BONE MARROW, SIGNAL = 0.99; EXPRESSED IN HELA, SIGNAL = 0.85; EXPRESSED IN ADULT LIVER, SIGNAL = 0.91; EXPRESSED IN BRAIN, SIGNAL = 0.97; EXPRESSED IN PLACENTA, SIGNAL = 0.88; EXPRESSED IN FETAL LIVER, SIGNAL = 0.9; EXPRESSED IN LUNG, SIGNAL = 0.87; EXPRESSED IN HEART, SIGNAL = 1.2
aaagcttttgccctttgttgtagataatggcaaagtttaggaagcacctcaaatcgtgatctgagatattaattgaatgactaagttgcttagtgagagatctgtccacgctgactggactacaattccgatgtctttcaaccttgcacaacctatggaatctctgctcaactactagcctcaaagaaaacactcttttctaggattcttggagcttttctatgtgcattttcttcccaggccttggcccaggatatgcaggacccaacatgaagactcctggaaactttttgctttacatctatctcctttctagtatcctgagcagccgcttcaacctgaagttctggtttgtgctcgcccatatcagtgagtctgccaaacactgcttgggctccaactccctgctctgtttctggaaagtgcgcagaaacctgaggtgaatatggagctcatttttctctttctttttctc

SEQ ID NO: 4223 - DNA, 465 bp, Homo sapiens
  MAP TO AC007537.3; EXPRESSED IN HBL100, SIGNAL = 0.72; EXPRESSED IN HELA, SIGNAL = 0.67; EXPRESSED IN PLACENTA, SIGNAL = 0.6; EXPRESSED IN FETAL LIVER, SIGNAL = 0.61; EXPRESSED IN LUNG, SIGNAL = 0.7; EXPRESSED IN HEART, SIGNAL = 0.83
tccttatgcgactactcatttccatagttatcaactgtgatatcaatgactatgagatttgacagaaaagatacaacacgtaacttttttcaaaaatatgttatttaaaacactaaaataatttataaaatagcattcaagtgatgccacagaacaaaacactcctattctataaccatgtgtgaagactgtgaaattaagtgactggtctcccaaagcagtataacctagagagctgattatagagaaaacaaatcatgaagaattccaatagttataaaatttttcattttggataatatcttcttaccatctttgcaggtttttccattctccaggagtttgaccccagtggggcaagcacactgataaaaaggcttgactggagacatcaaacacaaatgggaacaacccccattgtcaattccacatggatttgtggctgtcaaatataaatcacattga

SEQ ID NO: 4224 - DNA, 415 bp, Homo sapiens
  MAP TO AL031664.1; EXPRESSED IN BONE MARROW, SIGNAL = 0.92; EXPRESSED IN HEART, SIGNAL = 0.98; EXPRESSED IN BT474, SIGNAL = 0.91; EXPRESSED IN ADULT LIVER, SIGNAL = 1.2; EXPRESSED IN BRAIN, SIGNAL = 1.3
ctgaagctgccctcaaaatcccttgtaaggtgcacccaccactgcttatcctatctcctcttcactctgccctcaggaaaataccatccactggcaagttggtgctgacactcacaaccgacgcctgtgaggggaaggaaaattttgtccgctacctggagcatgtccaggctgtcatcacggtcaacgcaaccagaagaggagacctgaacatcaacatgacttcccctatgggcaccaagtccattttgctgagccggcgtccaagggatgacgactccaaggtgggctttgacaagtggcctttcatgaccactcacacgtggggggaagacgcccgaggcacctggaccctggagctgggatttgtcggcagcgccccgcagaagggggtgctgaaggagtggaccctgat

SEQ ID NO: 4225 - DNA, 462 bp, Homo sapiens
  MAP TO AL034399.6; EXPRESSED IN BONE MARROW, SIGNAL = 1.6; EXPRESSED IN BRAIN, SIGNAL = 1.3; EXPRESSED IN HBL100, SIGNAL = 1.6; EXPRESSED IN ADULT LIVER, SIGNAL = 1.6; EXPRESSED IN FETAL LIVER, SIGNAL = 1.2; EXPRESSED IN LUNG, SIGNAL = 1.3; EXPRESSED IN HEART, SIGNAL = 1.5; EXPRESSED IN HELA, SIGNAL = 1.2; EXPRESSED IN PLACENTA, SIGNAL = 1.3; EXPRESSED IN BT474, SIGNAL = 1.3
aaggccccgagttctacttcgagaatatatccttatcctgggaggaggtggaagacaagctcagggccatcctggaggacagcgaggtgcccagcgaggtcaaagaggcctgcacctggggcagcctggccttgggtgtgcgctttgcccacaggcaggggcagttacaaaaccgcagggtgcagtggctgcaaggctttgccaaactgcacagatcagctgcgctggtcttggcctcaaacctgacggaactcaaggaacagcaggagatggaatgcaatgaggcgaccttccagttgcagctaaccgagaccagccttgcggaggtgcagagagagcgggacatgctgagatggaagctcttccatgccgtaagatcccccgaatggtccctgtccaatgcctctgccctgccccaacctgtccggaccccctgccctgtccccagaatgtgtttcagct

SEQ ID NO: 4226 - DNA, 466 bp, Homo sapiens
  MAP TO AC006367.3; EXPRESSED IN BT474, SIGNAL = 0.69; EXPRESSED IN FETAL LIVER, SIGNAL = 0.74; EXPRESSED IN LUNG, SIGNAL = 0.74; EXPRESSED IN HELA, SIGNAL = 0.93; EXPRESSED IN BRAIN, SIGNAL = 8.2; EXPRESSED IN HEART, SIGNAL = 0.99; EXPRESSED IN PLACENTA, SIGNAL = 0.87; EXPRESSED IN BONE MARROW, SIGNAL = 0.96; EXPRESSED IN HBL100, SIGNAL = 0.7; EXPRESSED IN ADULT LIVER, SIGNAL = 0.79
ttgatacgtaatgcagagaggcagaatgggagagcagaggagaacacggactcgggagcaagatggcctaggtgtggagcatggctctgccactgactacctgggaaaccctgggcaaattacctgacctctctgggccttgctctctcctcatctgtacaatggggcaatgatagaacttgtctcaacggattgtagagaggattaaacacgctagagcatgtaaagaacttggacacactgcttgacacttagtaagtgttgtgaaagtattagcttcctaatgcaagcattgtctttgcctcttcatcctctttttttttgtacccttcatcctcctcttctttttccttctcctctttctgtctcttttcctcttcctcctcgtccttctttattagcatgattgtacatgcgaaatggccagggctggctatataatttgtcgagcacaggacaaaatgaa

SEQ ID NO: 4227 - DNA, 414 bp, Homo sapiens
  MAP TO AL034410.8; EXPRESSED IN PLACENTA, SIGNAL = 6.2; EXPRESSED IN BT474, SIGNAL = 1.5; EXPRESSED IN FETAL LIVER, SIGNAL = 1.2; EXPRESSED IN BONE MARROW, SIGNAL = 1.5; EXPRESSED IN HEART, SIGNAL = 1.4; EXPRESSED IN ADULT LIVER, SIGNAL = 2.2; EXPRESSED IN BRAIN, SIGNAL = 1.7; EXPRESSED IN LUNG, SIGNAL = 1.7; EXPRESSED IN HELA, SIGNAL = 1.6; EXPRESSED IN HBL100, SIGNAL = 1.9
gaaatgtatggcctgaagtgcaggggcacatgggtgtgggtggtgaaagtggggtttcctttagaaaaacccctatacgatggggcatcaatatttctgggaagctccattctccatagaagctcttggtaaggggagctactggtagtacagcagcatggagaaggagcagtgagagtgaaagggggtaagagaacagtaaaaagaaaaatatgacaaggtagggccatggggatctacgattctagttactttcctcacggttgtcgcttgaagagcaggcgcagatcctctagaggttcacaggaatagctagtgttgtctcctggattttcagtttcgtttggtagtatccagggtttgacttgagtgtgatgtatccaagactccactccagccactttaaccacggtt

SEQ ID NO: 4228 - DNA, 441 bp, Homo sapiens
  MAP TO AL031679.1; EXPRESSED IN HBL100, SIGNAL = 2.8; EXPRESSED IN HELA, SIGNAL = 3.3; EXPRESSED IN BT474, SIGNAL = 3.1; EXPRESSED IN FETAL LIVER, SIGNAL = 3.2; EXPRESSED IN LUNG, SIGNAL = 3.4; EXPRESSED IN BONE MARROW, SIGNAL = 3.2; EXPRESSED IN HEART, SIGNAL = 2.8; EXPRESSED IN ADULT LIVER, SIGNAL =   4; EXPRESSED IN BRAIN, SIGNAL = 3.2; EXPRESSED IN PLACENTA, SIGNAL = 3.2
tctgtagaggggaaggacccagaagagaaagtgtgtgggaagaggtgagaagtcaatgatccaaattcttggtctctggaggcaaatggcaagccttgtctgtggagacagcttcaccaagatcatctacattgtcttccagagcttaaacccatctctaagctgcaggtgttcaattttgtcttcaggccacgtgtttcctataaacctgagacttaaacattcaattatcaatttagtacttctacttagatgtctcataggcatctctagcttagtatggccaaacagagtccttagtttccccttcgagcctggctctcctcaccttttccatctctgtaaacagctctaccatcgacccagttaccaaagccagaagcctgagagtcattcttgacttctccctttccgtcatcccccacatccaattcatcagca

SEQ ID NO: 4229 - DNA, 492 bp, Homo sapiens
  MAP TO AL049911.2; EXPRESSED IN BONE MARROW, SIGNAL =  10; EXPRESSED IN LUNG, SIGNAL = 2.8; EXPRESSED IN PLACENTA, SIGNAL = 2.2; EXPRESSED IN BT474, SIGNAL = 1.4; EXPRESSED IN BRAIN, SIGNAL = 1.2; EXPRESSED IN HEART, SIGNAL = 1.3; EXPRESSED IN HELA, SIGNAL = 1.6; EXPRESSED IN HBL100, SIGNAL = 1.3; EXPRESSED IN ADULT LIVER, SIGNAL =   3; EXPRESSED IN FETAL LIVER, SIGNAL = 1.5
ccccaaaatgctaaggactctactctaatagtatggagaacactgatagtccttggcatgaactgtttagatagttatgaaaaataaacccatttgacactcctgattcactgctcatgacagtcaaggagtttagtgactctatacgtaatacctttgactatatatggagaatgaaggaacaaaatgaagtcggttgggtgctcctaagttcacttgacaaaaggatgaaagaaaatgatgaactcagggattctaactcccaggttcagaagcagatactaagtatcaaatctgctaagattaccctgagtgggagtcttatctcctgtagagacagagctgaaattgtggaaaaacagatacaagctcttatcatgcgagtggcagaactgtgatgaaagtgcatgcgcagcctcaccaggtgtctactgttaaagtgagggcattaattggaaaagaataagaccctgcaacttggaaggggaatgt

SEQ ID NO: 4230 - DNA, 475 bp, Homo sapiens
  MAP TO AC007390.2; EXPRESSED IN BONE MARROW, SIGNAL = 0.77; EXPRESSED IN HBL100, SIGNAL = 1.2; EXPRESSED IN ADULT LIVER, SIGNAL = 0.67; EXPRESSED IN PLACENTA, SIGNAL = 0.72; EXPRESSED IN BT474, SIGNAL =   1; EXPRESSED IN FETAL LIVER, SIGNAL = 0.9; EXPRESSED IN LUNG, SIGNAL = 1.1; EXPRESSED IN HELA, SIGNAL = 1.4; EXPRESSED IN BRAIN, SIGNAL = 0.76; EXPRESSED IN HEART, SIGNAL = 0.87
actctggagcctagcactgggcattgtatgtacgtatatatactataaccaatataattttataaaagagttaactaattgtattggttactaaagtattggttactaaagactaagcttaggatgaacattaaaaggaacaaaggaacacaaccatacccacaaaatgcttaagaattaaagaggagaaaaagccatcaagaagtttattgcttactgtgatctttcccttgccctggagaagtgcaaacacttgcttgaggagtaacaggcatgagggcttggcgaattgctttttcccagctctgtgctacatcaagtccaactccagtggcagcaagaacaggattatgagagctgtccccattgttctcaccaacgaagtataccatagtatcagtaatgatttcaaaacagtgtggattgctgccttgtgaaatgtttgtgaaatctcgtggtgaagatatgcggagaa

SEQ ID NO: 4231 - DNA, 463 bp, Homo sapiens
  MAP TO AC009683.2; EXPRESSED IN FETAL LIVER, SIGNAL = 1.1; EXPRESSED IN ADULT LIVER, SIGNAL = 0.92; EXPRESSED IN HBL100, SIGNAL = 1.3; EXPRESSED IN HELA, SIGNAL = 0.95; EXPRESSED IN HEART, SIGNAL = 0.87; EXPRESSED IN LUNG, SIGNAL =   4
  unsure 117
  unsure 259
  unsure 263
  unsure 268
  unsure 279
  unsure 289
  unsure 302
  unsure 442
tctctctctccctctatcctctctctttctctctctctttccttagtatctatccttagaatgtaccacaagttaagggctcaatgatgtctattaggtgaattaaagtccacttgntttagaattttctgtcaagtgttatgcatgtttatcttatgagtcatgatccaaaccaactaagtgcttaaaattataaaataaaaaataaaaccaaacgggcagttaaattgatatgacatgaaattaaattatattttgntggntttcnaatgaagaaangctggggggnagtaaatacttangaatttctgcgaaaagataaataacactgagcagagggaaaggaagaaggagagagaagggaattggtctaacacaatgagaagctgtggcactggtgcgctccgtggtgctgtccacggtgctgacacgtttcttaatncttggggaagttagtccatcc

SEQ ID NO: 4232 - DNA, 492 bp, Homo sapiens
  MAP TO AL033543.6; EXPRESSED IN BT474, SIGNAL =   2; EXPRESSED IN BRAIN, SIGNAL =   2; EXPRESSED IN PLACENTA, SIGNAL = 1.9; EXPRESSED IN HELA, SIGNAL =   2; EXPRESSED IN HBL100, SIGNAL =   2; EXPRESSED IN FETAL LIVER, SIGNAL =   2; EXPRESSED IN ADULT LIVER, SIGNAL = 2.7; EXPRESSED IN LUNG, SIGNAL = 1.9; EXPRESSED IN BONE MARROW, SIGNAL = 2.2; EXPRESSED IN HEART, SIGNAL = 2.1
tcctagtggctgcagagttgtgcagcctctgtccctgtgctagctctggacctggtggtggccgcagagctgtgtagcctctgtctctgtgcttgctctggtcctggtggccacagagctgtacagcctctgtccctccgcttgctctggttctggcggctgcagtgctgtgcagcccctgtctctgtgcttgccctgtccttgtggtggctgcagagctgtgcagcctggccccagagctgtgcagcctctgtccctgtacttgctgtggtcccggtggtggctgcagagctgtgcagtctctgtttctgcactttccctggtcactgcctcattgccgtggcgctggtggactgaggccataatgcctgcgtctcctgcaggtcctcctcgactggattaatgacgtgctggtggaggagaggatcattgtgaagcagctggaggaagacctgtatgacggccaggtgctgcagaagctcttgggtgagt

SEQ ID NO: 4233 - DNA, 350 bp, Homo sapiens
  MAP TO AL050343.17; EXPRESSED IN PLACENTA, SIGNAL = 1.7; EXPRESSED IN HBL100, SIGNAL = 1.8; EXPRESSED IN HEART, SIGNAL = 1.6; EXPRESSED IN BT474, SIGNAL = 1.7; EXPRESSED IN FETAL LIVER, SIGNAL = 2.2; EXPRESSED IN ADULT LIVER, SIGNAL = 2.2; EXPRESSED IN LUNG, SIGNAL =   2; EXPRESSED IN BONE MARROW, SIGNAL = 1.9; EXPRESSED IN HELA, SIGNAL =   2; EXPRESSED IN BRAIN, SIGNAL = 2.6
tgagaacctcactgaagaggcattcaacacccaggtgactgtgccagcctggtcttttggcctttggcccacacaagcccccagatacaaatcttaacagggcttcgccggccagtttttgagctttgcagccccaccttcctcttacaatagtgtctccctagcttcatccgtgcctcttatactggcatgtccatcacaagccgggctggacagggcccagtgtgttctgtgggaagtggtatgttgcctcacctgagcatctttctttttggtgggaacaggtcacagctctcatcaagctgaaggagtgtgaggatacccaccttggggaggaggtggataggaac

SEQ ID NO: 4234 - DNA, 387 bp, Homo sapiens
  MAP TO AC011198.2; EXPRESSED IN FETAL LIVER, SIGNAL =  11; EXPRESSED IN LUNG, SIGNAL =  11; EXPRESSED IN BONE MARROW, SIGNAL =  10; EXPRESSED IN HELA, SIGNAL =  11; EXPRESSED IN HEART, SIGNAL = 7.9; EXPRESSED IN PLACENTA, SIGNAL =  11; EXPRESSED IN BT474, SIGNAL =  11; EXPRESSED IN ADULT LIVER, SIGNAL =  15; EXPRESSED IN BRAIN, SIGNAL = 9.4; EXPRESSED IN HBL100, SIGNAL =  11
agggattcaagggtttcacctctaaggagctttccttggccatgagtccaacatggcactagaggcagtgcacacagggctatgcactttggcctgacactgacaattgaaggccaggatttcactagtgctctggagtgcacattgagcttagcttccttgcacttgaacagttttaaatatgtttttgaccaccattgcccatgaagctttaaaaaagtctttctcatatttttgaatctttgccttacctttcctttttaagaagagatatgcctgcatattcagctacaatggcctgcaccctgaggctgtcaccttggcagaggcctgcagatatggaccttttacaaggtcagcatgggttgggaaaatgaatgcttgctg

SEQ ID NO: 4235 - DNA, 420 bp, Homo sapiens
  MAP TO AL034562.2; EXPRESSED IN FETAL LIVER, SIGNAL = 4.8; EXPRESSED IN BONE MARROW, SIGNAL = 4.6; EXPRESSED IN HEART, SIGNAL = 4.5; EXPRESSED IN PLACENTA, SIGNAL = 4.6; EXPRESSED IN BT474, SIGNAL = 4.6; EXPRESSED IN ADULT LIVER, SIGNAL = 5.6; EXPRESSED IN BRAIN, SIGNAL = 4.4; EXPRESSED IN LUNG, SIGNAL = 5.9; EXPRESSED IN HELA, SIGNAL = 4.5; EXPRESSED IN HBL100, SIGNAL = 4.6
tgaatgaatgcactccaacctgaaaaggtgtcaggggtttctcctgactctactccatgaaaagaggtgcttatgcatcaaaaagctctccagagtaagcattcggatcttcctgagaccgagtcaccaccttgaactggcgccggagaaaaccgccatagcgcttctggttgtcccacttgagcttgggacgaatgcgccgcaagaagcccccatagcgtttgtacaggtcctcatggcccatgctatccccgtccccctccccagccacctctgagctcctcttggggtatttgcgcaaaaagcccccatagcgtttgacctgctccttggggtcctcctcagcgagatagagtgtgccagtctccatggcaccatcgttcagctgggcatccctcatcagctcagactctgctccct

SEQ ID NO: 4236 - DNA, 421 bp, Homo sapiens
  MAP TO AC011232.3; EXPRESSED IN ADULT LIVER, SIGNAL =   2; EXPRESSED IN FETAL LIVER, SIGNAL = 1.4; EXPRESSED IN LUNG, SIGNAL = 1.2; EXPRESSED IN BRAIN, SIGNAL =   2; EXPRESSED IN HEART, SIGNAL = 1.2; EXPRESSED IN HELA, SIGNAL =  16; EXPRESSED IN HBL100, SIGNAL = 1.3; EXPRESSED IN PLACENTA, SIGNAL = 1.8; EXPRESSED IN BT474, SIGNAL = 1.5; EXPRESSED IN BONE MARROW, SIGNAL = 1.4
ttcacaatcactgccctagctatagagaattatattaataatttctttctgaggcaaagcactggttcaaacatggccatttcagagtgaaaaaaaagtatgtaaaataaatgtagaacctatttctcttttttttttttaaaatttttcttccaactaatatacttatttctttacccaggtgcattttttggaaagaaccctctgaaaaacttccagcagttgaatttggcgggaaatcgtgtgagcagtgatggatggcttgccttcatgggtgtatttgagaatcttaagcaattagtgttttttgactttagtactaaagaatttctacctgatccagcattagtcagaaaacttagccaagtgttatccaagttaacttttctgcaagaagctaggcttgttgggtggcaatttg

SEQ ID NO: 4237 - DNA, 430 bp, Homo sapiens
  MAP TO AL049629.14; EXPRESSED IN FETAL LIVER, SIGNAL = 1.2; EXPRESSED IN LUNG, SIGNAL = 0.97; EXPRESSED IN BONE MARROW, SIGNAL = 1.2; EXPRESSED IN HEART, SIGNAL = 1.2; EXPRESSED IN BT474, SIGNAL = 1.1; EXPRESSED IN ADULT LIVER, SIGNAL = 1.1; EXPRESSED IN BRAIN, SIGNAL = 1.6; EXPRESSED IN PLACENTA, SIGNAL = 1.1; EXPRESSED IN HELA, SIGNAL = 1.2; EXPRESSED IN HBL100, SIGNAL = 1.3
cagggacttgacccacaatcagttggatgagccaagaatctagtcgttcaagagtttcctgttcccagaagccccatagttcaccttttcagaaatggagggtgagaaagactcacccattgctatgtctcaagtcctaacacgtaggcatgggaaacccaaaggctgagtcctcagagtttggaagtccagagtcccacggggctaaggcgttagacctggaactcaaacatgtctgtctgttttttggccagcttggccacctcctcccggatggccttcacaagggccgcagtggagatgttggtcaggggagcgtcagacgggtcgttttctgccaggctctgctgcgaggccgctgtggagggcgccggggcctgctccaggctggggtgcaggttggctggctggctgtactgacgaggaagcc

SEQ ID NO: 4238 - DNA, 488 bp, Homo sapiens
  MAP TO AC005921.3; EXPRESSED IN PLACENTA, SIGNAL = 0.92; EXPRESSED IN BT474, SIGNAL = 0.89; EXPRESSED IN HELA, SIGNAL = 1.2; EXPRESSED IN HEART, SIGNAL = 1.1; EXPRESSED IN BONE MARROW, SIGNAL = 0.75; EXPRESSED IN HBL100, SIGNAL = 1.2; EXPRESSED IN FETAL LIVER, SIGNAL = 4.1; EXPRESSED IN LUNG, SIGNAL = 1.1; EXPRESSED IN ADULT LIVER, SIGNAL = 0.99; EXPRESSED IN BRAIN, SIGNAL = 1.4
gctggaagagatagaaagtggccttcagaaggcaggcggaggatggttagggaagatgggattgtcagtagcatcagatgcagccaagaagtcaagtgatgcaagaactgaatgtatcattggctttggtgattgggaggtggcctccgtgagtgcagcgtgaaggaggtcgaagccagcgggcttgccacaggctgacaggcagctggaaacttgttccttgtgcacagcagttatgaaggctggggagcagccttcttagaggaggaggaggaagaggaggaagaggagaaggaggaagaggaggaggaggaggagggggaagagctgctcctgatcaagttcccttgggcattgctggctgagcaggagcttcagcttgcagctgctttgggaccattcaccctggatggaagcctgagtgaatcattacccccagggtctaaggtgctgcattgtagcagcaaagagcccccattataacagca

SEQ ID NO: 4239 - DNA, 362 bp, Homo sapiens
  MAP TO AL109933.8; EXPRESSED IN BT474, SIGNAL = 4.6; EXPRESSED IN FETAL LIVER, SIGNAL =   8; EXPRESSED IN BONE MARROW, SIGNAL = 4.8; EXPRESSED IN LUNG, SIGNAL = 6.3; EXPRESSED IN BRAIN, SIGNAL = 4.5; EXPRESSED IN HEART, SIGNAL = 5.4; EXPRESSED IN ADULT LIVER, SIGNAL = 5.9; EXPRESSED IN PLACENTA, SIGNAL = 4.7; EXPRESSED IN HELA, SIGNAL = 6.5; EXPRESSED IN HBL100, SIGNAL = 5.8
tgtgacctcatcacctccagatgtcctcctgcatccataaaactactcaggaaaaatagccagcctaaaatttctcttctcgcaggccctttcttcaaaagcaagattcttgagacatttttctacacattctgggtctaagagaaatttggtcctaggaagttggcttgaagcatgaagcatggctcttttaacagaaatttcagttggctgatgcccctcttacagtaaaaatcaaagacatacgcatttgggtagttttctggggtcttctggtgccggtgtggtgtcatagatgaccaagactgacacttctttcctgtggtggtggtggaggatgtgcctcggtagctctgtccatc

SEQ ID NO: 4240 - DNA, 393 bp, Homo sapiens
  MAP TO AL121572.6; EXPRESSED IN BT474, SIGNAL = 2.5; EXPRESSED IN FETAL LIVER, SIGNAL = 2.7; EXPRESSED IN BONE MARROW, SIGNAL = 2.6; EXPRESSED IN LUNG, SIGNAL = 2.9; EXPRESSED IN HBL100, SIGNAL =   3; EXPRESSED IN HEART, SIGNAL = 3.1; EXPRESSED IN ADULT LIVER, SIGNAL = 2.6; EXPRESSED IN BRAIN, SIGNAL = 2.4; EXPRESSED IN PLACENTA, SIGNAL =   4; EXPRESSED IN HELA, SIGNAL = 3.7
ggtgcacctattacccaagcagtatacactgcaccatatttgtagtcttttatccctcgccccctcccactctttcccccaagttgccaaagtccattgtatcattcttatgcctttgtgtcctcatagcttagctcccacatatcagtaagaacatacgatgtttggctttccattcctgagttacatcgcttagagtaagtgctgttggggaggttggccaatgactgctctaattgcttcccgctaaattggggtgtagtaggggtcgtgcagttgagatttcctcggaagccgtgccttcaatgtcatcaacatcagagcatgggctagcaggccggtccaggggtccgtggtagatcttagccatggactgcatctggggctctattt

SEQ ID NO: 4241 - DNA, 406 bp, Homo sapiens
  MAP TO AL035091.2; EXPRESSED IN BONE MARROW, SIGNAL = 9.8; EXPRESSED IN PLACENTA, SIGNAL =   5; EXPRESSED IN BT474, SIGNAL = 4.1; EXPRESSED IN ADULT LIVER, SIGNAL = 5.7; EXPRESSED IN FETAL LIVER, SIGNAL =   4; EXPRESSED IN BRAIN, SIGNAL = 4.1; EXPRESSED IN LUNG, SIGNAL = 8.4; EXPRESSED IN HEART, SIGNAL = 4.5; EXPRESSED IN HELA, SIGNAL = 4.3; EXPRESSED IN HBL100, SIGNAL = 4.2
tttttcaggtcagattggtgctttttcataagttggagtttgctggaaatttctagaattagaaacaagggttgctaaatctaaagagaaaccagcttatcctgctccaccctcccatgctgttctagaagatgctctgatggccagggtggtccatctcggggggaccgctcccaaagccagccaagtccttctccccagcacctgtggtctctctggatctaagatgccccatctccacccaggattctctaacctcagccctactccttccctgttcccccaggcagaggtgcaccttacctgttctgttggccaagaccagcagtagacactgaggcctcacctcagactgggcaaggagcagggagcatacctgggccccagcatcagcatcagcctgctc

SEQ ID NO: 4242 - DNA, 457 bp, Homo sapiens
  MAP TO AC011257.2; EXPRESSED IN HBL100, SIGNAL = 1.3; EXPRESSED IN ADULT LIVER, SIGNAL = 1.6; EXPRESSED IN FETAL LIVER, SIGNAL = 1.3; EXPRESSED IN HELA, SIGNAL = 1.3; EXPRESSED IN HEART, SIGNAL =   1; EXPRESSED IN PLACENTA, SIGNAL = 1.7; EXPRESSED IN BT474, SIGNAL = 1.2; EXPRESSED IN BRAIN, SIGNAL = 1.1; EXPRESSED IN BONE MARROW, SIGNAL =   1
  unsure 296
  unsure 297
  unsure 309
  unsure 314
  unsure 315
  unsure 327
  unsure 334
  unsure 344
  unsure 350
  unsure 359
  unsure 381
  unsure 395
  unsure 420
cttgtggctattgtaaatgagattacttatttgattccttttttagagtgttcactgttggcatatagaaatgctactgatttttgtatgttgatgtttgtatcgtatacatttactgaatttgtttatcacttctaatagatttttggtggagtctttaggtttttttcaaatataagatcatattgtctgcaaacaagaatattttgacttcttcctttccaatttgaatgccctccatttctttctcttgtctggttgttctagctgggacttccagtactctgtttgtaacnnagtggtggaagntgggnncattcctgtcantatcctngatgttaganggaaanggctttcangttttgacccatttagtataantactagctttgctnctgtcatatatggcttttactatgnttgagatatactccttctatacacagttatttggttt

SEQ ID NO: 4243 - DNA, 376 bp, Homo sapiens
  MAP TO AL109942.4; EXPRESSED IN LUNG, SIGNAL = 1.1; EXPRESSED IN BRAIN, SIGNAL =   1; EXPRESSED IN HELA, SIGNAL = 1.3; EXPRESSED IN HEART, SIGNAL = 1.1; EXPRESSED IN FETAL LIVER, SIGNAL =   1; EXPRESSED IN BONE MARROW, SIGNAL = 1.1; EXPRESSED IN PLACENTA, SIGNAL =   1; EXPRESSED IN HBL100, SIGNAL =   1; EXPRESSED IN BT474, SIGNAL = 1.7; EXPRESSED IN ADULT LIVER, SIGNAL =   1
tctgccttcttctctccacctttcagagtctcttacgtttattttatatgtagtgtccagggtttttagccatgcttgatggaataggaagaagtgtgcctactctatcttatcccagaactggaaatctagaagaactattttaatttcctgttttaaaagaaacaactctgaaaagaagatcaaaaaagaataaaaggttttatgttggcatgtttgttgttattattattattattattattattgtaatttcaacctttctgtggcttttttcttctgatctgtttcaacttggtgttttgatattttgtgatcttccagtgggaagttgtatactgcttttccccctgaaagtgcgattgcttcttgcttt

SEQ ID NO: 4244 - DNA, 463 bp, Homo sapiens
  MAP TO AL118496.10; EXPRESSED IN PLACENTA, SIGNAL = 4.2; EXPRESSED IN HEART, SIGNAL = 4.9; EXPRESSED IN FETAL LIVER, SIGNAL = 4.7; EXPRESSED IN BT474, SIGNAL = 3.1; EXPRESSED IN BONE MARROW, SIGNAL = 2.9; EXPRESSED IN BRAIN, SIGNAL = 3.2; EXPRESSED IN LUNG, SIGNAL =   4; EXPRESSED IN HELA, SIGNAL = 3.9; EXPRESSED IN HBL100, SIGNAL = 3.3; EXPRESSED IN ADULT LIVER, SIGNAL = 4.1
acactcaatgctgctgttgctagtgctgctagtacttacgctaaggttcaggctctgtttagaatattttacatatatcaactcatttaatcttaacgacagccctatgaggttggtattgtccttgttttgctgatggagaagctcatacataagttaaataacttgtccaaagtttgaactaatggaaccatcaactttattaatgactgatcaatattacctttcatatatactgaagttataaaaactaaagaaaaccataaaaagaaaacattctgacctataatctgtaaacatccatcgggatggaattctccaatatcaccagtgcaaaaccacctttgtccattttcatccacagaataatcttctgctgttttctcttcatttttaaaatatcccatggagatgttctgtccaccaattacgatttcacctctggggtttggcttgtcattaa

SEQ ID NO: 4245 - DNA, 393 bp, Homo sapiens
  MAP TO AL118508.9; EXPRESSED IN BT474, SIGNAL = 8.6; EXPRESSED IN ADULT LIVER, SIGNAL =  11; EXPRESSED IN BONE MARROW, SIGNAL = 9.5; EXPRESSED IN BRAIN, SIGNAL = 8.3; EXPRESSED IN LUNG, SIGNAL =  14; EXPRESSED IN HELA, SIGNAL =   9; EXPRESSED IN PLACENTA, SIGNAL =  10; EXPRESSED IN HBL100, SIGNAL =  10; EXPRESSED IN HEART, SIGNAL =  10; EXPRESSED IN FETAL LIVER, SIGNAL =  11
acacaagggtccttccactgtggctgcctgccaggctgggtgctggccccaaatggggtctcttgcaccatggggcctgtgtctctgggaccaccatctgggccccccgatgaggaggacaaaggagagaaagaagggagcaccgtgccccgtgctgcaacagccagtcccacaaggggccccgagggcacccccaaggctacacccaccacaagtagaccttcgctgtcatctgacgcccccatcacatctgccccactcaagatgctggcccccagtgggtccccaggcgtctggagggagcccagcatccatcacgccacagctgcctctggcccccaggagcctgcaggtggggactcctccgtggccacacaaaacaacgatggcact

SEQ ID NO: 4246 - DNA, 386 bp, Homo sapiens
  MAP TO AL050342.36; EXPRESSED IN PLACENTA, SIGNAL = 3.3; EXPRESSED IN HBL100, SIGNAL = 3.3; EXPRESSED IN HELA, SIGNAL = 2.9; EXPRESSED IN FETAL LIVER, SIGNAL = 3.5; EXPRESSED IN LUNG, SIGNAL = 2.5; EXPRESSED IN BONE MARROW, SIGNAL = 3.4; EXPRESSED IN HEART, SIGNAL = 2.9; EXPRESSED IN BT474, SIGNAL = 2.8; EXPRESSED IN ADULT LIVER, SIGNAL = 3.6; EXPRESSED IN BRAIN, SIGNAL = 2.9
tctggcccacatttttcttcgcagcctcttctcatcccacttcctttcttctccaggtgctgtgaaggcagcaagcttcccctgagcgcacactgctctttcctgccgcagggcctttgctgttccctttgcctagaaaactcccacccgttgccaggctggctcctactcttccttcaggaggcaacttaaaacatcgctgcctccaggaagccctcggttattaccttattctcaggatgggggctgtccttcttctgggcttcctgcctgcatcttgtcagtgtcctggggaaaggggtgaccagggccggttgagcactcacgtgtggctatctctgtgctctgtggcaggtgacggatggtggcaccatcaagcaaaagat

SEQ ID NO: 4247 - DNA, 413 bp, Homo sapiens
  MAP TO AL035425.11; EXPRESSED IN BRAIN, SIGNAL =   2; EXPRESSED IN PLACENTA, SIGNAL = 2.2; EXPRESSED IN HBL100, SIGNAL = 2.6; EXPRESSED IN BT474, SIGNAL = 1.8; EXPRESSED IN FETAL LIVER, SIGNAL = 2.3; EXPRESSED IN LUNG, SIGNAL = 2.6; EXPRESSED IN BONE MARROW, SIGNAL = 2.1; EXPRESSED IN HEART, SIGNAL = 1.9; EXPRESSED IN HELA, SIGNAL = 3.1; EXPRESSED IN ADULT LIVER, SIGNAL =   2
tgatgaacaaaacagcaggctgaaaattgaccatggggttcagattcttttagtacaacaagagactaaataacatacagactctccaaataagcatattttatttgtctcctagcccatgatatctgacaatgcctttatagacactctataaatatcaaataaattaactagtcaaatgaggtcataatgttttgtcaatatccataagagtggatcagagcttacttaatcttgtatactgattatttcgtggaaataggtacccgtggtttggatggtccccctggtccagatggattgcaaggtcccccaggtccccctggaacctcctctgttgcacatggatttcttattacacgccacagccagacaacggatgcaccacaatgcccacagggaacacttcaggt

SEQ ID NO: 4248 - DNA, 413 bp, Homo sapiens
  MAP TO AC011174.2; EXPRESSED IN BT474, SIGNAL = 3.4; EXPRESSED IN FETAL LIVER, SIGNAL = 7.5; EXPRESSED IN LUNG, SIGNAL = 6.9; EXPRESSED IN BONE MARROW, SIGNAL = 6.7; EXPRESSED IN HEART, SIGNAL =   6; EXPRESSED IN ADULT LIVER, SIGNAL = 8.8; EXPRESSED IN BRAIN, SIGNAL = 5.8; EXPRESSED IN PLACENTA, SIGNAL = 6.7; EXPRESSED IN HELA, SIGNAL = 7.9; EXPRESSED IN HBL100, SIGNAL = 5.5
tgtgtgtgtgtgtttgtgggtgagtgagtgtgtgagccacttctgagcaaagtggcggactggatggttgatctacttatccacttatggccacattaattatacttcaaccccttgttttgttcatgtgtgccaggaaatgcaatgagtcaatatacttactgagattgcagaagagactgaacacggcgctaggctctgaagagaaagatgaaaaagaagaaaggtgtgatttaccttgataaagaatggtgacaattgtatagggtttttgttaaaaattaaatggcagaatacacgtacagcactaacatcatgtctaccaaataccaggcagttgataatgacaggagctggtgttattaaggaaaatgacatcatagaggagatagacacagatgttggtgtttgca

SEQ ID NO: 4249 - DNA, 456 bp, Homo sapiens
  MAP TO AL050344.11; EXPRESSED IN FETAL LIVER, SIGNAL = 3.6; EXPRESSED IN LUNG, SIGNAL = 3.9; EXPRESSED IN BONE MARROW, SIGNAL = 4.6; EXPRESSED IN BRAIN, SIGNAL = 4.7; EXPRESSED IN HELA, SIGNAL = 4.2; EXPRESSED IN HEART, SIGNAL =   4; EXPRESSED IN PLACENTA, SIGNAL = 3.1; EXPRESSED IN HBL100, SIGNAL = 5.2; EXPRESSED IN BT474, SIGNAL = 5.2; EXPRESSED IN ADULT LIVER, SIGNAL = 3.4
ggtggtagtaagagtggtgtcaatagtgatggtggtgatggtagtggtggtggtcatgatggtggtgctgatgcttgtaatggtgttgattgtggtagtgatggtagtgctggttatggtgttagtggtgatgatggtggtgttggtggtggtgttgatgatgtggatggtaaagatggtgttgatagtggtgatggtggtagtggtggtgattccagtggtattagtgatggtggttgataatgatgctagtggtgatggtagtgatgttcatggtgatgatggtagtgttgctggtgatggtgattatggtagtgctgatgataatggtggtgttggtgttgatggtggtgctggtagtgatggtggtgttgatggtagtggtggtggtgttgatggtggtaacagtgatgctagtggtgactgtggtagtgttgatagtggtggtgctggtga

SEQ ID NO: 4250 - DNA, 454 bp, Homo sapiens
  MAP TO AC007653.1; EXPRESSED IN PLACENTA, SIGNAL = 5.6; EXPRESSED IN HEART, SIGNAL = 0.82
gaatcgtttttcattgcttgcattgtccaggtaattaacctggttcctatgtgggtcaaagatataaacttagcccaaatagctttaatatttgtgtggcttaaaacaaaactaaacaaagtaaaaccattatctacacccaacagaatagcactttctttgggtagcatgtggataggagagtggagagtagctaagacaagaagcgacagtttcctctttcacactagaatatcctgttgtgctctgtagcatcagacatcgatgagtcatcagtgatgcagctggccgagatgggtttcccgctggaagcatgtcgcaaggctgtgtacttcactggaaatatgggcgccgaggtggccttcaactggatcattgttcacatggaagagccaggtaggtggcgagaaaatggaatggctttggagtctgatgtgaccctcagtgatgctga

SEQ ID NO: 4251 - DNA, 446 bp, Homo sapiens
  MAP TO AL096712.17; EXPRESSED IN BONE MARROW, SIGNAL = 1.8; EXPRESSED IN PLACENTA, SIGNAL = 1.6; EXPRESSED IN BT474, SIGNAL = 1.8; EXPRESSED IN ADULT LIVER, SIGNAL = 2.1; EXPRESSED IN FETAL LIVER, SIGNAL = 1.9; EXPRESSED IN BRAIN, SIGNAL =   2; EXPRESSED IN LUNG, SIGNAL = 2.2; EXPRESSED IN HEART, SIGNAL = 1.7; EXPRESSED IN HELA, SIGNAL = 2.1; EXPRESSED IN HBL100, SIGNAL = 1.6
accagatatgggacacctgccattcactgcaaagtgcttcatatagctggctgcattcatctgcttaataaaaccagataatgaaacaaacccccttttccagttccccagagccctgctgtaaagaaggtgcctttaattagagtcagactgcacagcactggggctcagctgtactatagtttgatgctgcaaggcagaaaagttaccgtgtattttctaggcaagtaaaatgcagatgatgtttaatatcagatatctctccaaggaaagaacattctgtagctcagacaaataatgcaagtttgggttaatttttggtttgtcttttaaacatagtacattcaggcttttgtttgtgatcagggcaataatgacagatataattacttagagatgaagaaaccaaaaccaagacacaaggaggctgagtaacttgcccaagg

SEQ ID NO: 4252 - DNA, 380 bp, Homo sapiens
  MAP TO AC011208.2; EXPRESSED IN PLACENTA, SIGNAL = 9.2; EXPRESSED IN HBL100, SIGNAL = 9.9; EXPRESSED IN ADULT LIVER, SIGNAL =  11; EXPRESSED IN FETAL LIVER, SIGNAL =  10; EXPRESSED IN BONE MARROW, SIGNAL = 9.3; EXPRESSED IN LUNG, SIGNAL =  10; EXPRESSED IN HEART, SIGNAL = 7.9; EXPRESSED IN HELA, SIGNAL = 9.7; EXPRESSED IN BT474, SIGNAL =   9; EXPRESSED IN BRAIN, SIGNAL = 8.5
attcattgtgaaaggcagggtcaagtgtttagatatgacaagaaccaaattagatacaaaatggagggacatttctcctagaaattttctctaatccaccagtttttcttctgtgacaggctgaggtctgaaggaatagtattttatacttgggttataattacatgcttgccattcctcctggtctagccagattgaaaatatttctaaggaaaaatgtcttagtccatttttggttgcttacaacataggtaatttacaaggatttatttcttatagttatggaggctgtgaagtccaaggttgagggcctgcatctggtgagggccttagaactctgcagagggcatcacgtggcaaggaggctgagaatgctagct

SEQ ID NO: 4253 - DNA, 459 bp, Homo sapiens
  MAP TO AP000134.1; EXPRESSED IN PLACENTA, SIGNAL = 0.86; EXPRESSED IN FETAL LIVER, SIGNAL = 0.83; EXPRESSED IN LUNG, SIGNAL = 1.1; EXPRESSED IN BRAIN, SIGNAL = 1.1; EXPRESSED IN BT474, SIGNAL = 0.7; EXPRESSED IN HEART, SIGNAL = 0.85; EXPRESSED IN ADULT LIVER, SIGNAL = 0.91; EXPRESSED IN HELA, SIGNAL = 1.1; EXPRESSED IN HBL100, SIGNAL = 6.4; EXPRESSED IN BONE MARROW, SIGNAL = 0.94
tcaaaatttggaggcagcagcagcacagcattaaaccaactgtggggacctgtgcaaccatggaggtcacatgcccatgaagctggctctaataaattagatcaggattttcagaaggtgttctgtaaactccagatattccaaaaacaaaagattccttattctcatctctaggaagtggggcacatttccccatcccttcattgaagattcaaaatgcgcgtgaactgctccagaaagccctgcttgaaagcaagaaacgtgtgtgccttcatttcaaccagtttctcaaatgtatttgaccatagcaacattttttccccaattctccatattaataccccatataacccattttgcaaaatgcttgaagtcgatggtcttgaggtccctggagctagaaaaggcattagcagtcacccacagcagcccctcctgccctgagattggatgctcaca

SEQ ID NO: 4254 - DNA, 409 bp, Homo sapiens
  MAP TO AL118524.7; EXPRESSED IN PLACENTA, SIGNAL = 1.4; EXPRESSED IN HBL100, SIGNAL = 2.5; EXPRESSED IN BT474, SIGNAL = 1.3; EXPRESSED IN BONE MARROW, SIGNAL = 1.5; EXPRESSED IN LUNG, SIGNAL = 2.7; EXPRESSED IN HELA, SIGNAL = 2.7; EXPRESSED IN HEART, SIGNAL = 2.4; EXPRESSED IN ADULT LIVER, SIGNAL = 1.2; EXPRESSED IN FETAL LIVER, SIGNAL = 1.7; EXPRESSED IN BRAIN, SIGNAL = 2.7
gggtttcctcatcgtggtcggccctttgcgactcctggcatccggagacgttcccgtcgaccccgtggagaggtgaggccggatcctcagagccccgacacccaagcactgccacagagggctcctgctttgccaagcctcggggactggtttctaagacaaccatgggaaccactgtgacgggagaaaccgctcccgcctcgcgcatgcgcattggctgagccgactcgcgctccgctcctggcagtatggctgcgtcccctttaaataccgccaccgccgcgcggcggcagcgaggttcctcctgccgccacggcggcggctggatccggggtccagtttggggcggcgtgggagagggggccgcgggtgtcttgtccgttcccagggccaaacccctaggagtcct

SEQ ID NO: 4255 - DNA, 474 bp, Homo sapiens
  MAP TO AL121580.6; EXPRESSED IN PLACENTA, SIGNAL = 1.3; EXPRESSED IN HEART, SIGNAL = 1.4; EXPRESSED IN FETAL LIVER, SIGNAL = 1.1; EXPRESSED IN BT474, SIGNAL = 1.5; EXPRESSED IN BRAIN, SIGNAL = 1.9; EXPRESSED IN BONE MARROW, SIGNAL = 1.3; EXPRESSED IN LUNG, SIGNAL = 1.6; EXPRESSED IN HELA, SIGNAL = 1.9; EXPRESSED IN HBL100, SIGNAL = 1.7; EXPRESSED IN ADULT LIVER, SIGNAL = 0.97
aggcttgacactgaccaaggcaggtggggcagaaccaccccaggccatgctgcaaaattctacaccaaacgtcccagtcctgttgggtcagccagccctgagttcttagccccgaccactgcacctcccccgcagtgcccctcaggtcctctgccagcaggtgccagcaggatgtctcaagtgcagctcagatcactgtgctctgcctaatatccccacttctcctgtgttgggtcctgaatgccttgccttctccttgggcagaacactgatccattcctgctcaccttggaggcctcaacatgcacagcttcaacttcaacatcttcattttcatcttcttcttcttcatctttatcttcatcttcattttcatctttattttcatcttcttcatcttcatcttaatcatcttcttcttcttcatcttcatcttcattttcatcaccttcatcatcttcatggtccacatcc

SEQ ID NO: 4256 - DNA, 378 bp, Homo sapiens
  MAP TO AC011242.2; EXPRESSED IN HEART, SIGNAL =   3; EXPRESSED IN PLACENTA, SIGNAL = 4.2; EXPRESSED IN HBL100, SIGNAL = 4.1; EXPRESSED IN BT474, SIGNAL = 3.2; EXPRESSED IN FETAL LIVER, SIGNAL =   4; EXPRESSED IN ADULT LIVER, SIGNAL = 4.1; EXPRESSED IN LUNG, SIGNAL = 3.8; EXPRESSED IN BONE MARROW, SIGNAL = 3.9; EXPRESSED IN BRAIN, SIGNAL = 3.4; EXPRESSED IN HELA, SIGNAL = 3.8
tgccataacaatcacagaagatgtctaacaagaagatataaggaatcttcttccttgttttgctcttactgaggttttaataaattgctgtaattttccagtgaacaggttcatctacatcaaatgaatttcaagtcatgcataaaaatctaaagaagttgtttgtgatgttatcattaactataaatgggactaaggattccagtaataatcccaaacagcaactcacaggatgatccttcggcatattattccagatcttctgtctcatttcagaaactgctttagcatttgtctttcccagtttcattatcactttgtctacatggctttttgtggcttgcaagagattttccatggtgggccagagatcattag

SEQ ID NO: 4257 - DNA, 383 bp, Homo sapiens
  MAP TO AC012002.2; EXPRESSED IN BRAIN, SIGNAL = 4.9; EXPRESSED IN HELA, SIGNAL = 5.3; EXPRESSED IN HEART, SIGNAL = 4.4; EXPRESSED IN PLACENTA, SIGNAL = 6.8; EXPRESSED IN HBL100, SIGNAL = 5.5; EXPRESSED IN ADULT LIVER, SIGNAL = 7.9; EXPRESSED IN BT474, SIGNAL = 4.1; EXPRESSED IN FETAL LIVER, SIGNAL = 5.3; EXPRESSED IN BONE MARROW, SIGNAL = 5.3; EXPRESSED IN LUNG, SIGNAL = 4.5
ctgggaggagacgaagcctgcagggaccccttcccacctggaggcagggacgcagagaagccaacccgcagagaaaggaagaaacaggcaccactgggaaggcggccaggcctccaccctgagggaactcagaagtggctcctgtgggcttccgatggcctccccattcccggctctgacacccctcaggctggcccatatcgaccagcacccatcttccacttgagccgctttggctgggtttctgtcccctatacccactctctgcccaggatgccccggaacagacccctgtctttggggtcttcgcctgttgtgccccctctgggaccctcacagatcagggaccagaccctgggcacaggtccaacgtgacagtgaga

SEQ ID NO: 4258 - DNA, 373 bp, Homo sapiens
  MAP TO AL121590.7; EXPRESSED IN HEART, SIGNAL = 1.2; EXPRESSED IN FETAL LIVER, SIGNAL = 1.4; EXPRESSED IN BT474, SIGNAL =   1; EXPRESSED IN ADULT LIVER, SIGNAL = 1.2; EXPRESSED IN BONE MARROW, SIGNAL = 1.2; EXPRESSED IN BRAIN, SIGNAL = 1.2; EXPRESSED IN LUNG, SIGNAL =   1; EXPRESSED IN HELA, SIGNAL = 1.2; EXPRESSED IN PLACENTA, SIGNAL = 1.1; EXPRESSED IN HBL100, SIGNAL = 1.2
caaagctcagaaggccgtagtggggaaaattataaaacagcagatgtgtgctgcaaattccacaaaacttgggaactaggggcagcaggtacctctgaaattgggggtaaggcagaaagactcaaataagaaggatgtgtttagcaagcactcagatctctatgtcttcaccccactgtgggcagccaggccactgcccacctctcttagcaaagactggctggagagggtaaggcatggtctctggacacctgggctgtgcactgcagcagtgcgatgagggacagctggatgctgacgagcctcggcccgctttcctgacctggctcccaggatgctgcagtcagtcttcaccttccagtcaggagacctg

SEQ ID NO: 4259 - DNA, 429 bp, Homo sapiens
  MAP TO AC011259.2; EXPRESSED IN BRAIN, SIGNAL = 1.2; EXPRESSED IN HELA, SIGNAL = 1.1; EXPRESSED IN PLACENTA, SIGNAL = 1.7; EXPRESSED IN ADULT LIVER, SIGNAL = 1.4; EXPRESSED IN LUNG, SIGNAL = 1.1; EXPRESSED IN BONE MARROW, SIGNAL = 1.4; EXPRESSED IN HEART, SIGNAL = 0.95; EXPRESSED IN HBL100, SIGNAL = 1.2; EXPRESSED IN FETAL LIVER, SIGNAL = 1.6; EXPRESSED IN BT474, SIGNAL = 1.1
aaacatactttaggggaaaacgcatttataaagaaaatacccatactttaatgtcttatattcaaatcaggagtttcaactgaataccttgctgaaagaaaaatacattagcctctcatacagaaacaggtttcaaagagtgtaataacacaattctttacggtgattacctcagtgaataggtttaaaacaaatgtaattaacacattgatcacttataagtaaataggtacttttaaaaagaaaaattgaattttttccttgattgttcctaaacttgccttctggaatttcaagagcagctaagcttaataaatcctttagttgtaagtactctgtccagcccatgtcaaaatattttgaaatactgaagatgaaattaatgagattcttctgcatctcatatccaccctgagctgtggtcttctt

SEQ ID NO: 4260 - DNA, 447 bp, Homo sapiens
  MAP TO AC012064.1; EXPRESSED IN BT474, SIGNAL = 1.7; EXPRESSED IN BRAIN, SIGNAL =   2; EXPRESSED IN HELA, SIGNAL = 1.8; EXPRESSED IN HEART, SIGNAL = 1.2; EXPRESSED IN PLACENTA, SIGNAL =   2; EXPRESSED IN ADULT LIVER, SIGNAL = 2.4; EXPRESSED IN FETAL LIVER, SIGNAL = 1.7; EXPRESSED IN LUNG, SIGNAL = 1.6; EXPRESSED IN BONE MARROW, SIGNAL = 1.8; EXPRESSED IN HBL100, SIGNAL = 1.4
aaagactggctgaggaggtgactcctatctgttgagaacacctgtattttggtaagtccttaacttgtgtgagactaacaaatatgcagaaatataactgtttcagggtggagataggaaaactagatttgctcacgtagtatgcttttcttagaaatctgaaatattcttacctgaaagtaataggggagaaagaaaactatacagaaggcttccttgccttcagtgtcataccccagtttttaaaagctctcttgttttcaggaaactttagatccaattgatgaggtcgctgcactcatcgcagccaccattcatgatgtggatcaccctgggagaaccaactccttcctgtgtaatgctggaagtgagctggccattttgtacaatgacactgctgtgctggagagccaccatgcggccttggccttccagctgaccactgga

SEQ ID NO: 4261 - DNA, 450 bp, Homo sapiens
  MAP TO AL121675.8; EXPRESSED IN PLACENTA, SIGNAL = 1.1; EXPRESSED IN BT474, SIGNAL = 0.99; EXPRESSED IN BONE MARROW, SIGNAL = 1.2; EXPRESSED IN BRAIN, SIGNAL = 1.7; EXPRESSED IN LUNG, SIGNAL = 0.94; EXPRESSED IN HELA, SIGNAL = 1.5; EXPRESSED IN HBL100, SIGNAL = 1.7; EXPRESSED IN HEART, SIGNAL = 1.1; EXPRESSED IN FETAL LIVER, SIGNAL = 1.1
atgggcaccaaatgtttcacattgtcctaagtgagggcccagcaagaaaacctccggggcttatcccacctccccgacaggccggaggcgaggaggtggctgcccggggccttggcttttggtgcagcattgagtgcaacatcggatccctaagggacagagaccaggggctcagtgcatccaggggacacctgggaactggtgggtttgggttgggggccttctgtttgagatggaggtgtgatgaggtgttttcagtctcatggggtctctctggcaggtctataacttgacccaggagttcttccggcacgataaaccagtcaatgctgaaagtcaaaatagcgtgggggtgttcacccgagaggaggtgcgtaaccgcatcaggaatgaccctgacgacccagaggctaccaagcgcctgaagctcgccatgatccagcagtacct

SEQ ID NO: 4262 - DNA, 499 bp, Homo sapiens
  MAP TO AC006482.2; EXPRESSED IN PLACENTA, SIGNAL = 0.61; EXPRESSED IN HBL100, SIGNAL = 0.99; EXPRESSED IN LUNG, SIGNAL = 1.2; EXPRESSED IN HELA, SIGNAL = 0.89; EXPRESSED IN HEART, SIGNAL = 0.8; EXPRESSED IN BT474, SIGNAL = 0.6
ggccagttcaacaccagaactcatctaggagttgcagtccttgtgacccagactgccattcaacgttatttagggccacagagcactttagcccatggtggcaaggcgtgtaggaactcaagctccaatggctggggttggtgattcccctcttgttggggctggtttaaatgctccctacataagcaggtgtcagctgagtttggcctggttttgctttccgctataacaaggcagcactgtgttctgtgcctcacaactgctgtgttctccctctccccagtgcacagaattaccctctgcaccacaccactgctgctggcaatgaaggaggagaggcactggcgatccaaggcttttttctacctcttcaatgcctctttcagtgacatgaagttaaaaccagatactgtgagtgctcacttgatttttgattcttatacaggtacttttttggtgtgtagatagttgttaacttggcattcttgtggggcaacaa

SEQ ID NO: 4263 - DNA, 395 bp, Homo sapiens
  MAP TO AC012271.1; EXPRESSED IN BT474, SIGNAL = 1.1; EXPRESSED IN BRAIN, SIGNAL = 1.2; EXPRESSED IN HELA, SIGNAL = 1.3; EXPRESSED IN HEART, SIGNAL = 1.2; EXPRESSED IN PLACENTA, SIGNAL = 1.1; EXPRESSED IN ADULT LIVER, SIGNAL = 1.4; EXPRESSED IN FETAL LIVER, SIGNAL = 1.1; EXPRESSED IN LUNG, SIGNAL =   1; EXPRESSED IN BONE MARROW, SIGNAL = 1.1; EXPRESSED IN HBL100, SIGNAL =   1
cttcctgccttctgagcttggattttgatgcagtgcgtagacctgatgggtgtggagtcagctccttaacctctaaacaatctggctctgtctccttactggtgttctctgtgttctgcagcaccccattcacaatagcattttgcaacttcttatcttctcgtttgcccccaccactgcccccacccccagttcctccaggacctcctatggactcaggggggtctctgtccagggctaggaagacagtagagtagcggcgttctcgctgcttggcggactggtgcacagagtaggtgatgaagcaaagactgggggtacacaccattatgatctggaagacccagtaacgtatgtgggagatggggaaggcgcggtcatagcaggcctggtta

SEQ ID NO: 4264 - DNA, 408 bp, Homo sapiens
  MAP TO AP000351.3; EXPRESSED IN ADULT LIVER, SIGNAL = 1.2; EXPRESSED IN BONE MARROW, SIGNAL = 1.7; EXPRESSED IN BRAIN, SIGNAL = 1.3; EXPRESSED IN HBL100, SIGNAL = 1.6; EXPRESSED IN LUNG, SIGNAL = 1.5; EXPRESSED IN HELA, SIGNAL = 1.8; EXPRESSED IN PLACENTA, SIGNAL = 1.4; EXPRESSED IN HEART, SIGNAL = 2.3; EXPRESSED IN BT474, SIGNAL = 1.6; EXPRESSED IN FETAL LIVER, SIGNAL = 1.4
ttctctatcccaggctcaccctccgggtcctcccacaccgaagaatctttgtcaagtgtggagaactgtgatccttcctgattcataacattctgtgcttcctgttgccccgattgagtccaggcccccaggcctggttcccgcagcccccatggcagctctgcctgcctttcccgcctcaccagcctatcctcaagtgatggccccattggtcacagaggagtcctacctctgcccagggtctaaccctcctccaatccactccacacctgcatcatctccaccacggccaccaggtcagccagtgagatttggttcccggtgatgaacatcttatcctgcagaaaatactcctcaaagagctgcaggctgttcttcacctcttccactgcatgctccatcttctca

SEQ ID NO: 4265 - DNA, 393 bp, Homo sapiens
  MAP TO AE000659.1; EXPRESSED IN BONE MARROW, SIGNAL = 0.98; EXPRESSED IN BRAIN, SIGNAL = 1.3; EXPRESSED IN HELA, SIGNAL = 1.7; EXPRESSED IN HEART, SIGNAL = 0.97; EXPRESSED IN PLACENTA, SIGNAL = 1.1; EXPRESSED IN HBL100, SIGNAL = 1.3; EXPRESSED IN BT474, SIGNAL = 1.3
gcaaacagttcacttccttggatccgtggtttcgcctgtggccttcagggggcgacgttgcactaaggaggcatctgtgttcattgccgaccatcctcatccactgagcctcctccctgcagctggctgatgtagctcactggtgtctgtgtagatagggagctgtgatgagaacaagaggtcagaacacatccaggctccttaagagaaagcctttctttaaccatttttgaaacccttcaaaggcagagacttgtccagcctaacctgcctgctgctcctagctcctgaggctcagggcccttggcttctgtccgctctgctcagggccctccagcgtggccactgctcagccatgctcctgctgctcgtcccagtgctcgaggtgatttt

SEQ ID NO: 4266 - DNA, 398 bp, Homo sapiens
  MAP TO AC012299.1; EXPRESSED IN BT474, SIGNAL =   3; EXPRESSED IN FETAL LIVER, SIGNAL = 3.1; EXPRESSED IN BRAIN, SIGNAL = 2.9; EXPRESSED IN HELA, SIGNAL = 3.5; EXPRESSED IN PLACENTA, SIGNAL = 3.2; EXPRESSED IN ADULT LIVER, SIGNAL = 3.7; EXPRESSED IN LUNG, SIGNAL = 2.9; EXPRESSED IN BONE MARROW, SIGNAL = 3.2; EXPRESSED IN HEART, SIGNAL = 2.7; EXPRESSED IN HBL100, SIGNAL = 3.3
tcctttcctctgactgtgtgctttcaaatagcctttcttcaaactcactaattcattcttctgcttgatcaattcttcttttgaaggtctctgatgcattcttcagtatgcaaattatatttttcagctccagaaattctgcttgattttttaaaactatctccatctctttcttaaatttacctaatggaattctgaattccttctttgtgttatcttgaatttagttgagtttcctcaacacagctattttaaattctttgcctaaaaggtcacatatctgtttctccaggattggtccctgatgtcttatttagttcatttggtgagatcatgttttcctggatgatcttgatgcttgtggatgttggtcagtgtctgggcattgaagaggtagg

SEQ ID NO: 4267 - DNA, 392 bp, Homo sapiens
  MAP TO AE000661.1; EXPRESSED IN HBL100, SIGNAL = 1.3; EXPRESSED IN BT474, SIGNAL =   2; EXPRESSED IN BRAIN, SIGNAL = 1.8; EXPRESSED IN HELA, SIGNAL = 1.9; EXPRESSED IN HEART, SIGNAL = 1.4; EXPRESSED IN PLACENTA, SIGNAL = 1.5; EXPRESSED IN ADULT LIVER, SIGNAL = 2.1; EXPRESSED IN FETAL LIVER, SIGNAL = 1.6; EXPRESSED IN LUNG, SIGNAL = 1.6; EXPRESSED IN BONE MARROW, SIGNAL = 1.8
aagcaccagcttagggacagcaccctgaggggctgaaaagctattctttgagatagtgttgtgtccctgttacataaaatacatggacctgggtagcaagggatggaagtaggactatcaccccatcaaccaccactttcagtaacccacttttgtgcttcctgttcttataactataggttctgctggactagggattctgtttccctttgagggggaaaagggaggatgctgcttctacgagggaaataggtttttaccaaacccaagataatatatactacctcataatttggggatcttcatgccagtcctggaggccaagaaaggagttactactgtcatggacaagttgatcctgattatcatgaagctaaaccccatagcggaac

SEQ ID NO: 4268 - DNA, 387 bp, Homo sapiens
  MAP TO D87009.1; EXPRESSED IN LUNG, SIGNAL =  12; EXPRESSED IN BONE MARROW, SIGNAL =  11; EXPRESSED IN BT474, SIGNAL = 1.3; EXPRESSED IN HEART, SIGNAL = 1.6
actgtgcaggtgacaggatggggaccaagagagaggccctgggaagcccatgcgaccctgctttctcctcttgtctccttttgtctcttgtcaatcaccatgtctgtgtctctctcacttccagggtcctgggcccagtctgtgctgactcagccaccctcggtgtctgaagcccccaggcagagggtcaccatctcctgttctggaagcagctccaacatcggaaataatgctgtaaactggtaccagcagctcccaggaaaggctcccaaactcctcatctattatgatgatctgctgccctcaggggtctctgaccgattctctggctccaagtctggcacctcagcctccctggccatcagtgggctccagtctgaggatgag

SEQ ID NO: 4269 - DNA, 397 bp, Homo sapiens
  MAP TO AL049553.15; EXPRESSED IN PLACENTA, SIGNAL = 1.2; EXPRESSED IN ADULT LIVER, SIGNAL = 1.4; EXPRESSED IN LUNG, SIGNAL =   1; EXPRESSED IN BRAIN, SIGNAL = 1.2; EXPRESSED IN BONE MARROW, SIGNAL =   1; EXPRESSED IN HEART, SIGNAL = 1.2; EXPRESSED IN HELA, SIGNAL = 1.1; EXPRESSED IN HBL100, SIGNAL =   1; EXPRESSED IN BT474, SIGNAL = 1.2; EXPRESSED IN FETAL LIVER, SIGNAL = 1.1
gaattgcagggaaatcgaagggcgtggaacatcctctgcatgactcatctaccaaggagaagcagacaggcccctttcctagttcattggtagctcccaaagaccagggaccttgtctgcctcacaacttccctcccaccccttctgaggccacgtacatcgcaccagcaggttgacagtcttcttggcagggttgcccacattgttggtggctgtgcagttgtagtagccagagtcccgggcctgcactgaagggatgctgagggtgccaccctgggccagagcacccaggggcagtgggccaggcccatgggaccactgcagctgggggaggggatcaccgcctgtcagcagacactgcaccgtcacattctccccagggttcaccaccagagtt

SEQ ID NO: 4270 - DNA, 447 bp, Homo sapiens
  MAP TO AL049629.14; EXPRESSED IN BT474, SIGNAL = 4.6; EXPRESSED IN FETAL LIVER, SIGNAL = 5.6; EXPRESSED IN BRAIN, SIGNAL = 5.2; EXPRESSED IN BONE MARROW, SIGNAL = 4.6; EXPRESSED IN HBL100, SIGNAL = 5.7; EXPRESSED IN PLACENTA, SIGNAL =  16; EXPRESSED IN LUNG, SIGNAL = 6.6; EXPRESSED IN HEART, SIGNAL = 5.9; EXPRESSED IN HELA, SIGNAL = 7.9; EXPRESSED IN ADULT LIVER, SIGNAL = 5.6
taaatgcctgttcctcctccgtcccacccccataactatactggctctgatgagaccttggttttctgtaaaagctctatttagaggtgtatcattatttacttaattgttctcctttacaacccacctgggatgagcatcttgcctagaagtctctacttgcacaggatacatacgaaatagaattgaggattcaaaagcagatacagaactcttcccacttactttcttacccttgtgtgtgtctccccacagggttacaagtgtataacaagtgttggaagtttgagcattgcaatttcaacgacgtcacaacccgcttgagggaaaatgagctaacgtactactgctgcaagaaggacctgtgtaactttaacgaacagcttgaaaatggtgggacatccttatcagagaaaacagttcttctgctggtgactccatttctgg

SEQ ID NO: 4271 - DNA, 419 bp, Homo sapiens
  MAP TO AL132642.1; EXPRESSED IN PLACENTA, SIGNAL = 2.4; EXPRESSED IN BT474, SIGNAL = 3.2; EXPRESSED IN HEART, SIGNAL = 2.7; EXPRESSED IN HELA, SIGNAL = 2.4; EXPRESSED IN HBL100, SIGNAL = 1.7; EXPRESSED IN ADULT LIVER, SIGNAL = 1.8; EXPRESSED IN FETAL LIVER, SIGNAL = 1.4; EXPRESSED IN LUNG, SIGNAL = 2.5; EXPRESSED IN BRAIN, SIGNAL = 1.6; EXPRESSED IN BONE MARROW, SIGNAL = 1.5
ctttgagatggctccagtcccggctgtcaaatcacccccggtctttgagtctttccagccccagacattgcagatggagatatgtggctctcactgccctttctgaattcctgacccatgagtaccgctgagttcagggaggttgctacagcaatagtgacaggggcacacatctgacagcagtggggccatggctggaaaacaggtcctgctgacaccagaacccatctcttctccactgcctcagtttacctggagcatctgcatttcagatgcactgcctgaggtgatggggcccttgaggggtgattgggccaagcctaggaggttcataaataacactcccagctgctccgtgggctggcgcatctgtgtagggctggcccctaggaagagacagatgtgaagtgtcacggagc

SEQ ID NO: 4272 - DNA, 416 bp, Homo sapiens
  MAP TO AF001549.1; EXPRESSED IN BT474, SIGNAL = 1.6; EXPRESSED IN FETAL LIVER, SIGNAL = 1.9; EXPRESSED IN BRAIN, SIGNAL = 1.6; EXPRESSED IN HELA, SIGNAL = 1.7; EXPRESSED IN PLACENTA, SIGNAL = 1.7; EXPRESSED IN ADULT LIVER, SIGNAL = 2.5; EXPRESSED IN LUNG, SIGNAL = 1.1; EXPRESSED IN BONE MARROW, SIGNAL = 1.4; EXPRESSED IN HEART, SIGNAL = 1.4; EXPRESSED IN HBL100, SIGNAL = 1.5
ccctaagagggaggaactggaaatttcctcctttctcagataaggagatcacaatatcactgagctgatgcagtaaaatttcaagatgatgtatgggaaaactgctcgaggagggttctatgtgcagaaatgctgaactggttttggtgtttttcttttttcctctgtttaatgtttcctccctgaggtgggcttcacctgtattgctttctccttcagggtcatcagctgaggccggctgaaaccctggacagctcccagcagttccacggtcctgatgaatgtgtcttcctccatgcaccgcaggtcctccagggcccagcaggcgttggcttcggccaacttgaagatgtcatcagaagagggggccacgactccatggcaacctgaagaaaggagagatgcagggaaggaga

SEQ ID NO: 4273 - DNA, 382 bp, Homo sapiens
  MAP TO AL035072.13; EXPRESSED IN ADULT LIVER, SIGNAL =  16; EXPRESSED IN BT474, SIGNAL =  12; EXPRESSED IN BRAIN, SIGNAL =  13; EXPRESSED IN BONE MARROW, SIGNAL =  13; EXPRESSED IN HBL100, SIGNAL =  14; EXPRESSED IN HEART, SIGNAL =  11; EXPRESSED IN PLACENTA, SIGNAL =  16; EXPRESSED IN FETAL LIVER, SIGNAL =  15; EXPRESSED IN LUNG, SIGNAL =  15; EXPRESSED IN HELA, SIGNAL =  13
gtgctttgtggaaaatgtgcaacttgcactgagatgctaccatgggagacgaaggggatgtgtttgtgtgtgacgtgtctgaccacgcctccctaaactgatgctactgagagggaccactggcaaaagcataatgcatattcatcctgtttgatttttctgcaatgtacacactaatgtttgttcttttccaataacagaatcatgtttattaatttgtgtaacactcacctgtttttgcctaacaaattacccaaggcagctttccaaggccaaacagcacagtaggtaagatcctggcctctggattcagatgagcctgggttcaaatcctgactctgcctttcactagctgtgtgatcctgggcaaggtcccttactc

SEQ ID NO: 4274 - DNA, 391 bp, Homo sapiens
  MAP TO L14561.1; EXPRESSED IN BRAIN, SIGNAL = 4.2; EXPRESSED IN PLACENTA, SIGNAL = 3.6; EXPRESSED IN BT474, SIGNAL = 4.6; EXPRESSED IN ADULT LIVER, SIGNAL = 5.3; EXPRESSED IN BONE MARROW, SIGNAL = 4.5; EXPRESSED IN HEART, SIGNAL = 5.2; EXPRESSED IN HELA, SIGNAL = 4.8; EXPRESSED IN HBL100, SIGNAL = 5.1; EXPRESSED IN FETAL LIVER, SIGNAL = 4.6; EXPRESSED IN LUNG, SIGNAL = 4.7
ccctacctagactgcctccctctactgagattaagaattacagaagcagggaacttgaaagtgacatagagttcttatggaatactttgaatttaataaagtatttattgctataagtaaaattgataaacataattaacacaaaaatatgatttagacgtactatatgtatgttgtcatcaattcaggaatctttttgataagcattttctttctttccaaatagtttgtggagaagtttctgttggggaggaagaaggtgaaggtgaaactggttggattgaaggagctgcaatcctcttgtctgtagtgtgtgtggtgttagtaacagctttcaatgactggagtaaggaaaaacagtttagaggtttgcagagccgaattgaacaag

SEQ ID NO: 4275 - DNA, 404 bp, Homo sapiens
  MAP TO AC012366.2; EXPRESSED IN HBL100, SIGNAL =   5; EXPRESSED IN BT474, SIGNAL = 4.7; EXPRESSED IN BRAIN, SIGNAL = 4.7; EXPRESSED IN HEART, SIGNAL = 4.3; EXPRESSED IN HELA, SIGNAL = 6.5; EXPRESSED IN PLACENTA, SIGNAL = 5.5; EXPRESSED IN ADULT LIVER, SIGNAL = 6.2; EXPRESSED IN FETAL LIVER, SIGNAL = 6.3; EXPRESSED IN LUNG, SIGNAL = 3.8; EXPRESSED IN BONE MARROW, SIGNAL = 4.5
tataacccagggtgcacagcacagactcctgacaactggtaaggccaatgacctgggagctcacagctggctgtgcctgagggcagggcagcaggcatgaatgcttctatgtgtaaggcaggactgcccctatggcagggtgtggggagccacagggctctggggtatgtctaaaagtgggggcaaaaaggttcaggaagccaaaaacatgggcttatttgtcatagaagtccacgtgggctccagacttgaactcgtccttttccagtaagctcagcagtttctgggctgacaccttgcaatccaccagcttcccctttgccttcagctcctgcagcccttttcgcatgtctgggtccacggaggtctcccgggccaactgctgcatgtctgtgtccagagga

SEQ ID NO: 4276 - DNA, 414 bp, Homo sapiens
  MAP TO AF001905.1; EXPRESSED IN BONE MARROW, SIGNAL = 1.5; EXPRESSED IN PLACENTA, SIGNAL = 1.9; EXPRESSED IN HBL100, SIGNAL = 1.6; EXPRESSED IN BT474, SIGNAL = 1.6; EXPRESSED IN LUNG, SIGNAL = 1.2; EXPRESSED IN BRAIN, SIGNAL = 1.7; EXPRESSED IN HEART, SIGNAL = 1.3; EXPRESSED IN HELA, SIGNAL = 1.5; EXPRESSED IN ADULT LIVER, SIGNAL = 2.1; EXPRESSED IN FETAL LIVER, SIGNAL = 1.7
aaggctggaaagagcatcactgctacctttacaataataacaacagaaacaaagccagacatatatgaaatttccaattttttgaacctgtcagaaagctgaggtcacaagacaaccaaataatttgaaatctaagaaaaaagaggtaaagagagatgaagtggatttttctaattttctgtaaatccaaatgtatctcaaaatttgaaaaacgtgttataaattgttgacaaaatgagacccaatgctgtgctggtttcagatcttatgagaggcagttctactggtggtgaaaacaaaagtgcttgggttaaccaccctcagatccaggtggctcagcacagagagaggggatttatttgtttgggagaaagtaagggaagagaacaagagtctctgctggcaatccagata

SEQ ID NO: 4277 - DNA, 437 bp, Homo sapiens
  MAP TO L77570.1; EXPRESSED IN LUNG, SIGNAL = 1.9; EXPRESSED IN HBL100, SIGNAL =   2; EXPRESSED IN HEART, SIGNAL = 2.2; EXPRESSED IN PLACENTA, SIGNAL = 1.6; EXPRESSED IN ADULT LIVER, SIGNAL = 1.9; EXPRESSED IN FETAL LIVER, SIGNAL = 1.8; EXPRESSED IN BT474, SIGNAL = 1.7; EXPRESSED IN BRAIN, SIGNAL = 1.9; EXPRESSED IN BONE MARROW, SIGNAL = 2.1; EXPRESSED IN HELA, SIGNAL =   2
gccttgtacttccaggtctccacactggcctggctgctctcgatggcctggtgctctgctgacgggagttcgagattatctttctgcctctgcaatcacatggggaaaagtgatggtcagagatgcccctgggcattgtacccatggccctggggctccccaaccaccacagagggtgcctacgcctatgtgacaccccagaccccagagacaccttctcaaactcttcctcagcctggtagagccaagcgtggcgtgcccggcttctctccttggccacctccatgatctcctggaaggaggcattgtcctcactcgtgtagcggctcaggaagacatctaggctgggcagcggctccttctcctcctcctctccagcctctcctgcttaggggttgcgggaggaggaacacagcaccctttgcagtcaggaaaga

SEQ ID NO: 4278 - DNA, 421 bp, Homo sapiens
  MAP TO AC012140.1; EXPRESSED IN BONE MARROW, SIGNAL = 6.8; EXPRESSED IN HELA, SIGNAL = 6.5; EXPRESSED IN PLACENTA, SIGNAL = 6.3; EXPRESSED IN HBL100, SIGNAL = 4.7; EXPRESSED IN BT474, SIGNAL = 4.8; EXPRESSED IN BRAIN, SIGNAL = 2.9; EXPRESSED IN LUNG, SIGNAL = 4.3; EXPRESSED IN HEART, SIGNAL = 2.8; EXPRESSED IN ADULT LIVER, SIGNAL = 3.6; EXPRESSED IN FETAL LIVER, SIGNAL = 5.8
tctgtcaccttgtgggtttgtttttaactgttcgtgatatctttggatgtgcaaaattttaataatgttggatttatattttttatagtttttgaatgctgccttttcataaaggagttatctgacttccactttccccaggagctgcaggcatcaatttggcaagtttacttagcgctggtgtacttggtgacggccttggtgccctcggacacggcgtgcttggccaactccccgggcagcagcaggcgcacggccgtctggatctccctggaggtgatggtcgagcgcttgttgtaatgcggcaggcgggaagcctcacctgcgatgcgttcgaagatgtcgttgacgaaggagttcatgattcccatggccttagaggagatgccggtgtcggggtggacctgcttcagcaccttgt

SEQ ID NO: 4279 - DNA, 390 bp, Homo sapiens
  MAP TO AL035252.5; EXPRESSED IN BT474, SIGNAL = 1.7; EXPRESSED IN FETAL LIVER, SIGNAL = 1.5; EXPRESSED IN BRAIN, SIGNAL = 1.8; EXPRESSED IN BONE MARROW, SIGNAL = 1.6; EXPRESSED IN HBL100, SIGNAL = 1.3; EXPRESSED IN PLACENTA, SIGNAL = 1.6; EXPRESSED IN LUNG, SIGNAL = 1.8; EXPRESSED IN HEART, SIGNAL = 1.3; EXPRESSED IN HELA, SIGNAL = 1.5; EXPRESSED IN ADULT LIVER, SIGNAL = 1.7
ctgaagagcactggggacacaggatttatttgaacatgctccagtattgtctccgaggttttcttccaaggcattcacatccattcacattggcactgctgctttattgatgttaccaagaaatgtcaacagaaattaggaatcacggacacatgctgttttgctctcgctctcagctgtgtgttgagaacgcagtcgtaggacagcagggtgatgcaggggagctgctggcatcggcagagagaaatgggaagacagccacatcttcaacggaaggcaagctgcccgatgcatggagaccctggggctgcctgcacttacactagctgttcagacgccatggacaccaagggtatttgagtggctgaaaggttgacgaggattccacag

SEQ ID NO: 4280 - DNA, 360 bp, Homo sapiens
  MAP TO AC012668.1; EXPRESSED IN BT474, SIGNAL = 3.8; EXPRESSED IN ADULT LIVER, SIGNAL =   9; EXPRESSED IN FETAL LIVER, SIGNAL = 6.7; EXPRESSED IN BONE MARROW, SIGNAL = 4.1; EXPRESSED IN LUNG, SIGNAL = 8.3; EXPRESSED IN BRAIN, SIGNAL = 3.9; EXPRESSED IN HELA, SIGNAL = 4.3; EXPRESSED IN HEART, SIGNAL = 4.3; EXPRESSED IN PLACENTA, SIGNAL =  34; EXPRESSED IN HBL100, SIGNAL =   5
gggaaaatttgtagatggacgttatggtgtcagtttttaatcagaaaggccagtagccagctttgataagttacttatgacatttcagctaaatatcagaagtttagggaaaaactaatatataagatttcttgaatgagaggactgttgacagagacaaaacaaccctccttcaggaacaatcctgataagataacataggaagtgtcttcttaaaaaagttacctgagcgtggggtgccagtggtttcttgttgaatgacaacaggtgtactttcttgattttcttccacagcatagatagtgatgttatactgaacaccaggttgcaagtcactgagggtgacggagtttgcagttt

SEQ ID NO: 4281 - DNA, 363 bp, Homo sapiens
  MAP TO AC012145.1; EXPRESSED IN HEART, SIGNAL =   2; EXPRESSED IN FETAL LIVER, SIGNAL = 2.1; EXPRESSED IN BRAIN, SIGNAL = 2.4; EXPRESSED IN HBL100, SIGNAL = 2.1; EXPRESSED IN HELA, SIGNAL = 2.2; EXPRESSED IN PLACENTA, SIGNAL = 2.1; EXPRESSED IN ADULT LIVER, SIGNAL = 2.5; EXPRESSED IN BT474, SIGNAL = 2.2; EXPRESSED IN LUNG, SIGNAL = 2.3; EXPRESSED IN BONE MARROW, SIGNAL = 2.4
aactctacagttcccccaccttataatcataataacctcaatgaaatcttatttttattattgaagtaagcaatgtctcaaagaaaaatagttccagtcagttttaatttgtcattggaaatgtatacttccatactccacagaatcaagatctatgccttcctttcaaagttttttctctcaacaaagagccctattttccatcatacttacctttgtatcaaattccttgatggatatgctggagttattgaaggcatctgcaacaggcccctcagtggaggcattagatagaccttgctgctgagtggtgttcaccatggcgatgatcgcaatgctcagactcacacgctgcgttatcat

SEQ ID NO: 4282 - DNA, 386 bp, Homo sapiens
  MAP TO AC012132.1; EXPRESSED IN PLACENTA, SIGNAL = 1.4; EXPRESSED IN HEART, SIGNAL = 2.4; EXPRESSED IN FETAL LIVER, SIGNAL = 1.4; EXPRESSED IN ADULT LIVER, SIGNAL = 1.3; EXPRESSED IN BRAIN, SIGNAL = 2.1; EXPRESSED IN HELA, SIGNAL =   2; EXPRESSED IN HBL100, SIGNAL =   1; EXPRESSED IN BT474, SIGNAL = 1.8; EXPRESSED IN LUNG, SIGNAL = 1.8; EXPRESSED IN BONE MARROW, SIGNAL = 1.8
tgagaaaattgcctgccttcatctggacatctgtttgtacatttgaaaccttattctggaaatctccattttacttttctccattttttatgtgactgaaagcttcactttccatggacatctcttttgcacatttttttacattcagccttcaagaaagctcacctcttaaaagactagaaggtacctcctccctgcctgtagacaccagcatttaccccatgcttaagtctagcactgtcaccagcaaaggcgaaataactgggatcaactagtagaggatgccctgctgtacaacagttgttgttgatgttggtggtggtggtggtgatggtgctgctggtggtggcgggaagtgatttgaggctctggaacccttccaactg

SEQ ID NO: 4283 - DNA, 351 bp, Homo sapiens
  MAP TO AL122001.5; EXPRESSED IN LUNG, SIGNAL = 2.6; EXPRESSED IN BRAIN, SIGNAL = 2.8; EXPRESSED IN PLACENTA, SIGNAL = 2.6; EXPRESSED IN BT474, SIGNAL = 2.2; EXPRESSED IN ADULT LIVER, SIGNAL = 2.8; EXPRESSED IN BONE MARROW, SIGNAL = 2.3; EXPRESSED IN HEART, SIGNAL = 2.7; EXPRESSED IN HELA, SIGNAL = 2.5; EXPRESSED IN HBL100, SIGNAL = 2.5; EXPRESSED IN FETAL LIVER, SIGNAL =   3
taggggatacaggcatcaggatagggttagcaaggcaggactccccacccccaggcccaggaagcacccagctagagagaggccacaacgtagggccaggccatagtccttcaggtcttgcttaagaaaggctggcaaacccgcagtgctggtactgtttcctccacagcggccagagtcagggtggggagtgagtccagttgaggggcaggtcagtcctcaccttctgcagcatcttgtcccagatatccccaaagtagcccctgtaatgttccatctgggcctcgtcctcagcagtcaccgtggtgacaggcaccacccctgcagggaagtccaggcagttgtacagca

SEQ ID NO: 4284 - DNA, 390 bp, Homo sapiens
  MAP TO AL049822.19; EXPRESSED IN ADULT LIVER, SIGNAL = 0.95; EXPRESSED IN BRAIN, SIGNAL = 1.4; EXPRESSED IN LUNG, SIGNAL = 1.1; EXPRESSED IN BONE MARROW, SIGNAL = 1.3; EXPRESSED IN PLACENTA, SIGNAL = 1.6; EXPRESSED IN HEART, SIGNAL = 1.6; EXPRESSED IN HELA, SIGNAL = 1.5; EXPRESSED IN HBL100, SIGNAL = 2.1; EXPRESSED IN BT474, SIGNAL = 1.5; EXPRESSED IN FETAL LIVER, SIGNAL =   2
acacggaaacaagaagctcgcttttttttcccccctatttcggtttggccctttagatttcccctcccccaccggggcgggacttcccgccgacttctttcaggttctcagttcggtccgccaactgtcgtataaaggcgctgcctcaggccagaggcctcacaaagcgttgggtgagactcctcttgctcgtcatgtctggccgcggcaaaggcgggaagggtcttggcaaaggcggcgctaagcgccaccgtaaagtactgcgcgacaatatccagggcatcaccaagccggccatccggcgccttgctcgccgcggcggcgtgaagcgcatctccggcctcatctacgaggagactcgcggggtgctgaaggtgttcctggagaacg

SEQ ID NO: 4285 - DNA, 453 bp, Homo sapiens
  MAP TO AL050320.17; EXPRESSED IN ADULT LIVER, SIGNAL = 9.2; EXPRESSED IN BT474, SIGNAL =   6; EXPRESSED IN FETAL LIVER, SIGNAL = 7.2; EXPRESSED IN BRAIN, SIGNAL =   8; EXPRESSED IN BONE MARROW, SIGNAL = 8.2; EXPRESSED IN LUNG, SIGNAL = 7.6; EXPRESSED IN HBL100, SIGNAL = 9.4; EXPRESSED IN PLACENTA, SIGNAL = 7.9; EXPRESSED IN HELA, SIGNAL = 5.2; EXPRESSED IN HEART, SIGNAL = 6.9
actgaaggacaggcaaggtgctagtagtaactgagagggcagcgttgatgttttggtttaaacacagatttaaagaaatggatccaaacacatttcatgcttttctctttcgggctttttcttattcttctgcctgctcttcttcctccttttttctttttttttgctaggtcctttacctttgtttgcatctgccagaattccatcctctgttcactttacttctcccactgcacagatctgtttcttttctgttacgtagaaacatggttatcaaatttgagcctgcaccagaatctcctggaggaatggttaaaacagctgattcagaaatgctttgttgcagttctaacaagccccaggtaacattgctgctggtggtccagggaccactctttgagaaccactgctgtatgatgaccttgtaatcactctctcccttctgtctggcac

SEQ ID NO: 4286 - DNA, 399 bp, Homo sapiens
  MAP TO AL122020.1; EXPRESSED IN BONE MARROW, SIGNAL = 5.3; EXPRESSED IN BRAIN, SIGNAL = 4.9; EXPRESSED IN PLACENTA, SIGNAL = 5.7; EXPRESSED IN BT474, SIGNAL = 4.2; EXPRESSED IN HEART, SIGNAL = 5.1; EXPRESSED IN HELA, SIGNAL = 6.1; EXPRESSED IN HBL100, SIGNAL =   6; EXPRESSED IN ADULT LIVER, SIGNAL = 5.7; EXPRESSED IN FETAL LIVER, SIGNAL = 6.4; EXPRESSED IN LUNG, SIGNAL = 5.2
ttaggattaccggcatgagccaccactcccagccctgggccaggtactctcaaaggtccctgttagctgcagtccctgctggtgcaactagctcaaggctgggacggtgcaacagtagtgaggaattacttttaggaggtggaggtgagggccagtttgggggccacagaatataccccaaggagaaaaaccgttgggaggttttgaacatgccaagtgctgtcagggctgcttgacccataccagtgggctacgcagggcctgagggccacagccagggctcatttgtcactggatgcctacagcaagcggggacagaatggaggtaactgctgtccctaagcaccagcagcttcccacgcttccttgtgaggtacttgctcccagttgtctcactcc

SEQ ID NO: 4287 - DNA, 397 bp, Homo sapiens
  MAP TO AC011422.2; EXPRESSED IN PLACENTA, SIGNAL = 1.7; EXPRESSED IN FETAL LIVER, SIGNAL = 1.9; EXPRESSED IN LUNG, SIGNAL = 1.7; EXPRESSED IN BRAIN, SIGNAL = 1.5; EXPRESSED IN HEART, SIGNAL = 1.8; EXPRESSED IN HELA, SIGNAL =   2; EXPRESSED IN HBL100, SIGNAL = 1.8; EXPRESSED IN BT474, SIGNAL = 1.6; EXPRESSED IN ADULT LIVER, SIGNAL =   2; EXPRESSED IN BONE MARROW, SIGNAL = 1.5
ccccttcctcctgtcttctcttctactttctgtatgagtgattttaattgtaaaaaatatgtaattctcacctctggctatgggttattcatcttgggagcaattagaaaaaaactatgcccgggtcctactctcagagattatgattagttgatttggggtgagggtagctatcttttatagctctggtaggttattatattgtgaaaccagattcgagacccactggcctattgcctcaaactgtggtatttgctgatgctaatcttggtctccataacagagagaagtaatggaaggcctgtctgatgttgcttcttttgcaactaaacttaaaaacactctcatccagtaccatagcattgaagaagataagtggcgagttgctaagaaaacg

SEQ ID NO: 4288 - DNA, 483 bp, Homo sapiens
  MAP TO AL050344.11; EXPRESSED IN BONE MARROW, SIGNAL = 3.6; EXPRESSED IN HELA, SIGNAL = 3.8; EXPRESSED IN FETAL LIVER, SIGNAL = 3.6; EXPRESSED IN ADULT LIVER, SIGNAL = 3.9; EXPRESSED IN BT474, SIGNAL =   3; EXPRESSED IN LUNG, SIGNAL =   4; EXPRESSED IN BRAIN, SIGNAL = 3.8; EXPRESSED IN PLACENTA, SIGNAL = 4.2; EXPRESSED IN HEART, SIGNAL = 3.3; EXPRESSED IN HBL100, SIGNAL = 3.9
tttgcatacagagggcagaggatttttcccaggccttgaaacctgatggagtttgtctgattggattttgaaattgcttgggactggtgactccttttttccttccattttctccctatttgaatggaaatgtctataactgttgtcttatgctgtcccaccactgtattttgggagcagaaagcttgttttctagtttcacaaatctgcacatccagaggaattttgcccagaactgattatatcctcagccccacccatacctgagactttgcagatgtgatgaaggatcttgagatagggagaatatcctggattatccttttcagatggatgcaggaggagtcggagctggaggaaaaggcgatgtgatgacagaagcagaaattggagcgatgcactttgagatggaggaagaggccacaagccaaggaatgcaggtgcctctagaatctgataaaaagaaagggaatggttttccct

SEQ ID NO: 4289 - DNA, 447 bp, Homo sapiens
  MAP TO AC011504.2; EXPRESSED IN PLACENTA, SIGNAL =  10; EXPRESSED IN HEART, SIGNAL =   9; EXPRESSED IN LUNG, SIGNAL =  10; EXPRESSED IN BRAIN, SIGNAL = 8.6; EXPRESSED IN HELA, SIGNAL = 9.1; EXPRESSED IN HBL100, SIGNAL =  11; EXPRESSED IN BT474, SIGNAL = 8.9; EXPRESSED IN ADULT LIVER, SIGNAL =  10; EXPRESSED IN FETAL LIVER, SIGNAL =  10; EXPRESSED IN BONE MARROW, SIGNAL = 9.5
tgcagatacagcattgagggttttttcaaatatttcattcaaaagttgctcatggataagtctacctcatttttttaaatgcacaattcagcactgatgttttgggaaatgaactataggaagaggattctaaaacttaccacacaagtctggcctcttgatacatccagaatttgctgtgctacttgcaagtccgttaaaggctgctaagccatcagaactgtaggccctgaggaccgacagcatgttcatcggcttgtccaggctctggggcccccgctccggctttggcaggcccgccaaggggtcctgggcttggagaagaccctggctgtgccactgcttctccggtgcttgggataaaggtgagaccagtccctggacgggctgggaggtgcctgtgggctgcaggctgtccccgccatcgctgctgctgtctttgctgag

SEQ ID NO: 4290 - DNA, 431 bp, Homo sapiens
  MAP TO AC012122.1; EXPRESSED IN ADULT LIVER, SIGNAL = 3.7; EXPRESSED IN LUNG, SIGNAL = 4.9; EXPRESSED IN BONE MARROW, SIGNAL =   5; EXPRESSED IN HELA, SIGNAL = 5.1; EXPRESSED IN BT474, SIGNAL = 5.1; EXPRESSED IN FETAL LIVER, SIGNAL = 4.9; EXPRESSED IN BRAIN, SIGNAL = 5.3; EXPRESSED IN PLACENTA, SIGNAL = 3.7; EXPRESSED IN HEART, SIGNAL = 4.8; EXPRESSED IN HBL100, SIGNAL = 6.6
ttgtgggatctcaaaccaggctggcaaagcccaagtgtggagacattagacgtctcttccagaagcctcctcccactgcacccacccagatcaggcctgcgggagggacctggcctcctggctgacctctgcgctgggaggactcgtcttactgccctgcactgtgtgtctgatgcctcgctctcaaagtcggggtcatccatgacgaaggacagcatttgtgcagcgatgggcccctcggggtcactctcggacgaggaggcctgctcacccttccctggctcaatctcagcagggggcctggtgctgctgcacttctccagacctgtgtgaacagaggcaccacctggccagggggatgctgcggccgtcatgggagctgtccccctctgtggcttcgaagctggtatggaggacctttgtggacaagc

SEQ ID NO: 4291 - DNA, 346 bp, Homo sapiens
  MAP TO AL096829.12; EXPRESSED IN ADULT LIVER, SIGNAL =  13; EXPRESSED IN BT474, SIGNAL = 8.7; EXPRESSED IN BRAIN, SIGNAL = 9.1; EXPRESSED IN HELA, SIGNAL = 9.1; EXPRESSED IN FETAL LIVER, SIGNAL = 9.3; EXPRESSED IN LUNG, SIGNAL = 9.7; EXPRESSED IN BONE MARROW, SIGNAL = 8.6; EXPRESSED IN PLACENTA, SIGNAL = 7.2; EXPRESSED IN HEART, SIGNAL = 7.8; EXPRESSED IN HBL100, SIGNAL = 8.9
taagctcctcctcctcctcctcatacttctccttcttgttttattgagttatggcttcagcaagcctctcaagcttttataaatggtcagcacacttaaaacattaggatataaatttttctctcttcttcctgaagattattgaatttcttattcgtctctataagtcaatcagaataggaattcgtttaaccatgagactttataattaaattacattttttttcagacatagacacaaatcttgacgaacacttcagccctgcctccagaatgaaagggggaaacctagacctgaatgggcttgaccatctcacagctgctcacgtgatgaccatattcgtgg

SEQ ID NO: 4292 - DNA, 395 bp, Homo sapiens
  MAP TO AC012130.1; EXPRESSED IN PLACENTA, SIGNAL = 2.9; EXPRESSED IN HEART, SIGNAL = 3.3; EXPRESSED IN LUNG, SIGNAL = 3.2; EXPRESSED IN BRAIN, SIGNAL = 2.5; EXPRESSED IN HELA, SIGNAL = 2.8; EXPRESSED IN HBL100, SIGNAL = 3.4; EXPRESSED IN BT474, SIGNAL = 3.1; EXPRESSED IN ADULT LIVER, SIGNAL = 2.6; EXPRESSED IN FETAL LIVER, SIGNAL = 3.1; EXPRESSED IN BONE MARROW, SIGNAL =   3
agagctatttcaggcagggggtgagaaaacggggtaaaagacaggggaagaaaagagggggaagaggcgttcctggaggcgagagagcctgagaaggtgtgggaagcttcgggctggtgggggtgcatcggggagctgccgctgaagtaacagggctggacgagggagccagggagtacggggtgggggggaagacacacctccaaattcagcatttcggactctgaggactcctcggatcccgcctcgccctcgccctggtcctcatctccgtccgagtccagctcctgatagcggtgcatgagctgctggagcaggtaggaggaggctatgttagagctgcctttcgtcttctgccccatgggaaaagaccagcaaggctgacgctctttttc

SEQ ID NO: 4293 - DNA, 436 bp, Homo sapiens
  MAP TO AL096865.7; EXPRESSED IN BONE MARROW, SIGNAL = 0.91; EXPRESSED IN LUNG, SIGNAL =   1; EXPRESSED IN PLACENTA, SIGNAL = 3.3; EXPRESSED IN ADULT LIVER, SIGNAL = 1.6; EXPRESSED IN BT474, SIGNAL = 0.93; EXPRESSED IN HEART, SIGNAL =   1; EXPRESSED IN HBL100, SIGNAL = 1.2; EXPRESSED IN BRAIN, SIGNAL =   2
ctcatgggtctattctgccccattatgttcagtacatgagcaaaatttcttagcaaatagttaacagtgactgaataattattcactcatttcccaaagctacggaggccttagtgattgtgtggcaaaggttaaaaccgtagttttattttctactaactctgaagtttgactaactctccctcactaaaaaaaatatatgcagatagcaaagtccacaaagacactatggacatgaaagtgacactaactcatttggaataaattcctcatagggtctctggaaactctattactttcttcaataaaaaggggagtacttacttctgggttcccgaggtccatctactgtaactttaattgctctgtgataggtagctacttggggaggatttgtgaagacggttatggtcaaggtgaaactcttgcctgcaga

SEQ ID NO: 4294 - DNA, 415 bp, Homo sapiens
  MAP TO AC007684.2; EXPRESSED IN PLACENTA, SIGNAL = 1.2; EXPRESSED IN HBL100, SIGNAL = 0.72; EXPRESSED IN BRAIN, SIGNAL = 0.79; EXPRESSED IN BT474, SIGNAL = 0.81; EXPRESSED IN BONE MARROW, SIGNAL = 1.2; EXPRESSED IN FETAL LIVER, SIGNAL = 0.81; EXPRESSED IN HEART, SIGNAL = 0.8
gcaaaggcactaaatgcaatgtaaaattatggcaaagtacaagaaaaaaactagttttaaacttgcagaaaaagaataaaaaattcagagagaaaatgtctgatataatttgaaagtacaaagtagaaaaattttagaacaagagtgtgatcactaagcacttgttaatgtatattacttattattttttcatcatgatttttattaacccaaactgagtgctctttcactttctgtaacataaatatttatgagaatgaactgttaatatcatattgcctctaaggatgtacccttaccttggcagtattctgtcagggagtttgtgtgctggaatagcaacaggtaacttttgcatttgtcttgcataatcaaaaagccctggtaaattatgggaataaagctgagaagcttt

SEQ ID NO: 4295 - DNA, 378 bp, Homo sapiens
  MAP TO AC012134.1; EXPRESSED IN BT474, SIGNAL = 1.4; EXPRESSED IN ADULT LIVER, SIGNAL = 1.8; EXPRESSED IN LUNG, SIGNAL = 1.5; EXPRESSED IN BONE MARROW, SIGNAL = 1.6; EXPRESSED IN FETAL LIVER, SIGNAL = 1.6; EXPRESSED IN BRAIN, SIGNAL = 1.5; EXPRESSED IN PLACENTA, SIGNAL = 1.4; EXPRESSED IN HEART, SIGNAL = 1.4; EXPRESSED IN HELA, SIGNAL = 1.4; EXPRESSED IN HBL100, SIGNAL = 1.7
cttcttatgctgggcactccatgcattccatttcttattctgccaacactccatttctacaaggaaattcatcaggtgcacttttggggcctgctctggtttatctgaaacttgattatgttcagttacatagtatgtcatcaaaactagctctgatatttaaatgtgagtaaatcaaaatgcatcctcaattttgccaggcctacaagcgctggctggtcctccccagccatgtggcatgggagctcatgtttgattggcagcaggacatcctgaacctgtggaagatttttagggaagagaaggcagatgggaggagggagggacctgagtctgtgctcatgtttctccatatcccgctcttgtggacgtcagaca

SEQ ID NO: 4296 - DNA, 403 bp, Homo sapiens
  MAP TO AL109614.15; EXPRESSED IN BT474, SIGNAL =  13; EXPRESSED IN BRAIN, SIGNAL = 5.6; EXPRESSED IN BONE MARROW, SIGNAL = 3.8; EXPRESSED IN HELA, SIGNAL =   3; EXPRESSED IN ADULT LIVER, SIGNAL =  10; EXPRESSED IN FETAL LIVER, SIGNAL = 6.2; EXPRESSED IN LUNG, SIGNAL = 4.2; EXPRESSED IN PLACENTA, SIGNAL = 5.5; EXPRESSED IN HEART, SIGNAL =  12; EXPRESSED IN HBL100, SIGNAL = 4.3
ttcaggtaatcctccccacccccgattcctgctccaccctggagatgccccctccccttcaatatccactcagtcctcaagagatgcgtgtgctgtagcagcaatactggacacgcaatacttgccgctagcaaactcacatattcaacattcattcagtggttggtgagcaatactgtattgctcattggtgagcaaggctctgtgttctggggaaatggtatctagtcttgtcttagggggctccaggaatagaaactctcactcatttagtcagccactcaactaatacttatggacccagaccctctattgtgccctgtggagataatggtaaccaagaaagatgtgatctctgccctaaaaagatcacagcctggcgcctcccattccggtaggtttt

SEQ ID NO: 4297 - DNA, 475 bp, Homo sapiens
  MAP TO AC012441.1; EXPRESSED IN ADULT LIVER, SIGNAL = 2.5; EXPRESSED IN LUNG, SIGNAL = 3.4; EXPRESSED IN BONE MARROW, SIGNAL =   3; EXPRESSED IN HELA, SIGNAL = 3.2; EXPRESSED IN BT474, SIGNAL = 3.1; EXPRESSED IN FETAL LIVER, SIGNAL = 3.2; EXPRESSED IN BRAIN, SIGNAL = 3.4; EXPRESSED IN PLACENTA, SIGNAL = 3.4; EXPRESSED IN HEART, SIGNAL = 2.9; EXPRESSED IN HBL100, SIGNAL = 3.9
gttaaccccacatctggaccccgcggtcacacagcccagtgcacactcctgacccagtcacatgcacctcagatatccctggaaaagatcccaggggccctgatgacagttgtgagtctgagccagaagtggggaaagggtgggaagggttttccaggaactgtgaatggcaggaacgagtaaggttcttgggagggtgtgagtatcccaagaggaagtgagtgcggtggcaggctccgtcctaggtcctagcaggtggactggcagttatcatttcctctccagagctccctggagaaggcattctcccattttacccacgagtacaatgagccccagaccgcgttcctgcgtcacttgggcagtggtgacaggatgcagacccaggcctgtaggagcaggcagctccttctgacataccacatggctccttctaacacaccacgtgacactctgggtaagaagggtccagacc

SEQ ID NO: 4298 - DNA, 397 bp, Homo sapiens
  MAP TO AL109653.13; EXPRESSED IN HBL100, SIGNAL =   1; EXPRESSED IN HEART, SIGNAL = 1.4
ccaccaattcacacaccttggggtaggcggaaagaaatgatctggcatctgaaacaagagaaagccgatgtctgagtcaaggaagtaggagtgagcaggagggctggagaggtttttgtacatctccaacaaccttgccctcctttcccacctgacacatcaccacaccatggttattgccaggcctttctgctgagttttgagaaacaatagccgctgaccaactacctttttcttttctagattccagccctcgacacaacaggaatctcctctgaggattctgccagccataaagctcccctccccaacagctcccaaatcactctcaagcctgaagagtgctgccctgtcttcaacaccacaactacacccgggctgccggaactaaggtgta

SEQ ID NO: 4299 - DNA, 425 bp, Homo sapiens
  MAP TO AF003530.1; EXPRESSED IN BONE MARROW, SIGNAL =  15; EXPRESSED IN PLACENTA, SIGNAL =  14; EXPRESSED IN FETAL LIVER, SIGNAL =  16; EXPRESSED IN BRAIN, SIGNAL =  13; EXPRESSED IN LUNG, SIGNAL =  16; EXPRESSED IN HEART, SIGNAL =  11; EXPRESSED IN HELA, SIGNAL =  16; EXPRESSED IN HBL100, SIGNAL =  12; EXPRESSED IN BT474, SIGNAL =  15; EXPRESSED IN ADULT LIVER, SIGNAL =  14
gagtgagttttgagcccaggcgaatgcgagggagatgcctaataggccagccagccatataggggtcgcctcagctaagccctcttgggagaggcctgagaagtacgagggcaggccgaccaagagaagtagcggagaagggaaggaaggaaaagtgtgtgggcattggaattgattactcacccgtcacctgcaccgtcttgcgcatccatgcataggggctgtggcggctcctgctgggggaactggccttggcggcgcctgcgtccgtcgggacaagcgacccgccagcctggcctggtaggctgctgccgctagttccaccgcccacagggcccaagttgctgtagtcggtcgagcagaaagcggcggggctagaggtcacgtcgttcaccggcactgtgcccattgtactagacggccca

SEQ ID NO: 4300 - DNA, 396 bp, Homo sapiens
  MAP TO AC012448.1; EXPRESSED IN BT474, SIGNAL = 1.3; EXPRESSED IN ADULT LIVER, SIGNAL = 2.1; EXPRESSED IN LUNG, SIGNAL = 2.3; EXPRESSED IN BONE MARROW, SIGNAL = 2.2; EXPRESSED IN PLACENTA, SIGNAL = 1.9; EXPRESSED IN FETAL LIVER, SIGNAL = 2.4; EXPRESSED IN BRAIN, SIGNAL =   2; EXPRESSED IN HEART, SIGNAL = 3.3; EXPRESSED IN HELA, SIGNAL =   2; EXPRESSED IN HBL100, SIGNAL = 1.9
aaatgcattcgttttcaatgtgtgtctatgtgtgctctttgtaagtatacatgcatacacaaatacagacacacacacacaaattaatatagctgtatcaagttttctgaaggaaagacacaacatatttaactagcatattttcttctttgtttttacagtggctataatccagtttgtgtctaataattgtcttccctgaaatgcccatttttctccagaaatggcctttgagtggaatgttctagctaaggggctctctgttgtaacggttcccgcagccatcagtacattagctccaactgctgctgtagccattgccatttacatttctcccaggagaattcagatgaaaaaaggaaactgttagtgctaagtgtgtgccaggtttggata

SEQ ID NO: 4301 - DNA, 455 bp, Homo sapiens
  MAP TO AF015416.1; EXPRESSED IN BONE MARROW, SIGNAL = 3.9; EXPRESSED IN LUNG, SIGNAL = 2.9; EXPRESSED IN BRAIN, SIGNAL = 3.3; EXPRESSED IN PLACENTA, SIGNAL = 2.5; EXPRESSED IN HBL100, SIGNAL = 1.5; EXPRESSED IN HELA, SIGNAL = 3.4; EXPRESSED IN HEART, SIGNAL = 3.4; EXPRESSED IN BT474, SIGNAL = 3.4; EXPRESSED IN FETAL LIVER, SIGNAL =   3; EXPRESSED IN ADULT LIVER, SIGNAL = 3.1
tagggagtgaaggtaacgcctatagtctgttaagaatacagactcatcagccctgagtgtctggaccgtgtccctgcttggcctgttagcatctgtttcctcatctctaaatggaggtattgaaagtaacacccagtcaggtccaggtagtgcctggtgcaggattcacagcatcatcagctattactgttactgtgttaaccaacggggctccatatcaggtggaccataccctagagcagtgagaagggcagccccttggatggtcctcctcagcagtctgtaccttcccagtttcccgctgcacaaggtcccgcatctcttctgtccagcccagaagctccactaggctttccacgccgtgaaccacgtcccccagctgggccacgtccctgctgcgaggatgccaagccaagggccccaccaagtcccggttgatgagcagtcggggaact

SEQ ID NO: 4302 - DNA, 365 bp, Homo sapiens
  MAP TO AC007256.1; EXPRESSED IN HEART, SIGNAL = 0.98; EXPRESSED IN PLACENTA, SIGNAL = 1.2; EXPRESSED IN HELA, SIGNAL = 4.8; EXPRESSED IN ADULT LIVER, SIGNAL = 1.2; EXPRESSED IN BT474, SIGNAL = 1.1; EXPRESSED IN FETAL LIVER, SIGNAL = 1.1; EXPRESSED IN LUNG, SIGNAL = 1.1; EXPRESSED IN BONE MARROW, SIGNAL =   1
gtcttcccttgctgttcctgtaaattcattagtgtgcttaggaaagattttggaatacttggataagtggttggtacttgatggtatcctacccttcttacaacaaattccatccaaagagtctgcagtcctcatgggtattttaggcatttacaaatgtacttttactcataagttgggaatcaccaaagagcagctgactggaaaagtattgcctcatcttattcccctgagtattgaaaacaatcttaatcagttcaattctttcatttccatcataaaagagatgctgaataggttggagtctgaacataagactaagctggagcaacttcatataatgcaagaacaacagaaatctttgg

SEQ ID NO: 4303 - DNA, 368 bp, Homo sapiens
  MAP TO AL096774.8; EXPRESSED IN BRAIN, SIGNAL = 1.5; EXPRESSED IN BONE MARROW, SIGNAL = 1.6; EXPRESSED IN LUNG, SIGNAL = 1.6; EXPRESSED IN PLACENTA, SIGNAL = 1.7; EXPRESSED IN FETAL LIVER, SIGNAL = 1.7; EXPRESSED IN ADULT LIVER, SIGNAL = 1.8; EXPRESSED IN BT474, SIGNAL =   2; EXPRESSED IN HEART, SIGNAL = 1.4; EXPRESSED IN HELA, SIGNAL = 1.6; EXPRESSED IN HBL100, SIGNAL = 1.8
agggaacctagagggtggtggtagataaagaaggttgaagagaagaagctacaccaaaagggagcctctctttggggaggagagggaggatacattttcgcattacctagggaaggcagatgggggagaaataggaacgcgggaggagaaggaaactaaataaagagcaccaacgacccctgagggcaaagcacaggctctctgaggcactcactcaggctgcccagctgtcggatgacatttgccagggtgatgttggtcacgcattccagctcgcttctaacgctaggcaacgtctgacggcacaggtgccttggctcgatgttcctcgttactaacggcatggtggacctgcttcaggcaatgtt

SEQ ID NO: 4304 - DNA, 389 bp, Homo sapiens
  MAP TO AL096814.11; EXPRESSED IN PLACENTA, SIGNAL = 2.6; EXPRESSED IN HBL100, SIGNAL = 2.9; EXPRESSED IN HEART, SIGNAL = 2.2; EXPRESSED IN BRAIN, SIGNAL = 2.5; EXPRESSED IN BONE MARROW, SIGNAL = 2.4; EXPRESSED IN HELA, SIGNAL = 2.6; EXPRESSED IN BT474, SIGNAL = 2.8; EXPRESSED IN ADULT LIVER, SIGNAL = 2.6; EXPRESSED IN FETAL LIVER, SIGNAL = 2.7; EXPRESSED IN LUNG, SIGNAL = 2.3
gagtttgagtgtgggccatcatcttcttccttctgctctctccctctccacatttcccggtaccatctgatccatcaggcccttctttgctcaggcctgaaggactcaggcctgtgagagaggacggccccgttgtcggccaagacacctttgggcgaggagcagcgaacagggcctgtccatctcagacgtcagccccctgaaggcctgagcaatgggcaacgtgatggagggaaagtcagtggaggagctgagcagcaccgagtgccaccagtggtacaagaagttcatgactgagtgcccctctggccaactcaccctctatgagttccgccagttcttcggcctcaagaacctgagcccgtcggccagccagtacgtggaacaga

SEQ ID NO: 4305 - DNA, 370 bp, Homo sapiens
  MAP TO AL096862.15; EXPRESSED IN BONE MARROW, SIGNAL = 1.2; EXPRESSED IN LUNG, SIGNAL = 1.6; EXPRESSED IN HBL100, SIGNAL = 1.3; EXPRESSED IN HELA, SIGNAL = 1.5; EXPRESSED IN PLACENTA, SIGNAL = 1.5; EXPRESSED IN HEART, SIGNAL = 3.4; EXPRESSED IN ADULT LIVER, SIGNAL = 2.1; EXPRESSED IN BT474, SIGNAL = 2.5; EXPRESSED IN FETAL LIVER, SIGNAL = 1.7; EXPRESSED IN BRAIN, SIGNAL = 2.5
aagatcttctccagggaatatggaaattatactgtcaagtgtcaacaacaatgaaataattcaaaaacagcaaggaaaaagtcacacctaaaggaacctccatcaaataaagagcagatttctcagcagaaaccttgcaagccagaagaaaatgagatgatatattcaaagtgctgaaagaaaaaaaacctgtaagccaaggatactacacccagcaaagttattcttcataaatgaaggagaaatattttcctagatatgcaagaactgaaggaattcatcatcactagattggttctacaggaaatgctcaagagattattaaacctggaacaaaaggataaaatctaccaccatgaaaacacactgg

SEQ ID NO: 4306 - DNA, 458 bp, Homo sapiens; identical to SEQ ID NO: 405
  MAP TO AC007603.1; EXPRESSED IN BONE MARROW, SIGNAL = 1.6; EXPRESSED IN HBL100, SIGNAL = 1.1; EXPRESSED IN ADULT LIVER, SIGNAL =   1; EXPRESSED IN PLACENTA, SIGNAL = 1.3; EXPRESSED IN BT474, SIGNAL = 1.2; EXPRESSED IN LUNG, SIGNAL = 1.3; EXPRESSED IN HELA, SIGNAL = 0.99; EXPRESSED IN BRAIN, SIGNAL = 1.2; EXPRESSED IN FETAL LIVER, SIGNAL =   4; EXPRESSED IN HEART, SIGNAL =   1

SEQ ID NO: 4307 - DNA, 361 bp, Homo sapiens
  MAP TO AC007251.1; EXPRESSED IN FETAL LIVER, SIGNAL = 1.6; EXPRESSED IN ADULT LIVER, SIGNAL = 1.1; EXPRESSED IN LUNG, SIGNAL = 1.3; EXPRESSED IN HELA, SIGNAL =   2; EXPRESSED IN PLACENTA, SIGNAL = 1.4; EXPRESSED IN HBL100, SIGNAL = 1.9; EXPRESSED IN HEART, SIGNAL = 1.5
tttcttggggacacagatccaaaccatgtcagcagtggacccatatgaacgctatacatcaaaattgaggaacactgagcttggggtattcatcattggtaggctttctgtttatttcattcccagggatgctataatcaattagccatagtcaaagatccctgcaggtcaaggcattctggtgactggtacactcctgctgaccttaaaagtaaatgtgtccaccttgtcttctgagtttaagtgctatgacctggcctctgataatctggaaatcttttcctcatataatcagagagcttatcttaaaggtggtatcctctatggctatacctggcctacaaaagagagcaatcgcaaa

SEQ ID NO: 4308 - DNA, 449 bp, Homo sapiens
  MAP TO AL008632.1; EXPRESSED IN BONE MARROW, SIGNAL = 1.1; EXPRESSED IN LUNG, SIGNAL = 1.2; EXPRESSED IN BRAIN, SIGNAL = 1.3; EXPRESSED IN HBL100, SIGNAL = 0.98; EXPRESSED IN PLACENTA, SIGNAL = 1.2; EXPRESSED IN HELA, SIGNAL =   1; EXPRESSED IN HEART, SIGNAL = 1.2; EXPRESSED IN BT474, SIGNAL = 1.1; EXPRESSED IN FETAL LIVER, SIGNAL =   2; EXPRESSED IN ADULT LIVER, SIGNAL = 1.2
tttggtgccctgtcttatcctgcctcaaccctgcgacatacaccattcctaatcttcaggtttgctgaggtggatgaggatggttgagagtaaagagcttatgtttcaagattgttttcaaaaaattgacaaaacattttgtaacatttacaatgaatttaatagcaccttaatatattgccaaccatagcatttgcatggtttgaggaaaaagaatgtgtgtgcttgtgcccgtgtgtgtgtgtgtgtgtgtgtgtgtgtgacatttattaagtctataaagaatgtctctcttacttgcaaatcggtgactctcttacgaatccacagtgtgcagactgtgctcctctgtgaatcctctgctttagagtatacttggccagtttgggaaattaggtttacacattttgggtatgtctagataggatgaaaacaaagaaaaacaaaaa

SEQ ID NO: 4309 - DNA, 426 bp, Homo sapiens
  MAP TO AF088219.1; EXPRESSED IN FETAL LIVER, SIGNAL =   1; EXPRESSED IN ADULT LIVER, SIGNAL = 1.8; EXPRESSED IN BONE MARROW, SIGNAL = 0.99; EXPRESSED IN LUNG, SIGNAL =   1; EXPRESSED IN HEART, SIGNAL = 0.96
gctgctcttcaatcctggagttgaaagtcatccaccagtctttccaagaggggttgaagaaaaggaggaagggtgattgatgatgagggaggagaaaaagaagagcccaggagtaccatggagaaggagaagagaagatgaggaaagcctactctcccctccaagttctgaggggctgtctcctccttccttccctcctccatgccctcagcttgcaggagcagccaatggtatggcctttaacaaggggcccctcctcagcatctgatgctctctcctcagggggaccttaccacccctcagagtgctgcttcacctacactacctacaagatcccgcgtcagcggattatggattactatgagaccaacagccagtgctccaagcccggaattgtgtaggtggtacacacacatcacactgggg

SEQ ID NO: 4310 - DNA, 427 bp, Homo sapiens
  MAP TO AL049697.8; EXPRESSED IN HEART, SIGNAL = 0.86
gaaagcttgttttcatgcccattgccaaaaagttactgctggatgcttaattattaaaaatggacatgaggcaatggcataactctcagtaatccagctttgatgcgtgataagttttattatgtatcctataatcaggtatcagtaatttaaagaatcatataagtaactcagacccttaacttgctgctaaagaaaaacgttatttaacgtctgatatctttattctatcattttgttttccttttttttttttctggtttattttagctgctctacagagtgtttttcctcaggcagagcttgggacatttctaactctttctaagaaggacaaagaacgccagctgaaagaactcaccatgattgttactggaattcgtttatttaacagagactgtggaaaaggaggagaaggcattgatga

SEQ ID NO: 4311 - DNA, 424 bp, Homo sapiens
  MAP TO AF023268.1; EXPRESSED IN BT474, SIGNAL = 1.9; EXPRESSED IN ADULT LIVER, SIGNAL = 1.6; EXPRESSED IN BRAIN, SIGNAL = 1.7; EXPRESSED IN BONE MARROW, SIGNAL =   2; EXPRESSED IN LUNG, SIGNAL = 1.9; EXPRESSED IN HELA, SIGNAL = 1.7; EXPRESSED IN PLACENTA, SIGNAL = 1.7; EXPRESSED IN HBL100, SIGNAL = 1.3; EXPRESSED IN HEART, SIGNAL = 2.2; EXPRESSED IN FETAL LIVER, SIGNAL = 1.8
acaactgccttttgacacccaactctgggcaggaagatgctgataatgatggtgtgggggaccagtgtgatgatgatgctgatggggatgggatcaagaatgttgaggtgactcccagactgccctgccccttgaagctcctctcccctcctcctgtcctctctgtgcctcacttacctcatctggcagctctctagtaagggccaaatactccaaatcagggaggcaaaaacctcgtgcccaggacaaggaggctgggtgggtgggactgtactgagcagtttgtccatcacaagggtgtgatcttagaaaaggatacagagacaaggtaggtgcaagatgacaagtgatttaggggagacctgacccttcccctcccaccctctgcccaggacaactgccggctgttccccaacaaagacca

SEQ ID NO: 4312 - DNA, 397 bp, Homo sapiens
  MAP TO AC012593.1; EXPRESSED IN HBL100, SIGNAL = 1.1; EXPRESSED IN HEART, SIGNAL = 2.5; EXPRESSED IN FETAL LIVER, SIGNAL = 2.8; EXPRESSED IN BT474, SIGNAL = 2.2; EXPRESSED IN ADULT LIVER, SIGNAL = 1.9; EXPRESSED IN LUNG, SIGNAL =   3; EXPRESSED IN BRAIN, SIGNAL = 5.6; EXPRESSED IN PLACENTA, SIGNAL = 2.4; EXPRESSED IN HELA, SIGNAL = 6.1; EXPRESSED IN BONE MARROW, SIGNAL =   2
actgtgagacaaaccccagccacatctccagcacacaagaacttccaaacgcctgaaccatagcggccaggcattcctccagaacctcctcccccaggagcttgctacaagtgctggaaatctggccactgggccaaggaatgcccgcagcctgggattcctcctaagctgcgtcccgtctgtgcggaaccccaatgaaaatcggactcttcaactcacctggcagccactcccagagcccctggaactctggcccaaggctctctgactccttcccagatcttcttggcttagcggctgaagactgacgctgccagttcgcctcagaagccccctaaaccatcacggacgccaagcttcgggtatctctcacagcagaaggtaagtccgtcccctt

SEQ ID NO: 4313 - DNA, 378 bp, Homo sapiens
  MAP TO AL049649.4; EXPRESSED IN PLACENTA, SIGNAL = 0.7; EXPRESSED IN FETAL LIVER, SIGNAL = 0.61; EXPRESSED IN HEART, SIGNAL = 0.8; EXPRESSED IN BONE MARROW, SIGNAL = 0.71; EXPRESSED IN LUNG, SIGNAL = 0.65; EXPRESSED IN ADULT LIVER, SIGNAL = 0.96
tggtttgcagtgacaaatggaaatgcaaagaagttttaatattagaaaaatctattagtataatgtattatattattaagtgattgaaggaaagaggccaccacaatagctgctggaaagatatttaataagctttaatacccatttttaataacagcaaactagcaactagaatggttcttgttcaacttgattaaagatataaatctaaattatagagccagttcaatatataacagtgaaacaccagaggcctcctcattaaaatcaggaacagcagagaatggctgctgctcagttatttttccattaactatggatgttccagaactttcttggtcaaattcttctgtataggcctgaaacttcttgaagctc

SEQ ID NO: 4314 - DNA, 449 bp, Homo sapiens
  MAP TO AC007327.1; EXPRESSED IN ADULT LIVER, SIGNAL = 3.3; EXPRESSED IN BT474, SIGNAL = 1.9; EXPRESSED IN BRAIN, SIGNAL = 2.2; EXPRESSED IN HEART, SIGNAL = 2.1; EXPRESSED IN HELA, SIGNAL =   2; EXPRESSED IN HBL100, SIGNAL = 2.1; EXPRESSED IN PLACENTA, SIGNAL = 2.6; EXPRESSED IN FETAL LIVER, SIGNAL = 2.6; EXPRESSED IN LUNG, SIGNAL = 2.6; EXPRESSED IN BONE MARROW, SIGNAL =   2
gtgtctggatggacaggaggcctggcctctgggtgttttcactgcctaaatgcagaaactctcctttatgtggaaaatcaaactggccgagacctttaatatgcacaggcaaatgcacaggcaccttccagctacctgaggcagcctctccgggcaccccggcctgcagacatgcggtgtgaccctccacctgccaatccaggacctcccgcacccaaccccccatcctgattcccggtctctttccttcctctcccttcaggtcactgggctgtggtgagagaaggcctcacgaacccttggattccggataactggtcttggggcggggtggcttctgaacactgcccagtgctagccgagttctacactgaaaaggactggagcaagaaggatgcccctcggaacggcagcggggtggccttggagcgaagtgaagccaacatcaa

SEQ ID NO: 4315 - DNA, 465 bp, Homo sapiens
  MAP TO AC007722.1; EXPRESSED IN BONE MARROW, SIGNAL = 0.68; EXPRESSED IN HBL100, SIGNAL = 0.82; EXPRESSED IN FETAL LIVER, SIGNAL = 0.85; EXPRESSED IN PLACENTA, SIGNAL = 0.67; EXPRESSED IN BT474, SIGNAL = 0.8; EXPRESSED IN LUNG, SIGNAL = 0.71; EXPRESSED IN BRAIN, SIGNAL = 0.74; EXPRESSED IN HEART, SIGNAL = 0.89
  unsure 43
  unsure 155
caaaatgcttgagaccaaaggtgtttcagatttcagatttttntgggggttttggaatatttgcattatacttatcagttgagcatccttagtccttttaaacatttgtttatttgaagacaattgttagtatgacgacacacagattacccacncaaagtaccacttgtgtttcatccagcttttactggtaccactaaatattatgaaaagcccttttttgtcttctcagatagactgttttctctataacattcacttaaagttttaccaagttcattttttgtttctttgtatttcatgggtcttgaaggattatgttgacaaagagaaggcaattgccaaagccttggaagacctcagagccaacttttattgtgaactgtgtgataagcaatatcagaaacatcaggaatttgataaccatatcaactcctatgatcatgcacacaagcaggtgagttg

SEQ ID NO: 4316 - DNA, 405 bp, Homo sapiens
  MAP TO AJ006995.1; EXPRESSED IN BONE MARROW, SIGNAL = 1.3; EXPRESSED IN HBL100, SIGNAL = 1.4; EXPRESSED IN FETAL LIVER, SIGNAL = 1.3; EXPRESSED IN ADULT LIVER, SIGNAL = 0.83; EXPRESSED IN BRAIN, SIGNAL = 1.3; EXPRESSED IN PLACENTA, SIGNAL = 1.1; EXPRESSED IN BT474, SIGNAL = 1.3; EXPRESSED IN LUNG, SIGNAL = 1.4; EXPRESSED IN HELA, SIGNAL = 1.3; EXPRESSED IN HEART, SIGNAL = 1.4
cagaatttcgaatgttccccaaactgttatgagtatgctaattatctttatttatcttgattaccttaattggatcattacacattgttcccatgtattgaaatatcactagatgccataaatatgatttaggctggtgcaaaagtaattgtggttttgggctgtgaattttaaatcattataactaggctcaaacacatctttattaatcaaaataggagtcattataatcaacacatttttgccaacaagaaataagtttgcttattcctgtagcataaaaatatgtgcttcgggattcgacaaactcttggaaagcattttctgcatcctgctggttgtggaagcattttccctgcaaaaagttgtcgagatgcttgaagaagtggtagttggttggaggga

SEQ ID NO: 4317 - DNA, 398 bp, Homo sapiens
  MAP TO AL020997.1; EXPRESSED IN BT474, SIGNAL = 1.3; EXPRESSED IN FETAL LIVER, SIGNAL = 1.6; EXPRESSED IN BONE MARROW, SIGNAL = 1.6; EXPRESSED IN LUNG, SIGNAL = 1.6; EXPRESSED IN BRAIN, SIGNAL = 1.4; EXPRESSED IN HBL100, SIGNAL = 1.3; EXPRESSED IN PLACENTA, SIGNAL = 1.3; EXPRESSED IN HELA, SIGNAL = 1.7; EXPRESSED IN HEART, SIGNAL = 1.5; EXPRESSED IN ADULT LIVER, SIGNAL = 1.8
gccaaacttcaccctcacacaatgggccccagtaaaacagtgggccttaataagcacattcctttcccttcaggtgcactaagggaagctaaaagcagactcaggggatatgtctgcagctgcagaaagatgtatggaaacaagacacacaactctccctcccagataagaacaaagagatacagaagcagtccaagcctctgataaactctcctaccccgaatccttaaaaactcacagtctgtaaaagagtgtgtctctgacctaactcggccagaaggcgcctctcaggtttgttttctctaaaataaatctgtcttgactggaaagccacctttttgtgtttctttcctctttctttaattcttacagctacctggatgacaacatggaccaca

SEQ ID NO: 4318 - DNA, 464 bp, Homo sapiens
  MAP TO AL049588.11; EXPRESSED IN LUNG, SIGNAL =   1; EXPRESSED IN HELA, SIGNAL = 0.91; EXPRESSED IN BRAIN, SIGNAL =   1; EXPRESSED IN HEART, SIGNAL =   1; EXPRESSED IN PLACENTA, SIGNAL = 0.75; EXPRESSED IN BT474, SIGNAL = 0.61; EXPRESSED IN BONE MARROW, SIGNAL = 0.93; EXPRESSED IN HBL100, SIGNAL = 0.87; EXPRESSED IN ADULT LIVER, SIGNAL = 0.98; EXPRESSED IN FETAL LIVER, SIGNAL = 0.85
accattggtctgggctgggcaaatattttttaagacctcacaagtacaggaaattgaagcaaaactggacaaatgggatcacatcaagttaaaaagtgtctgcaaaggcaaggaaacaataagcaaaatgaagagacaacacacagaatgggagaaaatatttgcaaacaacacatctgacaaagaattaattaccagaacatataaggaactcaaacaactcattacaaaaaaagaaaacaaatctgattaaaaataggtaaaagatctgaagaagcatttatcaataaagaacatagaaatggtgaaaaggtatataaaaatgttcaagatcactaatcatcagagaagtgctacaacgagatatcctgtcactctagttaaaatggcttttatcacaaaggcaataacagatgctggtgaggatggggagaaaagggaaacctcgtacactattggtggga

SEQ ID NO: 4319 - DNA, 457 bp, Homo sapiens
  MAP TO AL021069.1; EXPRESSED IN PLACENTA, SIGNAL = 5.9; EXPRESSED IN HEART, SIGNAL = 5.6; EXPRESSED IN ADULT LIVER, SIGNAL = 6.7; EXPRESSED IN FETAL LIVER, SIGNAL = 6.1; EXPRESSED IN BONE MARROW, SIGNAL = 3.9; EXPRESSED IN HELA, SIGNAL = 5.6; EXPRESSED IN HBL100, SIGNAL = 4.3; EXPRESSED IN BT474, SIGNAL = 4.5; EXPRESSED IN BRAIN, SIGNAL =   5; EXPRESSED IN LUNG, SIGNAL =   8
gcttgcttttgattttacagactcataggtggaaggcacttgccttgtctcagatgagactttggactgtggacttttgggttaatgatgaaataagttaagactttgcgggactgttgggaaggcatgattggtactgaaatgtgaggacatgaaatttggaagggccaggggcagaaagatatggtttggctgtctccccattcaaatctcaacttgaattgtatctcccagaattcccacgttattgtgggagggacccaggtggaggtgattgaatcatgggggatggtctttcccgtgctattcttgtatagtgaataagtctcacaagatctgctgggtttatcaggggtttctgcttttgcttctttctcattttctcttgctgctgccatataagaagtgcctttcgtctcccaccatgattctgaggcctcctcagccatgtcgaact

SEQ ID NO: 4320 - DNA, 407 bp, Homo sapiens
  MAP TO AC012447.2; EXPRESSED IN ADULT LIVER, SIGNAL = 1.2; EXPRESSED IN BRAIN, SIGNAL =   1; EXPRESSED IN BONE MARROW, SIGNAL = 0.95; EXPRESSED IN LUNG, SIGNAL = 0.95; EXPRESSED IN HBL100, SIGNAL = 0.97; EXPRESSED IN HEART, SIGNAL = 1.1
ctttcctctgtgctggcttccttctcctgcaggctccaccttactagaatgtggcaaaagtcaacatagtagctcaaatttacaacttaccagcttatcagcatcagtatcgcaatgctaattcaattaaagaatagcaggcagaaacctgctgcatatggggactgtatcacttctgagggccaccacaggcaagtacgtgcacctctggtttgaaaagctggcatagctgaccccagaacgccacacagggcttagactaacctgaagacttggatccaagggtggatgaaccaagccggcgggtggttcccattccaacgtttctccgagaacttggtggagccttggatgatgtagaactagcagaggaaggtctgttaccatccacagaatcttcatcgtcg

SEQ ID NO: 4321 - DNA, 391 bp, Homo sapiens
  MAP TO AF003627.1; EXPRESSED IN HBL100, SIGNAL = 0.91; EXPRESSED IN HEART, SIGNAL = 1.2; EXPRESSED IN BT474, SIGNAL = 0.97; EXPRESSED IN BONE MARROW, SIGNAL = 1.2
gctccacctggttagtttgctggtccactgtctggtgctggaggacaggaggctggcagctttcccagatgcaagctccgattccagcgggagagggcacactgctccacctgtggtgcctgccgagttccctggtctggtgtccggtgctggtggtcagggttgctgcgtgggctcagggaccagtgtgacagtggcttccctgggcaaaagctctgattccagtgtgggagggtgcacaggtgtgtctgcctcgttagttccctggtccactgtctcatgctggaggacagcaagctggtcgcttcccgtgacggaagctctgattccagcaaaagagggcgcgctgatccacccatggtgcctgctgcgttcccagctctggtgtctg

SEQ ID NO: 4322 - DNA, 429 bp, Homo sapiens
  MAP TO AL021155.1; EXPRESSED IN LUNG, SIGNAL =   5; EXPRESSED IN HBL100, SIGNAL = 5.1; EXPRESSED IN PLACENTA, SIGNAL = 4.5; EXPRESSED IN ADULT LIVER, SIGNAL = 3.8; EXPRESSED IN BRAIN, SIGNAL = 5.4; EXPRESSED IN BONE MARROW, SIGNAL = 4.2; EXPRESSED IN HEART, SIGNAL = 4.3; EXPRESSED IN HELA, SIGNAL = 4.4; EXPRESSED IN FETAL LIVER, SIGNAL = 4.4; EXPRESSED IN BT474, SIGNAL = 3.9
aagaacggtctgacggaggtgctccccagtgcaggcaccgcgtggcgtggccctgctacgacagctgcccctgaccccagcctgatgctatctcacttctgctggaggagctgcagaggctggagacagagctgggctaatgccctcagtgatggaaggacacctgggaccaggtgaaggctgcacagcgcctggaaggctggccagacggaagtggcacccctagctcccttctagtgtccactgcaccccaccaccaccgttcctgggtgtgtgactgccggaggggcccgtgggctccaccctgagcctcagcctggacagcgaccagagtagtggctcgaccgcttctggctcctgccaggctgcccgccacagcaccagcaccctgtgcagccagttccagagagctgagagtgagaacgggtc

SEQ ID NO: 4323 - DNA, 469 bp, Homo sapiens
  MAP TO AC007001.2; EXPRESSED IN HBL100, SIGNAL = 1.1; EXPRESSED IN LUNG, SIGNAL =   1; EXPRESSED IN PLACENTA, SIGNAL = 1.1; EXPRESSED IN BT474, SIGNAL =   1; EXPRESSED IN BONE MARROW, SIGNAL = 1.5; EXPRESSED IN FETAL LIVER, SIGNAL = 1.2; EXPRESSED IN HELA, SIGNAL = 1.2; EXPRESSED IN ADULT LIVER, SIGNAL = 1.1; EXPRESSED IN BRAIN, SIGNAL = 0.93; EXPRESSED IN HEART, SIGNAL = 1.3
gcaaaatcatctaacacaaagcctattttataataaagtgttgaatagctcagataatttattgaatactataccgaaagtgaaaaacagaatggttgtatgggtacttactcaaagtctggcttctaatgaatgagtattgctttcccaccactgtgaagtcaaaaaaatcgtaggtcgaactcgtaaataaattgaggactgtctgttcatacttgtagataatttcccttgggttttcattgctgccagtataggatttaagtgctgcagaaaaggaatactcttttttctggtggggaactgtgaagacagtctaagaacagattgtcactcctttgattttgttgttgttgctgttgttgttgttgttcttgttgatgaacactgggatggctgggaagcaaatgtctcttatagaacaaacaaaaacaaggggaggcttggatcacccagagagcacactgag

SEQ ID NO: 4324 - DNA, 392 bp, Homo sapiens
  MAP TO AC008127.10; EXPRESSED IN ADULT LIVER, SIGNAL = 2.5; EXPRESSED IN BT474, SIGNAL = 2.1; EXPRESSED IN BRAIN, SIGNAL =   2; EXPRESSED IN HEART, SIGNAL = 1.8; EXPRESSED IN HELA, SIGNAL = 2.3; EXPRESSED IN HBL100, SIGNAL = 2.3; EXPRESSED IN PLACENTA, SIGNAL =   2; EXPRESSED IN FETAL LIVER, SIGNAL = 2.6; EXPRESSED IN LUNG, SIGNAL = 2.1; EXPRESSED IN BONE MARROW, SIGNAL =   2
aggtggtatacaccccatgcgatattgggagtaatatcatcctctcccccctccacccccagatattaagactatcacagggggaggtacacccccaatgatattggagtgtacaccccccatgatattgggagtaatattactctctctccttctggatattacgaacagtaccacaaaagggtgtacacctcctttgatattgagagtaatttcatcctctcccccccaccccggatattaggaagaatatcacaggagggtgtactacccctgcgatattgggagtaatatcatcctctttccccctggatattatgaaaaacatcaccggggggtttacaccatctgcgatgttgggagtaatatcatcctttcggtccctggatatt

SEQ ID NO: 4325 - DNA, 459 bp, Homo sapiens
  MAP TO AC007361.1; EXPRESSED IN BONE MARROW, SIGNAL =   4; EXPRESSED IN PLACENTA, SIGNAL = 4.8; EXPRESSED IN ADULT LIVER, SIGNAL = 5.7; EXPRESSED IN BT474, SIGNAL = 3.8; EXPRESSED IN BRAIN, SIGNAL = 3.9; EXPRESSED IN LUNG, SIGNAL =   5; EXPRESSED IN HEART, SIGNAL = 4.7; EXPRESSED IN HELA, SIGNAL = 4.8; EXPRESSED IN HBL100, SIGNAL = 4.7; EXPRESSED IN FETAL LIVER, SIGNAL = 5.2
cctgtggactgtgctcttccaactggagaatcctgtatttgtaataaattccttttgctctggatgagttctgcattttcaatgaggttaacttggcaacattctagttgattttaataaaaatagctgctttgaggacagggagctgaggttgccaaatttacagctgccttgcacaattactcttacacctccttcagggctacttagaaccagtaagcaaattaagtgtatcgattgcaattttgttggactaaccctgctttttttttttcttaaggaataaacttgattccgtttagtatgtgtctgttcagagtgatctcttttcttttcagccataacacaaagacaacatcatggctggatccacgacttgcgaaaaaggctaaacctccagaagagtgcaaagaaaatggtaggttattaagtttttatggtgtttcagcaatgtgcttt

SEQ ID NO: 4326 - DNA, 400 bp, Homo sapiens
  MAP TO AC008249.14; EXPRESSED IN BT474, SIGNAL = 1.3; EXPRESSED IN FETAL LIVER, SIGNAL = 1.6; EXPRESSED IN BONE MARROW, SIGNAL = 1.2; EXPRESSED IN HELA, SIGNAL = 1.8; EXPRESSED IN PLACENTA, SIGNAL = 1.7; EXPRESSED IN ADULT LIVER, SIGNAL = 1.4; EXPRESSED IN BRAIN, SIGNAL = 1.3; EXPRESSED IN LUNG, SIGNAL = 1.2; EXPRESSED IN HEART, SIGNAL =   1; EXPRESSED IN HBL100, SIGNAL = 1.6
acagcatcctggctcagaagtttaagcaaaagagacattttgttttgaagagagatctataaaaagaagccagtattgggatttggtctagacaatgggatagtgtgtagcgtagatggtatagtatagtgttagaatcttaccattaatactttgtaatcactgcattataggtggctcagcttatcaaccttcctcgccctcacctgtagtgggggtctgtggttgcttacttgtctgattcctacacagtccatagctcttgagtcactctcaaatgctttgattttcttctctctatttctagtataagtcatagtagaacagaagatgaaacaagaactcagattttgagcatcaagaaagttacctctgaggatctcaagcgcagctatgtctg

SEQ ID NO: 4327 - DNA, 425 bp, Homo sapiens
  MAP TO AJ229042.1; EXPRESSED IN ADULT LIVER, SIGNAL = 5.4; EXPRESSED IN BT474, SIGNAL =   4; EXPRESSED IN FETAL LIVER, SIGNAL = 5.2; EXPRESSED IN BONE MARROW, SIGNAL = 4.8; EXPRESSED IN LUNG, SIGNAL = 4.7; EXPRESSED IN BRAIN, SIGNAL = 4.3; EXPRESSED IN HBL100, SIGNAL = 4.8; EXPRESSED IN PLACENTA, SIGNAL = 4.4; EXPRESSED IN HELA, SIGNAL = 5.1; EXPRESSED IN HEART, SIGNAL =   4
tcctattggatcaagccctgcccttatgagtccacttaaccttaattacctctgtaaaggccctttctcctagtacagtcactttgagggttagtgcttcaacatgtgaattttggggggacacaaacatttggtacataaccacttcttcaacaaagatattttttatagattaagaaagaaaatcacagagatgaacacgaagatcaaaattgactactcttatgggctcttacctgtctaagggcctccttaccaggaagatggcatgaaggataataatcaggatacaataatcaataacaataatatcctctgcctcacctgccaaacaccagctgcttctcaacttttgtggtacttccagtatctctgggtgaggggctgggagccctcggtggctgccccatgctgagtacagagca

SEQ ID NO: 4328 - DNA, 438 bp, Homo sapiens
  MAP TO AL008583.1; EXPRESSED IN PLACENTA, SIGNAL = 1.9; EXPRESSED IN HEART, SIGNAL = 1.9; EXPRESSED IN ADULT LIVER, SIGNAL = 2.1; EXPRESSED IN FETAL LIVER, SIGNAL = 2.1; EXPRESSED IN BONE MARROW, SIGNAL = 1.9; EXPRESSED IN HELA, SIGNAL = 2.1; EXPRESSED IN HBL100, SIGNAL = 2.4; EXPRESSED IN BT474, SIGNAL =   2; EXPRESSED IN BRAIN, SIGNAL = 2.1; EXPRESSED IN LUNG, SIGNAL = 2.8
cggaagatctcatctcccacctcctctaccctgtcacaccgccccaccccacgtctcccacacagacccatgcccgctgccccgtccacaccctgagactccgagggagacggttgagagcctggggatggagatgtcaagttcacacactgggcgtggctcaggaaactggtacacaaagacaaaaagaaaagaccccaactctccttggaaaaaccaggacctgcctagggctgctccccaccccagatgagtggcaggaaaaggccctgcaggggacggggcaggggacagagtgtcaggagcacttccagacgcacacagccagggtgcccccgaagtacaggtagaggaggttcttcacctcgtgggtgatctcaaacccaaagccctcgccgatcaccacgtgccaggaggagccgaacttcttgtccattg

SEQ ID NO: 4329 - DNA, 407 bp, Homo sapiens
  MAP TO AC010130.3; EXPRESSED IN BONE MARROW, SIGNAL = 3.8; EXPRESSED IN LUNG, SIGNAL = 4.1; EXPRESSED IN PLACENTA, SIGNAL = 3.5; EXPRESSED IN HBL100, SIGNAL = 4.4; EXPRESSED IN HELA, SIGNAL =  11; EXPRESSED IN HEART, SIGNAL = 3.2; EXPRESSED IN ADULT LIVER, SIGNAL =   4; EXPRESSED IN BT474, SIGNAL = 3.7; EXPRESSED IN FETAL LIVER, SIGNAL = 5.2; EXPRESSED IN BRAIN, SIGNAL = 3.4
aatgaggcaactcttggtgggctcctggatgatcaccagaaagaccaagccgtgattagaagcttggaaccttcagttccacccaactcccatcctatgcggaggggaaagggaatagataatgagttaataatcaatcatgcctacctgatgaagcctccagaaagatacctgaactaaggggttcagagagcttctgagttggtgaatacatccacgtgctcagagtggcacacccccagtccagagggaaagaagttgctgcgcccaggacccttccagacctcaccctacacatctcttcatctggctgatctggccgttcatttgtatcctttatcatatccttttttaataaactggtaaaagtatttccctgagttctgtgagctgatcccaagaaggtg

SEQ ID NO: 4330 - DNA, 451 bp, Homo sapiens
  MAP TO AC010149.2; EXPRESSED IN BT474, SIGNAL = 5.2; EXPRESSED IN BRAIN, SIGNAL = 3.4; EXPRESSED IN BONE MARROW, SIGNAL = 4.8; EXPRESSED IN PLACENTA, SIGNAL =   2; EXPRESSED IN ADULT LIVER, SIGNAL = 2.8; EXPRESSED IN FETAL LIVER, SIGNAL = 5.2; EXPRESSED IN LUNG, SIGNAL = 7.3; EXPRESSED IN HEART, SIGNAL = 3.3; EXPRESSED IN HELA, SIGNAL = 5.6; EXPRESSED IN HBL100, SIGNAL =   8
tttttgctgaattaggctttcctttagctcgatatgcagcaatatcctttttgtatttttccttcagtttgcagccttcttttcataaaactgttgtcagctgcagcggtgttattccacatccctgccagtttcttcacaacatcatcaatggacaggccaggatgttctcctttgatttttgggcgatactcagagcagaacaggaaaaaggccaaaggaggcctcttgggtgcattgggatccttgaacttctatttttctccccttaggagggatataggttttcattctcttcataatggccttgtccgcctttgccatatcttcaaattttcctttctctttagcaaaaatggtcttccatgtctctgagcacttctttaaaaactctgagaacttgactgaagcatctgggttcttcttcttatgctcctcctgacaagtttgc

SEQ ID NO: 4331 - DNA, 388 bp, Homo sapiens
  MAP TO AC007450.1; EXPRESSED IN BONE MARROW, SIGNAL =   2; EXPRESSED IN LUNG, SIGNAL = 1.7; EXPRESSED IN ADULT LIVER, SIGNAL = 1.9; EXPRESSED IN BT474, SIGNAL =   2; EXPRESSED IN BRAIN, SIGNAL = 2.6; EXPRESSED IN HEART, SIGNAL = 1.4; EXPRESSED IN HELA, SIGNAL = 3.5; EXPRESSED IN HBL100, SIGNAL = 2.4; EXPRESSED IN PLACENTA, SIGNAL = 3.3; EXPRESSED IN FETAL LIVER, SIGNAL = 1.8
cgcttgaccccaatacaaagtcgacagtagttccaaatagccagaaaacgacactttcaatttttccatcctgcaagatctaaataattcttgtcgtaaaataggcaaatggtctgagatgcctgacgtccaggcactcttttacacatcggtccctttccagtctctgttcccaatgcaactcatcacaaatcttccttctttccctcccacctgtcccctcagtcccaaccccaagcgtcgctgagtctttctaattttccttttctacagacccatctgacctcttcccttctccccaggctgctcctcaccaggctgagctaggtcccaattcttgctcagcctctgctcctccaccctataatccttttatcacctcccctcc

SEQ ID NO: 4332 - DNA, 447 bp, Homo sapiens
  MAP TO AC010892.2; EXPRESSED IN HBL100, SIGNAL = 1.6; EXPRESSED IN HEART, SIGNAL = 1.4; EXPRESSED IN BRAIN, SIGNAL = 1.2; EXPRESSED IN BONE MARROW, SIGNAL = 1.5; EXPRESSED IN PLACENTA, SIGNAL = 1.5; EXPRESSED IN HELA, SIGNAL = 1.4; EXPRESSED IN BT474, SIGNAL = 1.2; EXPRESSED IN ADULT LIVER, SIGNAL = 1.5; EXPRESSED IN FETAL LIVER, SIGNAL = 1.7; EXPRESSED IN LUNG, SIGNAL = 1.7
atgatcatgatgtgcttggctaataaaaaggaaaaaagccgtgtgttaaaaatatgtttaaaatgatttgcatgagtggtgtaaatataaaccaccaccatcatcattgtcaacattatccccagtttaatttgccttttgaaatccctgcctgaccttgagggtgggaggttgataaaggaagagggaggcagaaaattagcatctattaaatgcttattattgctaggcactgtgctaaacactcacaataaccctctaagataggtattattatgctcttacagatgaggaaattgggctcaaagaagttcaggaacttgctctaggtcatacagttagtaatcacaggatcaagatttcaacccaggtaagtgtaattccaaagtctgcactctttcccctacacctggactggttacatttactttgacctcagcagtgcct

SEQ ID NO: 4333 - DNA, 393 bp, Homo sapiens
  MAP TO AL021407.1; EXPRESSED IN LUNG, SIGNAL = 3.4; EXPRESSED IN BRAIN, SIGNAL = 0.98; EXPRESSED IN PLACENTA, SIGNAL = 1.9; EXPRESSED IN HEART, SIGNAL = 1.1; EXPRESSED IN FETAL LIVER, SIGNAL = 1.4; EXPRESSED IN BONE MARROW, SIGNAL = 1.2; EXPRESSED IN HELA, SIGNAL = 1.2; EXPRESSED IN HBL100, SIGNAL = 1.1; EXPRESSED IN BT474, SIGNAL = 1.2
attccccgtctgtgcattagcgagccagtacctggctcctactccccgttaagaggagggataggtgaggctgcaggcaaaagtgggcagctgactcccctacctgtagctgggcggcgcagctctcacagcacacagtgtggccacagggacagaaggtggagttgatctcctcctcgcagcacaccatgcacagcatggcttccttcagcttgcgtagcttctcctgcagcacccgggtctgctggcagctgaggccctcgcagctgctgcagttcatgctgctttctgaggacttcagaggcgagtgtgaagggctctggttgtttcttgaaacgaggtccacaacgccagcattgtacagagccctcctggcatggtcatacacctcct

SEQ ID NO: 4334 - DNA, 408 bp, Homo sapiens
  MAP TO AF030453.1; EXPRESSED IN ADULT LIVER, SIGNAL = 1.5; EXPRESSED IN HELA, SIGNAL = 3.5; EXPRESSED IN HBL100, SIGNAL = 5.3; EXPRESSED IN HEART, SIGNAL = 3.5; EXPRESSED IN FETAL LIVER, SIGNAL = 4.3; EXPRESSED IN BT474, SIGNAL = 2.5; EXPRESSED IN BRAIN, SIGNAL = 1.3; EXPRESSED IN LUNG, SIGNAL = 2.7; EXPRESSED IN BONE MARROW, SIGNAL = 2.3; EXPRESSED IN PLACENTA, SIGNAL = 2.3
ggcgatgaggtcagagagaccaaggagaggcggagcatgggggccttatcggccattgctgaggctttggtttttactctgagtcaactgggaggcattggacggtttgaacagagggtcctggctctggtggggaaacaggaagtaggattctttggtaggagtgagtaaggaggggtcagcacaggggaagccctcagaagctcacccaggaggccacaactggggctgcgtttaacccccacagccatgccagatgagctgcttctcagccaccacgtgggatcgatttcttccacattgaacttggtcaaggcccgctgctttgtgctgtggatcttctggcagccagggaacttagacttggccctgcatatggcctcaatcacaccctcatggttctgctct

SEQ ID NO: 4335 - DNA, 367 bp, Homo sapiens
  MAP TO AC010899.2; EXPRESSED IN BRAIN, SIGNAL = 3.6; EXPRESSED IN BONE MARROW, SIGNAL = 3.7; EXPRESSED IN LUNG, SIGNAL = 4.5; EXPRESSED IN PLACENTA, SIGNAL = 4.3; EXPRESSED IN HBL100, SIGNAL = 3.8; EXPRESSED IN HELA, SIGNAL = 4.3; EXPRESSED IN HEART, SIGNAL = 3.8; EXPRESSED IN ADULT LIVER, SIGNAL = 3.2; EXPRESSED IN BT474, SIGNAL = 3.2; EXPRESSED IN FETAL LIVER, SIGNAL = 4.4
atcacaggaagcaaacccagctcctagggtacagtctactagtgaattagcgactttggtcagaaaggcctggaaataatgttgagtttcattgcataccggatacagatacccaaaaagattcaagtaataaatgcttggtgagaattaacttggcctaatgctaatgagattgttcctcactccttttctatgcagaaaaatgatggcagatttacagtcattcagctggtgggcatgcttcgtggcattgggtctgggatgaagtatttatctgatatgagctatgtgcatcgtgatctggccgcacggaacatcctggtgaacagcaacttggtctgcaaagtgtctgattttggcatgtccc

SEQ ID NO: 4336 - DNA, 368 bp, Homo sapiens
  MAP TO AC008269.1; EXPRESSED IN FETAL LIVER, SIGNAL = 0.67; EXPRESSED IN BONE MARROW, SIGNAL = 0.71; EXPRESSED IN HBL100, SIGNAL = 0.82; EXPRESSED IN ADULT LIVER, SIGNAL = 0.74; EXPRESSED IN BRAIN, SIGNAL = 0.73; EXPRESSED IN BT474, SIGNAL = 1.2; EXPRESSED IN HELA, SIGNAL = 0.77; EXPRESSED IN HEART, SIGNAL = 0.96
aagtctataaaatgtttgtctcgtgcaagacatacagcaatagccaacatttattgaatgtatacacttattatgagataaccaactgtccagaatgatgtgtggatacttacttgcaaggctgattttcttatctcttttctttggaatcgttacagatattggccttctgtatatgttgggaaactgacttttctttgttccccagacagttcgtggaagttatggctagtgctctgactggttatcttcacactatttcttctgaaaacttattggatgcagtatattcattttgcttgatgaattactttcccctggctccttttaatcagcttctgcaaaaagacatcatcagtgagctgctg

SEQ ID NO: 4337 - DNA, 474 bp, Homo sapiens
  MAP TO AL049642.5; EXPRESSED IN HBL100, SIGNAL = 0.68; EXPRESSED IN HELA, SIGNAL =   1; EXPRESSED IN BT474, SIGNAL = 0.66; EXPRESSED IN FETAL LIVER, SIGNAL = 0.58; EXPRESSED IN LUNG, SIGNAL = 0.63; EXPRESSED IN ADULT LIVER, SIGNAL = 0.71; EXPRESSED IN PLACENTA, SIGNAL = 0.74; EXPRESSED IN HEART, SIGNAL = 6.8
gtccccttctcactcttcccccataacaaccctgagagcaattttgatcccgctgaggaacctccaccataccaccagcttcaggcccctgccggagccaccagccccatcgccacctcccccactcccctttctatctatatcacctgttcaaaaaaacagtcaaaccctagccatccttcccctctgcgaggttcatgttccttctcaatgccagacatgtctgagatcaaaaggcacctggttccttttccactgacccttcccacttccgaagggagtttctttatgttactcagtcatataaccttacttggcataacatttatgttatcctcttagccactcttaccccagataagaaacaatgcatttggctggcctctcaagcccataccaatatacttcaccagcaagatgtagtccataatcctgttgcagccaatgctgttcccggagcagacccctaataaa

SEQ ID NO: 4338 - DNA, 415 bp, Homo sapiens
  MAP TO AC009930.2; EXPRESSED IN FETAL LIVER, SIGNAL = 1.2; EXPRESSED IN BONE MARROW, SIGNAL =   1; EXPRESSED IN ADULT LIVER, SIGNAL = 1.8; EXPRESSED IN BT474, SIGNAL = 0.94; EXPRESSED IN BRAIN, SIGNAL =   1; EXPRESSED IN LUNG, SIGNAL = 1.2; EXPRESSED IN PLACENTA, SIGNAL =   1; EXPRESSED IN HEART, SIGNAL =   1; EXPRESSED IN HELA, SIGNAL = 1.2; EXPRESSED IN HBL100, SIGNAL = 1.1
tcttggtgcttcaatgttgggtgcatatgtattataattgttacatcctcttgctgaattgagccttttattattatataattatcttctttatatctttttatagtttttgtctcaaaatctaatttgtctgatataattatagctactcttgctcttaatttctgctctgtttccatttgcatgaaatatctttttccaactctttattttcactctatgtacagctttgtaggtgaagtgtttctagtaggcaacaaatagttggatcttggtttctgttttttgttttgttttgtttttaatccattcagcccctctgttttcttgtgtgttttgtggtctttctttcttcctttcttgtaagaaaagtctagtgtcggtgatatccctcagcttgtgtttgtctggggaa

SEQ ID NO: 4339 - DNA, 379 bp, Homo sapiens
  MAP TO AC009313.1; EXPRESSED IN BT474, SIGNAL = 0.88; EXPRESSED IN BRAIN, SIGNAL = 0.81; EXPRESSED IN HEART, SIGNAL = 0.95; EXPRESSED IN PLACENTA, SIGNAL = 0.95; EXPRESSED IN BONE MARROW, SIGNAL =   1; EXPRESSED IN HBL100, SIGNAL = 0.75; EXPRESSED IN FETAL LIVER, SIGNAL = 1.5; EXPRESSED IN LUNG, SIGNAL = 0.83; EXPRESSED IN HELA, SIGNAL = 0.74; EXPRESSED IN ADULT LIVER, SIGNAL = 0.87
accccacttgctccttgaacattagaataagaatattttaaaattgtggaacttaaggtttcatacaatttctagtcaggattttagatgagacttatgtttatagtacttggtggtataatgtttgtggtaaaccttatagaactatctttaagatgcatttttaaaatgaggtttatgtaacttagtaattatctaaattgatctcattattttgcagacctgtcatttactccatcctttatagtgatgctacaggacgaagaggaatggataaaaacattggcgagcaactcaataaagcgtatgaagccttccggcaggcatgcatggatagagattctgcagtaaaagaattacagcaaaaggtgtgtggttc

SEQ ID NO: 4340 - DNA, 384 bp, Homo sapiens
  MAP TO AC009650.2; EXPRESSED IN BONE MARROW, SIGNAL = 1.6; EXPRESSED IN PLACENTA, SIGNAL = 2.3; EXPRESSED IN HEART, SIGNAL = 2.1; EXPRESSED IN HELA, SIGNAL = 1.9; EXPRESSED IN HBL100, SIGNAL = 2.8; EXPRESSED IN FETAL LIVER, SIGNAL = 1.8; EXPRESSED IN BT474, SIGNAL = 1.7; EXPRESSED IN LUNG, SIGNAL = 2.3
  unsure 126
  unsure 269
  unsure 277
  unsure 303
  unsure 317
ccaaccacctattaaccaaggttattctgttcttaactgaatcaacctatacctctgctatttggcagattggtagaaagaaatgaaacccaaaaaggcttattttatacactatgtaaaatcaangtgtataaaatatattgatgccacaaataaaattaaaaagtgtatattaaataagacttcctcacttttcatttggcatgccacttaaaattctggtatctccatggaacactccactaggtattactgatattgtaaaaacnaaaacatnacccaaagtctggcttctgcagaggntgtccctgatgccnaagatttgcatttttgacctgggacagaagaaagcaaaaatggatgagtatccactctgaggccaca

SEQ ID NO: 4341 - DNA, 355 bp, Homo sapiens
  MAP TO AL022162.1; EXPRESSED IN LUNG, SIGNAL = 7.2; EXPRESSED IN BRAIN, SIGNAL = 6.5; EXPRESSED IN HEART, SIGNAL = 5.8; EXPRESSED IN ADULT LIVER, SIGNAL = 6.9; EXPRESSED IN FETAL LIVER, SIGNAL = 7.3; EXPRESSED IN PLACENTA, SIGNAL = 6.6; EXPRESSED IN HELA, SIGNAL = 8.4; EXPRESSED IN HBL100, SIGNAL = 6.3; EXPRESSED IN BT474, SIGNAL = 6.6; EXPRESSED IN BONE MARROW, SIGNAL = 5.7
aagttgacaatgccagccactggagacagagtggcaactactgctgtcgcctccaaaataccagttgaggttttctcctactgtggggtttagaaactatttccatttctattatgcctttgttttgccctattttctcttttctttttaatagtgttggtggttgtgcctggaggtgagacaggggagggcaggacaagagccaagagaacgctgaagtcagcagagtgtgctctggtgcctcgcagcttctcttccagcactgcccactcccactgcagggcctgggtctcaatggcagtccctctcagggcctattctccatggacaagaatcagcagggctcttactccac

SEQ ID NO: 4342 - DNA, 430 bp, Homo sapiens
  MAP TO AC010681.3; EXPRESSED IN BT474, SIGNAL = 1.8; EXPRESSED IN FETAL LIVER, SIGNAL = 1.6; EXPRESSED IN BRAIN, SIGNAL = 1.5; EXPRESSED IN BONE MARROW, SIGNAL = 2.1; EXPRESSED IN LUNG, SIGNAL = 1.8; EXPRESSED IN PLACENTA, SIGNAL = 2.1; EXPRESSED IN HBL100, SIGNAL = 1.9; EXPRESSED IN HELA, SIGNAL = 1.8; EXPRESSED IN HEART, SIGNAL = 1.6; EXPRESSED IN ADULT LIVER, SIGNAL =   2
ttattctgtgcttccctgtggtatatatatgagcaccatcaaactctgttgtctagcaggttatgggcccacagtacatgctcgctatacagttgctgaatgaatgaatgccttggtatgatgaagtggaaaaggttatgtatacactattctatgcttttctgggtcctggatgcttctgtatactgctgtgtggtttgggagtttgagtatgttttatttaggtggttgcatatgtgaagtggaaagaggtaaggttggttgaagggtaattatttcttgatggaagaatataaaaagtataaacagatcagctattgcttaagcaaactcagctcttcattcctgatctacaatgcaaatggtatacaaaataaggtttcattaaagagtgactgtcacatcaacagggaagagaatgaagacctgc

SEQ ID NO: 4343 - DNA, 373 bp, Homo sapiens
  MAP TO AC007708.13; EXPRESSED IN FETAL LIVER, SIGNAL = 3.1; EXPRESSED IN HELA, SIGNAL = 1.3; EXPRESSED IN HEART, SIGNAL = 1.1
tcatattaagttaagtttggggatagcccaaaattatatatggattttcaactgcacaggagctggtcccctaacccttgcactgttcaaggatcaacagtatgtataatactacagattttattcatattttagagtgtagtactactactcattaaaaaaaattaactatgaaacagcttcaggaaggtcttccacgagttcttccagaagaaagccttgttatcatagagaatgacagctgcatgtatgttattgccactgaagaccctgaagacctttcacttggacaagatttcgagatggaagacagtgatattgattatcctgacccttacaggactaagctagtgtgtgtgtttgtatcttagtt

SEQ ID NO: 4344 - DNA, 473 bp, Homo sapiens
  MAP TO AC008008.2; EXPRESSED IN FETAL LIVER, SIGNAL = 0.58; EXPRESSED IN HELA, SIGNAL = 0.61; EXPRESSED IN BRAIN, SIGNAL = 0.95; EXPRESSED IN ADULT LIVER, SIGNAL = 0.66; EXPRESSED IN HEART, SIGNAL = 0.82
tctggggtcattccattctgctaagcagtgtgaaaaatttcagtcattatgttaaaaataaaactaagtaatatgtctctaatctttggtaggacctccaaaatgtgctataaataatcagcagtattaatggacacctttgccttttttgtgagatggtttgtttttacctgaaacaaaaacatccatcatcattagttacagcacaggtcattacaattctgtgcttattgagtgaatcataaaggataaatataaaagaacaacatgaaaaggaaacattttttctaaaaataaaaagctatttttatttctgagataacttacttctcttcagaatgtcttttttccctaaattcatttccatctccacaataagaaatatcaaagcagtaagcatgatatattttttaaaattaaaaatatttatgcgccagatacgtgaagtcatggacctcaaaaagatcacaatc

SEQ ID NO: 4345 - DNA, 402 bp, Homo sapiens
  MAP TO AC010960.2; EXPRESSED IN LUNG, SIGNAL = 1.4; EXPRESSED IN HBL100, SIGNAL = 1.2; EXPRESSED IN HEART, SIGNAL = 1.2; EXPRESSED IN BRAIN, SIGNAL = 1.1; EXPRESSED IN BONE MARROW, SIGNAL = 1.8; EXPRESSED IN PLACENTA, SIGNAL = 1.4; EXPRESSED IN HELA, SIGNAL = 1.4; EXPRESSED IN BT474, SIGNAL = 1.1; EXPRESSED IN ADULT LIVER, SIGNAL = 1.5; EXPRESSED IN FETAL LIVER, SIGNAL = 1.3
tcttttctggaaatggctggattttgcagaatattggtatcaaatttggggctcatattaaagaccccatatgaagcaacaagagggcctgaaaatgagctaatgaaatagaacctggaaatgaaagaagccttcgtcaagctaaaataggctctcacccaggctcctgctcttggcatcgcagacctcaccaagcccttctccttgtatgtagcagagaggaagggcatagctgtgagagtgctaaccgagaaaataggatcagaacccagaccaactgcctacgtttcaaagaagttgggcggagtagcctcaggatggctgagttgcctgcaaacatttgcagccactgctattttagtaaaggaagccactaaaatcaccctggctcaactattggaa

SEQ ID NO: 4346 - DNA, 449 bp, Homo sapiens
  MAP TO AC010807.2; EXPRESSED IN ADULT LIVER, SIGNAL = 1.2; EXPRESSED IN FETAL LIVER, SIGNAL = 1.3; EXPRESSED IN BT474, SIGNAL = 2.3; EXPRESSED IN BRAIN, SIGNAL = 1.2; EXPRESSED IN LUNG, SIGNAL = 1.5; EXPRESSED IN BONE MARROW, SIGNAL = 1.5; EXPRESSED IN PLACENTA, SIGNAL = 2.8; EXPRESSED IN HEART, SIGNAL = 8.1; EXPRESSED IN HELA, SIGNAL =  27; EXPRESSED IN HBL100, SIGNAL =   3
tcgacctgtgtttggtatcgttggggtgatcactcgcggccatgggcggacactgaacatctcgttcatgcctctgtgcgtagaggtaccacatctcagtgattttaggaacattcatcctttacaaattattggatgcctcattttttttttttaactgggggagggggcttgctggtgtcttcagcagtatttttgtgtttgcggagcagcttttggaatggattcgtcgcacgatcccctggctggagaaccggactcccgagaagaccatgcaagccatgcagaagaagctggaggacttccgggattaccgccggaagcacaagccacccaaggtgcaggagaaatgccagctggagatcaacttcaacacgctgcagaccaagctgcggatcagcaaccgtcctgccttcatgccctccgagggcaagatggtgtcggtgagt

SEQ ID NO: 4347 - DNA, 469 bp, Homo sapiens
  MAP TO AC008278.1; EXPRESSED IN LUNG, SIGNAL = 0.76; EXPRESSED IN BRAIN, SIGNAL = 0.88; EXPRESSED IN HEART, SIGNAL = 0.81; EXPRESSED IN PLACENTA, SIGNAL = 0.6; EXPRESSED IN HELA, SIGNAL = 1.2; EXPRESSED IN ADULT LIVER, SIGNAL = 1.1; EXPRESSED IN FETAL LIVER, SIGNAL = 0.91; EXPRESSED IN HBL100, SIGNAL = 0.85; EXPRESSED IN BONE MARROW, SIGNAL = 0.78; EXPRESSED IN BT474, SIGNAL = 0.9
gtgttggcaggacaggatgagcagttcaagcttgccccagtgacccaggattcaataaatacacagtcaatgtgtgcgtaactggtccccaacatctgagtaaaagcctcctttcgggaagaatgcatatgtctctctatttgtgtcccatggctgctggcctgaggctgaacactcaggaggtcatttggaatgtcaggcatggtaactctggtggaggggcaggtgaggtctgagatttcagtgcaccctgagttctgaggggatcacactcccctggctgtcccagggtgagccacctgctggagcccatgttcagacagttatggcctgtagaaaacttgggaaggctctggagttttagcagcttggggatacccacttcctgcagccccttggctcctgctgctctggtgtgcatggaaggagtagaaatagggaatttcagagagcgggttaagagggaatt

SEQ ID NO: 4348 - DNA, 490 bp, Homo sapiens
  MAP TO AC005674.9; EXPRESSED IN HELA, SIGNAL =   1; EXPRESSED IN HEART, SIGNAL = 0.94; EXPRESSED IN PLACENTA, SIGNAL = 1.2; EXPRESSED IN BT474, SIGNAL = 0.75; EXPRESSED IN FETAL LIVER, SIGNAL =   1; EXPRESSED IN LUNG, SIGNAL = 0.98; EXPRESSED IN BRAIN, SIGNAL = 1.1; EXPRESSED IN BONE MARROW, SIGNAL = 1.2; EXPRESSED IN HBL100, SIGNAL = 0.82; EXPRESSED IN ADULT LIVER, SIGNAL = 1.1
tttcaagtccctccaactgcatttaggacttcagatcacttgcaaactgctactctcctagctccactgactgccaatcaaaggcccaagaccaaaaacaaacaagacattgtcttttaaccagatcactgtgtgcccatctcacccttgagcagaaggggaatgctgtcttgtactcagcacctgccctgtgccaggctcacctaatccacaacagcctgaggcaggctccactgtacccgcctttactgatgaggaaagggacacagggagagaccgcagcaggttcctggagaacagggctgtgatctgctgcccctgcttccagggcagagtccacacctggtcgttgtctgtgggcaagagcattacccagaccacctggatctgtaacacagtgctgggctcagggcccaacaacaggagaacaatgctggggacggggtgggagagatgaaaggagcaagtgaggcgtcctccagaacagtaa

SEQ ID NO: 4349 - DNA, 466 bp, Homo sapiens
  MAP TO AC007465.2; EXPRESSED IN FETAL LIVER, SIGNAL = 0.87; EXPRESSED IN ADULT LIVER, SIGNAL =   1; EXPRESSED IN PLACENTA, SIGNAL = 1.1; EXPRESSED IN BONE MARROW, SIGNAL = 1.1; EXPRESSED IN HBL100, SIGNAL = 0.87; EXPRESSED IN LUNG, SIGNAL = 1.1; EXPRESSED IN HELA, SIGNAL = 1.2; EXPRESSED IN BRAIN, SIGNAL =   1; EXPRESSED IN BT474, SIGNAL = 0.7; EXPRESSED IN HEART, SIGNAL =   1
agctcaggagtgcaacatagggattagctaagtagatagcatattttgatattctgtgacaatttgttccatggagcggtactaatgcactatcaagggggagaaaaggggtagcctgcccagtgcaggtctggggatatgtttaagaaaggctttctggataagtagtaataaacagtaacaaatgttgctcttgtctaggagcatatttgcactgtttcctgtgcatttgttccttctggtcctcttcatttctttcctttatagttaatttgtggaacacattactcccaagtggtggcacaggctggacacagtaacgagttaaagacatctgtagataaattcccaaaggatgttagtctagacaaatccttattagattgtttagagaaaacctattgctttgagggtaagcagattctattctgatttttgtctcaaaacattttgggggagacttctg

SEQ ID NO: 4350 - DNA, 452 bp, Homo sapiens
  MAP TO AC007949.1; EXPRESSED IN BT474, SIGNAL = 0.64; EXPRESSED IN FETAL LIVER, SIGNAL = 0.64; EXPRESSED IN HELA, SIGNAL = 0.8; EXPRESSED IN ADULT LIVER, SIGNAL = 0.67; EXPRESSED IN PLACENTA, SIGNAL = 0.62; EXPRESSED IN BONE MARROW, SIGNAL = 0.78; EXPRESSED IN HBL100, SIGNAL = 0.7; EXPRESSED IN LUNG, SIGNAL = 0.64; EXPRESSED IN BRAIN, SIGNAL = 0.79; EXPRESSED IN HEART, SIGNAL = 0.96
  unsure 169
  unsure 219
  unsure 396
  unsure 402
tgcttttctggttggaatttctcttaccaaattaatacaatggttagcagacaagtttttagattaatataactgtcattataaagatttaaatgaataacaaagctatttctgctattaatggacacaagaattttttttaccctaattccatctgaatttatttttnatttttgataaagacaaaatgacacactagtagagacctagattgtattncccactttctcttaatgacctgtatgaccttgggcaaataccatgcacgcagactgagtttcttcatctgtacagtgagaatcattctgatacttgtcccagctacattattcgttgttgtgaagatgaagaggttgtacctaaaaaaaaatttggttagaataagtgagtaaaganaaaatngaagaaactatgaagttagacttataatgtctctagtgtgtttgtgactc

SEQ ID NO: 4351 - DNA, 471 bp, Homo sapiens
  MAP TO AC010825.2; EXPRESSED IN BRAIN, SIGNAL = 1.5; EXPRESSED IN HELA, SIGNAL = 1.7; EXPRESSED IN PLACENTA, SIGNAL = 1.6; EXPRESSED IN FETAL LIVER, SIGNAL = 1.3; EXPRESSED IN ADULT LIVER, SIGNAL = 1.6; EXPRESSED IN BT474, SIGNAL = 1.3; EXPRESSED IN BONE MARROW, SIGNAL = 1.1; EXPRESSED IN HEART, SIGNAL =   1; EXPRESSED IN HBL100, SIGNAL = 1.3
gaaggggaggagctcttttgtttcccaagaaaaaccatactcagcatgaatgggatattctactctctaaaatacaaactcaagttgagtataactatgttttaaggcaattctccaaaaaacattataagcaaataatatttgttaagtatatgcaaagtatgcatcattttcacaggtcatctgacttaagagtttcattatggtttctttctcttgttctcttacaattcatatttctttctatcactatctaggtcttctgatgttcactattttccttactttgtattgtctccaggattctcatattccttgagctcaggtgcagcattttgtttttattcatgtaaaccttggcaaaatcgtctatggcatactgcactatgatttgtgaagttgtatatgtattaggcttatcaaacagctgagatatataaaaaaataagagattttaatgatcatgaccca

SEQ ID NO: 4352 - DNA, 455 bp, Homo sapiens
  MAP TO AC011330.4; EXPRESSED IN BRAIN, SIGNAL = 0.99; EXPRESSED IN LUNG, SIGNAL =   1; EXPRESSED IN HEART, SIGNAL = 0.98; EXPRESSED IN BT474, SIGNAL = 0.94; EXPRESSED IN FETAL LIVER, SIGNAL = 1.3; EXPRESSED IN ADULT LIVER, SIGNAL = 1.2
gatcccggacctaaaagagcttaatatctgaagaatcacacttgagatgatggacaagcatcccagcaagtggagttggaatgcctgggggagctgcaggagagacagagaagacagctctgttggcatattgtctttcttcccaccagcctgtgctgtgggatctgctccagagggaaaagagtgtttgggccctgcagattctagtgcaggtaacaggtggagggcacatgggtgggctgggtgacagccatggctggaggtccctgccccgtgaggtgaggccatacccaccatgacctcctattcgcaggcgtacctgcatatgcccccagaaaacctccagcagctggtgctttcagcagagagggaggctgcacagggcttcctgacactcatgctgcaggggaagctgcaggggaagctgcaggtgagcactgagaaaggggagcaag

SEQ ID NO: 4353 - DNA, 406 bp, Homo sapiens
  MAP TO AL022323.7; EXPRESSED IN BT474, SIGNAL = 2.9; EXPRESSED IN FETAL LIVER, SIGNAL = 3.4; EXPRESSED IN BONE MARROW, SIGNAL = 3.1; EXPRESSED IN LUNG, SIGNAL = 3.4; EXPRESSED IN HELA, SIGNAL = 3.4; EXPRESSED IN HEART, SIGNAL = 2.4; EXPRESSED IN ADULT LIVER, SIGNAL = 3.6; EXPRESSED IN BRAIN, SIGNAL = 3.1; EXPRESSED IN PLACENTA, SIGNAL = 2.5; EXPRESSED IN HBL100, SIGNAL = 2.6
cctagaagctgggtgctgtcatcatggggttcctttcccagatagttgaggctcagagaggttgaggcacccacctgaggtcacacagttattaaatggctgaggctgggccactggaacccagagctaccgccctacatgttacctctgatcattaaagtgggggatttctgggggtttaattttcttctttgccctttttggtacagaatggactcttggcataatatattttttcctgtaaatgagaaggctcccagtaaagtccttttcttgtgctctgtgtttcaggtgctgccacgggacctggagaaggaggatgccccccaggagaaggagcgaccgctccagcaggtgtcccctgtggcctcggttccctggagaagccacagcttctgcaaagaca

SEQ ID NO: 4354 - DNA, 440 bp, Homo sapiens
  MAP TO AC011440.4; EXPRESSED IN HEART, SIGNAL = 2.1; EXPRESSED IN BT474, SIGNAL = 1.9; EXPRESSED IN ADULT LIVER, SIGNAL = 3.1; EXPRESSED IN FETAL LIVER, SIGNAL = 1.9; EXPRESSED IN BRAIN, SIGNAL = 1.9; EXPRESSED IN BONE MARROW, SIGNAL = 2.3; EXPRESSED IN LUNG, SIGNAL = 2.4; EXPRESSED IN HBL100, SIGNAL = 1.7; EXPRESSED IN PLACENTA, SIGNAL = 2.7; EXPRESSED IN HELA, SIGNAL = 1.7
cttttgcttggcatttctccttcctgctgtcatgtgaagaaggatgtgtttgcttccccttccaccatgattgtaagtttcctgaggcctccccagtcatgtgaaactgtaagtcagttaaacctcttgctttataaattacccagtcctgggtatttcttcatgtcaggctgagaatggactaatacagtaaattggcaccaggtagtgggatactgctgtaaagatgcctgaaaatgtagaagcacctttggaactgggtaacatacagaggatggaacagtttggagggctcagaagaagagaggaagatggggaaagtttggaacttcctggatacttgttgaatggctttgaccaaaatgctgatactgacatggacaatgaagtccaaactgaggtggtctcagatggagatgaggaacttgttgggaactgga

SEQ ID NO: 4355 - DNA, 406 bp, Homo sapiens
  MAP TO AC012079.2; EXPRESSED IN HBL100, SIGNAL = 1.3; EXPRESSED IN PLACENTA, SIGNAL = 1.3; EXPRESSED IN HELA, SIGNAL = 1.5; EXPRESSED IN HEART, SIGNAL = 1.3; EXPRESSED IN BT474, SIGNAL = 1.5; EXPRESSED IN FETAL LIVER, SIGNAL = 1.7; EXPRESSED IN ADULT LIVER, SIGNAL = 1.7; EXPRESSED IN BRAIN, SIGNAL = 1.5; EXPRESSED IN BONE MARROW, SIGNAL = 1.7; EXPRESSED IN LUNG, SIGNAL = 1.6
tgtgttgcataaacccgaagtttgagtacaagtcctaactgtggtgttaactgatggaataattccaggacattcttcaattagcctcttggagacagtctcctgatctgtgaaatgaggcttctgaagcctgtcctgcatctcacgcaggggtgcaagtgaagattaaatgaatcaggcttcatggaaaatttctaaaaaatacaaagctcttactaaaaattatgagtttattaacatgttatgcgtgtgtttggttatcttaatcttgctttattatgaaatatgatttctcccacaggcttctgaggatgaattcagagccaccagttctagaacaaatgtatctaacacctcaggcaattcagaagtggatgagtattttcaggcagttcttgcagtccaa

SEQ ID NO: 4356 - DNA, 459 bp, Homo sapiens
  MAP TO AC007404.2; EXPRESSED IN BT474, SIGNAL = 0.76; EXPRESSED IN FETAL LIVER, SIGNAL = 0.74; EXPRESSED IN ADULT LIVER, SIGNAL = 1.9; EXPRESSED IN PLACENTA, SIGNAL = 0.98; EXPRESSED IN BONE MARROW, SIGNAL = 0.9; EXPRESSED IN LUNG, SIGNAL = 0.79; EXPRESSED IN BRAIN, SIGNAL = 0.81; EXPRESSED IN HEART, SIGNAL = 0.84
aaaacagaaaacacaatcttaccaacataccacccaaatctttaaaaactctatttcactgtaattatgtgattttaatatcaaataagagtactcaataaaaatcactatgaaaacacacagaaagataaactaatcagtcttatggatatttattaagaatcataataaagaactaaatgactaaggtaatcaacacacataatgatactgattcttacctacggctttcatttgttttccaatagcttggcagatttctttggcagctgcaatctgggctttttcacctagcaaactgcccacagtagctcttaggataaaggaaacacatcgtctggagtacacagcctccacatgtgtttgtgttgcccgaggatgggaaaccagatcaagtacatgggacaggaacgtggcaaagctgcgctccaaccactgaccacccaatgttgtcacaaa

SEQ ID NO: 4357 - DNA, 388 bp, Homo sapiens
  MAP TO AC011456.2; EXPRESSED IN HELA, SIGNAL = 2.8; EXPRESSED IN HEART, SIGNAL = 2.2; EXPRESSED IN LUNG, SIGNAL = 2.2; EXPRESSED IN BRAIN, SIGNAL = 2.3; EXPRESSED IN BONE MARROW, SIGNAL = 2.6; EXPRESSED IN PLACENTA, SIGNAL =   2; EXPRESSED IN HBL100, SIGNAL = 2.1; EXPRESSED IN BT474, SIGNAL = 2.8; EXPRESSED IN ADULT LIVER, SIGNAL =   3; EXPRESSED IN FETAL LIVER, SIGNAL = 2.5
aaacagaatggacaggtgcccaggtggcacatttcagggttttactcaccctattatccaacatgcatcaggtcaaccccacaggcccctgtcttgggagcctcaaccccaccctgaacagcctttgaagataatccatttccttcaaatatctccgtgtgcaccttccttgccctctaagatagcaacacctacctgcagacgtgaatgtgctgagctccacaccctccatccagaaggggatcaccgggatggcagggaaggagtgctgccaggaagttttccaactccagtttctaggtctgtatttaattccggatctatcagctaagcatttagggtgctgccactgaagctctgtgtttacacagctaaatgcctctgctcc

SEQ ID NO: 4358 - DNA, 391 bp, Homo sapiens
  MAP TO AC007721.10; EXPRESSED IN BT474, SIGNAL =   1; EXPRESSED IN PLACENTA, SIGNAL = 0.95; EXPRESSED IN HELA, SIGNAL = 1.4; EXPRESSED IN HEART, SIGNAL = 0.96
tgctcctcatgttcaacgagggagatggcttcagctttgaggagataaaaatggccacggggataggtacgaaaactgcagagtgcatagctccatgagttgttcttaaagcatgtatttgttttaagataagacatagacttggtagcatgattggtttactgttgttgagtctcattcgtttaacgccagcctttgcctgcatttgcttcccattcagaggatagtgaattgcgcagaacgctgcagtccctggcctgtggcaaagcacgtgtgctgattaaaagtcccaaaggaaaggaagtggaagatggagacaagttcatttttaatggagagttcaagcacaagttgtttagaataaagatcaatcaaattcagatgaaggaaa

SEQ ID NO: 4359 - DNA, 472 bp, Homo sapiens
  MAP TO AC005105.2; EXPRESSED IN BONE MARROW, SIGNAL = 0.78; EXPRESSED IN FETAL LIVER, SIGNAL = 0.88; EXPRESSED IN PLACENTA, SIGNAL = 1.1; EXPRESSED IN BT474, SIGNAL = 1.1; EXPRESSED IN LUNG, SIGNAL = 0.95; EXPRESSED IN HELA, SIGNAL = 0.75; EXPRESSED IN ADULT LIVER, SIGNAL =   1; EXPRESSED IN BRAIN, SIGNAL = 0.86; EXPRESSED IN HEART, SIGNAL = 1.2
gagagcaagtgagcgagagcccagccggagggagagccagagctaggcgcaaaagaagggccagcacattacatcatcgcttggcctggaatcaaatgggaaggatatgactcactcaagctagttaagctttggctcaaattctacacacactcattccagagctctcatgttctgcacctcaggagggaattcagcctcagtgatgtccatgaggtttgtttttaattttattttcttttctcctgattttatagattttttttgcccctactgccttctgtttttgagccttcgtcctcctcctcctcctcttcattttctcccccttctccctttctgcccgtctttgtttctcctcttcttccttctcctctttccccagcccctccgctcctcttcttgcccgaagaggcatttcttttcacttcgatcagagtttttgttctagcacagagacctgaatgagttg

SEQ ID NO: 4360 - DNA, 371 bp, Homo sapiens
  MAP TO AC010766.2; EXPRESSED IN LUNG, SIGNAL = 1.6; EXPRESSED IN HELA, SIGNAL = 1.5; EXPRESSED IN PLACENTA, SIGNAL = 1.6; EXPRESSED IN HBL100, SIGNAL = 1.4; EXPRESSED IN HEART, SIGNAL = 1.4; EXPRESSED IN ADULT LIVER, SIGNAL = 1.4; EXPRESSED IN BT474, SIGNAL = 1.4; EXPRESSED IN BRAIN, SIGNAL = 1.4; EXPRESSED IN BONE MARROW, SIGNAL = 1.4; EXPRESSED IN FETAL LIVER, SIGNAL = 1.4
tcactgcccagttagtgtccacagaaccactctgcgatggccgcacatagagaaaaatggcacttccatagaagagggtcaccactatcaagtgggaggtacaggtagagaaggccttctgacggcctgaagcagaggggatgctcaggactgccagcacaatgaggccgtaggacacagcagtgatcagcaaggaagatacaatgacgagggaggccaggacaaagtcagtctcctccagcttcttggtgttggtgcaagccaggcggagcagtgggccactgtcgcagaagaagtgctgtaccacagcaccctgcttacagaaaggaagcaaggccacagccactgtgggaccaagcacagggacgagt

SEQ ID NO: 4361 - DNA, 430 bp, Homo sapiens
  MAP TO AC011589.2; EXPRESSED IN PLACENTA, SIGNAL = 4.4; EXPRESSED IN HELA, SIGNAL = 4.7; EXPRESSED IN ADULT LIVER, SIGNAL = 5.2; EXPRESSED IN BRAIN, SIGNAL = 4.3; EXPRESSED IN BONE MARROW, SIGNAL = 4.6; EXPRESSED IN HEART, SIGNAL =   4; EXPRESSED IN HBL100, SIGNAL = 3.9; EXPRESSED IN BT474, SIGNAL = 4.4; EXPRESSED IN FETAL LIVER, SIGNAL = 4.7; EXPRESSED IN LUNG, SIGNAL = 4.8
ctctgcaacacctctccctccctccactctgctaactcctatttggctttcaggtccccacttgtccgtcacctcctctgagaagccctcctgtccctcaatactgaccctgcccctgttccttgatggcgttgaagtgtacgtaccctaagctcagcacttgcacaccctgtaactgccttttactgtttgactttctcaagactgtaagctcttcaagggccggggataaccctctcattctccattttctccatgctgtctagcatgatacctagcatagcagaggatgcctgacaaatattgtttaaacatacatgaattgagttggcaaatgcaagaagaagggtgatgacaatcgtgagtgggcaggtcagggacacagtgccctacagagaaggtagaacttggggtcagactggaaggatca

SEQ ID NO: 4362 - DNA, 499 bp, Homo sapiens
  MAP TO AC010896.1; EXPRESSED IN ADULT LIVER, SIGNAL =   1; EXPRESSED IN HELA, SIGNAL = 1.1; EXPRESSED IN HEART, SIGNAL = 0.85
gaaaaggacatacaaacggctcttaaacactagaaaagctcattcatagtaagagaaaggcaaattaaaactgtacagacacatcatttcttacctatcagattggcaaaaagtcaaacgtttgacaatatactatgttggtaaaactgtaaattaacaagcactttcatacactgctggtaggaacagaaaatcacacaacccatatgtaggggaatatggtaattttaagcaaaacagcacacatttgtcctctactagcaattctacttctagggacctcttcctcaacaccctggcaaaaaatatgaaaagactgatgtacaagactattcactgcagcaatttgtacaacagcaaaaactggaactaacccaaatgtctattgatagggggatggttggacacactacggtacatccacacaatgaagtgccaggcagctgtaagaggactgaggaggctccttatagaccactgtggagtgatcgctgggata

SEQ ID NO: 4363 - DNA, 423 bp, Homo sapiens
  MAP TO AC010787.2; EXPRESSED IN BRAIN, SIGNAL = 1.2; EXPRESSED IN LUNG, SIGNAL = 1.3; EXPRESSED IN HELA, SIGNAL = 1.8; EXPRESSED IN PLACENTA, SIGNAL = 1.7; EXPRESSED IN ADULT LIVER, SIGNAL = 1.5; EXPRESSED IN FETAL LIVER, SIGNAL = 1.2; EXPRESSED IN BT474, SIGNAL = 1.4; EXPRESSED IN BONE MARROW, SIGNAL = 1.6; EXPRESSED IN HEART, SIGNAL = 1.1; EXPRESSED IN HBL100, SIGNAL = 1.4
tgcctcccttgtcagttaggtcagggaccttatctgatctatttcatgtccccaggatgaatcctaacacataacagatgtcagtaaacattgtggaactaactggcctctgttttgcctcttcttacccagcacagatggccaggaacatagtaggtgccattttatgcttagtaagtaggtagatgagtgagtgaattaaaatgccactagaaaacaggtgagattggtggctcatgctgtcgttgctaatggaagggtttgtgttgctgtctccccagtcctgatcacccgagaggatgacttcaacaacaggctgaacaaccgcgccagtttcaagggctgcacggccttgcactatgctgttcttgctgatgactaccgcactgtcaaggagctgcttgatggaggtgagagcagagg

SEQ ID NO: 4364 - DNA, 490 bp, Homo sapiens
  MAP TO AC009189.1; EXPRESSED IN BRAIN, SIGNAL = 0.91; EXPRESSED IN LUNG, SIGNAL = 1.5; EXPRESSED IN HEART, SIGNAL = 0.94
gttattgagtgcttactgtatgtcaagcatgacaataagtattataattaccctgtttattcatcagtatgatcaaatgtggttattattcccatgtgacccatgaggaaactaaaggcctaaggtgatagagctagtgatagaccacctactcccaaagtctgagctcttagctcaagaacactctgctctgatctgtagggtctcatttgtctctgagactctttaatgtgtaaatatatttgataagttttctcttctaatgtaattccaggtattccttccaagatgaggaagacatgttcatggtggtggacctcctgctgggtggagacctgcgttatcacctgcaacagaacgtccacttcaaggaagaaacagtgaagctcttcatctgtgagctggtcatggccctggactacctgcagaaccagcgcatcattcacaggtcagtcaagtccaaggagatggccatgaacgtaacgcaagg

SEQ ID NO: 4365 - DNA, 469 bp, Homo sapiens
  MAP TO AC004985.2; EXPRESSED IN BONE MARROW, SIGNAL = 2.4; EXPRESSED IN LUNG, SIGNAL = 1.1; EXPRESSED IN PLACENTA, SIGNAL = 1.1; EXPRESSED IN BT474, SIGNAL = 1.1; EXPRESSED IN HBL100, SIGNAL = 0.94; EXPRESSED IN FETAL LIVER, SIGNAL = 1.1; EXPRESSED IN HELA, SIGNAL = 0.9; EXPRESSED IN ADULT LIVER, SIGNAL = 0.86; EXPRESSED IN BRAIN, SIGNAL = 0.94; EXPRESSED IN HEART, SIGNAL = 1.2
tgcattgtctctgactccctcctgtgatttctttgtagcactaatcacaagtgctaatggaagagtgatctgatggctttctgtttaatatctgtatccctgtgctcctagacagtaggctctttgaagacagtcaccatagtccaactttccaggagacctgaaggaaggggctaaatgtggggctttgggtcctgggtcagcacaagaaaggtggtgggtgaggactcacttggattctcatttgtccaggctctgtcctggagggagcagaagggaaggagcaagggaaaacctgcccaggccactagccccgctgggcctacgaaggcagtgtgggtgtcagtgtgtaacaactggctctccaggatgggggcagggaagccatctgccaatttctgtggtgtaaatgctcctgacatggctgatttccagacaccagtgatgttcctgaaagtggagttgggaa

SEQ ID NO: 4366 - DNA, 423 bp, Homo sapiens
  MAP TO AC009966.3; EXPRESSED IN HELA, SIGNAL = 2.1; EXPRESSED IN PLACENTA, SIGNAL = 2.2; EXPRESSED IN HBL100, SIGNAL = 2.1; EXPRESSED IN HEART, SIGNAL = 1.9; EXPRESSED IN FETAL LIVER, SIGNAL = 2.1; EXPRESSED IN ADULT LIVER, SIGNAL = 2.7; EXPRESSED IN BT474, SIGNAL = 2.2; EXPRESSED IN BRAIN, SIGNAL = 1.8; EXPRESSED IN BONE MARROW, SIGNAL = 1.8; EXPRESSED IN LUNG, SIGNAL =   2
aataaacatggccagatgggagacaaagaatggtctcaaccttgccctgatgcctgtgggggcctgggatgggaggggggcagcaggagcatggaggcagcgcaggcaggaagcaaatgcaagccacacagtcactttatctctttatgtttctttctctcagctccgagggtggtaataaaagatggctgcacggctctccccgggaaactgaacgggagccaaaccatcatgtggtgaacaaatgctgtgatcgctcaactgcagagctgctgctgcaccgtattaaaaaggtgacagcctctcctctgacccttgaaccatggaaatgggcagccaccagcccacccactcagaaagccccaatgctctgtcaccagcagaggcccaacacccactccgacgtcagaaaaagaaggtggc

SEQ ID NO: 4367 - DNA, 457 bp, Homo sapiens
  MAP TO AC006333.3; EXPRESSED IN HEART, SIGNAL = 0.91; EXPRESSED IN PLACENTA, SIGNAL = 0.72
ttttgttgttgttgttttaattaatggtaaaatatatgatcataattttcatctgttcaatggcaacattttccatgtgtgtgtgattcatacgttgaaaagttttgcttttttctatatttttcatagtgtctttatatttgtgccataggaatttcatgtttatttctcactttaaaataagttggattttccttggccaactatgtctaagtgataacaaagggactgcttcccatagctgtcactcatctatgggattctctgtgtagctccacatcctcggcttctctgagccaaattagatccaagaagacttgtaccaccaccttgctctctttagttcctgcacggaatgctgcagtaaaagaaaacagcttttactacacacttcactgtgaagatgagttcttcacctttagaaagtatatttttgtggcatgtctaagatctgctg

SEQ ID NO: 4368 - DNA, 394 bp, Homo sapiens
  MAP TO AL022313.1; EXPRESSED IN PLACENTA, SIGNAL = 2.3; EXPRESSED IN HEART, SIGNAL = 1.9; EXPRESSED IN BT474, SIGNAL = 2.1; EXPRESSED IN BONE MARROW, SIGNAL = 2.5; EXPRESSED IN BRAIN, SIGNAL = 1.8; EXPRESSED IN LUNG, SIGNAL = 2.3; EXPRESSED IN HELA, SIGNAL = 2.3; EXPRESSED IN HBL100, SIGNAL =   2; EXPRESSED IN ADULT LIVER, SIGNAL =   2; EXPRESSED IN FETAL LIVER, SIGNAL = 2.3
tagagagagccagggtggtgcttaagcttctcacacagaggccactgaacacagaaaggtctggtctatcatcagggccctacacagggttgcagccatctcggatgctggcaaggtctgcactggccaatgtggttcatgtaacaggcatctaccacctgcagcatttgccactgaaaccatgacctatctgggctaaaatggctcatgaaacaatgtttgtgcatttgagaaatgcctcgagcatgtacagcttccgctgcaggtccccctcgctcttggtgtggtcgccattgatggcaatgaacaggcattctccaaacaggtgaaggacatacagggagttgctgttttccatggagaagcaggtgtaggtgtccgagagcttctccag

SEQ ID NO: 4369 - DNA, 441 bp, Homo sapiens
  MAP TO AC004909.2; EXPRESSED IN BT474, SIGNAL = 0.99; EXPRESSED IN BONE MARROW, SIGNAL = 0.83; EXPRESSED IN FETAL LIVER, SIGNAL = 0.69; EXPRESSED IN LUNG, SIGNAL = 0.87; EXPRESSED IN HELA, SIGNAL = 0.59; EXPRESSED IN PLACENTA, SIGNAL = 0.8; EXPRESSED IN ADULT LIVER, SIGNAL = 0.76; EXPRESSED IN HEART, SIGNAL = 0.89
taaaaggcgtaagctggctcctgcttgtgtatttttatctgcctataagactgtccatttttgttggtctgaattattggacatatgtggagctcataaaattgtcttccatgccttgatgtttgcatatgtactatatttatttgctctgttttagctctgaacccacagaaaaaaaacaggccttccttacctatactaattgtcctcatgtttcccccttaaccatgttcaagccggcttgccatatctatccaatataagaagaatcctgatcttccactcttgttcatctctggacctgtgctaggaaccacccgatgttaaattaaataaagaattaaaagcaacacactttctagtacatgttgttcatatcatcatggatgtaaaagaaatacaacattttataaaggtaattcagcccatatttattactca

SEQ ID NO: 4370 - DNA, 402 bp, Homo sapiens
  MAP TO AC009973.3; EXPRESSED IN LUNG, SIGNAL = 1.8; EXPRESSED IN HELA, SIGNAL = 2.6; EXPRESSED IN PLACENTA, SIGNAL = 2.1; EXPRESSED IN HBL100, SIGNAL =   2; EXPRESSED IN HEART, SIGNAL = 1.9; EXPRESSED IN ADULT LIVER, SIGNAL = 2.7; EXPRESSED IN BT474, SIGNAL = 1.8; EXPRESSED IN BRAIN, SIGNAL = 1.9; EXPRESSED IN BONE MARROW, SIGNAL = 2.2; EXPRESSED IN FETAL LIVER, SIGNAL = 2.2
aaatggcaaccaaatccaactaatcaaaatatcaaactggtaaagtaaaacaaaacagaacaagaagtttatacgatagtaacacctagcatacttccctccctctgcccatcaaatctgtaaaagacagaaacgcattttaaagctaagaagtaccaatctacctgcagctccttggggagcttcatctgtccgagcagctgaagaatttactgcctcctggttgctttcagggtctgccattttctcctgtcgacgagcttcagctgctcctcttttgcccaggccagagcctcgccgactacaacagaaaaatgtcatcatgggcagcattaccagtgaaccaggagcaatgtatacacaacacaaagctcaaattcatggagcacaaagccagtttct

SEQ ID NO: 4371 - DNA, 376 bp, Homo sapiens
  MAP TO AC011308.2; EXPRESSED IN HELA, SIGNAL =   2; EXPRESSED IN ADULT LIVER, SIGNAL = 2.2; EXPRESSED IN BRAIN, SIGNAL = 1.6; EXPRESSED IN LUNG, SIGNAL = 2.3; EXPRESSED IN BONE MARROW, SIGNAL = 2.1; EXPRESSED IN PLACENTA, SIGNAL = 1.9; EXPRESSED IN HEART, SIGNAL = 1.6; EXPRESSED IN HBL100, SIGNAL = 2.1; EXPRESSED IN BT474, SIGNAL = 1.8; EXPRESSED IN FETAL LIVER, SIGNAL = 2.1
gccagtaaatgggtatgtttccatagcagataactgtctcatgttttggtatggtttggttttgcttactagcgtctaaacccctcctcctatcttgtaagctttgcagaaaggcattctaccatcccataggagaggaagaacggtcccctgggatacagaactttaacctggctttgccagtccgacgctctcaacagtcttcgatctagaggtagtgacccaaagaacctctaatccagaggtagatgcaatgatagcagtaccatcccatttctaggggcagcagcaatagagatgtcagcagtggtggcacagcaagacgtgacgtgatgagcaatcaagtcttcggtgcactggttgtgggtcaggattt

SEQ ID NO: 4372 - DNA, 417 bp, Homo sapiens
  MAP TO AC011421.2; EXPRESSED IN PLACENTA, SIGNAL = 8.4; EXPRESSED IN HBL100, SIGNAL =   8; EXPRESSED IN HELA, SIGNAL = 9.3; EXPRESSED IN HEART, SIGNAL = 7.4; EXPRESSED IN ADULT LIVER, SIGNAL = 9.4; EXPRESSED IN FETAL LIVER, SIGNAL = 8.9; EXPRESSED IN BONE MARROW, SIGNAL = 7.8; EXPRESSED IN BT474, SIGNAL = 7.4; EXPRESSED IN BRAIN, SIGNAL = 7.5; EXPRESSED IN LUNG, SIGNAL = 9.9
atatgtggaaggggaggaggattgatttacgaagggaaaagtgtaatcattatttggatatgaaagtatcacattcataaaggctatgtgctaaagttcacaagttccttaaattcacaaactctttactatacatagttttccccattagatatttatataatggtgagatataaaccacacaaaacaaagacatgctaaggtgcagataccggccccttagctaggatcaattacggtataaatgattcacagcctaacactagcctcagagctcatattatccttaaataaattatgacggactatatggcacgagccatgaggacagagatggtcatcaatgctctgaccactaaccaaattcaaggtgtttgagtcttgttgaaagctgagattggacagtgtagctcctca

SEQ ID NO: 4373 - DNA, 476 bp, Homo sapiens
  MAP TO AC006052.5; EXPRESSED IN HEART, SIGNAL = 0.83
aaagtgcccattgccttgtaaataaagtcatatatctctccattatgctcttagtcattcacttgaaaataattgaggatatgcacagagcttctgcccatcaaaggtggcaacttgcatggtccaacagatgggttttttgtcttaacccttcattgtctcttatctttgaattgtgttaatagatctgattaagcaaaaagaaaaaaaatgaagtaaatattttccatcattaaaattgtttttgcttgctttgcttgtcgcatgggaaggctttggatctgttttttttcccctgtgtctctcagtcaagatgcgatgaacaatgatgttggtgaacctcaccattgcactgctgaccggagtcagcctggcttcatcttccctctcaacttcagagtgagtgacagagctggagggaatggcattgagagtctggctgctcttccactaactggaaggaaacagtatgcaga

SEQ ID NO: 4374 - DNA, 364 bp, Homo sapiens
  MAP TO AL022326.1; EXPRESSED IN HBL100, SIGNAL =   2; EXPRESSED IN PLACENTA, SIGNAL =   2; EXPRESSED IN FETAL LIVER, SIGNAL = 1.7; EXPRESSED IN BONE MARROW, SIGNAL = 2.1; EXPRESSED IN BRAIN, SIGNAL = 1.9; EXPRESSED IN LUNG, SIGNAL = 1.9; EXPRESSED IN HELA, SIGNAL =   2; EXPRESSED IN HEART, SIGNAL = 1.7; EXPRESSED IN ADULT LIVER, SIGNAL = 1.8; EXPRESSED IN BT474, SIGNAL = 1.8
catgccacaacatgatgctcactgaaagaagccagtcacaaaaggctacacattgtaggattccatttatacgaaatgtccagaacagagaactctctagagacagaaagcagaggagcgttccaggggctggaggaggggaacagggagtggctgctgatgggtgttgcgtttctttgcgggatgatgtaaatgttctagaattagattgtggtcatggttgtacaactctgtaaatatactcaaaaccactgactcatatactttaagtgggtaaattttagggtatgtaaattatctcccaagaaagtgctgtaaaaaatgggctcgtccaagtccaggctggacagcctgcagttcaagc

SEQ ID NO: 4375 - DNA, 440 bp, Homo sapiens
  MAP TO AC007437.16; EXPRESSED IN LUNG, SIGNAL = 0.72; EXPRESSED IN ADULT LIVER, SIGNAL = 0.74; EXPRESSED IN HEART, SIGNAL = 0.81
tgtaactcaggacttgttaggacttcttctatatctatctgtctgtctatgttcatctatctatctctattatctatctgtctgtctatctatctatctatccatctatctatctatctatctatctatctatctatctatctatctatctactctatctggagagtagttgagcagttacagataatgctttttgtaacacaatatcaatcttgctgtattttatcagtaattgctgttcatttaatgcctcttccacagggatgtagaagaactcatagaagcaactatgaatccaggtaggattagtgttactgttggatggtatctatcttccatgaagataactttgttgcctcatggtggaaagttctatctgtgtctccaaaaacattatcagcagtttaagctaaatattcaggaccattctctcgtcctca

SEQ ID NO: 4376 - DNA, 475 bp, Homo sapiens
  MAP TO AC006374.2; EXPRESSED IN BT474, SIGNAL = 0.86; EXPRESSED IN BONE MARROW, SIGNAL = 0.67; EXPRESSED IN FETAL LIVER, SIGNAL = 0.68; EXPRESSED IN LUNG, SIGNAL = 0.69; EXPRESSED IN PLACENTA, SIGNAL = 0.8; EXPRESSED IN ADULT LIVER, SIGNAL = 0.71; EXPRESSED IN HEART, SIGNAL = 0.9
tccttaaagaaacaaaagaaataaagcaaagtatatgttaagaagttccaatatgcgtaccggcacacttcacagcagaaaccttagaggccaggaggaagaaaagctgaaagcttatcttcaaagatatggaacaaaacaagaatgcccactctcactacttctattcaacatagcactagagtgcaagtcaggcaattaggcaagagaaaaaaataaaaggcatccaattggagaaaaaggaatttaaattgtccctattaaattgtcaaagtgctgaggaaaaaaaaaaaaaaacactttaaaccaagaatgctgcacccagccaaactggtcttaataaatgaagatgagataaagacttttccaggcaaaccaaaactgagggagtttattaccaccaacctgattgaaatgaaattctgaagggagttcttcaaattgaaagaaaggatgtgagtgagtaacatgaaaa

SEQ ID NO: 4377 - DNA, 386 bp, Homo sapiens
  MAP TO AC011451.2; EXPRESSED IN LUNG, SIGNAL = 5.3; EXPRESSED IN PLACENTA, SIGNAL = 4.9; EXPRESSED IN HELA, SIGNAL = 5.3; EXPRESSED IN ADULT LIVER, SIGNAL = 5.9; EXPRESSED IN BRAIN, SIGNAL =   4; EXPRESSED IN BONE MARROW, SIGNAL = 4.4; EXPRESSED IN HEART, SIGNAL = 3.8; EXPRESSED IN HBL100, SIGNAL = 4.9; EXPRESSED IN BT474, SIGNAL = 3.9; EXPRESSED IN FETAL LIVER, SIGNAL = 5.8
agagagaccttgcctgctccgctcgcgtccgccggggccgcgcgggtcctcctggcgccgccaggttcaaaaagccactcgagttgtcactgcgacggccctgggccaggagccgtttcgggatctgtcgtaagggcgcttcctcacgatttttgcaaacacggtgattgccgcttcaaactcttccaaagcaattctttgtgacttttttttttccagaaacaacgagttttcgtcgttcgaatcaggttgactggtccttcatccccccaatctcccgtacctggcgagtccagctcgtcgcggtgagtactggggtgaaagttggtttcgggggcttcttcctcctgttttatctgagaatttgtttttctctttgcgcatcc

SEQ ID NO: 4378 - DNA, 423 bp, Homo sapiens
  MAP TO AC010970.2; EXPRESSED IN FETAL LIVER, SIGNAL = 5.7; EXPRESSED IN BRAIN, SIGNAL =   5; EXPRESSED IN LUNG, SIGNAL = 5.9; EXPRESSED IN HBL100, SIGNAL = 4.5; EXPRESSED IN HELA, SIGNAL =   6; EXPRESSED IN PLACENTA, SIGNAL = 6.4; EXPRESSED IN HEART, SIGNAL = 4.1; EXPRESSED IN BT474, SIGNAL = 4.7; EXPRESSED IN ADULT LIVER, SIGNAL = 7.6; EXPRESSED IN BONE MARROW, SIGNAL = 4.1
gcagaaggtggagtaggcacaggatggaaaaatattacgtttttcacttccggattgtatgactgaaggtaatttgtttttctttctgcgtatctctagtttctgatttttctacaacaaactatttaatttcaaatagatacattttaaaattggcaaaacagaagtaaaaattaggtggaaaatgatactaacttggtttcaaaggcccaccaaggaggccatctgttaagagtaactcatatgcaaaataagccacatgggaacagagacacgtatcaagctcacaggcaggcgcgggcttaccttcagcccagctgctacatgcggtggagtgtccacaatttgccggtcatctgaggagccacctcgcttcaggtcaatgactggggcgaggactgtactttgtttcgtcctttggct

SEQ ID NO: 4379 - DNA, 441 bp, Homo sapiens
  MAP TO AC007430.11; EXPRESSED IN LUNG, SIGNAL = 0.75; EXPRESSED IN BRAIN, SIGNAL = 0.94; EXPRESSED IN HEART, SIGNAL = 1.3
ctggcatatgtcactgtggagggcagttgtgagtccctcctgggctgtgagggtggggcttcatagggagctgcaagccttgagcagtccctgtagcgatccctggagcctgtgttttgggactccagttgaaatattgggtgcatttgaagatgtcccagatcatcttagaccaccggccatttttctcaggacatggcagagatttgccaaggttgggagtcacccaggacctagaggatgtggttgagaagggacctgctttcttactcatttggccatgagggaagcagagtccaccagggtcttcagtattacggaggaactgaagctgctccggtcttttaaacacatccccgtagactagctgggtggtggagcaggcatttggctgtagatacacatggtttggtatgcggaagtaagacctcctggctggac

SEQ ID NO: 4380 - DNA, 394 bp, Homo sapiens
  MAP TO AC011739.2; EXPRESSED IN HEART, SIGNAL = 3.2; EXPRESSED IN BRAIN, SIGNAL = 4.1; EXPRESSED IN LUNG, SIGNAL = 3.9; EXPRESSED IN HELA, SIGNAL = 4.2; EXPRESSED IN HBL100, SIGNAL = 3.6; EXPRESSED IN PLACENTA, SIGNAL = 4.8; EXPRESSED IN BT474, SIGNAL =   4; EXPRESSED IN ADULT LIVER, SIGNAL = 4.9; EXPRESSED IN FETAL LIVER, SIGNAL = 4.3; EXPRESSED IN BONE MARROW, SIGNAL = 3.6
acatctggaagagcctcacctacttggtatgctggctctaattccacccctacagacctggctgctcagctgcagtccagcctttactctctctgtgatcctgcccagctctgaaatgatgtgactgcccatttttctccaaggggagaggcacagcctcctctggatgcaagctgagggaatgggagcttcccgctttcagagcgctccagggcacaccactcactttgcccataatctgttaacacaggtaaaccccaaggatttggaccccaaatatgcctacatccaggtgacctatgtgacgccgttctttgaggaaaaggaaatcgaagaccggaagacagatttcgaaatgcaccacaacatcaaccgctttgtcttcgagacaccc

SEQ ID NO: 4381 - DNA, 435 bp, Homo sapiens
  MAP TO AC011493.2; EXPRESSED IN FETAL LIVER, SIGNAL = 8.2; EXPRESSED IN BT474, SIGNAL = 2.1; EXPRESSED IN ADULT LIVER, SIGNAL = 7.1; EXPRESSED IN BRAIN, SIGNAL = 3.4; EXPRESSED IN LUNG, SIGNAL =   7; EXPRESSED IN BONE MARROW, SIGNAL = 6.1; EXPRESSED IN PLACENTA, SIGNAL = 8.3; EXPRESSED IN HEART, SIGNAL =   4; EXPRESSED IN HELA, SIGNAL = 5.6; EXPRESSED IN HBL100, SIGNAL = 4.5
ttttcctggtggtcatcctcaatatctgaccttgagtaaatgtatttcagattacattttaacctttttgattattttaagttgactgagggctggcctgcaacattctcctgggtgtaaatactcaaaccataggttaactgctcagtagggaacactaatcaacagcaggacctagcacaggtcaaagacacacgcagtgggaaggtttttggggcctggctcctaattgcaaggacagttgcacagggggtctctgaatgcttagacagcctggcctttcctgacccaatgcccctcaccagctttttgaagcacatcttgaccttttgtctttctgttccctgggatgaaaactcatcttcagtgctgtctacaacaaaagagaaacatcatgttactaaaacctcaggaacagagattgcagattgggct

SEQ ID NO: 4382 - DNA, 379 bp, Homo sapiens
  MAP TO AC012122.1; EXPRESSED IN LUNG, SIGNAL = 2.1; EXPRESSED IN PLACENTA, SIGNAL = 2.4; EXPRESSED IN HELA, SIGNAL = 1.6; EXPRESSED IN ADULT LIVER, SIGNAL = 1.8; EXPRESSED IN BRAIN, SIGNAL = 2.1; EXPRESSED IN BONE MARROW, SIGNAL = 1.6; EXPRESSED IN HEART, SIGNAL = 1.6; EXPRESSED IN HBL100, SIGNAL = 1.5; EXPRESSED IN BT474, SIGNAL = 1.7; EXPRESSED IN FETAL LIVER, SIGNAL = 1.4
ctcactgcagaagtccctccaggtcccttttcaactgagttgtgggggacttgcttagtcctcacgcccagggtcaggggaggggtgcagagtctgcaccctaaatccgctagggccagagggaggtctcccaggtgacctctgtcctctccagtgacatgagtcctcccagatggcctcagccctctcaggtgacatgcttccatggtgactctggcccttgcaggaggtgggctagcacagggacatgagctgcctaactgccatcctcctcctgtatctgccagaggaagacaccttctgggcactggatcagctgatggctgaggagaggcactccctgcagggtaggcggacagctacccccagacctcacaca

SEQ ID NO: 4383 - DNA, 386 bp, Homo sapiens
  MAP TO AC011592.2; EXPRESSED IN BT474, SIGNAL = 1.3; EXPRESSED IN FETAL LIVER, SIGNAL = 1.6; EXPRESSED IN PLACENTA, SIGNAL = 1.8; EXPRESSED IN HELA, SIGNAL = 1.8; EXPRESSED IN ADULT LIVER, SIGNAL = 2.1; EXPRESSED IN BRAIN, SIGNAL = 1.3; EXPRESSED IN LUNG, SIGNAL = 1.8; EXPRESSED IN BONE MARROW, SIGNAL = 1.5; EXPRESSED IN HEART, SIGNAL = 1.8; EXPRESSED IN HBL100, SIGNAL = 1.8
ttcaagttggtgtgtttccaactatgttcttttattatcactttagtctcatttacgttttagagacctactactgatgatccttggtaattatgtacaattgatgagaaagatatgcaagcagtcagtcattcaggtcagagatataaaaacctcacttccaaaacatcactgtgggcttcctctttatttcacctttgtgtttcttctgcctttcatttcttacagcagttaataccactgttgaaactagcattttaaatatagatgaccctggaattatgagagcactagcatgtgcagtttatgaatgccaatggcactgcatccgagctgcctgccggcccctatttcttgtggatgcctcagcagatccagtgcaggta

SEQ ID NO: 4384 - DNA, 459 bp, Homo sapiens
  MAP TO AC011700.3; EXPRESSED IN HBL100, SIGNAL =   1; EXPRESSED IN HELA, SIGNAL = 1.2; EXPRESSED IN HEART, SIGNAL =   1; EXPRESSED IN ADULT LIVER, SIGNAL = 1.2; EXPRESSED IN FETAL LIVER, SIGNAL = 1.2; EXPRESSED IN PLACENTA, SIGNAL = 0.98; EXPRESSED IN BT474, SIGNAL = 0.94; EXPRESSED IN BONE MARROW, SIGNAL = 1.2; EXPRESSED IN BRAIN, SIGNAL = 1.1; EXPRESSED IN LUNG, SIGNAL = 0.99
ccactttcattttaaaccgaattacatgatgtctatcacatgaagtgttagggacttttagaacttagatctgtatatcttagagaccatggactcttaagtcaacaaacaagaacttcggaggattcccgctcagaaggttcccagggtcctgctaaactctggtccaccaggcaggtttcaatctctcctgcctggcctttgaaaacaggaaagagaaggaggacctggtttgtcctgtggctccaaactagcaggggaaggtgatttgtgtaggtggccaggaacagggatccgtggtcgatgaggtggaagtgtctgtgtccagcccgtcacaggcacgatatcaggacacaatcactctgctcactccatggaatggcgtcagcgtacaggtgacaggagatacctatgtattcgacaaggatgatgatgtaatggaggtgctagagagggcta

SEQ ID NO: 4385 - DNA, 491 bp, Homo sapiens
  MAP TO AC007603.1; EXPRESSED IN BONE MARROW, SIGNAL = 0.67; EXPRESSED IN FETAL LIVER, SIGNAL = 0.59; EXPRESSED IN PLACENTA, SIGNAL = 0.66; EXPRESSED IN HEART, SIGNAL = 0.87
tttggacactgatgtgtcggggggtgatgtctggcaccacagcagccatttcttcatcatgaggagacaaatccgagggcaccagccaatgagttgagcaggacagagcataaagacagaaggcagctcgatctctgctgacagtactgagctgctcagctaagttctctgcagccacactcctccacacttctcatcctaggagatctcacagcccctcatgcttgagcttttctgaacttggattgcacgtcttgcagctcgaagcatcccaggtgatacaatcctgtgtcagccagccagttccaccaaaattgaatttctgacctgactgcttgctcttcctctttccagaagaccctgcaggtttctctgcaccgctccctgccaagaggagctccaactatcagagatgcaaccctctccccaggggaatttcacaacctcagggtgtgagggggaacacctggccagagccagagcagtgacat

SEQ ID NO: 4386 - DNA, 390 bp, Homo sapiens
  MAP TO AF002992.1; EXPRESSED IN BT474, SIGNAL = 2.1; EXPRESSED IN BONE MARROW, SIGNAL = 1.9; EXPRESSED IN PLACENTA, SIGNAL = 2.8; EXPRESSED IN HELA, SIGNAL = 2.2; EXPRESSED IN ADULT LIVER, SIGNAL =   2; EXPRESSED IN FETAL LIVER, SIGNAL = 2.2; EXPRESSED IN BRAIN, SIGNAL = 2.5; EXPRESSED IN LUNG, SIGNAL = 2.6; EXPRESSED IN HEART, SIGNAL = 2.1; EXPRESSED IN HBL100, SIGNAL = 2.1
ctgaccatttatcccctcccttcggtgaatccgaggcagagggtctctgtcttctgtttagcctggaaacaaggaagcccccagtgcacagagatggggaaccctaccaccagagggcgcatgaacctcaggaaagggtggtgggctccactctgcgaaccctccacccagcagaggactgagcagggccggttgaggcagttaggtggctgccccccggggccttgcagagctattggacaaggtctctttcccattgtgccccactgtggtccctttgaaggccctcagaggttcctgggtgtcaaggccaatgcccagtacaagtttcttcatgctaggtacccagactctgctggagactggggaaggagagaatgtcagggtgga

SEQ ID NO: 4387 - DNA, 388 bp, Homo sapiens
  MAP TO AC012444.1; EXPRESSED IN HBL100, SIGNAL = 7.1; EXPRESSED IN HEART, SIGNAL = 7.3; EXPRESSED IN BONE MARROW, SIGNAL = 6.1; EXPRESSED IN PLACENTA, SIGNAL =  10; EXPRESSED IN BT474, SIGNAL = 6.9; EXPRESSED IN ADULT LIVER, SIGNAL =  11; EXPRESSED IN FETAL LIVER, SIGNAL = 8.9; EXPRESSED IN BRAIN, SIGNAL = 7.8; EXPRESSED IN LUNG, SIGNAL = 9.9; EXPRESSED IN HELA, SIGNAL =   9
gacctctgggaagaagggagactgctgtcaatattttgtttcaaggatgtggaactatgctccttcccacagcctagcagagctgaaataaactctataagcagtagaacttcaaagcaaaaattaattcagagatttagatagtggctcacaagatggaacttcctcacctttgcccaccaactctagccagatgctggggtctccttctcctccagcctgtcttatgtagtggctgctacctaatcattcctcatcctcttgctcctccagtgacaccaggagcacttgtcaacatgtctgccctgctcaaggttgagatggaacacagtaggaagggctcagaggcgctgaacatgtcctctcctgcctcctgctctgtcccagt

SEQ ID NO: 4388 - DNA, 489 bp, Homo sapiens
  MAP TO AC007462.2; EXPRESSED IN HEART, SIGNAL = 0.78; EXPRESSED IN ADULT LIVER, SIGNAL = 0.79
tgaaaaatttaaataaagacagcatcaatattattgaatttcccttttgcctcaggctccagtacagctcaggataccactgttattgatcttgtctttatttaaaattttgatatgttattcatcatgaacaactttttatttttaaaatattaattttgatttttaaggtattgatttaaaatgttatttatcttactcactgactttttggtgtcctcttaaatattgcccctgagccagtgcctcaaactagtcctggccaatacctactttaaaaaggtccgataggcagacacgtaattcgagtagaggcagcgctgcttcttgaagttggcttgattcattattaatgcataaatcctatgactcatctgcaggactgtaaatccaaagacaagtaaacaatattgagtatatgacgccattatgggttctgtgggtgctgtaatttactgaggttattcagcttccaagaggctaatcaca

SEQ ID NO: 4389 - DNA, 467 bp, Homo sapiens
  MAP TO AC007952.1; EXPRESSED IN ADULT LIVER, SIGNAL = 0.75; EXPRESSED IN HEART, SIGNAL = 0.84; EXPRESSED IN PLACENTA, SIGNAL = 0.74; EXPRESSED IN BONE MARROW, SIGNAL = 0.89; EXPRESSED IN HBL100, SIGNAL = 0.74; EXPRESSED IN FETAL LIVER, SIGNAL = 0.66; EXPRESSED IN LUNG, SIGNAL = 0.77; EXPRESSED IN HELA, SIGNAL = 0.73
  unsure 63
  unsure 101
  unsure 104
  unsure 113
  unsure 159
  unsure 243
  unsure 268
  unsure 270
  unsure 287
  unsure 288
  unsure 289
  unsure 348
  unsure 390
  unsure 399
agcagggttggaggttcccggagtctcccagctggtaagggcggtgtcaggactggaaccccnagccaggctgactcagacatccctggggcctgagcccnagncagggcagnctgtgactcaagtttgcaggaagaggaggaggagggtggggtaaantgggtgcttgacggaagccacaacctctattccctcagaaatggaagtgcttggtgaggtttggtgtgtccgagccgaagagcnagccaatgacaggcctggggatcgntnctggcacagcccacttnnngacaaggccttggaaacttggtctctgcagcagcaaccggatttcagcctgggcctcgngacacctcggcctgggtacggatgcgacttggatgcagtccnttccctggncagtggaggggatgcccaggctggcacaggagtctcgggtcctctccggctctaccccaatctgctgt

SEQ ID NO: 4390 - DNA, 421 bp, Homo sapiens
  MAP TO AC011299.1; EXPRESSED IN ADULT LIVER, SIGNAL = 0.92; EXPRESSED IN HBL100, SIGNAL = 0.92; EXPRESSED IN HEART, SIGNAL = 1.1; EXPRESSED IN BONE MARROW, SIGNAL = 1.2
tggtgtgtgcttcttccttgtttaatgatgccaaacatccaaatagtatttgctgtggtaagcataagtagaacttacaaattttattagctaagtggtgatcagatttgttcaacttagtatttgaaacacacttcaactgttatgctttggaatgataaataactataacaaattgtacaggtattaacacttatatgtagaaacaatcattgtcctatttatcttcacaaaacctttatttcttataatttgtatcctgtttcttatattgcatggtttagatgttgaaacatttgtagcagatatactgaaaggagaaaatttatccaagaaagcaaaggaaaagagagaatcccttattaagaagataaaagatgtaaagtctatgtaagtcacttaccttttgtttactgatttc

SEQ ID NO: 4391 - DNA, 484 bp, Homo sapiens
  MAP TO AC009973.2; EXPRESSED IN ADULT LIVER, SIGNAL = 0.97; EXPRESSED IN BT474, SIGNAL = 1.4; EXPRESSED IN HELA, SIGNAL = 1.4; EXPRESSED IN HBL100, SIGNAL = 1.6; EXPRESSED IN HEART, SIGNAL = 0.94; EXPRESSED IN LUNG, SIGNAL = 5.6
gctatcagttcatactggtcttagggatattattttttgtttttgctgtaaaaccagtcaagttttcaattaagaagacagaagtatataactgtgaaagcatgttaaggcagagtagatccaactaatttaattcttccttcaatgtattagcagtgagccttaaccctggtatagacctagtctttcattaggatgcaaagaagataagcaaccaattacatttcgagtcacaccttatacctagtaataattttcttaaatgtttaaagataataattatttttttctctaaaggttctaaggcccagcagctactacaaggattgcaagccagtgatgaaagtcaacagcttcaggcagttattgagatgtgtcagttactggtcatgggaaatgaggagacactgggagggtttcctgtcaagagtgttgttccagctttggtaagcataatgtttttccctcgtttttacctcatttg

SEQ ID NO: 4392 - DNA, 375 bp, Homo sapiens
  MAP TO AP000275.1; EXPRESSED IN BRAIN, SIGNAL = 0.76; EXPRESSED IN PLACENTA, SIGNAL = 1.2; EXPRESSED IN BT474, SIGNAL = 0.67; EXPRESSED IN BONE MARROW, SIGNAL = 0.69; EXPRESSED IN LUNG, SIGNAL = 0.85; EXPRESSED IN HELA, SIGNAL = 0.62; EXPRESSED IN ADULT LIVER, SIGNAL = 0.74; EXPRESSED IN FETAL LIVER, SIGNAL = 1.7; EXPRESSED IN HEART, SIGNAL =   1
ttcctttcctcaattcctggcctagcaagtctagaaagaaaacaaaaagaatgtaaaatgttcttggttgactttactcttaattactaaaaagcaaacagagaaaattaaaatcaaacacatgcaaaaaattcttctagagccttgcacacaatgccagttcttgaaatatttcataaagcaaagctaatgaaataaacaaagacgtggctgaaaggatatgcattgtactgtgcttatggagccacattgctcactgcatctctcgctccactgccgccgggctcatctgccagaagcctgttcctgagctgattggggttctggtccaggggtcccaaggagcgaggcccaagctcaggaggacaaagaacg

SEQ ID NO: 4393 - DNA, 473 bp, Homo sapiens
  MAP TO AC004887.2; EXPRESSED IN BT474, SIGNAL = 0.67; EXPRESSED IN BONE MARROW, SIGNAL = 0.82; EXPRESSED IN HELA, SIGNAL = 0.83; EXPRESSED IN ADULT LIVER, SIGNAL = 0.72; EXPRESSED IN BRAIN, SIGNAL = 0.8; EXPRESSED IN PLACENTA, SIGNAL = 0.69; EXPRESSED IN FETAL LIVER, SIGNAL = 0.76; EXPRESSED IN LUNG, SIGNAL =   1; EXPRESSED IN HEART, SIGNAL = 0.84
ccccaataaaatcatcataattccattacatttactgatctttcattgtattattagcctacatttgtattcgttaactctcacaagtacccagggaatctaaacagtaccagttacatggggttctgttggatcctgagaagctatttatcctttgagcacaattccacatttttgagttatatttagctagcattccttgttgacctgttttcttgactatgagcacatcagaaagagccttaccattttctgccataaataaatccttcattagtttcttaatcagattcaagagcaaggtgagagaaagtggctgagcaggaggtactgtaaagacactcttcatctctcatcttcacactgggctaagcttcaagtcagtgttagggatgacacagaaattgaaagcacagttgatgagtaagtaaccagtggtgaaaagggacctgtgcggtgaagggttaactcag

SEQ ID NO: 4394 - DNA, 494 bp, Homo sapiens
  MAP TO AC008163.1; EXPRESSED IN HEART, SIGNAL = 0.78; EXPRESSED IN BRAIN, SIGNAL = 0.82; EXPRESSED IN FETAL LIVER, SIGNAL = 0.7; EXPRESSED IN HELA, SIGNAL = 0.68; EXPRESSED IN ADULT LIVER, SIGNAL = 1.1
caatccatatgttacagatacaatcagaataattttgtcattactcctaataccctatctgccacacacagaaataactataatttgaattcaaatttgaattatagtaactttattttttttctttttaggaacatgctatgtctctcactttatttgcttttatttacttcccatttataaaactagaaagcttaaactataattccagttttatttttaaattttattattgtctcatgaattttatcaataaaattgacttgtattatacctgctcctgttgaaaaacttggatcacaggaaataggatcatctacattctccacaaaaactgtaaacgtatagctgctggtattattcccattatctgttgcctcagtttccaaagagtagattttggagttacttgggttgtcaagattcaaaggctgaagaagagtgattgttcctgtgactaataaaaagaaataaaatgaagaaaaatgaccaaa

SEQ ID NO: 4395 - DNA, 390 bp, Homo sapiens
  MAP TO AC007002.2; EXPRESSED IN BT474, SIGNAL = 0.73; EXPRESSED IN ADULT LIVER, SIGNAL = 0.94; EXPRESSED IN BRAIN, SIGNAL = 0.94; EXPRESSED IN HEART, SIGNAL = 0.92; EXPRESSED IN PLACENTA, SIGNAL = 0.83; EXPRESSED IN FETAL LIVER, SIGNAL = 0.68; EXPRESSED IN LUNG, SIGNAL = 0.83; EXPRESSED IN HELA, SIGNAL = 0.82; EXPRESSED IN BONE MARROW, SIGNAL = 1.4
tccgggatacctctttcctctcgaaagtcattaccaaaaaacagcctcctgggggtgcccctgggcctccgcctccttgcattatttattatcctctaggccctacttcgcagttcttgtgcacgctatgaaaaataaaacctgcgtgctcgtctgtgtgagtgtgtttggtggggagagggggcaggtgactgtaccccgggttggggtccgccgcccctccctcgcgggccctctgcagaagtgcaccctgagagagacccgggtgtggctcccgcagggttctggcttccagtcgtcgcggagggagaagtatggcaacgtgttcaagacgcatttgttggggcggccgctgatacgcgtgaccggcgcggagaacgtgcgcaagat

SEQ ID NO: 4396 - DNA, 352 bp, Homo sapiens
  MAP TO AC012330.5; EXPRESSED IN FETAL LIVER, SIGNAL = 1.5; EXPRESSED IN LUNG, SIGNAL = 0.98; EXPRESSED IN BONE MARROW, SIGNAL = 1.1; EXPRESSED IN HELA, SIGNAL = 1.1; EXPRESSED IN HEART, SIGNAL = 1.1; EXPRESSED IN PLACENTA, SIGNAL =   1; EXPRESSED IN BT474, SIGNAL = 1.2; EXPRESSED IN ADULT LIVER, SIGNAL = 1.3; EXPRESSED IN BRAIN, SIGNAL = 1.1; EXPRESSED IN HBL100, SIGNAL =   1
ttgctctcctggactgtgtggcctctcttggttttgatataagcaggagctgtggacccacatggccagtcactgaccctcctccaccaggaacttcctgcaggctcaggcaagacaggaggaccccatggctctgggctacagctcagggtttccactgcagagttcctcacccaggtccttgaggttacccactcaccagccgcctggatgtccttcacaatctgggccatgaggctgccgttgtagaaggcctgggcaccctcgatggccagcatctcgtaggtgtcagccagccgcggcagggtcagtctctccccctcccaaagcacctttctatcccggcagaaca

SEQ ID NO: 4397 - DNA, 435 bp, Homo sapiens
  MAP TO AL132708.1; EXPRESSED IN BT474, SIGNAL = 1.3; EXPRESSED IN ADULT LIVER, SIGNAL = 1.7; EXPRESSED IN FETAL LIVER, SIGNAL = 1.6; EXPRESSED IN BONE MARROW, SIGNAL = 1.3; EXPRESSED IN LUNG, SIGNAL = 1.1; EXPRESSED IN BRAIN, SIGNAL = 1.2; EXPRESSED IN PLACENTA, SIGNAL = 1.3; EXPRESSED IN HBL100, SIGNAL = 1.4; EXPRESSED IN HELA, SIGNAL = 1.3; EXPRESSED IN HEART, SIGNAL = 1.3
ccaaaatccaggtaaacccctcttgaagaatttgttgaacatctttggcagagtgttatggatgtctactgcccagtgcttttctagagagagaagcttcatgaatgtggggatgggagaagtcttgggacataagtggtgcctccaatttgggtccacccctgctgcatgatgctggccacagtcatccttgtgtgtgagctgtttgtgaatctttatctctctctgaggatagaggctggatccatcaactcactggttcatggagaaagtgaggcgaagcagcctgttcaatgcatttctgcagaattgccttcaccactgatgcacactgcaaccacaatctcttcctttgtccactctgggcctcatttccctctttatggcacagatagtcctgaagtcaatgatctctcagcctttccaacccacata

SEQ ID NO: 4398 - DNA, 454 bp, Homo sapiens; identical to SEQ ID NO: 4250
  MAP TO AC007653.1; EXPRESSED IN ADULT LIVER, SIGNAL = 0.72; EXPRESSED IN HEART, SIGNAL = 1.1; EXPRESSED IN HBL100, SIGNAL = 0.88; EXPRESSED IN HELA, SIGNAL = 0.6; EXPRESSED IN BONE MARROW, SIGNAL = 0.78

SEQ ID NO: 4399 - DNA, 432 bp, Homo sapiens
  MAP TO AL121759.5; EXPRESSED IN HEART, SIGNAL = 1.1; EXPRESSED IN BT474, SIGNAL = 0.95
gacatgtcggacagcaaggctgcctggcctccctccctagcgctaggacagtgtcctcagaaacagagcgccagggcctagctgagcattcacccacgtaagtgtctaccatcagttgtcctcctttgccagaccctggtccccacctgatgaaatccgtcttacctttcccagcccccactgaactgccacctcctccctgaagcctgccctttccttacccaaatgtgactgacctcccacttctcaaccacccttgcagctgatttctacctctccagcagcccctaccacatcttgcctagtgatctgtcgacttgtatctgcagatccaggctccgcagttgctaacgctgtacttctctcagcctcattttccacatttctaaaataaaatgggaatataaagactgcctacttcaggggctttct

SEQ ID NO: 4400 - DNA, 481 bp, Homo sapiens
  MAP TO AC007632.4; EXPRESSED IN PLACENTA, SIGNAL = 0.8; EXPRESSED IN BONE MARROW, SIGNAL = 0.72; EXPRESSED IN LUNG, SIGNAL =   1; EXPRESSED IN HEART, SIGNAL = 1.1; EXPRESSED IN HBL100, SIGNAL = 0.69; EXPRESSED IN FETAL LIVER, SIGNAL = 0.69; EXPRESSED IN HELA, SIGNAL = 0.94; EXPRESSED IN ADULT LIVER, SIGNAL = 0.99; EXPRESSED IN BRAIN, SIGNAL =   1
tggaacttatatttaaaagggaagtagaacataaaagtttggaaaacttgcagcatagccatgtggcagagaaagaaaaagcatttttcagaagacaaataaaagcacagcagcaacttgctagagagattagcatgacaacaaaggagccaagtggtaatatccaagacgatggcaaaaaggccctaaagacatttcagaaatcgtggagacatctcctcccaacacaagttcgaagacctaggaggaaagaatagttttgtgggctgggccatggacctcactgccatgcatgatattggggcactgctccctgcatcccagctgctccagctccagccacagctcaaaaggccccaggtacagctgagaccaccactccagagggcacaagccataatccttggcaactttcatgtggaattaaatctgcaggtgtacataatgcaagagtgaaggaggcttggcagcttccctgtag

SEQ ID NO: 4401 - DNA, 1962 bp, Homo sapiens
  MAP TO AC004230.1; EXPRESSED IN BT474, SIGNAL =  31; EXPRESSED IN FETAL LIVER, SIGNAL = 6.5; EXPRESSED IN ADULT LIVER, SIGNAL = 3.2; EXPRESSED IN BONE MARROW, SIGNAL = 3.5; EXPRESSED IN LUNG, SIGNAL = 1.2e+02; EXPRESSED IN BRAIN, SIGNAL = 5.7; EXPRESSED IN HELA, SIGNAL =  13; EXPRESSED IN PLACENTA, SIGNAL =  27; EXPRESSED IN HBL100, SIGNAL = 2.6; EXPRESSED IN HEART, SIGNAL =  40
cctctgggccttcgatattcacatctggaacatcaatgtccaccttgggtcctgagacatcaaggtcagccttgggcaggttcacatccacatctgggccctctcctttgaagccaggcatgctgaatttgggcattttcactttgggcatttttaggtgccagtctgggccttgaacgcccacatccgggacatcaatgtccactttgggacccctgatgtcaacttcagggcccttgaggtcaccttccactttgggcagagaaatatccacatcgcccttcaccttgggacctttcagatgcaaatcaaagtcaggcatggggatcttgggggctttgatattcatctctggcatcttgaacttgggccctttcaactttccctctggtccttcaatgttaacatcagggccttcaacgtccactttggggcctgagacatcaacgtcagccttgggcaggttcacatccacttcagggccctctgctttgaagccaggcatgctgaacttgggcattttcatcttgggcatcttcaggtgccagtctggaccctgaacattaacatctgggacatcaatgtccactttggggcctttgaggtcaacttcaggacctttcagatctccctctaccttagggcctgtaacatccacatctccttttatttttggacctgtgagattcaggtcaatatctggcatggatatctttggagtcttaaaatgcatctctggcatcttaaactttggacttttccactttccttcaggtccttcgatattcacatcgggacattcaacatccactttcggtcctgagacatcaatgtcagccttgggcaggttcacgtccacatctggaccttctcctttgaagccaggcatgctgatcttgggcatttttatcttgggcatctttaggtgccagtctgggccatgaacatcaacatcaggtgcgtcaatgtccacttttgggcccttgatgtcaacttctgggcccttgaggtcaccttccactttaggaagggaaacatccacatcacccttcactttgggtcctttcaggtttaagtcaatatcaggcatggagatcttgggggctttgatattcatctctggcatcttgaacttaggccctttcaactttccctctggtccttcaatgttaacatcagggccttcaatgtccactttgggtcctgagacatcaatgtcagccttgggcagcttcacatccccatctgggccctctcctttgaagccaggcatactgaactttggcattttcaccttgggcatcttcaggtgccagtctgggccttgaacacccacatctggggcattaatatccactttgggccccttgatgtcaacttcggggcccttgaggtcaccttccactttgggcagagaaacatccacatcgcccttcaccttgggacctttcagatgcaaatcaaagtcaggcatggagatcttgggggctttgatgttcatctctggcatctttaacttaggccctttcaactttccctctggtccttcaatattaacatcagggccttcaatgtccaccttgggtcctgagatgtcaacgtcagccttaggcaagttgacgtctacttcagggccctctgctttgaagccaggcatgctgaacttgggcattttcatcttgggcatcttcaggtgccagtctggagcttggacatcgggggcatttacatcaactttggggcccctgatgttcatatctggtacttcaagtttaccttctacctcaggcacagacacatccacatcccccttgattttgggtcctttgagatttagatcaacatcaggcatagaaatattgggggctttgaaatgcatatcaggcatcttgaacttagggcctttcaatttgccctctggtccctcaatgtcaatgtctggcccactgacatccacatgtg

SEQ ID NO: 4402 - DNA, 426 bp, Homo sapiens
  MAP TO AF110324.1; EXPRESSED IN BT474, SIGNAL = 7.2; EXPRESSED IN FETAL LIVER, SIGNAL = 7.4; EXPRESSED IN LUNG, SIGNAL = 8.6; EXPRESSED IN BONE MARROW, SIGNAL = 6.8; EXPRESSED IN HEART, SIGNAL = 5.1; EXPRESSED IN PLACENTA, SIGNAL = 7.5; EXPRESSED IN ADULT LIVER, SIGNAL = 8.3; EXPRESSED IN BRAIN, SIGNAL = 5.9; EXPRESSED IN HELA, SIGNAL =   8; EXPRESSED IN HBL100, SIGNAL = 6.4
gaggaatgccaaccaaagtcaacaggagatttgatccagtaagttttgaaaaccacacttagcatcaagctacacagaccttgctcttacttttcatttcccttgagagaagggctaaggcaattcatgggtagtttagtttcatctatgtcatcttcattgaaatttcacggcaataggactctaaaatttttgctcttgtgggtgtcgggccataatcataattaacatttcttttcccagattacaatttgcttgtccctgtgtaagtaacaaggggtcacctatgctgactcgtccttttgtgccccgtgtaggactgcacatgccagagcgaaggccgatgccgccgaccaggccgcgctggccgctcgccaggagtgcgacatcgcgagagctgtggccagggagctgtcacctgatttc

SEQ ID NO: 4403 - DNA, 1992 bp, Homo sapiens
  MAP TO AC004554.1; EXPRESSED IN BT474, SIGNAL = 1.7; EXPRESSED IN FETAL LIVER, SIGNAL = 2.1; EXPRESSED IN ADULT LIVER, SIGNAL = 1.4; EXPRESSED IN LUNG, SIGNAL =   4; EXPRESSED IN BONE MARROW, SIGNAL = 1.8; EXPRESSED IN BRAIN, SIGNAL = 1.6; EXPRESSED IN HELA, SIGNAL = 2.1; EXPRESSED IN PLACENTA, SIGNAL =   3; EXPRESSED IN HBL100, SIGNAL = 1.2; EXPRESSED IN HEART, SIGNAL = 1.9
tggtctcacagagaacgatcccaaaagagaatacatccacatttcgtcatagctctttccattcagcatctcaggtatcatccagtagaggtttcccaccaccatgtagcacttcttgaagttgttcttgtgcaaagtacatttcttggtggtggccattctggaggcaatgcctttggccaagctgacttcctgctgccaggggaatgggtccacactttgcagaaggtccttcagcatgcccccctcaatgtcctctcagcaggttcagcttcttgtccttgtacagcacgccaatgaacttgagcacattggggtggtccaggcttcacgtcactttcacttcagtcagaaaagtcttctggttctcctcatcacatcgcattaattccttcatgaccaacactttgcctgtggctttgtgtgtcactttgatagcctgcccaaagaagcccttccccaggacctccccgtggatcaggtcacaggaccggaagttctgctttgagtaagtgctggaacaacaaagggattcccagcagctgatgtcacggctgagcagcaggggctcctttggagagctagggctaggggacttggagatgctgttactgagtcttagggagcatcttctcagtgtcccctccagattatccttggtgtccagggtgctgagggcgtgagggtgtccagcattctgtgtgtggggagagagccaggcatccagccgcagctgggctggggaccgggagacagggtcatgttcaatcaacagcagaagtgtctggctcatctggctaattgcatcctccaactcctctacttggagtgtgtgggtgggggttccactgatctccaggatgtggtccctggggtggatggcattgcagctgttgggactgatgtgcatctggttgacctcttttacttgcacggtggtaacatagttggagcaggcattctccacggacacggagaagctccgcctgccctctgtgatggccagcatggacatgagcatgacagagtagggcagctggtcctgaatggactctgtggagagtatctcaaatatgggtgccagcaccacctcatttgtggcactttccacagtatagggtgacacgcagcaccagggcgtatgcatccccatcctcaatggtcaccttatagctcacacaggcaaagcattctggatggtacttgaactccctattagcagcagcaaatctgcatgggtctgcagcaacctcaattcttcctcctcagaagaaagaattcgactgaggggcataagagagagtgagagaccaaggcaagtttcagagcaggaatgaaagtttattaaaaagctttagagcaggaatgaaaggaagtaaagcacacttggaagagggccaagcaggagacttcagagatcaagtgtgcagtttgacctttgacttggggttttacatgttggcattcttctggggtctgcatcttgtctcccctgattcgtcccttggggtgggctgtccgcatgcgcagtgggctgctaacacttgggaggggctgcatgcacagtgtgtttactgaagttgtgcacatgctcacttgaggtgctttatgtggtccccacagccctgacacctccaggcatcttcaccttggtcctggcattaccactagttgagtgacctggacaacttcattttcttccctaagccccagtttcttcatatgtaaaatgaggagattgtacattatctcaaaagtctctcctggctctagcacccaccagtgcagacatggtcccaggagcatagaaacggggaggaggaagcagggccgcagcagcaccaataagctcccacctctgcctaggcgagggaggacctcaaccccaggcacgaatgggcggatttttaaatctatgattaatctaggattcctttgagtaagacttcaaaaaataactttaatattagaaaagggttttgattgttttcc

SEQ ID NO: 4404 - DNA, 390 bp, Homo sapiens
  MAP TO AF047825.1; EXPRESSED IN BONE MARROW, SIGNAL = 1.1; EXPRESSED IN ADULT LIVER, SIGNAL = 1.3; EXPRESSED IN FETAL LIVER, SIGNAL = 1.1; EXPRESSED IN BRAIN, SIGNAL = 0.98; EXPRESSED IN LUNG, SIGNAL =   1; EXPRESSED IN HEART, SIGNAL =   1; EXPRESSED IN HELA, SIGNAL = 1.2; EXPRESSED IN PLACENTA, SIGNAL = 0.93; EXPRESSED IN BT474, SIGNAL =   1
cacttctgctggcaatccaccacagctctgtgtattctgagcatagcttccttttccaggagggctttcaccaaggacccaatggaaaatcacatcacagagcgcaaaatctgcatgacgctgggtcggagcagccgggaaggcaccatctgggcagcaccttttgcccggagcatttctttaatgtgaataaaaagaccaattagccacgaagggtggctcaggatagaaaatgaatagaaaagcttacctctccttggaaactcttcagcagcggcgctacctgcttgcgcaaatcctggagcaggaggcggaggtcaggaagcagccatttgagaaggagaaagaagggaaacattggttaaggcctcctaaaaacagcgtggcagt

SEQ ID NO: 4405 - DNA, 397 bp, Homo sapiens
  MAP TO AL121748.2; EXPRESSED IN LUNG, SIGNAL = 1.5; EXPRESSED IN PLACENTA, SIGNAL = 1.5; EXPRESSED IN HEART, SIGNAL = 1.4; EXPRESSED IN HBL100, SIGNAL = 0.91; EXPRESSED IN BT474, SIGNAL = 0.91; EXPRESSED IN ADULT LIVER, SIGNAL = 1.1
ccagaatgggttgtttccacgtgctaagcagtctgtcagaagccccagcgcccactcccctctaccacctcccacacttctgttcccaacaatgagtcagatatgacaggcaaaactggggtgtgtgatttgctcctgtttcgttcctttctatttttctgtctgctttcatctggtctgttggcggtgctcacggagacaatattgtttttttccatagggagcacgccaggatacgaaggtgaaggagaaggtgacaagaacatctccaggaagccaggcaatgtgttgaagaccttagaccccatcctcatcaccatcatagccatgagtgccctgggggtcctcctgggggctgtctgtggggtcgtgctgtactgtgcctgttggcataatg

SEQ ID NO: 4406 - DNA, 461 bp, Homo sapiens
  MAP TO AF053356.1; EXPRESSED IN BRAIN, SIGNAL = 1.7; EXPRESSED IN PLACENTA, SIGNAL = 2.1; EXPRESSED IN HBL100, SIGNAL = 2.2; EXPRESSED IN ADULT LIVER, SIGNAL = 3.4; EXPRESSED IN FETAL LIVER, SIGNAL = 2.9; EXPRESSED IN BONE MARROW, SIGNAL = 1.7; EXPRESSED IN LUNG, SIGNAL = 2.4; EXPRESSED IN HEART, SIGNAL = 2.1; EXPRESSED IN HELA, SIGNAL = 2.3; EXPRESSED IN BT474, SIGNAL = 1.7
catgataatccccctcctcccattttaacagagacagaaaataataaaaaaggctatttccagtgttctaaaaggaagtgctaggagccctcaactataatgttttaggatcaaacccccaaacataatcctggctgtacttatttgaccccagtcctcccagcctcactgcttcagagtgaccctcacatttgtttgcatgagaagatctagagccatggttacctccagggactggatctctcatgttgtaagcatatacgctgtagggagggtcccatcccaaaacccacttacccccaaaggcagggaatgcagcaaaagctggtgccatctggggtgcagcaaaggggtctccaccgatgtcagccagcaggtcagtactggcttttttgacagaggagtggggaggtggctgagtgctccgggcatgggatgtccgagcgtgagactgactgacg

SEQ ID NO: 4407 - DNA, 386 bp, Homo sapiens
  MAP TO AC009269.1; EXPRESSED IN PLACENTA, SIGNAL = 0.74; EXPRESSED IN FETAL LIVER, SIGNAL = 0.57; EXPRESSED IN LUNG, SIGNAL = 0.7; EXPRESSED IN HELA, SIGNAL = 0.73; EXPRESSED IN BRAIN, SIGNAL = 1.2; EXPRESSED IN BONE MARROW, SIGNAL = 0.63; EXPRESSED IN HBL100, SIGNAL = 0.92; EXPRESSED IN ADULT LIVER, SIGNAL = 0.84; EXPRESSED IN HEART, SIGNAL = 0.84
  unsure 142
  unsure 167
  unsure 209
  unsure 223
  unsure 288
tcatttggtaaaatctgcgttgaattgtaaaggttcattttaattaccccaactaggtaactgtgcagttggagcataacaactcctttacgttcgactcttccaagactttgtaagtggcacttattttaatgatataganattttgatgatatcgccattcttgntaacgtgacaaattatctaaatcacaacatctgcggtcaggnctgtttctcaagantttctgttctcctgccaactaaagaggccccgactactccttggcgcgcacactgaggccgcgcntgcaggtcagcaccgaaagagccccgcacggatcccgccccacaggtgcgatttacacaacccacatcaccaccacccctcccaacttcaccacctct

SEQ ID NO: 4408 - DNA, 355 bp, Homo sapiens
  MAP TO AF127936.1; EXPRESSED IN PLACENTA, SIGNAL = 8.5; EXPRESSED IN HBL100, SIGNAL = 7.6; EXPRESSED IN HELA, SIGNAL = 8.7; EXPRESSED IN BT474, SIGNAL = 8.2; EXPRESSED IN LUNG, SIGNAL = 5.7; EXPRESSED IN HEART, SIGNAL = 7.5; EXPRESSED IN ADULT LIVER, SIGNAL =  11; EXPRESSED IN FETAL LIVER, SIGNAL = 8.6; EXPRESSED IN BRAIN, SIGNAL = 8.8; EXPRESSED IN BONE MARROW, SIGNAL = 8.6
tgtgcttaaccattctaggcttctcccttagtaattggatctctctctgaaagaatcctgaatctaacaaaaatgcacaaaatctaatgtattcttctctgttaatatggtaccacagcttggtacttcttactttcatagttttattaagtttatcaataatgtggccaattggaaatgaccactaatgcagttaaaataagacaaaacaaatacaagagtcaaatggaggagagtcccatgactcacattctcattcagttgccggttgttttttgttctctcttgtactagtattccctgaaaggcaggaaatactagtcctctgaacatatccagcctccctaaggaaagt

SEQ ID NO: 4409 - DNA, 399 bp, Homo sapiens
  MAP TO AF043945.1; EXPRESSED IN BONE MARROW, SIGNAL = 6.7; EXPRESSED IN LUNG, SIGNAL = 6.9; EXPRESSED IN BRAIN, SIGNAL = 6.7; EXPRESSED IN HELA, SIGNAL = 6.5; EXPRESSED IN HEART, SIGNAL = 6.9; EXPRESSED IN PLACENTA, SIGNAL = 7.4; EXPRESSED IN HBL100, SIGNAL = 8.1; EXPRESSED IN ADULT LIVER, SIGNAL =  11; EXPRESSED IN BT474, SIGNAL =   6; EXPRESSED IN FETAL LIVER, SIGNAL =   8
catgcagtggcacaatcacagttcaccatggcctcaaactcctgggctcgagtgatcctcccacctcagcctcctgagtagctggactacaggtgctgcaccaccacgtccagctaatttttaatttttttgcagagatgggggtctctttatgtgctaagattgcaggcatgagccaccacacatgggccacgtttctagatttcctcatgttcactctctcagcagctgtgacacaacagatcacacttcccttcctgaaacaccttcacctggaccgtgcacacctcactctctgggtttccctctgcctcactggcttctccttctcagtgtctttggtgagcttcttccctctaattagactctaaatgttgcagcccactccagggattaatt

SEQ ID NO: 4410 - DNA, 1972 bp, Homo sapiens
  MAP TO AC004702.1; EXPRESSED IN HBL100, SIGNAL = 1.2; EXPRESSED IN PLACENTA, SIGNAL = 0.97; EXPRESSED IN FETAL LIVER, SIGNAL = 2.4; EXPRESSED IN BRAIN, SIGNAL = 3.2; EXPRESSED IN LUNG, SIGNAL = 1.5; EXPRESSED IN BONE MARROW, SIGNAL =   2; EXPRESSED IN HEART, SIGNAL = 1.3; EXPRESSED IN HELA, SIGNAL = 3.7
tggcttcgtgaatgaaacagactaagcaaatgcttctctgtgctctgtgaatttagaggttaagggcagaaatgtgaacaaggatgagcaaataccagtaaagagctgtctcttctcaccttggccagcagactggaaacatgtttaatttcaccgtttgcctttagtaattcttgtctgagctcattgcaagacagttccagtagatctttctctgctcgggctactttcaacatttcttgaacttcgcagctctctgccgtctgctccacagcactggcctctgtggctttctgcttctcaccctgcaaatgagacttcaaagatccattctccatttttagcccttccaaggtaactctacactcttccaaagttttggccatcatgttattattatgccgttccagttctagaaactcattcagtttttcattttcttccttcagacgtttaatcatttctaaagctccttggttttcttcctcaaccttccgcaagctacaggtcaactgctgctgaatgttgagtagcttctctctttcaaagcggccctgttcaagaatacctgtgcacttctgctccagttcaataatttttccttcctgagtggtgggctcttcattctttactcgctcttgtaaaagattcatcagcttctcattttcttgacttagctgctctgccctctctcgatgctgatgaaaggatgtctctaaaatcgtcttttcatccaccagcttctcattttcagctgtcaattcctgtaccatttgttgctggtctgataattcttgtagagtagcctgtagttcttctgcagtgctatggtggttttcttccatcttttgtatcttctctgtgagggaagccagggacaattcacttacgctgtttggggaactcccagcagtagaacactttgaactcttaaaggggttactggtggaggacaggggccttgagggtgtctctgctgtaatgtgctcaaagtcggaagcatctggcgacaaagaagctttggtaacatcgctacttgaggagcctgatgtccgtaatgcatttccatgtatgttttttttatactcatcaatgtcactggacatctgatttccagttgggcttccgaagcttgactcttgagttatggatgttgggcagctgctgtcgccagtgtgacttgctgccccttctgaatttggggagtgctcaagatagatcagtttctccttcaggacccggttttcttcctctagatcggaaagctctttctgaaagttcttgttcttctcctcaagagctcttatcataggttccgtgtcacctggggagactgatgttccatcgacatttgggcccaaagcatcagtcccctcagcgttcagagtccttttctctttgtatttctttagttcacttcgaagcctgttaatttcactatcttttgctttggcttctgccaaaagttcccgaacttgggactcaagcgcagccttttctccaccttcattctcttgcttgggctttgtggaaggggtcctcaggtgtttcgtaggagtgggagtgttggaagaagttggactggacactgatttcctggggttggagggaccacgtggcacagacctctctcttgagacagttactgaaaattcccgtggggctggaatgcctgtccgtttagttgttgtaaaggccccttaaagacagaagaagaaaaaaatgaaaaaataaagcaagcattcttataaacaaaacccaaatgactgtaaatcacatggcacagtggacagtggctgtcgctcttcatccatttcctcctcctctagctaattacccagttctgactgtggtttctgtgcttcctccccacagccctatactttgggtgaggctgactccaagcctgagctactcaggatgaccccatccccagccagttgctggttcacgcatgggcacacaactcaat

SEQ ID NO: 4411 - DNA, 412 bp, Homo sapiens
  MAP TO AL121716.2; EXPRESSED IN BT474, SIGNAL = 1.5; EXPRESSED IN FETAL LIVER, SIGNAL = 1.5; EXPRESSED IN BRAIN, SIGNAL = 1.7; EXPRESSED IN BONE MARROW, SIGNAL = 3.4; EXPRESSED IN HBL100, SIGNAL = 1.6; EXPRESSED IN PLACENTA, SIGNAL = 1.2; EXPRESSED IN LUNG, SIGNAL = 2.7; EXPRESSED IN HEART, SIGNAL = 1.5; EXPRESSED IN HELA, SIGNAL = 1.5; EXPRESSED IN ADULT LIVER, SIGNAL = 2.4
cagaaaactagattgtatgacttggcataagaaaaatatatattgaaaaaagtataagaaattcttgttgctactttattaaagctctagactaggtgagaaaccatggttttgttaacagatcaaggccttaaaagtatttagtggctttgttttttgaaattaacttagagtgtgtgtgaaatgtttagtataatgaactctgattgctaccatcttttgtttcagactgtgagcatgtgcagcctccacagtggctccagactctgatgaatgcttgcagccaagcaagtgatttcagtgttcagagtgttgctatttcactagttatggacctggtgggactgacacagtctgtggccatggtcactggggaaaacatcaacagtgtagagcctgcacaacccttaag

SEQ ID NO: 4412 - DNA, 424 bp, Homo sapiens
  MAP TO AL121749.7; EXPRESSED IN PLACENTA, SIGNAL = 1.8; EXPRESSED IN HELA, SIGNAL = 1.9; EXPRESSED IN ADULT LIVER, SIGNAL = 2.9; EXPRESSED IN BT474, SIGNAL = 1.8; EXPRESSED IN LUNG, SIGNAL = 2.2; EXPRESSED IN BRAIN, SIGNAL =   2; EXPRESSED IN BONE MARROW, SIGNAL = 2.2; EXPRESSED IN HEART, SIGNAL = 1.9; EXPRESSED IN HBL100, SIGNAL = 2.3; EXPRESSED IN FETAL LIVER, SIGNAL = 1.8
ctaggttgcctccctgtctgggctattgtgaacagtgttttaatgggagtgcagctgtctctccagcacactgatttcgattcctctggatatatagccagaagtgggattgccggatcatatggcaattctatttttagtctttttaggagcctccatattgtcttctagaatggctgtaataattcgcctttgcaacagcagtgcaaaggggctcccttttctccataccattctcacaggtgtgatgaattctgatagttttccaggtgtttcttttaggttttcttggtagcaaccacattagcttcaaggttactgaacacgagataaatgactgtagaacccatgagtgcctgcaggaagaaatgatgttcaagaaccactttatctacatttctatacctccagctttcctcctttt

SEQ ID NO: 4413 - DNA, 472 bp, Homo sapiens
  MAP TO AL132778.2; EXPRESSED IN BT474, SIGNAL = 4.5; EXPRESSED IN FETAL LIVER, SIGNAL = 3.7; EXPRESSED IN BRAIN, SIGNAL = 4.4; EXPRESSED IN BONE MARROW, SIGNAL = 4.2; EXPRESSED IN HBL100, SIGNAL = 4.1; EXPRESSED IN PLACENTA, SIGNAL = 3.6; EXPRESSED IN LUNG, SIGNAL = 3.5; EXPRESSED IN HEART, SIGNAL = 2.8; EXPRESSED IN HELA, SIGNAL = 2.8; EXPRESSED IN ADULT LIVER, SIGNAL = 5.3
tttccttttctattgtctcaggcttcttagtgatgtaacattacaccaagcatatcctgcttttaaaaagaaacttcgatggaggttggcaaattaccattcacagcttggtgaatgataaagtcacaagagaagagtggaagcaatgcacctggtgtccgtaattataggcttgaatgagggaggaaagaagggatgaaggcaggccaaatacagctgggtgtgggagactggctcagaggggatttgagaggactaggaaacggaaggatgttatagagcaagtacttttaatctccctctatcccaccccagtcttgcactcccaccttctgctccttaccttggttttctttttttgatctgtgtttttcctgatctcaaagatctctttgtccatcttcccataacagcaccagatgaactgtgatgatcaaaataaaagctcttgaggcatcctcaagtcaatctg

SEQ ID NO: 4414 - DNA, 459 bp, Homo sapiens
  MAP TO AL121755.4; EXPRESSED IN HELA, SIGNAL = 2.9; EXPRESSED IN ADULT LIVER, SIGNAL =   3; EXPRESSED IN BT474, SIGNAL = 3.1; EXPRESSED IN BRAIN, SIGNAL = 3.6; EXPRESSED IN BONE MARROW, SIGNAL = 3.1; EXPRESSED IN HBL100, SIGNAL = 2.1; EXPRESSED IN HEART, SIGNAL = 3.1; EXPRESSED IN PLACENTA, SIGNAL = 2.9; EXPRESSED IN FETAL LIVER, SIGNAL = 1.8; EXPRESSED IN LUNG, SIGNAL = 3.7
ggaaagtggtcctagctccccaaatggggagagtcttcttgtagttctttgccccagtcccttcaggttttcccggattctttcggggcctgggtgtttgggttcctgtatgtaaccttggtgggtcatgagcctctttttttttttttaattgaggtaaaatatgtatggtaaaacatgaacctctgagcacatagctcgcagttagcagggtactaggcaccctcaggaacatggccaaaccaggtgcctgtgtctgggctggatggttggaacttacttccttgccggtctctctgttattcctcctcagctgtcctatgtgatgtccgggtacagatgctttgtctgccctgtggagtacaacaatgacaccaacagcttcactgtggactgtgagccctcggacctgtttcgcctgcaggagtacaacattcctggggtgatccagtcagtcat

SEQ ID NO: 4415 - DNA, 431 bp, Homo sapiens
  MAP TO AP000008.1; EXPRESSED IN PLACENTA, SIGNAL = 1.1; EXPRESSED IN ADULT LIVER, SIGNAL = 1.1; EXPRESSED IN BT474, SIGNAL = 1.1; EXPRESSED IN LUNG, SIGNAL = 1.1; EXPRESSED IN BRAIN, SIGNAL =  12; EXPRESSED IN BONE MARROW, SIGNAL = 1.1; EXPRESSED IN HEART, SIGNAL =   1; EXPRESSED IN HBL100, SIGNAL = 1.2; EXPRESSED IN FETAL LIVER, SIGNAL = 1.2
ctagagtcacgcgtccagcaccgcccggctggccgggaagaggcgaccgggtccgtggtccgagtcccgcacctccggcctctctctgggccccggggcaacagcccctcccgggccgcacaggccgcactgagggcgccactccggggctcccgaactcccgggctcccggcggggacgaggcgcagggacgggggcacttccggctcgcggggcccgggtcgcccgcccgcccgacccgcccacctggctgtcgctgacgcagaagacgcggccgccacggctcaggcacacgcgggcgcccgggggctccgcggccgcgccgcagaaggtgaaggaacagcgcgaggcacgcagccgccgcaccgtggcgcgcacgagctcagccggccggcgaccccagcgcgcccacaggtacaggtagcacagcg

SEQ ID NO: 4416 - DNA, 1964 bp, Homo sapiens
  MAP TO AC005828.1; EXPRESSED IN FETAL LIVER, SIGNAL = 1.4; EXPRESSED IN LUNG, SIGNAL = 2.4; EXPRESSED IN HBL100, SIGNAL = 1.2; EXPRESSED IN PLACENTA, SIGNAL = 1.3; EXPRESSED IN BT474, SIGNAL = 1.3; EXPRESSED IN BRAIN, SIGNAL =   2; EXPRESSED IN BONE MARROW, SIGNAL = 1.2; EXPRESSED IN HEART, SIGNAL = 1.8; EXPRESSED IN HELA, SIGNAL = 1.9
ctagcccaccacacacttccccggctcatcagggaggatcttaccgtttcagcccccctcctgtgggaggacagggcaaagaatacccaagccctcccccttcccctctccggagaggccctcagtatcgggccagccctccagctgaaagtatgagtgtctatagatcccagtctggttcacccgtgcgctatcagcaggaaacaagcgtcagtcagcttcctggcagacccaaatctccattatccaaaatggcccagcggccctaccagatgcctcagctccctgtggcagttccccagcaagggctcaggctacagcctgccaaggcccagattgtgagaagtaaccagcccagcccagccgtccattcaagcaccgtcatccccacaggagcctatggccaagtagcccattcaatggccagtaaataccagtcttcacaaggagacataggagtcagccagagccggttggtttatcaagggtcaattgggggaatcgtaggggatggaaggccggtgcagcatgtccaagccagcctgagtgcaggcgccatctgtcagcatggaggattgaccaaagaggatcttccacagcgaccttcctcagcataccgaggtggcgtgagatacagccagacaccacagatcggacgcagccagtcagcatcctattacccagtctgtcactcaaaactagatctggagcgctcctccagccaactaggttcccctgatgtgtcgcatttaatcagaagacctatcagtgtcaaccctaacgaaatcaaaccgcacccgccaactcccaggccgttgctgcattcccaaagtgtaggccttcgcttctctccatctagcaatagtatctcctccacctccaacctaactccgaccttccggccatcttcttccatccagcaaatggagatcccactgaaacctgcatatgagaggtcatgtgacgagctgtcgccagtgtctccaactcaaggaggttaccccagtgagcccacccgatccaggaccacaccattcatggggatcatagataaaacagcacggactcagcagtacccccacctccaccagcagaatcggacctgggcagtgtcatctgtggacaccgtcctcagtcccacgtctccaggcaacctgcctcagcctgagtccttcagtccaccatcatccatcagcaacattgccttttataacaaaaccaacaatgcacagaatggccatttgctggaggacgattattacagcccccatgggatgctggctaacgggtctcgtggagacctcttggagcgagtcagccaggcctcctcctatcccgacgtgaaggtagctcggactctacctgtggctcaggcataccaggacaacctgtacaggcagctgtcccgagactctcggcaagggcagacatcccctatcaaaccaaagagaccgttcgtggagtctaatgtttaaaagacgttttgttggagtgagacccatatgttttcactgcacattttcaggcttggtttccacattcgaggtagttctctggcttaatttctcatgtagtttctgtgtggtgttcagaggtggcagcccacatgctgaaatcctttgcatgcagccgactgggaagcggcctcccgggagccaggacttcagtttctcttgtctgtgcccagccacatgctctctccctctcttcagatgccaacgaggagattttcgtgctgtgtgctttaacccagggagatcagacacactggtcagctttttccaggagacaatcgctttcactgatgttcttgttgtgtaattgtctttttccttttttaaaaaataaggtgttcttgttcgttttcttctagaaactttagaaagagtgcgatgcccctttgcctttgcatccttagccagtgtcacccacacagccagccgcagcgcattctcatgctgtgg

SEQ ID NO: 4417 - DNA, 386 bp, Homo sapiens
  MAP TO AL121758.5; EXPRESSED IN PLACENTA, SIGNAL = 4.6; EXPRESSED IN ADULT LIVER, SIGNAL = 6.2; EXPRESSED IN BRAIN, SIGNAL =   5; EXPRESSED IN LUNG, SIGNAL = 5.5; EXPRESSED IN BONE MARROW, SIGNAL = 5.6; EXPRESSED IN HEART, SIGNAL = 4.4; EXPRESSED IN HELA, SIGNAL = 3.3; EXPRESSED IN HBL100, SIGNAL = 5.1; EXPRESSED IN BT474, SIGNAL =   5; EXPRESSED IN FETAL LIVER, SIGNAL = 5.7
ggtcataccagcaatcccacttctgaaaacttattctatagacatgtttgcatacatgtggaatgaatgcattcatggttatttattgcaattttgtttggcatagcaaaatcttagtaatgatctaaatgcctgttacacatgggctgactgaagtatggaatattatatagccattaaaaagggtgagaccatttctatttctgtttatttttatttactttttttagagatgggatctcactatgttgaccaggctggtcttaaactcgtcactggtgagaccatttcttatgtactgatatagaaagctccctaagatgttttgacaaataagaaaaggaatgtgaaggatagtttctgtaaaagaggagacaatttgaaaa

SEQ ID NO: 4418 - DNA, 1958 bp, Homo sapiens
  MAP TO AF003625.1; EXPRESSED IN HELA, SIGNAL = 1.2; EXPRESSED IN HBL100, SIGNAL = 1.2; EXPRESSED IN HEART, SIGNAL = 3.9; EXPRESSED IN PLACENTA, SIGNAL = 1.1; EXPRESSED IN ADULT LIVER, SIGNAL = 0.97; EXPRESSED IN FETAL LIVER, SIGNAL =   2; EXPRESSED IN BT474, SIGNAL = 1.2; EXPRESSED IN BRAIN, SIGNAL = 1.3; EXPRESSED IN BONE MARROW, SIGNAL = 1.7
cacctccagtgaaggaaacgtttgcattttgtttttctctaagatggtggcagcatgaccctgtctcattgtgaaggctcctggcagggattttgtgctcactgctgtctgtcttatgttcgcttctttctcagagcatttctttaaaagaattctggaattataaaaggtcataatccagctggccttcccctgcaccttaaatgtgtagatttctgtacttaaaccacttattcttctctgtctttcccctttctccctccctcgatatgtttttcaggcaacatcttcgtggtcagtctctctgtggccgatatgctggtggccatctacccataccctttgatgctgcatgccatgtccattgggggctgggatctgagccagttacagtgccagatggtcgggttcatcacagggctgagtgtggtcggctccatcttcaacatcgtggcaatcgctatcaaccgttactgctacatctgccacagcctccagtacgaacggatcttcagtgtgcgcaatacctgcatctacctggtcatcacctggatcatgaccgtcctggctgtcctgcccaacatgtacattggcaccatcgagtacgatcctcgcacctacacctgcatcttcaactatctgaacaaccctgtcttcactgttaccatcgtctgcatccacttcgtcctccctctcctcatcgtgggtttctgctacgtgaggatctggaccaaagtgctggcggcccgtgaccctgcagggcagaatcctgacaaccaacttgctgaggttcgcaattttctaaccatgtttgtgatcttcctcctctttgcagtgtgctggtgccctatcaacgtgctcactgtcttggtggctgtcagtccgaaggagatggcaggcaagatccccaactggctttatcttgcagcctacttcatagcctacttcaacagctgcctcaacgctgtgatctacgggctcctcaatgagaatttccgaagagaatactggaccatcttccatgctatgcggcaccctatcatattcttctctggcctcatcagtgatattcgtgagatgcaggaggcccgtaccctggcccgcgcccgtgcccatgctcgcgaccaagctcgtgaacaagaccgtgcccatgcctgtcctgctgtggaggaaaccccgatgaatgtccggaatgttccattacctggtgatgctgcagctggccaccccgaccgtgcctctggccaccctaagccccattccagatcctcctctgcctatcgcaaatctgcctctacccaccacaagtctgtctttagccactccaaggctgcctctggtcacctcaagcctgtctctggccactccaagcctgcctctggtcaccccaagtctgccactgtctaccctaagcctgcctctgtccatttcaaggctgactctgtccatttcaagggtgactctgtccatttcaagcctgactctgttcatttcaagcctgcttccagcaaccccaagcccatcactggccaccatgtctctgctggcagccactccaagtctgccttcagtgctgccaccagccaccctaaacccaccactggccacatcaagccagctaccagccatgctgagcccaccactgctgactatcccaagcctgccactaccagccaccctaagcccactgctgctgacaaccctgagctctctgcctcccattgccccgagatccctgccattgcccaccctgtgtctgacgacagtgacctccctgagtcggcctctagccctgccgctgggcccaccaagcctgctgccagccagctggagtctgacaccatcgctgaccttcctgaccctactgtagtcactaccagtaccaatgattaccatgatgtcgtggttattgatgttgaagatgatcctgatgaaatggctgtgtgaaaaatgctctc

SEQ ID NO: 4419 - DNA, 438 bp, Homo sapiens
  MAP TO AP000012.2; EXPRESSED IN BT474, SIGNAL = 2.9; EXPRESSED IN FETAL LIVER, SIGNAL = 3.3; EXPRESSED IN BONE MARROW, SIGNAL = 2.8; EXPRESSED IN PLACENTA, SIGNAL = 2.1; EXPRESSED IN BRAIN, SIGNAL = 2.9; EXPRESSED IN LUNG, SIGNAL = 2.7; EXPRESSED IN HEART, SIGNAL = 2.3; EXPRESSED IN HELA, SIGNAL = 1.7; EXPRESSED IN HBL100, SIGNAL = 3.1; EXPRESSED IN ADULT LIVER, SIGNAL = 2.8
cctgtttaattcagcagaagagcaacttagatattcttaactgattgaaaactgctgttattacaaaatgctgatctccaaactttaactgaactctgcgtttgatgtaataatgttatagaacatttgagagtgcatgtgtttgttactctcagtttattggtatatataatttaaaatgaaactgttttctctttcagtgcatttgaaacgccactttatgtttcgaaaccatctctgtttagtttttgaaatgctgtcctacaacctctatgacttgctgagaaacaccaatttccgaggggtctctttgaacctaacacgaaagtttgcgcaacagatgtgcactgcactgcttttccttgcgactccagaacttagtatcattcactgtgatctaaaacctgaaaatatccttctttgtaaccccaaacgcag

SEQ ID NO: 4420 - DNA, 448 bp, Homo sapiens
  MAP TO AL121760.4; EXPRESSED IN ADULT LIVER, SIGNAL = 1.5; EXPRESSED IN BT474, SIGNAL = 1.3; EXPRESSED IN FETAL LIVER, SIGNAL = 1.6; EXPRESSED IN BRAIN, SIGNAL = 1.6; EXPRESSED IN BONE MARROW, SIGNAL = 1.4; EXPRESSED IN HBL100, SIGNAL = 1.6; EXPRESSED IN LUNG, SIGNAL =   1; EXPRESSED IN HEART, SIGNAL = 1.4; EXPRESSED IN HELA, SIGNAL = 1.2
acacccaggtacccttacccatatttaatgaatattaacatttagccctatttgctttacattacgcatacaagaaaaaaatatttctttaaaaaaaggcgagagaccttgaggctgttccctgggagagggaagcatgggtggccacaggcaggggctgatttcaccaggtcttacttcctattcctctgtctagttgtccccaccctgaagatcaccactgaaacctctgggacccatgtacatgtgcaagacagagtgaatctcacctgccacgtcctccacttctatcccgcccacctgcgactcacctggatggagaacaggagcatgatccagaccctggtgtcccctcgtcccctcaggccaccagaaatccagatgggacatactctctggagcacacgtggcaggcagaggccacgctggaggagcgtgagtttgcttg

SEQ ID NO: 4421 - DNA, 411 bp, Homo sapiens
  MAP TO AL021154.1; EXPRESSED IN FETAL LIVER, SIGNAL = 1.3; EXPRESSED IN ADULT LIVER, SIGNAL = 1.7; EXPRESSED IN LUNG, SIGNAL = 1.2; EXPRESSED IN BONE MARROW, SIGNAL = 1.2; EXPRESSED IN HELA, SIGNAL = 1.3; EXPRESSED IN PLACENTA, SIGNAL = 1.4; EXPRESSED IN BT474, SIGNAL = 1.3; EXPRESSED IN BRAIN, SIGNAL = 1.1; EXPRESSED IN HEART, SIGNAL = 1.6; EXPRESSED IN HBL100, SIGNAL = 1.2
ctcttccctgctgtgagaccccctctgctcctgggtgaagagaaggaggagaacagagagaagagttagttgggtaagaagccagagagaaaggaggattatccaaaagaagggtcagggctggaaagggacctcaggtctgaactcaggtcagagatcaagggcaaattgggagaaggaaggaaacggaccctttcccagtcaggttcttaagaccactagatttaccctgagtctgggcaaggaagagacaggggcctcaccaggttcttgaagagcgcagcaacctcgcgggtgaacacggccaagtttaggaagcctgtggacagctcatggctgttctgggacaggtggctgttgcctaaggattccacggcctctcggtactgctcttcattctccacatggcct

SEQ ID NO: 4422 - DNA, 402 bp, Homo sapiens
  MAP TO AF067844.1; EXPRESSED IN HEART, SIGNAL = 1.3; EXPRESSED IN BT474, SIGNAL =   1; EXPRESSED IN FETAL LIVER, SIGNAL = 1.1; EXPRESSED IN LUNG, SIGNAL =   1; EXPRESSED IN BONE MARROW, SIGNAL = 1.3; EXPRESSED IN BRAIN, SIGNAL = 0.96; EXPRESSED IN PLACENTA, SIGNAL = 0.94; EXPRESSED IN HBL100, SIGNAL = 0.99
tattggttcccaagctccagttctcatgaggcaccaggatgtattacagtttaccgtctttgggaatctatgagattcctatgtattctcataatattaatcctttgtatgtgtcaacttgagtgttcttgcaatcaaaagacctggcctaagatatgggcaatgtgggaaatccacatttaggcaggcagtggaaactttaaaactctgtctttagtgccagccagttacttttaatttgttttcctcatcataggaaaccttatagaattggagtgtgaatttcttggtgcaggatgggaatgcccagagcttgaggatttagggtttactggcagggctgagatctcttcacactcctactcaagaggcatgactatcttccatcacctcaagaaggtt

SEQ ID NO: 4423 - DNA, 410 bp, Homo sapiens
  MAP TO AJ229041.1; EXPRESSED IN HBL100, SIGNAL =  17; EXPRESSED IN HEART, SIGNAL =  15; EXPRESSED IN ADULT LIVER, SIGNAL =  25; EXPRESSED IN FETAL LIVER, SIGNAL =  20; EXPRESSED IN LUNG, SIGNAL =  19; EXPRESSED IN HELA, SIGNAL =  21; EXPRESSED IN PLACENTA, SIGNAL =  22; EXPRESSED IN BT474, SIGNAL =  18; EXPRESSED IN BRAIN, SIGNAL =  16; EXPRESSED IN BONE MARROW, SIGNAL =  17
attggagctgtccaagatggtcgtaatatattgttcataataaccgtgcttggctagcttggcagctcagcttgcctcttgtgagaacagggctggccatgagtgaagcaacaggaatatgaacaaggcattgaaaatatccaatgctgtaataagaaagtcctcttggtgcattatctatgccctccattaaagcagagaaacaaagatttcacttggtatcgcatagtaggtctccactaagcaaactaatgaccaacagtgaattccaaactgaagaccatcttgaaatttaaatgtggtagccagcctccaagatggtcctcagtgatcctcaccttctcatgatattcatgtcctgtgtagcccctatccacgtcgaagcagctggcctgggtgaccactagaac

SEQ ID NO: 4424 - DNA, 1959 bp, Homo sapiens
  MAP TO AC006184.1; EXPRESSED IN BONE MARROW, SIGNAL = 0.94; EXPRESSED IN HELA, SIGNAL = 1.4; EXPRESSED IN HEART, SIGNAL = 1.5
  unsure 445
  unsure 446
  unsure 449
  unsure 450
  unsure 451
  unsure 455
  unsure 459
  unsure 796
  unsure 812
  unsure 833
  unsure 857
  unsure 863
  unsure 884
  unsure 1004
  unsure 1856
cagataccagccttgggttggaagcagctgagagcctttctacccggccctgctcctctctggattctaccctgggcatgatccctgagtattgtttgtctgtttgccttgtaggcgtcatccctcaagtgtatcacttagttcaagagtcctggaatcttttcacatccactatgaacacctctcacctcctggccttgctgctcccaaaatctccacaaggtgaaaacagaagcaaacccctgggcaccccatacaacttctctgaacattgccaggattccgtggacgtgatggtcttcatcgtcacttcctacagcattgagactgtcgtgggggtcctgggtaacctctgcctgatgtgtgtgactgtgaggcagaaggagaaagccaacgtgaccaacctgcttatcgccaacctggccttctctgacttcctcatgtnnctnnnttgncagncggtgaccgccgtctacaccatcatggactactggatctttggagagaccctctgcaagatgtcggccttcatccagtgcatgtcggtgacggtctccatcctctcgctcgtcctcgtggccctggagaggcatcagctcatcatcaacccaacaggctggaagcccagcatctcacaggcctacctggggattgtgctcatctgggtcattgcctgtgtcctctccctgcccttcctggccaacagcatcctggagaatgtcttccacaagaaccactccaaggctctggagttcctggcggataaggtggtctgtaccgagtcctggccactggntcaccaccgcaccatntacaccaccttcctgctcctnttccagtactgcctcccactgggnttcatnttggtctgttatgcacgcatntaccggtgcctgcagaggcaggggcgcgtgtttcacaagggcacctacagcttgcgagctgggcacatgaagcaggtcaatgtggtgctggtggtgatggtggtggcctttgccgtgctntggctgcctctgcatgtgttcaacagcctggaagactggcaccatgaggccatccccatctgccatgggaacctcatcttcttagtgtgccacttgcttgccatggcctccacctgtgtcaacccattcatctatggctttctaacaccaacttcaagaggagaataaggccctggtgctgacttgccagagagggccccctggaggagtaagagcatctgcccctgtccacagtacatacggaagtctccaaagggtccctgaggctaagtggcaggtccaatcccatttaaccaggtctaggtcttctccctgccatgtcccttgccagggttttccacttagctaagtgggcacactgcaagctggggtggcacccagattcctggctttctggggtccagataggctggcaagagctgtttttgcatccatttgcatcgtgaagactggcattttgatacttcagctgtttgttcctgggagaattctgagcacagattccagaggtcacagtaagccttgcagcttgagctgaaagatgccagagccggagatgtctgctggcagcaggcagggttcattctggtgacacagcaacagatgcctggcctgggaacccagggatttcacctccaccagtgagaccacggggccactgtggggtgagggaaggagcgcttggagtcagagctctagaccttggtcaactcttcacctctgtgagagatggtgtgtggaggtgcttcagaagtaaagaattctgtggatgcaaagcagtgggattactgttagatcattagcgcatccagctgaagacaatagatgcagtagtcttggcttacagccctntgcagcaggaattccaggactcacttcctactccatcccttttctctatcactgtgtcttccaccttacatggaaatcagcctgcaagttcctctcctcgatg

SEQ ID NO: 4425 - DNA, 468 bp, Homo sapiens
  MAP TO AL132772.1; EXPRESSED IN HELA, SIGNAL = 6.7; EXPRESSED IN FETAL LIVER, SIGNAL = 1.9; EXPRESSED IN BT474, SIGNAL = 5.1; EXPRESSED IN BRAIN, SIGNAL = 2.2; EXPRESSED IN LUNG, SIGNAL = 2.5; EXPRESSED IN BONE MARROW, SIGNAL = 1.7; EXPRESSED IN PLACENTA, SIGNAL = 2.6; EXPRESSED IN HEART, SIGNAL =   2; EXPRESSED IN HBL100, SIGNAL =   3
aaacaacaatgggctcaaggggatgggtaaatacacacaaagacttagtattgtgcctggcatatgataagagctcaataaacggcagccagtagcttgatgatcagtaaatgtggttcctagaatagatgctcttcttggattcacaaagtcttttacaaaaccagaagagccttgaaggccctgaagggcagctgtctctgggacctacccactcagggagaagacagaccttggggccatgagcccaagtgtgcccatttcccagctgaagaaattgaggctcctcacctgcaggagtacatgtggttcttccgcacgctcctccggaagaagcccttgcagccgtcacagctcgaggcaccgtagtgtttgcccgtggcccggtccccgcagatggcacacagggcgctgacacccaggctgttgggcgcgttgaggttggtgccttctgatggggacgtgtct

SEQ ID NO: 4426 - DNA, 437 bp, Homo sapiens
  MAP TO AL121754.8; EXPRESSED IN PLACENTA, SIGNAL = 1.8; EXPRESSED IN HEART, SIGNAL = 1.3; EXPRESSED IN ADULT LIVER, SIGNAL = 1.5; EXPRESSED IN BT474, SIGNAL = 1.7; EXPRESSED IN BONE MARROW, SIGNAL = 1.4; EXPRESSED IN HBL100, SIGNAL = 1.6; EXPRESSED IN FETAL LIVER, SIGNAL = 1.5; EXPRESSED IN BRAIN, SIGNAL = 1.6; EXPRESSED IN LUNG, SIGNAL = 1.7; EXPRESSED IN HELA, SIGNAL = 1.3
ctaaatacccaggccagtgcccagcctgctgaaaggagaaaaactaggatcaacgattgtaaagatgagaaacaaaccaattactatgagataggttttcttaaaaagaattttaaaaaggtatttggttgatgatttatactacatgttaaaaaacaatgacattcattttttctaaagaaaaaatgttcccactggttaaaaaattgtgagctaaaaattccatgctttactttgaaaggctagtttaaaaaacccataattacttacctgcccaactctccccggatgtttcaaggccaagcctccactggagacagcagcagcaacattcccttcgtggtccacaaccacagcgcctaccgtgtccaaagtgcctgagtcattttcctgcagagcaaaagtggcacaagtattcactaggcatggagtgggac

SEQ ID NO: 4427 - DNA, 467 bp, Homo sapiens; identical to SEQ ID NO: 1750
  MAP TO AL121757.7; EXPRESSED IN BT474, SIGNAL = 1.7; EXPRESSED IN BRAIN, SIGNAL = 1.8; EXPRESSED IN BONE MARROW, SIGNAL = 1.5; EXPRESSED IN LUNG, SIGNAL = 1.3; EXPRESSED IN PLACENTA, SIGNAL = 1.3; EXPRESSED IN HBL100, SIGNAL = 1.5; EXPRESSED IN HEART, SIGNAL = 1.2; EXPRESSED IN FETAL LIVER, SIGNAL = 1.4; EXPRESSED IN ADULT LIVER, SIGNAL = 1.6

SEQ ID NO: 4428 - DNA, 472 bp, Homo sapiens
  MAP TO AF096876.1; EXPRESSED IN BT474, SIGNAL = 1.7; EXPRESSED IN LUNG, SIGNAL = 1.7; EXPRESSED IN BONE MARROW, SIGNAL = 1.4; EXPRESSED IN FETAL LIVER, SIGNAL = 1.7; EXPRESSED IN BRAIN, SIGNAL = 1.1; EXPRESSED IN PLACENTA, SIGNAL = 1.6; EXPRESSED IN HEART, SIGNAL = 1.6; EXPRESSED IN HELA, SIGNAL = 1.7; EXPRESSED IN HBL100, SIGNAL = 1.2
ggttatgagcccaaagatgcaggtggcttctagaaaaggcaaacaaatagcatcccttctatatcctttctgtttacaccttgattttagccccttaagactcagttttggatttctgaccaccagaactgtaagataaaatcctttgttgctttaaaccaccagatttgtggtgacatgagcagtagaaaactgacctacacctccctgttcatgttctagaacttctagggtaattcctcaagttttacctttaggtatcttctctgcctgtgagaccattaccaatggaaaaggatcttcccattgctttttaggtcagagaaagagagagagggagagagagagagagaaggaagagcaagaaaaagaggaagcaagccaggtagagcggtgaatgctgtaatgcaaaggtaacataaatgtgagacatttttcagggggcggggcatgggggaaggcatactggaga

SEQ ID NO: 4429 - DNA, 438 bp, Homo sapiens
  MAP TO AP000014.2; EXPRESSED IN HBL100, SIGNAL = 1.1; EXPRESSED IN PLACENTA, SIGNAL =   1; EXPRESSED IN HEART, SIGNAL = 1.1; EXPRESSED IN BT474, SIGNAL = 1.1; EXPRESSED IN BRAIN, SIGNAL = 1.3; EXPRESSED IN BONE MARROW, SIGNAL = 0.93
atctgtgatgacccggtagccataaccaatggtggtttctgtctctattgagaataaaaaagcagagacgaacccgttgaggttggtaacacaaggagtccaggaggggtcctctatgtggtccatgtctccccgtatgtatgcgatcaaccaccagatcattccaaaaaagagccaggtcactgtgtaaaccatgacaaaaatcaataggttgaatctccacttcaggtccactaatgtggtgaagatatcggtcaggtagcgataggtctccctcacgttgccgtgatgaacattgcactttccgtctttcctcacgtacctctggattttccttttggtccgatctcggctgatgtgtcttggcaggtcatccctggcctgcttaggcaactttggctggtgaatggccactgggctttcgacgtcctgatccat

SEQ ID NO: 4430 - DNA, 368 bp, Homo sapiens
  MAP TO AJ003147.1; EXPRESSED IN BONE MARROW, SIGNAL = 1.9; EXPRESSED IN PLACENTA, SIGNAL = 1.2; EXPRESSED IN HEART, SIGNAL = 1.9; EXPRESSED IN LUNG, SIGNAL = 1.2; EXPRESSED IN BRAIN, SIGNAL = 1.1; EXPRESSED IN HELA, SIGNAL = 1.1; EXPRESSED IN HBL100, SIGNAL = 1.1; EXPRESSED IN BT474, SIGNAL = 1.4; EXPRESSED IN ADULT LIVER, SIGNAL =   1; EXPRESSED IN FETAL LIVER, SIGNAL = 1.2
ccagagtgaagaaagggacgttcctgaactaaagtcatctggattttggtagacctgagactcccaatccccaggtcagagtgagctgctctgagctcctggtcccctttcccacaaagcagccagcactcagcactggatgaggaggaggcctgggcccgcttaccctgaatggctgccctgtggagctcctcggccagcaggcgctggttgatggcccgcaggacctgcagggtgagctgcacggcgtactcttccccatagtaggtgaccagcagagtggccatcttcaccggcctggctctctggatctggctccgggggatcctggagtgctccttctgcacactggtgttctgcagcttgaa

SEQ ID NO: 4431 - DNA, 477 bp, Homo sapiens
  MAP TO AC008169.1; EXPRESSED IN ADULT LIVER, SIGNAL = 1.3; EXPRESSED IN LUNG, SIGNAL = 1.2; EXPRESSED IN HELA, SIGNAL = 1.2; EXPRESSED IN HEART, SIGNAL = 1.4; EXPRESSED IN PLACENTA, SIGNAL = 0.99; EXPRESSED IN BONE MARROW, SIGNAL = 0.92; EXPRESSED IN FETAL LIVER, SIGNAL = 0.93; EXPRESSED IN BRAIN, SIGNAL = 1.4; EXPRESSED IN BT474, SIGNAL = 1.1; EXPRESSED IN HBL100, SIGNAL = 0.95
cctctgatggatcttgaaaaggtaaaaaaaaaaaaaaaaagtaaactgaaaaccttctggaaaggaacattcaagattcatgggaggggatcgaaatataaagattaacaggagtttggaaggaatttattccaactttcatggatgtctttgagaagttcaaaactccagtggaggaattaactgcaaatgtggtgaaaataggagaaccagaagtgaagcctgaggatgtgactaaattgctataagctcatgataaaattttaatggatgagaagttgcttcttatggatgagcaaagaaagtggtctctggagatggaatctactcctggggaagatgctgtgaacattgctgaaattacaacaaaggatttagaacattccataaacttaactgataaagcagtagaagggtttgagaggattgactccaatttttaaagaatttctactgtgggtaaaatgttatcaaaca

SEQ ID NO: 4432 - DNA, 433 bp, Homo sapiens
  MAP TO AP000018.2; EXPRESSED IN BT474, SIGNAL = 6.6; EXPRESSED IN BRAIN, SIGNAL = 6.1; EXPRESSED IN BONE MARROW, SIGNAL = 6.5; EXPRESSED IN LUNG, SIGNAL = 5.6; EXPRESSED IN HELA, SIGNAL = 5.6; EXPRESSED IN PLACENTA, SIGNAL = 6.8; EXPRESSED IN HBL100, SIGNAL =   7; EXPRESSED IN HEART, SIGNAL = 5.6; EXPRESSED IN FETAL LIVER, SIGNAL = 5.6; EXPRESSED IN ADULT LIVER, SIGNAL = 7.4
ctggtctggaactctaaaatcgaaattcaggattacagtttatgcagctaaaaattgcaaagccaacttgagatcacacggtggtggtgattggggtaatggtggagtgatgtggtgatcatagcagtagtgggatggtggtagagatggtatgatggcagtatggtggtggcaggaagatgctcatggaggtgacagtaaccatgatggtggaaatggagcaggaggtaaaagttgtgatggaggtaggggtgggggctgtgatggtaatggtaatagtgatggtgatggtggtggtgatggttggtggtggtgatggtggtgatattggtgatggtgttgcctgtgatgctgtggtagtgatgatcatggtggtggtggtggtggtgctaatggtgatggtggtgatggaggtaatgggagtggcagcatt

SEQ ID NO: 4433 - DNA, 384 bp, Homo sapiens
  MAP TO AP000022.2; EXPRESSED IN PLACENTA, SIGNAL = 2.5; EXPRESSED IN HBL100, SIGNAL = 2.8; EXPRESSED IN HEART, SIGNAL = 2.2; EXPRESSED IN ADULT LIVER, SIGNAL = 2.2; EXPRESSED IN BT474, SIGNAL = 2.3; EXPRESSED IN BONE MARROW, SIGNAL = 2.7; EXPRESSED IN BRAIN, SIGNAL = 2.7; EXPRESSED IN FETAL LIVER, SIGNAL = 2.3; EXPRESSED IN LUNG, SIGNAL = 2.6; EXPRESSED IN HELA, SIGNAL = 2.2
ttgacagcactgagtgagcccagctgtcctgctgctcatgcccctcagcacccatgagcctagtgggtgcccagtaaatccttagtgagtaaatgaatgagtcaatttccacacaccaaatcccaaagggataaaaagacattgcctttctgccatttcttggaagaattttttgagacaaactaaagaaaggaagctacttgttattaaatttttaaaaatctgcctactattttcaggcaaatatgtcatgatgacatctatgaaatctctgaaattaaagagaagcctgacgtttcacaggaattaaatgaagttgctgcatcacaggtgctccctgccacagggctccgtgtggcagcagcaaacagaactcctcgctgc

SEQ ID NO: 4434 - DNA, 436 bp, Homo sapiens
  MAP TO AF130417.2; EXPRESSED IN HELA, SIGNAL =   1; EXPRESSED IN HBL100, SIGNAL = 1.1; EXPRESSED IN HEART, SIGNAL = 1.2; EXPRESSED IN LUNG, SIGNAL = 1.1; EXPRESSED IN BONE MARROW, SIGNAL =   1
gcacttgagtttagatgaagaggctgaataactgatagatgacagagatgaaatgaatgaaaatatttctcaaggaacagtcattctcaagggaaagtcattgtcaatttcagtactgtatcctttacaaataatgtctcaaagacaatcaaactcaaaatagcaaaattatggtagagcccttaaatatgggtctagagactataatgatatctttagcccaaacaattgcacttgtcaacatggatgggaggaaaacagagggaacaccaacaaaagactctccacaatttcgtggtggtggtggcaatgatgatgatgaagatgaatgcaaaagtaggcatcagcaaagatattgccatctgagagatcgagattttgaatgtgatactcaactatgcaagtttaaacttgacacaacttgggataaaggtga

SEQ ID NO: 4435 - DNA, 364 bp, Homo sapiens
  MAP TO AL121879.4; EXPRESSED IN PLACENTA, SIGNAL = 0.94; EXPRESSED IN HEART, SIGNAL = 1.1; EXPRESSED IN ADULT LIVER, SIGNAL = 1.1; EXPRESSED IN FETAL LIVER, SIGNAL = 1.1; EXPRESSED IN BRAIN, SIGNAL =   1; EXPRESSED IN BONE MARROW, SIGNAL =   1
ttccaggatgaacttcccagaagcaactgacagcccctttgtcactgccactacagtggtaccacccctgctgcccttggattagggaagggacaaacagcctgagtactttacttgcaccctcagcacacaacaaccacaaccaccatttggagaggaggccagtctctcttcattgtgagccccagatcccctgctcttcaccaggcatgtcccctggtttgggcccacagtgcagctgccccacctgaagctgaaaattcccattggcagtggccctgtatttctctggggtggagttccaagagacaactgacagcccatctgccactgcaactgcggcagtgccattcttgttgccttt

SEQ ID NO: 4436 - DNA, 408 bp, Homo sapiens
  MAP TO AC007324.38; EXPRESSED IN BT474, SIGNAL = 1.8; EXPRESSED IN BRAIN, SIGNAL = 3.2; EXPRESSED IN BONE MARROW, SIGNAL = 1.8; EXPRESSED IN LUNG, SIGNAL =   1; EXPRESSED IN HELA, SIGNAL = 1.9; EXPRESSED IN HBL100, SIGNAL = 3.4; EXPRESSED IN PLACENTA, SIGNAL = 1.7; EXPRESSED IN HEART, SIGNAL = 1.6; EXPRESSED IN FETAL LIVER, SIGNAL = 1.9
ctgggtaaggcaggaatcaggctggggcggggagagtgttctgttctcttgaacatgtgctttgaatggcacagcataaataaagagacacagccaaggggaaggtatatatttaaaattcctccccttcattttcttcttcaaacgaatcagtccccacttcttcataatccttctccagggcagctaagtcttccctggcctcagaaaattctccttcttccatcccctctcccacataccaatgcacaaaggcccgcttggcgtacatgaggtcgaacttgtggtcgaggcgggcccaggcctccgcaatggccgtggtgttgctgagcatgcagacggcccgctgcaccttggccaggtctcccccggggaccacggtcgggggctggtagttgatgcccacct

SEQ ID NO: 4437 - DNA, 457 bp, Homo sapiens
  MAP TO AP000070.1; EXPRESSED IN BRAIN, SIGNAL = 1.8; EXPRESSED IN LUNG, SIGNAL = 1.7; EXPRESSED IN HELA, SIGNAL = 2.3; EXPRESSED IN PLACENTA, SIGNAL = 2.3; EXPRESSED IN FETAL LIVER, SIGNAL = 1.9; EXPRESSED IN ADULT LIVER, SIGNAL = 1.1; EXPRESSED IN BT474, SIGNAL = 2.1; EXPRESSED IN BONE MARROW, SIGNAL = 1.4; EXPRESSED IN HEART, SIGNAL = 1.3; EXPRESSED IN HBL100, SIGNAL = 2.4
gtgggagcagggcttagagccccagcactttctccctgtgcgataaagaccatttctgcagagagcatgttgcaaacacacacacgcacacaactggctcttcctttgcagggagcctgcatcgccccatatcccactttaccagcatggcaaaccctgctaattaatgacacaaaatccattcctctttctttgcccataaacagaacctcagctttctttggggggtgacaaggtgtctatttcatgtctcaggctctttgggaaccatatgagacaattctggttaatgagataaatgcctaatttgctgctggtgtaggagtgggggtggtgctgtgaaaactgtggctttcctgatatcagggataatgaaggctggagctgtcttttctcctctgttttccccttgaacatggatacggtgtctggagctgcagcagccatcttgtgacta

SEQ ID NO: 4438 - DNA, 412 bp, Homo sapiens
  MAP TO AF134726.1; EXPRESSED IN BT474, SIGNAL = 6.9; EXPRESSED IN ADULT LIVER, SIGNAL =  11; EXPRESSED IN BONE MARROW, SIGNAL = 8.2; EXPRESSED IN PLACENTA, SIGNAL = 9.8; EXPRESSED IN FETAL LIVER, SIGNAL =   9; EXPRESSED IN BRAIN, SIGNAL = 6.8; EXPRESSED IN LUNG, SIGNAL = 9.6; EXPRESSED IN HEART, SIGNAL = 7.5; EXPRESSED IN HELA, SIGNAL = 8.1; EXPRESSED IN HBL100, SIGNAL = 9.2
tgagtcaccagattcccctcctcttgtgtccttgccttcttcctccctgatcctctaccccctcgcccaatgtctgaaacacaggctttggacagaggaggaggagccagagctccgaatggattccaagaccaacaggatttataagggaaagaggcctaatctggggacattgggtggtgtgtggaaaggcagggagggcctctgtaaggggaaagatttgaggggctagggctgaacctcactgtcctcaccctgcctacagtgccctgggggtggctctggtcttgagcctactgtttatcttgcttctgcgcctggtggctgggcccctggtgctggtgctgatcctgggagtgctgggcgtgctggcatatggcatctactactgctgggaggagtaccgagtgct

SEQ ID NO: 4439 - DNA, 1947 bp, Homo sapiens
  MAP TO AC000378.1; EXPRESSED IN HELA, SIGNAL = 4.4; EXPRESSED IN PLACENTA, SIGNAL = 3.2; EXPRESSED IN HBL100, SIGNAL = 3.2; EXPRESSED IN HEART, SIGNAL = 3.1; EXPRESSED IN ADULT LIVER, SIGNAL = 3.7; EXPRESSED IN BT474, SIGNAL = 2.7; EXPRESSED IN BONE MARROW, SIGNAL = 2.3; EXPRESSED IN BRAIN, SIGNAL = 2.6; EXPRESSED IN FETAL LIVER, SIGNAL = 2.9; EXPRESSED IN LUNG, SIGNAL = 3.7
acagaaattagggcctgtggtattttttatgccattttgctaatgtacccagtattattttatagattagattcataaagtgtattcatctgtgtctagtaagtcggataactttttttttttttttcagctatgtcttctcattttacccaagaccttctgccagagcagggcatacaagatgcattcccaaaaagaatactgagaggatatggaaattgtggccttgataatttatatttaaggaaagactgggaaagtttagatgagtgtaagttgcaaaaagattataatggacttaaccaatgttcatcaactacccatagcaaaatctttcaatataataaatatgttaaaatctttgataacttttcaaatttacatagacgtaatataagtaatactggagagaaacctttcaaatgtcaagaatgtggcaaatcctttcaaatgctctcattcctaactgaacatcagaaaattcacactggaaaaaaattccaaaaatgtggagaatgtggcaaaacctttatccagtgctcacactttactgaacctgagaacattgacactggagagaaaccttacaagtgtcaagaatgtaacaacgtcattaaaacttgctcagtccttactaaaaatagaatttatgccggaggggaacattacagatgtgaagaatttggcaaagtatttaaccagtgctcccaccttactgaacatgagcatggtactgaggaaaaaccctgcaaatatgaagagtgcagcagtgtctttatctcttgctcaagcctttctaatcaacagatgattcttgctggagagaagctctccaaatgtgaaacatggtacaaaggttttaaccacagcccaaatccttccaaacaccagagaaatgagattggagggaaacctttcaaatgtgaggaatgtgacagcatcttcaagtggttctcagaccttactaaacataagagaattcacactggtgagaaaccatacaaatgtgacgaatgtgggaaagcctatacacagtcctcacacctcagtgaacacaggaggattcacaccggagagaaaccctaccaatgtgaagaatgtgggaaggtcttcagaacttgctcaagcctttctaaccataagagaactcattctgaagaaaaaccctacacgtgtgaagaatgtggcaacatctttaagcagttatcagacctcactaagcataagaaaacccatactggagagaagccctacaaatgtgacgaatgtggaaaaaactttacccagtcctccaaccttattgtacataagagaattcatactggagagaaaccctacaagtgtgaagaatgtggcagagtcttcatgtggttctcagacattaccaaacataagaaaacccatactggagagaaaccctacaaatgtgacgaatgtggaaaaaactttacccagtcctcaaaccttattgtacataagagaattcatactggagagaaaccctacaagtgtgaaaagtgtggcaaagccttcacccagttctcacacctgactgtacatgaaagcattcatacttgagaaaaaaataaacaaatataaaaataggcaaagccgttagtatctgctcgcatcccactttacatcagagttcagacttaataaagttatcataaatgtaattactattgaaagacctttcatgaaatataagtctccagagcacacaagagtatttcttctgaaaaaaatgttacaattatactagatggaagacttgcatcagttgcttaaactttcagaaaatttgtagagaaacccaacaaatctcataaatgtggaataacatttgttcaaaaatgatagcttagaaaacactagagttcatactaaaagatattttgcaaatacactaaatgggaaaaataagcaaggacacgttcagaaatg

SEQ ID NO: 4440 - DNA, 439 bp, Homo sapiens
  MAP TO AC010175.4; EXPRESSED IN HELA, SIGNAL = 2.5; EXPRESSED IN HEART, SIGNAL = 3.1; EXPRESSED IN FETAL LIVER, SIGNAL =  10; EXPRESSED IN ADULT LIVER, SIGNAL = 2.3; EXPRESSED IN BRAIN, SIGNAL =   2; EXPRESSED IN LUNG, SIGNAL =  12; EXPRESSED IN BONE MARROW, SIGNAL = 1.3; EXPRESSED IN PLACENTA, SIGNAL = 4.5; EXPRESSED IN BT474, SIGNAL = 0.96
catagcgtggctttagagggtaaagatgctcgttgtacgtctccatgttgctaatatattaacatagggcttagtgaaaagtgttatgggggatgtcttaagtctttcctttaaattctcatggtcctcaaatattcctaaatacttcttcaatgatttaataattgccttctcttttccattaactgttctacttttaagcctcccaattgccaagtgaacctggagcagaagactctttgggaaccactgacctgggtggaggagaaaccaccttgggcgttctgctgcttcatgatccacttcacaatgttagttgcagaggtcaggtcccctgaggtgggggctggctgggccgtgagataagcgaggagcacataggatgtcatctccacctcagcagagggagcctgggtttggtaaagatgccccactggtg

SEQ ID NO: 4441 - DNA, 396 bp, Homo sapiens
  MAP TO AC010892.2; EXPRESSED IN BT474, SIGNAL = 2.9; EXPRESSED IN BRAIN, SIGNAL = 3.2; EXPRESSED IN BONE MARROW, SIGNAL = 3.6; EXPRESSED IN LUNG, SIGNAL = 2.8; EXPRESSED IN HELA, SIGNAL = 3.1; EXPRESSED IN PLACENTA, SIGNAL = 2.8; EXPRESSED IN HBL100, SIGNAL = 2.8; EXPRESSED IN HEART, SIGNAL = 2.5; EXPRESSED IN FETAL LIVER, SIGNAL = 3.2; EXPRESSED IN ADULT LIVER, SIGNAL = 3.6
tcaaagcattcccagagtccagggccagcttccattaaacatttattatgtggtgggcaccgaactacatgaggcaataccagaattaggacttttgcaaaagagaaaagagacaacatttcagggaaatggattcacttttcagcagctccttcccaagttctacggagcccttcgacaatcatggcagtcatctcccttccccagacgagttaaactatattcttaaaaaaaaaacaacagtccccaaatctcccactctcactcagaaatattctttgatcccaataactgtaacttccacctgtcttcacagtattattcccctttttcaaaaaatcttcagtgactaacttcccattcctgatgggagtgaagtccaaacctttgtacatg

SEQ ID NO: 4442 - DNA, 1953 bp, Homo sapiens
  MAP TO AC002064.1; EXPRESSED IN BRAIN, SIGNAL = 3.8; EXPRESSED IN LUNG, SIGNAL = 3.2; EXPRESSED IN HELA, SIGNAL = 1.9; EXPRESSED IN PLACENTA, SIGNAL = 2.1; EXPRESSED IN FETAL LIVER, SIGNAL = 2.1; EXPRESSED IN ADULT LIVER, SIGNAL = 2.4; EXPRESSED IN BT474, SIGNAL = 1.7; EXPRESSED IN BONE MARROW, SIGNAL = 1.6; EXPRESSED IN HEART, SIGNAL = 3.3; EXPRESSED IN HBL100, SIGNAL = 2.2
cagaatgttgagcctccctccagaactactcaatcagaatctacattttaacgagattccgaagtgatctgtgtgcacattaaaatttgagaagccccactttagcacctcacctttgtgacagttaattttcctattgagatgcttttttaaaagccaaaagatttatgaagagaaaccagaatagtgatccttttttagcttacaaattgtgtcttactgtgctgtatgttaaagtgtggtgaaatattttacctctagaaagacaggacattacaatgtctagaagtgttttaatgttcagtaataggtaactgatgaccattttattttctctcccctaggatattcttggtgatcttggaagtgtccgtatcatggaatcaatctctatgatgggaagccctaagagccttagtgaaacttttttacctaatggcataaatggtatcaaagatgcaaggaaggtcactgtaggtgtgattggaagtggagattttgccaaatccttgaccattcgacttattagatgcggctatcatgtggtcataggaagtagaaatcctaagtttgcttctgaattttttcctcatgtggtagatgtcactcatcatgaagatgctctcacaaaaacaaatataatatttgttgctatacacagagaacattatacctccctgtgggacctgagacatctgcttgtgggtaaaatcctgattgatgtgagcaataacatgaggataaaccagtacccagaatccaatgctgaatatttggcttcattattcccagattctttgattgtcaaaggatttaatgttgtctcagcttgggcacttcagttaggacctaaggatgccagccggcaggtatgtattttacatttttattcttatgtatctggtattttgtagttaaacaactaagcaaatatcaaacattttaataccaaactctgacactttccaatgattatcatttgaaaattaattatgagcacctgaagattaatgtcctgaccttgtaagggcacattcccattcccaacatgatgtggaaaactgggaaaataacgtgaaagtcatccagttcaacttgagaataaagcagatggggcactctgtcaacaccattgtggaacaagcttttataagtaaacacataaaatatgttttaaaaatcttttaaatgtgcttatgcattacaattaagcatgattataaaacacttttattgtttttgtccataaagacagttgattagattccttagaaaataagtttcagtattatatcattgtatgctgtatatcagtcatgataaccatttactttccagtctttattttaatgactggtaaaagaacataggctcttctacaggctatttctgaatccttttttctcttttgcatatccaccaaagtttagcagtggatatagaataagcaaattagaaccaggacctgtgagacaaacctgaatttaataatatgcccatatttatgccaattttaaatttttaacagaaaaaaatgtggaacagtgattaaattccaaatgagctacagaaatagtctaaatttgtattatgtagcatttgtgcctttattttgagtgtttggtttatttttagacttattataccgtattataatttatacaaaattttttccaaatgagtttttaaaaaagtttattccaccattgtcacaactgtaataaattaatttagaatacttttttcttatttgtgttataaaaggacctctattttaaaagttcataaatgattatataatattcattcaaataggatttgtcattcatctggctaatgttatccaagattaataatccaaagagtgttatattgtcaccattatgtaaatagaaacatgcaaatatttctatgtggtctattttagagtccttatacaaacatcttcaggga

SEQ ID NO: 4443 - DNA, 428 bp, Homo sapiens
  MAP TO AF095703.1; EXPRESSED IN BT474, SIGNAL =   1; EXPRESSED IN ADULT LIVER, SIGNAL =   1; EXPRESSED IN BONE MARROW, SIGNAL = 1.9; EXPRESSED IN LUNG, SIGNAL = 3.2; EXPRESSED IN BRAIN, SIGNAL =   1; EXPRESSED IN PLACENTA, SIGNAL = 1.8; EXPRESSED IN HBL100, SIGNAL = 2.7; EXPRESSED IN HELA, SIGNAL = 2.2; EXPRESSED IN HEART, SIGNAL = 3.2; EXPRESSED IN FETAL LIVER, SIGNAL = 1.7
tttcttaccctggctcttgcccttgctctaatagggagctagtctctgcttttattagagaggaatagtcagcaccacctcaagactaatggatggcagggagctatggaaggataaattacaggcttcgtggacactttgagaacagatagggtaggccaatacaggtgctctgaacacccagtttgctaactggagcagagctaagaacttgaaagataatttccagtgagcccggtgaatgttctcttcttcctcccactgcattaggccggcgatgaatttgtggagaagaccctgagcaccatagcgaccagcacggatgcagcctccgttgtccacagcacagacttggtggtggaagccatcgtggagaatctgaaggtgaaaaacgagctcttcaaaaggctggacaagtttgctgctga

SEQ ID NO: 4444 - DNA, 1894 bp, Homo sapiens
  MAP TO AC002346.1; EXPRESSED IN PLACENTA, SIGNAL =  20; EXPRESSED IN HBL100, SIGNAL =   6; EXPRESSED IN HEART, SIGNAL = 5.4; EXPRESSED IN BT474, SIGNAL = 5.9; EXPRESSED IN FETAL LIVER, SIGNAL =   4; EXPRESSED IN ADULT LIVER, SIGNAL = 6.7; EXPRESSED IN BRAIN, SIGNAL = 6.2; EXPRESSED IN BONE MARROW, SIGNAL = 6.3; EXPRESSED IN LUNG, SIGNAL = 3.9; EXPRESSED IN HELA, SIGNAL = 7.2
tatctaagggaacccccaccttcactgcccacacccatatgccccacaactgctataactctgccactctttgcatgcatgcaaatactcattattggacaggaaaaacgattaatcccagttgtcctggaggacttggaggactcacttcactcataccagtatgtctgatgggggtggagttcaagatcaggcaacagaaaaacacataaaggaagtaatctcccaactgacctgggtacatagcacccctggcccctacaaaggactagatctctcaaaactacatgaaaccctccatacccatactggcctggtaagcctatttaataccaccctgactgggctccatgaggtctcggcccaaaaccctactaactgttggatgtgcctccccctgcactttaggccatacatttcaatccctatacctgaacaatggaacaacttcagcacagaaataaacaccacttctgttttagtaggtcctctttccaatctggaaataacccatacctcaaacctcacctgtgtaaaatttagcaatactatagacacagccaactcccaatgcatcaggtgggtaactcctcccacacgaatagtctgcctaccctcaggaatattttttgtctgtggtacctcagcctatcattgtttgaatggctcttcagaatctgtgtgcttcctctcattcttagtggcccctatgcccatctacactgaacaagatttatacaatcatgtcatacctaagccccgcaacaaaagagtacccattcttccttttgttattggagcaggagtgctaggcggagtagctactggcattggcggtatcacaacctctactcagttctactacaaactgtctcaagaactaaatggtgacatggaatgggtcgctgataccctggtcaccttgcaagatcaacttaactccctagcagcagtagtccttcaaaatcgaagagctttagacttgctaaccgcggaaagcgggggaacctttttatttttagaggaaaaatgctgttgttatgttaatcaatccggaatcatcaccgagaaagttaaagaaattcaaggtcgaatataacgtagagcaaaggagctgcaaaacactggaccctggggcctcctcagccaatggatgccctggattctccccttcttaggacctctagcagctataatattgttactcctctttggaccctgtatctttaacctccttgttaagtttgtcttttccagaatcgaagcagtaaaactacaaatcgttcttcaaatggagccccagatgcagtccatgagtaaaatctaccacggacccctggaccggcctgctagcccatgctctgatgttaatgacatcaaaggcacccctcccgaggaaatctcaactgcacaacctctactacgccccaattcagcaggaagcagttagagtggttgttggccaacctccccaacagcagttgggttttcctgttgagaggggggactgagagacaggaataactagatttcctagaccaactaagaatccctaagactagctgggaaggtgaccgcttccacctttaaacaccgggcttgcaacttagctcacgcccaaccaatcagatactaaagagagctcactaaaatgctaattaggcaaaaacaggagataaagaaatagccaatcatctgttgcctgacagcacagcaggagggacaatgatcgggatataaacccaggcattcgagccagctacagctaccctctttgggtcccctccctttgtatgggagctctgtcttcactctattaaatcttgcaactgcaaaaataaaaatagaaaaataataattcccaattgtgattttgaagtgctctaagatatgg

SEQ ID NO: 4445 - DNA, 435 bp, Homo sapiens
  MAP TO AC010491.2; EXPRESSED IN HELA, SIGNAL = 3.5; EXPRESSED IN HBL100, SIGNAL = 3.6; EXPRESSED IN HEART, SIGNAL = 3.2; EXPRESSED IN FETAL LIVER, SIGNAL = 2.9; EXPRESSED IN ADULT LIVER, SIGNAL = 3.3; EXPRESSED IN BONE MARROW, SIGNAL = 3.8; EXPRESSED IN LUNG, SIGNAL = 3.5; EXPRESSED IN PLACENTA, SIGNAL = 3.2; EXPRESSED IN BT474, SIGNAL = 2.8; EXPRESSED IN BRAIN, SIGNAL = 3.1
atggacaaagtcaagccaccaactcccaaatgtatcagtgcagctgcttcagaggaaatcactgaaaaataaagaaaaaccatccatgcatggctgcatccagtgtacctgtaatcctgaagaaaaggtcctaattccttccatgctgaaatgctagctttggtttcagagagagactttattgcaactgtgaccaccgtcactggtgagcactgctgttcggcccccagcggacttaaaagactggaatgtggtagtggcggtcgttctcggtcagcagggagatctccggccagtccctgagaggctcctctgggtagcagacttcaaagtctctggagttaaacttgaacagtctgaacacttttatctttacttcaagggagtatccaagtataaacatatcaatctgtggatgagatgaaagacaggtca

SEQ ID NO: 4446 - DNA, 407 bp, Homo sapiens
  MAP TO AC010906.2; EXPRESSED IN BONE MARROW, SIGNAL =   2; EXPRESSED IN LUNG, SIGNAL = 1.9; EXPRESSED IN HELA, SIGNAL = 2.1; EXPRESSED IN PLACENTA, SIGNAL = 2.1; EXPRESSED IN HBL100, SIGNAL = 2.2; EXPRESSED IN HEART, SIGNAL = 1.9; EXPRESSED IN FETAL LIVER, SIGNAL = 1.8; EXPRESSED IN ADULT LIVER, SIGNAL = 1.9; EXPRESSED IN BT474, SIGNAL = 2.1; EXPRESSED IN BRAIN, SIGNAL = 2.2
agcctatttgattttggggggtcatgtgtgtgtgtgtgtgtgtatggttgttttatacatatgtattttggttatatatatagatatatatagagagagagatatagccaaacaatgaaaacaattaaacacatgctatgttcaaatacattgcccaaccctattaaacttatggagagctatcctacttgctaagctcggtcagtttgttcagcataaagcaactttatgcctttagcctggaccccttagaagctacagaaatgaaaatggacccatgaccaagagagcacagagcagagataagaagctccctccagcttcctccccgacaattcaacaccctcctccaccacagggagctgagctgtgttcttcaccagcacagcatcatcagccacatcatc

SEQ ID NO: 4447 - DNA, 415 bp, Homo sapiens
  MAP TO AC010937.2; EXPRESSED IN HBL100, SIGNAL = 4.7; EXPRESSED IN HEART, SIGNAL = 4.2; EXPRESSED IN FETAL LIVER, SIGNAL =   5; EXPRESSED IN BT474, SIGNAL = 5.1; EXPRESSED IN LUNG, SIGNAL = 5.1; EXPRESSED IN PLACENTA, SIGNAL = 4.6; EXPRESSED IN HELA, SIGNAL = 5.2; EXPRESSED IN ADULT LIVER, SIGNAL = 5.6; EXPRESSED IN BRAIN, SIGNAL = 4.9; EXPRESSED IN BONE MARROW, SIGNAL = 4.7
tcacaacatcactaaccaaccttcaagataacttctcactcactacaatgaacatgatgtgtaagaggtagacagaaaacacagtgttataattgggaagaggtgataaaggcgtgagcaaaaattaaaagagtcatgtattatttgcctagtgttagacttgaaaaagggcttagtatatggtaagcactcaataaatgttcacttaatcataatatactagtacagaattacttagccatatctgtctgtccaacaccacacatataaatactcaccatttgactaggttttgatgaacttgaaattggcgtgaagagggagttagtaagaggccccacaaagaaacacaaaaaggcaactgtggtgaacaccaccaggttaccagatgaataccctgtctccccagtcttct

SEQ ID NO: 4448 - DNA, 494 bp, Homo sapiens
  MAP TO AC007859.1; EXPRESSED IN LUNG, SIGNAL = 1.3; EXPRESSED IN HELA, SIGNAL = 1.5; EXPRESSED IN ADULT LIVER, SIGNAL = 1.5; EXPRESSED IN BRAIN, SIGNAL = 1.5; EXPRESSED IN PLACENTA, SIGNAL = 1.1; EXPRESSED IN BT474, SIGNAL = 1.4; EXPRESSED IN BONE MARROW, SIGNAL = 1.5; EXPRESSED IN HEART, SIGNAL = 1.2; EXPRESSED IN HBL100, SIGNAL = 1.2; EXPRESSED IN FETAL LIVER, SIGNAL = 1.3
  unsure 467
aaactcatcatcttctttatggtaggttattagagaaaactacaacaaagcccaaaaaaatcaaaacatacatgtttttcagtattagtattcacactaaaaatactaaatttaaatattaaatattaaaatcatttcatttctgaaatgtttcaaagcacacacacaatgaattctaacctaattaataagtatttcaaatcattacagaaatattattctagtaattaccaaaaagactcaagaaaataaattttaaaaaaataaagcatagaatcaaaaatattaaacttatgcttatggattttccagaaacttggaagaaacaccatttctgttcttgcagctggccaacactttggtcccttcagtcttgattatatctattcctttcacatacttgaacttgcccatcatcagttattgttgctatatatatatatattcaatcctttcttccttgcagngctcctttacctttacaaacataatcc

SEQ ID NO: 4449 - DNA, 1969 bp, Homo sapiens
  MAP TO AC005366.1; EXPRESSED IN BT474, SIGNAL = 1.2; EXPRESSED IN BRAIN, SIGNAL = 4.3; EXPRESSED IN LUNG, SIGNAL = 3.5; EXPRESSED IN HBL100, SIGNAL = 1.8; EXPRESSED IN HELA, SIGNAL = 1.2; EXPRESSED IN PLACENTA, SIGNAL = 2.2; EXPRESSED IN ADULT LIVER, SIGNAL = 1.4; EXPRESSED IN FETAL LIVER, SIGNAL = 1.7; EXPRESSED IN HEART, SIGNAL = 1.9
tccgtggtgagatacacctgatggtaaaggtgcggcgacatcaggcctccccgcacggcgtccgcgtgcaaggagggccctggtgttcggtacagtgagctcaccggggctcggtataggtctctagactgcttccacttgtaaactttgaatatgattactccgaacactgtgaccacaaaccccacagaaaccaggattagagaaagaagtagataaaaggtgagattttttttctgctcccggggggcagagccagaggggaactcggctcgggcttcaggagagtcctcggttactgacacagtgagggtagcagtggtggagagcgaaggctccccattgtctttgatcaagaccgtgagagtctgcctgggtgaatctgtgtcttggactggacgggcagtactgatttgaccagtgtgcagccctatggcaaaaaggctctggttaggggatcccaagagactgtaggagagccaggcattgtgccctgcatccgcgtcccagcctaccacccgtgacactaggtggccagctgaggtacctcgaggcagcatctccaccgagctcccacctggccgaggatataggacctggggggcattgtcattgcgatcagtgacaaatatgttcacgctgatgttggtggctaggaccggggtgcccccatcgctgatatgagctgttaattcaaattcccgccgatcctcatagtctaggggcactaaggatgacactatgccattgtcacgatttattgtgaaatagcgacccactagcccggtttcagctccttgctccaagagaaagaaagaaagccgagcattctgcggggcgtcggggtcccagacacttaggtttagtattggagccccggggaggttgttttcttcaatgtaaacgtcgtaggaagattgagaagattgtggagggttgtcattgatgtcggacacttgaacacgcactattgtaagggctgagagggaaggggttccggcgtctcgggcggtgatgctgaggttgtattctggcacagtctcccgatccaggtctgcactggttttcaaagtgaagtaattcttgagggaagaagtaaggctgaaagggagacccggtggaacttcgcaggtcaccagcccgttctcgccagcatccaggtcagtcacactgagcaaagcgatgacagtccccagaggggcatcctcgggtactgggctgtacacggaggtgactgtgatctccggggcgttgtcattcacatccacaacctccaccaacactttgcaatgtgctccttcgggattggcgcccttgtctttggcctggatgtaaatctcatggagtttggtgtcctcgaagtccagccgacccttgattgtcagcatcccggttacaaggtctaaggcgaatagttgccgcacgccggcgcggttgtggctgccgaaggagtaaataatttcaccgttggggccttcatccagatccgttgcaaggacttgtaccacgcgcgtgccggagggtgcatcctccaggacgcgcgcccggtacaaggactggttgaagacaggcgcattgtcattcgcgtccagcaccttgatgtgaataggcaggctggcggagagagctggggtccctccgtccaacgccgtcagcactaactggagactaggctcccgttctcggtccagggcgcgctccaacaccagctccgcgtacttggtgctgtcctcccgcgtctgcacgcgaagcgcaaagtattcatttcggctcagctcataggtttgtaaagagttgcttcccacatcgggatcgtgcgcgctctcgagcggaaagcgcgtccccggagccacggcctcgctaatctccaatttcatttcctgggtagggaaagcaggattgttgtcgttgatgtcctggatcaccacttccacgctgaacagctccagcgggttctccactaccaact

SEQ ID NO: 4450 - DNA, 400 bp, Homo sapiens
  MAP TO AJ009612.1; EXPRESSED IN FETAL LIVER, SIGNAL = 2.8; EXPRESSED IN BT474, SIGNAL = 1.9; EXPRESSED IN ADULT LIVER, SIGNAL = 2.3; EXPRESSED IN BRAIN, SIGNAL = 2.1; EXPRESSED IN BONE MARROW, SIGNAL = 1.9; EXPRESSED IN LUNG, SIGNAL = 2.7; EXPRESSED IN HELA, SIGNAL = 2.2; EXPRESSED IN PLACENTA, SIGNAL = 1.8; EXPRESSED IN HBL100, SIGNAL = 2.4; EXPRESSED IN HEART, SIGNAL =   2
ctggaaggagaacaccatgcaggatggagctcatgttaaagccttgttctcactcactaacctttgttctccccagtttctttctttttaaaaaatgcatcctggacctctcagtgctctccctgatttctttaaaggagctgctcagatgtgctagttgtcttctttaaccacccagggattcctcccctctctgctctatgattctcaccttcctcttctagaatctgagtcaaatcctccaccagagtcactgcttcctcgctgctctctggatactgggactttacccaagtcctaacctcaccaggcaggatggtcaggaattgctccagcaccagcagctccaaaatttgttcctttgagtgaatctcaggtctcagccacttaaggcagagct

SEQ ID NO: 4451 - DNA, 454 bp, Homo sapiens
  MAP TO AC007275.3; EXPRESSED IN BT474, SIGNAL = 1.6; EXPRESSED IN BONE MARROW, SIGNAL =   1; EXPRESSED IN LUNG, SIGNAL = 0.96; EXPRESSED IN BRAIN, SIGNAL = 1.1; EXPRESSED IN PLACENTA, SIGNAL = 0.85; EXPRESSED IN FETAL LIVER, SIGNAL =   1; EXPRESSED IN HBL100, SIGNAL = 0.92; EXPRESSED IN HELA, SIGNAL = 1.6; EXPRESSED IN ADULT LIVER, SIGNAL = 1.2; EXPRESSED IN HEART, SIGNAL = 0.79
caaaagatgagaacccagcctgataaagggtgcaccttactctaaatagggctaaaggaagagacttacccaattttcaccggtctctagaattaattttgtaagaatgttttttagggtgcggttcatgctttctacctgtctagagctctggggtcgataggcaccatggagcttccactgaatgttcaatgccttactgactcactgagctatggatgaggtgaaagcaggtccattatcagaccctatggcagcaggcagcccatattgggggatgatttcattgactaagaacttaactactgtgttagcagtctcattcttggtagcgaatgcctcagtccatccagagaaggtgtctattaatactaaaaggtatttgtactcagccccgtgtggatttacttcagtaaagtcaatttcccacttttctcctggtgagtttccttgg

SEQ ID NO: 4452 - DNA, 1947 bp, Homo sapiens
  MAP TO AC003682.1; EXPRESSED IN BONE MARROW, SIGNAL = 1.3; EXPRESSED IN LUNG, SIGNAL = 1.3; EXPRESSED IN BRAIN, SIGNAL = 1.3; EXPRESSED IN HELA, SIGNAL = 1.3; EXPRESSED IN HBL100, SIGNAL = 1.1; EXPRESSED IN PLACENTA, SIGNAL = 2.2; EXPRESSED IN HEART, SIGNAL = 1.4; EXPRESSED IN BT474, SIGNAL =   2; EXPRESSED IN FETAL LIVER, SIGNAL = 1.5
cctgggcatacacttcacagcatcacttgtcaccagcagatgtgatcccactaaaagctattatcagaagaattaattgtataacatgcctcttagtcctgggccataccttagccttgtgcactgtacctgggagggcctaccctattccgtaaccttagggacaagtaatgcacaacagctgcttcctcaacctgaccccccaactcacttttcctaaaaacaggcccatatactggttctttgctgtaactgatgtgcatttgcaattgcattgtctcctcctaataaaggtaacatgtacttcaccatgatctctttacttttaggttgttggtgtggagtggaacatgaggaaacaccttctgaacagagaatttctggagaaagagtgccacagttcaggacttccaaagaaggttcatcttcccagaatgccgactcctgtgaaatatgttgcctggtcttgagagatattttgcacttggctgaacaccaaggaacaaactgcgggcagaaactacacacatgtggaaaacaattctacatcagtgcaaatcttcaacagcaccagaggcagcacattacagaggcacctttcagaagttatgtggacactgcctcgtttacacagagttgcatagtccatgtgtcggagaaaccctttacctgcagggagatcaggaaagacttcctggccaacatgaggtttctccatcaagacgccactcaaacaggggagaagccaaataacagtaacaagtgtgcggtggccttttacagtggaaaaagtcatcacaactggggaaaatgcagtaaagcctttagccacatagacacacttgttcaggaccagagaatcctcactagagaaggactttttgagtgcagtaaatgtgggaaagcatgtacgcgaagatgtaacctcattcagcaccagaaagtccacagtgaagaaaggccttatgaatgcaatgaatgtggaaaattctttacctactactccagtttcattatacatcagagagttcatactggagaaaggccttatgcgtgccctgaatgtgggaaatcgtttagtcagatatacagcctcaatagccataggaaagttcacactggagaaaggccttatgaatgtggggaatgtgggaaatcttttagccaaaggtccaacctcatgcagcatcgcagagttcacactggagaaaggccttatgaatgcagcgaatgtgggaaatcttttagccaaaactttagcctgatctaccaccagagagttcacactggagaaagacctcatgagtgcaatgaatgtggaaaatcctttagccgaagctccagcctcattcaccaccggagacttcacactggagaaagaccctatgagtgcagtaaatgtgggaagtcatttaagcaaagctccagcttcagttcacatcggaaagtccacacaggggaaaggccttatgtgtgtggggaatgtgggaaatcctttagccatagctccaaccttaagaaccaccagagagttcacactggagaaagacctgttgagtgcagtgaatgtagcaaatcctttagctgtaaatctaacctcattaaacacctgagagttcacactggagaaaggccttatgagtgcagtgaatgtgggaaatcctttagccaaagttctagcctcattcaacaccgcagagttcacacgggaaaaaggccttatcagtgcagtcaatgtgggaaatcctttggctgcaaatctgtcctcattcaacaccagagagttcacattggagaaaagccttagctgtactgagaatatgcaatttccttttagtgtaattatactgaaggagtacacctgtgagagagacaagtacctgatttggaagccccaacatctaaggatatacagtgggcggattccccttaagttccaggtatgtg

SEQ ID NO: 4453 - DNA, 464 bp, Homo sapiens
  MAP TO AC007859.1; EXPRESSED IN PLACENTA, SIGNAL = 0.64; EXPRESSED IN BT474, SIGNAL = 0.62; EXPRESSED IN LUNG, SIGNAL = 0.72; EXPRESSED IN HELA, SIGNAL = 0.72; EXPRESSED IN FETAL LIVER, SIGNAL = 0.66; EXPRESSED IN BONE MARROW, SIGNAL = 0.71; EXPRESSED IN ADULT LIVER, SIGNAL = 0.76; EXPRESSED IN BRAIN, SIGNAL = 0.86; EXPRESSED IN HEART, SIGNAL = 0.92
aaataagcccaggtttcatttaagttaaccctcatagaaattagagcatttaataaacaaattcagggaaatgatactgattttaaaattaaaatagtaaagagaaaaactaattccaccagcaaacaacaacaacaaaaaaaaaaccatgattttgaaaattttagattggaaactagcaagagagttattggggatatttatagaaaccagaatgaaaaccctaactacttttgtttgtttgcatacctagtcatctcaagtttattgcatttcaggagaaagtccttttaccatataagaaaggcataacttttaagtttattatcttccaagtttatcatcttctgttcgtcttcaacccaatgatcacctattccttcgagaatttttcagaggtgagcaactattcacagttctttgttcttaagctgttatttcagaccattagcttcctctggggc

SEQ ID NO: 4454 - DNA, 442 bp, Homo sapiens
  MAP TO AC010683.2; EXPRESSED IN HELA, SIGNAL = 5.7; EXPRESSED IN HBL100, SIGNAL = 5.8; EXPRESSED IN HEART, SIGNAL = 5.1; EXPRESSED IN FETAL LIVER, SIGNAL = 6.1; EXPRESSED IN LUNG, SIGNAL = 5.3; EXPRESSED IN PLACENTA, SIGNAL = 5.7; EXPRESSED IN BT474, SIGNAL = 6.4; EXPRESSED IN ADULT LIVER, SIGNAL = 8.6; EXPRESSED IN BRAIN, SIGNAL = 6.2; EXPRESSED IN BONE MARROW, SIGNAL = 7.4
tattatcgctgagcagtggcatttcagataactccaattttctgctgaatattttcaagcacctgggacaattcccattgaaatcagttgatactaagaggcatcaagggttagcaggagttcaaggtcaggatctctggaccaattcttggtctgggcagctactgtgcatttgcatcacagcacactgaaggccagcgtagatacagctgccgagggaagttctgctaagtatgattagaaccacagtagagttgaaggacttgtacccctaaaattctctagaagagggtctcatgaaggtgtagatacttcagggaagtcagatacacactgagtccccagtcagagcacacgaaagtctttttcagcttcttcggcatgtagattcttttggaattggacctattaaagaacatcaaccacagtgtctgcaaccaat

SEQ ID NO: 4455 - DNA, 468 bp, Homo sapiens
  MAP TO AC007304.11; EXPRESSED IN FETAL LIVER, SIGNAL = 0.97; EXPRESSED IN BT474, SIGNAL = 0.61; EXPRESSED IN BONE MARROW, SIGNAL = 0.86; EXPRESSED IN HBL100, SIGNAL = 1.8; EXPRESSED IN HELA, SIGNAL = 0.99; EXPRESSED IN ADULT LIVER, SIGNAL = 0.76; EXPRESSED IN BRAIN, SIGNAL = 0.95; EXPRESSED IN HEART, SIGNAL = 1.2; EXPRESSED IN PLACENTA, SIGNAL = 0.76; EXPRESSED IN LUNG, SIGNAL = 0.88
ttgcctctaactcctgagccaagtctctttccaccatactgcaatggaccttgaaaagcagagcaagtcttcctttcccaccagagtccagttgagctgattgctctgtgggtctgatgaaacaaagggtcttggttttacatttcccccaaagatgcttctgatgtgtgtggtctcactgccatggagcacatcccgggcagcagtccgtcccatgtgccaccagaaacaatgagaatcagttcagatagacttggaaggctggacacagctccaacaccattccagtaagaacagcttggaggtcaggacctgctgaaagcaaggcaggaagagagcctctgtatcttgaaagcggtgcactgtccttcccatgttctgccgagatggcaagctcacagctaacacgtgcagctgcaacatcttaagcaagttcctcatgccaaaggacacgaggtggaaacctct

SEQ ID NO: 4456 - DNA, 425 bp, Homo sapiens
  MAP TO AC010099.3; EXPRESSED IN BT474, SIGNAL = 5.5; EXPRESSED IN BRAIN, SIGNAL = 5.9; EXPRESSED IN BONE MARROW, SIGNAL = 6.4; EXPRESSED IN LUNG, SIGNAL = 6.1; EXPRESSED IN HELA, SIGNAL = 5.7; EXPRESSED IN PLACENTA, SIGNAL = 5.6; EXPRESSED IN HBL100, SIGNAL = 5.3; EXPRESSED IN HEART, SIGNAL = 5.1; EXPRESSED IN FETAL LIVER, SIGNAL = 6.6; EXPRESSED IN ADULT LIVER, SIGNAL = 6.6
cagtgaatctgccaacatggccattgccagttggccagaggatcaggtcacttgcatgtcctctctcagcatgagagaatatttgcatacttggctgcattctagttttgaaggacacctgcactgcttgttctggtcttagtgggatacagaggcactgtcttgaacagctttattttaacccatttaaacaaagagttaaactagaatttagaactttttaaggaaggatggtaaaaatcagtataaatacttaagtaaatttcgttttacccaaatattaatacataaaacacatacctttttacttagccttttattattagccatttaccttgttttctagatggaggaactgtgtttaatggtaccaactgttttgtggtgtttttgttgaagaagaggccattcttctcccgatgatt

SEQ ID NO: 4457 - DNA, 380 bp, Homo sapiens
  MAP TO AC010130.3; EXPRESSED IN HBL100, SIGNAL =   2; EXPRESSED IN HEART, SIGNAL = 1.6; EXPRESSED IN FETAL LIVER, SIGNAL = 1.7; EXPRESSED IN BT474, SIGNAL = 1.7; EXPRESSED IN LUNG, SIGNAL = 1.7; EXPRESSED IN PLACENTA, SIGNAL = 1.9; EXPRESSED IN HELA, SIGNAL =   2; EXPRESSED IN ADULT LIVER, SIGNAL = 1.7; EXPRESSED IN BRAIN, SIGNAL = 2.2; EXPRESSED IN BONE MARROW, SIGNAL = 2.1
tgagatctaccttccagggcagagaagtttatatttttgttgcgtatattgttgcatatactgcatattgagacctcatatattgttcatggaaaaaaaaatgtttaactcaatcaattagtagcaagcaattttgaggttctccaaatgtccccctatgtgaagttgtttggtgtgagcacaaagagaagccactgtattgaactgtgtgattctatcgcagggagaattgcttgatggagcacaagactacatgtcaggcctagatgatatgacagactccgactcctgtctgtctcgcaaaaagatcaagaagacagagagtggcatgtatgcatgtgacttatgtgacaagacattccagaaaagcagttcccttc

SEQ ID NO: 4458 - DNA, 448 bp, Homo sapiens
  MAP TO AL021579.1; EXPRESSED IN FETAL LIVER, SIGNAL = 1.4; EXPRESSED IN BT474, SIGNAL = 1.1; EXPRESSED IN ADULT LIVER, SIGNAL = 1.2; EXPRESSED IN BRAIN, SIGNAL =   1; EXPRESSED IN BONE MARROW, SIGNAL = 1.1; EXPRESSED IN LUNG, SIGNAL = 1.3; EXPRESSED IN HELA, SIGNAL = 1.6; EXPRESSED IN PLACENTA, SIGNAL = 1.5; EXPRESSED IN HBL100, SIGNAL = 1.1; EXPRESSED IN HEART, SIGNAL = 0.98
agcaccagcaaaaacacttgagtcatatgttctatgatattagaacagctatgatgtcactaggtgataggaatttttcagcttccttatgatcttatgggaccatcaatatatatgtggtctgttgttgactaaaatgtcatgcagcacatgactgtattgggtcatttgggatttgcattcttaagattttcagattccagatgaaattaacttctaacaatattttctctttaatccttatgtagatctcagccagcttttatgcaaagcagtttatcccagccatctgtggtcctttctggtactgctattcacaactttccaactgtccaacaccaagaacttgccaaggcacaatccggtcttgcctttcagcaaacatcaaatactcagcccattcctatattgtatgaacatcaactggggcaggcatcaggactaggag

SEQ ID NO: 4459 - DNA, 424 bp, Homo sapiens
  MAP TO AL021918.1; EXPRESSED IN BT474, SIGNAL = 1.8; EXPRESSED IN ADULT LIVER, SIGNAL = 1.9; EXPRESSED IN HELA, SIGNAL = 1.9; EXPRESSED IN HBL100, SIGNAL = 1.9; EXPRESSED IN HEART, SIGNAL = 1.9; EXPRESSED IN FETAL LIVER, SIGNAL = 1.6; EXPRESSED IN BRAIN, SIGNAL = 1.7; EXPRESSED IN LUNG, SIGNAL = 1.7; EXPRESSED IN BONE MARROW, SIGNAL = 1.9; EXPRESSED IN PLACENTA, SIGNAL = 2.5
cctactggaatgcttggctccatgatccatggctctgtcccttgctctaactgggaaatcacatcaggtttagaaacttggagtcctgttcattagggaaaaaaagaaagaaacctgcagtaaggggaaagtaccatatcagaattcaatcaccactttgtctttagaagaaatgatatgtagtaaaaacctgatgggagtggatagcatatcaagctttagtgttaccagttcccagacatggtgggagtataatttgggaactgatcggggttcaggaaaattattattttgtccctctgcttgctaggatggtagaaaccttttcaaaaactagaaatttagaaatggttggttactaaacttaaaggcaaactcccctgagcacaagagagaaccctcctcctgcacaccccttgatatt

SEQ ID NO: 4460 - DNA, 368 bp, Homo sapiens
  MAP TO AC010149.2; EXPRESSED IN BRAIN, SIGNAL = 1.9; EXPRESSED IN HELA, SIGNAL = 1.8; EXPRESSED IN HBL100, SIGNAL = 1.9; EXPRESSED IN HEART, SIGNAL = 1.8; EXPRESSED IN FETAL LIVER, SIGNAL = 1.5; EXPRESSED IN ADULT LIVER, SIGNAL = 1.9; EXPRESSED IN LUNG, SIGNAL = 1.5; EXPRESSED IN BONE MARROW, SIGNAL = 2.1; EXPRESSED IN PLACENTA, SIGNAL =   2; EXPRESSED IN BT474, SIGNAL = 1.8
cctaaggcaagatgccagtctatctgcaaagaacatggtaggggattgggagcctggttctgccagcatcagccttccccacctccaggccttatgagagaggccacatttctctggagagaattgtcagataccttctctcaagccaaatgaggtttaaagacatctaagcaggagatggacctccgtccctgggaatgtcagggaatgagagactctcagactcacctctgagaagtgtaaaggtgaaggtcatggctagcggggtcaagggtgccagagggctgagctgggagccagcaggggaataatgaagaagcacgattcccatggtctggtgcagaccttgtggatgggagctgtactgg

SEQ ID NO: 4461 - DNA, 459 bp, Homo sapiens
  MAP TO AL009029.1; EXPRESSED IN BONE MARROW, SIGNAL =   4; EXPRESSED IN HBL100, SIGNAL = 2.5; EXPRESSED IN HEART, SIGNAL = 4.3; EXPRESSED IN FETAL LIVER, SIGNAL = 4.8; EXPRESSED IN BT474, SIGNAL = 3.8; EXPRESSED IN ADULT LIVER, SIGNAL = 4.4; EXPRESSED IN LUNG, SIGNAL = 4.6; EXPRESSED IN BRAIN, SIGNAL = 3.7; EXPRESSED IN PLACENTA, SIGNAL = 5.5; EXPRESSED IN HELA, SIGNAL = 3.9
actgtgggtctcctctgagctgttctatcactcaattaaaggttcacttgaccttgtttaccctccacttgtccacataccactttcttcctgggcacagggcaagaactcaggacctaccaaatgacagggacaaaagtgatgtaacacaaacagggctgaaatgtgcctcttgcttgccacgtgtgggtgacaagaagaagagaggagaaaaagagagaagggctgtagccttttgaagagccagacctagagctccctgagccaggacttgacactctctttggggctatgcagttcctggtatttctaagcttctgggtgccaccaagttccctggtgccagctgtggaagctgcttgcagtactcctattccaggagcagccagcaaggagctggcgcctgtgccagcacctggagctgcccaccccaccgcagccaaggtgcctagctgtgtg

SEQ ID NO: 4462 - DNA, 476 bp, Homo sapiens
  MAP TO AC010491.2; EXPRESSED IN BONE MARROW, SIGNAL =  31; EXPRESSED IN HELA, SIGNAL =  34; EXPRESSED IN HBL100, SIGNAL =  51; EXPRESSED IN HEART, SIGNAL =  15; EXPRESSED IN BT474, SIGNAL =  44; EXPRESSED IN FETAL LIVER, SIGNAL =  33; EXPRESSED IN LUNG, SIGNAL =  45; EXPRESSED IN PLACENTA, SIGNAL =  60; EXPRESSED IN ADULT LIVER, SIGNAL =   5; EXPRESSED IN BRAIN, SIGNAL =  15
attctgcgaatgggaaacagaaaggaaattcaataagaaaaaggaatgatggctttttcgcaacgggtttgccgccagaacacaggtgtcatgaaaactacccctaaaagccaaaatgggaaaggaaaagactcatatcaacattgtcgtcattggacacgtagattcgggcaagtccaccactactggccatctgatctataaatgcagtagcatcgacaaaagaaccattgaaaaatttgagaaggagactgctgagatgggaaagggctctttcaagtatggctgggtcttggataaactgaaagctgagcgtgaacgtggtatcaccattgatatctccttgtggaaatttgagaccagcaagtactatgtgactatcactgatgctccaggacacagagacttcatcaaaaacatgattacagggacatctcaggctgactgtgctgtcccgattgttgctgctggtgttg

SEQ ID NO: 4463 - DNA, 486 bp, Homo sapiens
  MAP TO AF009660.1; EXPRESSED IN BT474, SIGNAL =   2; EXPRESSED IN BONE MARROW, SIGNAL = 1.5; EXPRESSED IN BRAIN, SIGNAL = 1.6; EXPRESSED IN LUNG, SIGNAL =   2; EXPRESSED IN HELA, SIGNAL = 1.4; EXPRESSED IN ADULT LIVER, SIGNAL = 1.7; EXPRESSED IN FETAL LIVER, SIGNAL = 1.4; EXPRESSED IN PLACENTA, SIGNAL = 1.8; EXPRESSED IN HEART, SIGNAL = 1.4; EXPRESSED IN HBL100, SIGNAL = 1.2
cacaggaaaaaccaccaaccaaggccaaggagaccagagcccagcacctcacccagaggaccccagtcagaggccccatctcagacccgaggctagcatgggctgcaggctgctctgctgtgcggttctctgtctcctgggagcgggtgagttgggttcacatcagctgtccttgaattcgaaactttttccttgtgatttcagcaacaagcctcctcctgggctctgcctgaattttgtccctttccccccgcagtccccatggaaacgggagttacgcagacaccaagacacctggtcatgggaatgacaaataagaagtctttgaaatgtgaacaacatctggggcataacgctatgtattggtacaagcaaagtgctaagaagccactggagctcatgtttgtctacaactttaaagaacagactgaaaacaacagtgtgccaagtcgcttctcacctgaatgccccaacagctctcactta

SEQ ID NO: 4464 - DNA, 416 bp, Homo sapiens
  MAP TO AC010904.2; EXPRESSED IN BRAIN, SIGNAL = 8.5; EXPRESSED IN HELA, SIGNAL =   9; EXPRESSED IN HBL100, SIGNAL = 9.7; EXPRESSED IN HEART, SIGNAL = 8.5; EXPRESSED IN BT474, SIGNAL = 7.8; EXPRESSED IN FETAL LIVER, SIGNAL = 8.4; EXPRESSED IN ADULT LIVER, SIGNAL =   8; EXPRESSED IN LUNG, SIGNAL = 8.6; EXPRESSED IN BONE MARROW, SIGNAL =  10; EXPRESSED IN PLACENTA, SIGNAL = 8.7
ctgagaaggtgggacacaggccaaaagaggcaggcagaggcaccagctggacacatgtctgggaacgcctctcccagtaaattaggtgagaatggagtaagattgagtttcaagagcttcacatttgtagaatttgtgcagaaaatgggaagcattcacactggttaactttgctcagtgattggtgaggttctctggtgactgatgggatggggaagagaggaggaagaaaaagagaaggagaatgttcgaggcagacacactggactgcccagagactgggctgttgacatgtcgaaagctacttgcatgtctgatggcaagaggagggctgttgcttctcatgtccacaggcccctggacgtgatcatgggtcattctccagagctctcaatgcccaagtgcagtcatgaaga

SEQ ID NO: 4465 - DNA, 465 bp, Homo sapiens
  MAP TO AC012458.2; EXPRESSED IN HBL100, SIGNAL =  15; EXPRESSED IN HEART, SIGNAL = 4.6; EXPRESSED IN BT474, SIGNAL =  12; EXPRESSED IN BONE MARROW, SIGNAL = 7.8; EXPRESSED IN BRAIN, SIGNAL =  14; EXPRESSED IN PLACENTA, SIGNAL = 9.5; EXPRESSED IN HELA, SIGNAL =  11; EXPRESSED IN ADULT LIVER, SIGNAL = 2.8; EXPRESSED IN FETAL LIVER, SIGNAL =  11; EXPRESSED IN LUNG, SIGNAL =  11
gagctggattttctccttttgtttcacttccttctctgttcctgatcatctcattatgttgagtattttatacacagagcacatgtaatataacaacttctttctgttgattatggcaagaagtccaagctggagctctccatttacccaatcccaccacaccccaggtttccacagctgtagctgagccctacaacttcatcctcaccactcacaccaccctagagcactctgattgtgcttcatggtagacaatgaggccatctatgacatcatctgccatagaaatctcaatattgagcacccaacctacactaaccttaactgctttattagccagattgtgccttccatcactgcttccttcagatttgatggagccctgaatattgatctgacggaacctcagaccaatctggtaccctatccccacattcacttccctctgctcacataggcccctaa

SEQ ID NO: 4466 - DNA, 497 bp, Homo sapiens
  MAP TO AC007402.3; EXPRESSED IN ADULT LIVER, SIGNAL = 0.8; EXPRESSED IN HEART, SIGNAL = 0.91
gaaggttggcaatgttgtctctataaaatcatttggcaagtgatagtaactaaccaatattgtactgtatatctactgataatttcactgttcatcaactagtactctatacaccacctaccaaccatcaatgccagcacagactccctactcatttttgagtagggaggaggaaacttcatattctcaatttcagtggtgagatttgagtgggattcctaatcttgagtttccactactcaggcctgaacaatcacagtcttttggaccccttgcctcatttattgaccagggagtggcagtgacagttcctgacagttctgctccaggaattctcacactttgtaatgtggacctgaaggagaagattgtgcaaattagccccagaaaaggggaagtatattgggagctgctggaaagggttacctgtggacctcatcaaaatgaagaaaaaaaaaaaagcctactacagatgaatagctgataaaagaaaaccc

SEQ ID NO: 4467 - DNA, 426 bp, Homo sapiens
  MAP TO AL022097.1; EXPRESSED IN PLACENTA, SIGNAL = 5.4; EXPRESSED IN HBL100, SIGNAL =  12; EXPRESSED IN HEART, SIGNAL = 4.9; EXPRESSED IN FETAL LIVER, SIGNAL =  13; EXPRESSED IN BT474, SIGNAL = 6.3; EXPRESSED IN ADULT LIVER, SIGNAL = 1.9; EXPRESSED IN BRAIN, SIGNAL = 8.4; EXPRESSED IN BONE MARROW, SIGNAL = 6.5; EXPRESSED IN LUNG, SIGNAL = 8.3; EXPRESSED IN HELA, SIGNAL =  19
ttagcaatcaacagcatgggtgccaaaaaaaaaaatctgtattaaaaccctttgttggaatgctttacactttccacagaacagaaactaaaataacctgttgtacagttagtcacaaatacagtcctcagttttttgcccatacacatgagtatttgtctaaaatatgtcttctttgtagcagctaggccctgccaccactgtgcttggctgagttcacaaatccgttgtaacctgtagcttccctgacacttctctggctctcctctccggctaagctttgtttcctaattaaaatcttctgccactgccttagctactgctgctactggaactgccctagccaccttggtttcatggtttggcaaagtattggcctctaccaccatagggaccagagcttctgcctccaaagtttcctccctt

SEQ ID NO: 4468 - DNA, 443 bp, Homo sapiens
  MAP TO AF017104.1; EXPRESSED IN BT474, SIGNAL = 1.4; EXPRESSED IN FETAL LIVER, SIGNAL = 1.9; EXPRESSED IN BONE MARROW, SIGNAL = 1.6; EXPRESSED IN BRAIN, SIGNAL = 1.5; EXPRESSED IN LUNG, SIGNAL = 2.7; EXPRESSED IN HELA, SIGNAL = 1.9; EXPRESSED IN PLACENTA, SIGNAL = 1.7; EXPRESSED IN HBL100, SIGNAL = 1.6; EXPRESSED IN HEART, SIGNAL = 1.8; EXPRESSED IN ADULT LIVER, SIGNAL = 1.8
cacctcctgtgacaaccctcccctctgacaattacactcacacccagttcccacgtgaacacgcggagtccagccttggagatgcagcttttgtcttgctgaaaccttccagttaaatttctccatcaatttttcaaatagtattattagctgagggactaaaatctgcctggcgttcttctgatgacaaaggtaacccatccctccctgtgctccccatcctcacgttgtttctaattcagattttcttctccctcctcctgaatacctgcatcttcttcctgactgacatggctttaggaaacacagcacattcacaaacatctgaagccaactgcaaggcacccgtcactcagcgagaaaagcagaaaggtgccaattcagatggctgagctacttcgcctgggtcccgacctgtatcaccacagggtcacagaaatgga

SEQ ID NO: 4469 - DNA, 446 bp, Homo sapiens
  MAP TO AC010941.2; EXPRESSED IN LUNG, SIGNAL = 1.2; EXPRESSED IN BRAIN, SIGNAL = 1.5; EXPRESSED IN BONE MARROW, SIGNAL = 1.8; EXPRESSED IN HELA, SIGNAL = 1.3; EXPRESSED IN HEART, SIGNAL = 1.3; EXPRESSED IN BT474, SIGNAL = 1.3; EXPRESSED IN FETAL LIVER, SIGNAL = 1.5; EXPRESSED IN PLACENTA, SIGNAL = 1.3; EXPRESSED IN HBL100, SIGNAL = 1.4; EXPRESSED IN ADULT LIVER, SIGNAL = 1.6
tgcggattcagcaactagagaaagggctgactctctgtttcatagattatgccttctatgtgtcctcacatggcagaaggggaaaaagctcccttgacgtcttacaagggcagtaatcccattcatgagagcagagctctcataacctcataatctcccaaaggcctcaccttctaagaccaccacactgaatattaggtttcaacatttgagcagggacaggaaggggatgattaaaccagcagctgctatccacctattctttttgtcttcaaactcttgttttagcatcctttttgactcaaggtatttgaaacttattgaagaccagtgcaaagttaaaaggaagaatggtcacacggtgacttcagcgaatatgaacagagagaaagagagagagagagataaaggggataaaaactagggagacagagtgctagacagag

SEQ ID NO: 4470 - DNA, 426 bp, Homo sapiens
  MAP TO AF019413.1; EXPRESSED IN HBL100, SIGNAL = 2.2; EXPRESSED IN HEART, SIGNAL = 2.1; EXPRESSED IN BT474, SIGNAL = 2.3; EXPRESSED IN BONE MARROW, SIGNAL = 2.3; EXPRESSED IN BRAIN, SIGNAL = 2.3; EXPRESSED IN PLACENTA, SIGNAL = 2.4; EXPRESSED IN HELA, SIGNAL = 2.9; EXPRESSED IN ADULT LIVER, SIGNAL = 2.3; EXPRESSED IN FETAL LIVER, SIGNAL = 2.6; EXPRESSED IN LUNG, SIGNAL = 2.8
agtgaggagcaactcatggctgctcatggcacaagccacccgccctgccagcttcacagtgcccacctcgtccacgtaacccagggttcggagcacctgcaagaaaaagggtgggcattggacacactgctgtcccctagcccccctgccccaaccactgccccacccacctctactcgctgatggtactcaggaagcagcagcaatgactgatccgacagtaggaagcgcagccgctccatctccttctgtatctgcattcgctcccgcagcttcaggtactgcagagagccacccgtcagccttctccttgccccttagcaggggtgcactgaggacaagggctgagatgggggcggtcagtctacaggggaccacagaggaaaagcccctactcccagcttgggagttaccacccagggtcct

SEQ ID NO: 4471 - DNA, 483 bp, Homo sapiens
  MAP TO AC011278.3; EXPRESSED IN PLACENTA, SIGNAL = 2.1; EXPRESSED IN FETAL LIVER, SIGNAL =   2; EXPRESSED IN ADULT LIVER, SIGNAL = 2.9; EXPRESSED IN LUNG, SIGNAL = 1.9; EXPRESSED IN HEART, SIGNAL =   2; EXPRESSED IN HELA, SIGNAL = 2.4; EXPRESSED IN HBL100, SIGNAL = 2.3; EXPRESSED IN BT474, SIGNAL = 2.3; EXPRESSED IN BRAIN, SIGNAL = 2.6; EXPRESSED IN BONE MARROW, SIGNAL = 2.9
ttatgggaaggatatgggggaatctgttcaaggatatatgcatttccactgccaattatgtggaatagtatgagacacagaaagaaacaaaacaaaaatgagtcattggaaagcagaccgaaaccatgaagagacatgttttctttctctgaatcttgctttcattggctttgattctaaggacaccagttattattaggagtgctgtctgcaggttgagaaaaagcagcctctggcattttaaaccaggtttagagctagataaaaatgagtcgcaaacctggtagattgaagccatgttgatggagtggtaggcatcgtatagtgggtaccatgaagatgagctgctcaatacctgaactttcaaagaagtcaatatccagcatttcctcatactccattagtaagtatggttatatagacttttttatactcttccaatttctttaatatgaggcattaactcagcttccactggagaca

SEQ ID NO: 4472 - DNA, 468 bp, Homo sapiens
  MAP TO AC009941.2; EXPRESSED IN LUNG, SIGNAL = 0.99; EXPRESSED IN HEART, SIGNAL = 1.8
  unsure 47
  unsure 206
  unsure 211
  unsure 231
  unsure 240
  unsure 263
  unsure 269
  unsure 271
  unsure 286
  unsure 290
  unsure 306
ttgggattttctgaactatcttttcattattatttctagtttaattnccatatagtcttcatcctctttctagtttcattagtcctcagagattaagcttatttttaaatcctggggcaagttaacttatccctatgtactcatcataagttgacaaaaactcagtattctgcctttctggaaataattgagaattgattcattgntactncattttcctttacctataanttatcttanctttaaattttttattcaggggncttctnanttacaaaattatgangctngaatataagattttantctctttttccttccaagaaaccattaaaatcatagcacaaatttttcataaggcatacatttacaataacaaagaaaataaagaggagaaagctaccaataaaaaaagagtttttaacagatttctagaggtgagaaagtagatgggggagtgatgactga

SEQ ID NO: 4473 - DNA, 457 bp, Homo sapiens; identical to SEQ ID NO: 2748
  MAP TO AC012064.1; EXPRESSED IN BONE MARROW, SIGNAL = 1.6; EXPRESSED IN FETAL LIVER, SIGNAL =   1; EXPRESSED IN ADULT LIVER, SIGNAL = 1.3; EXPRESSED IN PLACENTA, SIGNAL = 1.8; EXPRESSED IN HEART, SIGNAL = 1.5; EXPRESSED IN HELA, SIGNAL = 1.1; EXPRESSED IN HBL100, SIGNAL = 1.5; EXPRESSED IN BT474, SIGNAL = 1.1; EXPRESSED IN BRAIN, SIGNAL = 1.6; EXPRESSED IN LUNG, SIGNAL = 1.3

SEQ ID NO: 4474 - DNA, 354 bp, Homo sapiens
  MAP TO AC012593.1; EXPRESSED IN ADULT LIVER, SIGNAL = 2.6; EXPRESSED IN BT474, SIGNAL = 2.4; EXPRESSED IN FETAL LIVER, SIGNAL = 1.8; EXPRESSED IN BONE MARROW, SIGNAL = 1.7; EXPRESSED IN BRAIN, SIGNAL = 1.2; EXPRESSED IN LUNG, SIGNAL = 2.6; EXPRESSED IN HELA, SIGNAL =   2; EXPRESSED IN PLACENTA, SIGNAL = 1.8; EXPRESSED IN HBL100, SIGNAL = 1.7; EXPRESSED IN HEART, SIGNAL = 1.2
aatggatgttgaccgctctctctgagcatatcactcttcatgatttctttgtgcaataagacaggccatgttctgtggcaaaagtcagtaacaaaacaaggaagcaatatcttccaggacttcaaataccctgtattcccaattccacttcttagtggaaacagacttgcaaacatagatcaagtactttttcacatcagtgaggacaagaagttaagacagtctttggaaacaatggcattatacctgcgtttagaatccaaaagcttatgtgaaatttcccacgaactagtgacacaagaagtctttatctctccctgccacactacctgcctcctgccatcctgtattcaa

SEQ ID NO: 4475 - DNA, 418 bp, Homo sapiens
  MAP TO AC012443.1; EXPRESSED IN HBL100, SIGNAL = 2.4; EXPRESSED IN HEART, SIGNAL = 1.9; EXPRESSED IN BT474, SIGNAL = 3.1; EXPRESSED IN BONE MARROW, SIGNAL =   2; EXPRESSED IN BRAIN, SIGNAL = 2.9; EXPRESSED IN PLACENTA, SIGNAL = 1.2; EXPRESSED IN HELA, SIGNAL = 2.2; EXPRESSED IN ADULT LIVER, SIGNAL = 2.1; EXPRESSED IN FETAL LIVER, SIGNAL = 2.1; EXPRESSED IN LUNG, SIGNAL = 0.98
ggaaagaacttcattaccaacaacaatagctagaatatattacatgcattactagcatacaactaataattaatgggactttataggttctagctgaattccaaagaattcccattcatatgagtatctttttttctctttatcctcagtttgccaatctgatgctactaagtatgaatgttatgtgaagataaactcttgaccttggactttattgcaggaaatctacaaagatgcaaatactcaagttcacacattaagaaaaatggtcaaagaaaaagaagaagcaattcaaagacagtctaccctggaaaaaaagattcatgagctagagaaacaagggaccattaaaattcagaagaaaggggatggggatatcgccatactgccagttgtggcttctggcacattgtccatg

SEQ ID NO: 4476 - DNA, 413 bp, Homo sapiens
  MAP TO AC012072.1; EXPRESSED IN BONE MARROW, SIGNAL = 1.2; EXPRESSED IN PLACENTA, SIGNAL = 0.98; EXPRESSED IN FETAL LIVER, SIGNAL = 1.3; EXPRESSED IN HEART, SIGNAL = 1.7; EXPRESSED IN HELA, SIGNAL = 1.2; EXPRESSED IN HBL100, SIGNAL = 1.6; EXPRESSED IN BT474, SIGNAL =   2; EXPRESSED IN BRAIN, SIGNAL = 1.4
ccagtgacagagaaagcaactgatttctctgattgaattcattatggatttaagtctgtgtatttcatatgtgaaaaaaacaaacactgcataatcattttatattaatgaaatattagatgctgtcagtatcattgagatatgaagagaacagtttgccctgttatttttttttttctggtaatgcctggtttcattcatttattttctttgaccaggcaggaagttaggaaagtgatattcccctttttctgtcttctcagtatcgtcagtgaagcaggagcatcaatctacagtgtcagccctgaagctaacaaagagatgccagggctggaccctaatttgagaagtgcaggtaagaaactatggaccatcacaaaaacatgtgattttgatattttgggcagcatgtg

SEQ ID NO: 4477 - DNA, 374 bp, Homo sapiens
  MAP TO AC011422.2; EXPRESSED IN LUNG, SIGNAL = 1.1; EXPRESSED IN BRAIN, SIGNAL =   2; EXPRESSED IN BONE MARROW, SIGNAL = 1.4; EXPRESSED IN FETAL LIVER, SIGNAL = 1.1; EXPRESSED IN ADULT LIVER, SIGNAL = 1.2; EXPRESSED IN PLACENTA, SIGNAL =   1; EXPRESSED IN HEART, SIGNAL = 1.6; EXPRESSED IN HELA, SIGNAL = 1.1; EXPRESSED IN HBL100, SIGNAL = 1.1; EXPRESSED IN BT474, SIGNAL = 1.5
tgcttccacacctttcttgctgaaggacaaagtacataaaatgccggtgtttggcttccagatctgaaggaagctgtttagtactctggcaggatcacatcttgctgtggaacttcaaaacccacagcagagcttccttgcccttctctgggagctgctgcctcctccacagtcttcagcttctcctctgctaggccctcctctagttccaggtcagccacctttatcccatcctccactgccttgggcaccattttgggggcctcttcagcatttatatctgcacctttaactttctctaaggcttgcaccttcatcagctcagcctgtgcccccttaactgcggcttgggccccatcgccttgaattttctc

SEQ ID NO: 4478 - DNA, 396 bp, Homo sapiens
  MAP TO AL031983.1; EXPRESSED IN HELA, SIGNAL =  10; EXPRESSED IN HEART, SIGNAL = 6.5; EXPRESSED IN BT474, SIGNAL = 6.6; EXPRESSED IN BONE MARROW, SIGNAL = 3.6; EXPRESSED IN PLACENTA, SIGNAL = 4.8; EXPRESSED IN HBL100, SIGNAL = 9.4; EXPRESSED IN ADULT LIVER, SIGNAL = 1.7; EXPRESSED IN FETAL LIVER, SIGNAL = 6.4; EXPRESSED IN BRAIN, SIGNAL = 3.4; EXPRESSED IN LUNG, SIGNAL = 7.8
ggccaattttaaactgtcaatgtgagattactgaaaatgcagagttgtagagaaatgtatggtaacacaccattacacagaataatttataatacagagggtttttttttgtttgtttgtttttgaggaataaacaaacagtctttattaggctcagaccagaagtccatggatcttgaggagacctgtgtgtatttgtcagttttctttttcatgttcttttccacctatttctgtagcctcataagctgtttcttcttctggtagtggatcttggccttctccttcctcttcttcagggtggctgtcactgcctggtacttccagctaacttcataagctcggtgtccaggcggacaaattttcttgtaggcttcagacacacaagcttgaggg

SEQ ID NO: 4479 - DNA, 436 bp, Homo sapiens
  MAP TO AC012079.2; EXPRESSED IN LUNG, SIGNAL =  21; EXPRESSED IN BRAIN, SIGNAL = 6.3; EXPRESSED IN BONE MARROW, SIGNAL = 6.6; EXPRESSED IN HELA, SIGNAL = 7.6; EXPRESSED IN BT474, SIGNAL = 6.2; EXPRESSED IN ADULT LIVER, SIGNAL = 7.7; EXPRESSED IN FETAL LIVER, SIGNAL = 6.8; EXPRESSED IN PLACENTA, SIGNAL = 5.7; EXPRESSED IN HEART, SIGNAL = 5.4; EXPRESSED IN HBL100, SIGNAL =   6
ccaatggcctctgtagcatccctggccaagcggcaagcagaggccagatgctccatctgtctggactacctgagacacccaatgaccactgattgcaggcactacatctgaggtgcctgcatccaccaatgctggtaagaattacaggacatctctccctgtcctgtctgcctccagcactgtcctgacaagaacctcaagaggaacttccagttatgccacatgaccgatattgctaagcagcttctcaccactgcaaggcgcaaaaggaaactgcagggagaggagcccgtgtgcaggaagtcagatgtggccctgttctgtgagaaggatcctgagctactgtgtcaccagtatagggtctcctcgaccactgagatcaccccgatgcccattgaacaagctgcagctaagcacaggaagcagttcgagagct

SEQ ID NO: 4480 - DNA, 430 bp, Homo sapiens
  MAP TO AC011451.2; EXPRESSED IN PLACENTA, SIGNAL =  18; EXPRESSED IN HBL100, SIGNAL =  13; EXPRESSED IN HEART, SIGNAL =  10; EXPRESSED IN ADULT LIVER, SIGNAL =  13; EXPRESSED IN LUNG, SIGNAL =  15; EXPRESSED IN BRAIN, SIGNAL =  15; EXPRESSED IN HELA, SIGNAL =  17; EXPRESSED IN BT474, SIGNAL =  12; EXPRESSED IN FETAL LIVER, SIGNAL =  13; EXPRESSED IN BONE MARROW, SIGNAL =  11
cattcccccttctcccttagcctgtgttcttaaagacctaaaaccttcctccttatatcaactctactccccccatatttagacctctcacaacacaaactactattcctgtggcagctcctttatgtatctctcagcaaagacccactggaattcccctaggtaaactttcaccttctcgatgttcctttactcttcatctccaaagcccaactacacacatcactgaaacaattggagccttccagctccatattacagacaagccctctatcagtagtggcaaacttaaaaacattagcagtaattattgcttaggaagacacttaccctgtatttcactccatccttggctaccttccccttgctcgtcagactcttctcccaggccctcttcttgcttacttatacccagccctgaaaataacag

SEQ ID NO: 4481 - DNA, 475 bp, Homo sapiens
  MAP TO AF011889.1; EXPRESSED IN LUNG, SIGNAL = 3.8; EXPRESSED IN HBL100, SIGNAL = 2.7; EXPRESSED IN HEART, SIGNAL = 2.8; EXPRESSED IN BT474, SIGNAL = 2.6; EXPRESSED IN BONE MARROW, SIGNAL = 2.9; EXPRESSED IN BRAIN, SIGNAL = 2.4; EXPRESSED IN PLACENTA, SIGNAL = 3.2; EXPRESSED IN HELA, SIGNAL = 2.9; EXPRESSED IN ADULT LIVER, SIGNAL = 3.1; EXPRESSED IN FETAL LIVER, SIGNAL =   3
tggagttgtgacagagcaggttgcatttggggccaatgaaaggcccatgtgactggagaatcaaatgggagggcagaggggtgactagaaagttaggtccgggccagataatatggacctggtgggtctatccagggagtggagactccaagttctaggccaatggagtcactgaggtctttcaaggcgagaaattgacatgatctgggcttcaagttattaagagtcctgttgcaacaggacacagacacagattccagaggctttagacaaaatggtactaggccactgctgggtacataagaggtgctcactacacttgctgaatgaacaaaacaaagcaaggcccactgaggtggtccagaacaatgtgctgaaggatccagaggactgtgtggatgtgagaggaattcaggggcatcaagcagacatgggggcagggagcagaggaggaggaggtgttgaggaacccaag

SEQ ID NO: 4482 - DNA, 437 bp, Homo sapiens
  MAP TO AC012109.1; EXPRESSED IN PLACENTA, SIGNAL = 1.5; EXPRESSED IN HEART, SIGNAL = 1.5; EXPRESSED IN ADULT LIVER, SIGNAL = 2.3; EXPRESSED IN LUNG, SIGNAL = 1.2; EXPRESSED IN HELA, SIGNAL = 1.4; EXPRESSED IN HBL100, SIGNAL = 1.3; EXPRESSED IN BT474, SIGNAL = 1.6; EXPRESSED IN FETAL LIVER, SIGNAL = 1.8; EXPRESSED IN BRAIN, SIGNAL = 1.8; EXPRESSED IN BONE MARROW, SIGNAL = 1.7
gggaagactgggaggaagacatttagagactctgaaatagtctctaattgctttgcaaagtaagggatgagatcaccatgtgagtgagggaggatgttaatgggacttcaagaataaagaaaaagatttgacaaaactgagaggcctaactacagacagcttggttaaggattgcatgtacacataggaatgagtttcagtgtgcaagtctgacagggtaggttcacctgagttacgaatggggaatgtgtcagtggggaggcagaactggtgatgtggagagaggagaaaagggtcaagaacgtgtgttcatgcgcgcacgtgtgtgtgtgcgtgtgcatgtgcgtgtgcctgtgcatgtagaagaagatcataagtgagtgtgggtgggtgaaaaaagtgtttaagtggatcagtctaaggagggaccaggaagg

SEQ ID NO: 4483 - DNA, 398 bp, Homo sapiens
  MAP TO AC011504.2; EXPRESSED IN BONE MARROW, SIGNAL =  14; EXPRESSED IN PLACENTA, SIGNAL =  15; EXPRESSED IN FETAL LIVER, SIGNAL = 9.7; EXPRESSED IN ADULT LIVER, SIGNAL =  15; EXPRESSED IN LUNG, SIGNAL =  12; EXPRESSED IN HEART, SIGNAL = 9.8; EXPRESSED IN HELA, SIGNAL =  13; EXPRESSED IN HBL100, SIGNAL =  12; EXPRESSED IN BT474, SIGNAL =  11; EXPRESSED IN BRAIN, SIGNAL =  13
cccagagtctccttgagctgaccttgggccatcttctcagaagcagagtctagagagctgatcatattggagaggcccaggtctttgtttgattgtaacgagggcagcagggccatcttactcgcctcccgggcttggtctttgcagttgactgtgaccccgatggtgttatctttgcgtttcgctttgcccaggtggttggcctggagatgaagggccatgagctccatggaggacgttgtgaaagcacaaaacaagcagccgtgccatgcaatgctgtcctgcacagttaccgaggagcccgggagggaggcggcatctggccgcacagacaagtccaggggttcatactgagatttctcggacttcctctgggaggacttgccactgggtttctc

SEQ ID NO: 4484 - DNA, 447 bp, Homo sapiens
  MAP TO AC012113.1; EXPRESSED IN BT474, SIGNAL = 1.2; EXPRESSED IN LUNG, SIGNAL = 1.2; EXPRESSED IN BRAIN, SIGNAL = 2.6; EXPRESSED IN BONE MARROW, SIGNAL = 1.4; EXPRESSED IN FETAL LIVER, SIGNAL = 1.1; EXPRESSED IN ADULT LIVER, SIGNAL = 1.7; EXPRESSED IN PLACENTA, SIGNAL = 1.2; EXPRESSED IN HEART, SIGNAL = 1.6; EXPRESSED IN HELA, SIGNAL = 1.3; EXPRESSED IN HBL100, SIGNAL = 1.2
tcagaacctatgggctggactcatctggctgcgctcagaacctacacaaggttcctgcctggaatgtggtacagatgccttcatccatactggaagggtcatgagaaccaggctctgaagcacagagcatgggttggggtggcaataggggcaacaactctacaggcagatatgactttgacctaattctggaggtgcagttcctgattctgtaggaacatgcccaggatggcaggtggggacatctgagtactgaggcactcatgatcccaatggaaacaccaactcgcccaactcaccttccttggcatcataccacttggaatgccatacttcttcaccaactgctctccactcagctttgtatttgaggatgggcaccccacctgtggcctctggttcatcaaactgcacctgggctgtgctggagtatggctccacctggtc

SEQ ID NO: 4485 - DNA, 360 bp, Homo sapiens
  MAP TO AC011589.2; EXPRESSED IN LUNG, SIGNAL =   6; EXPRESSED IN BRAIN, SIGNAL = 6.4; EXPRESSED IN BONE MARROW, SIGNAL = 6.6; EXPRESSED IN HELA, SIGNAL = 6.9; EXPRESSED IN BT474, SIGNAL = 5.9; EXPRESSED IN ADULT LIVER, SIGNAL = 7.3; EXPRESSED IN FETAL LIVER, SIGNAL = 9.4; EXPRESSED IN PLACENTA, SIGNAL = 6.6; EXPRESSED IN HEART, SIGNAL = 5.4; EXPRESSED IN HBL100, SIGNAL = 5.4
cagaaagtgagggacttggcaaggtcacatatccagcaaatgtgtaccttctcagtctgcatccagggcttggcccacattagggaggtagcatggggcagtggaaaaagcacagacttggggtcatctaggcctaggttgaaagcccagttctgcctcttctctgcagtgtgacaacacttggagccagtttcctcttcattaaacttgcagatttgcactgaggattagagacaacatagaagatgatcaatatatgggagctgttattggcagcagtggccaggatactgactgggctagtagtcacgatgcagctaggatggtggctgggagaggggctgagtggtgggttgaaat

SEQ ID NO: 4486 - DNA, 479 bp, Homo sapiens
  MAP TO AC007842.1; EXPRESSED IN BT474, SIGNAL = 1.2; EXPRESSED IN HBL100, SIGNAL = 0.73; EXPRESSED IN FETAL LIVER, SIGNAL = 0.85; EXPRESSED IN HELA, SIGNAL = 0.61; EXPRESSED IN BRAIN, SIGNAL = 0.74; EXPRESSED IN PLACENTA, SIGNAL = 0.75; EXPRESSED IN LUNG, SIGNAL = 0.62; EXPRESSED IN HEART, SIGNAL = 1.2
tatcattcaacgaatatacaagatttcaaattcagccccatggtcatgaagagagagaggggattacagagatgaccagcataatggaggaggccctggtgcagtaggcaagatgcagaggctccaaggaggtgcctgttttcaacccaacaaatctcaatccattccttcgggaataagaagaaggaatccaactacctcttaaaagacagccctgaaactcatgatgaagaaagctgatattccagagaacagatacaaaaataactgggaccaatgaccttacccagtgatatcaggtggctgtagttctccaacatcacatccctgtacaaggtcctctgatcaggctgcaggcactcccactcctcctgagagaagtcaatggccacatccctgaatgtcactgatccctgaaaccacaaacacatggattatggtgaaattgaagaaagttgtttcaagacgaaaggagagga

SEQ ID NO: 4487 - DNA, 421 bp, Homo sapiens
  MAP TO AC012513.2; EXPRESSED IN BONE MARROW, SIGNAL = 4.4; EXPRESSED IN LUNG, SIGNAL = 4.8; EXPRESSED IN BRAIN, SIGNAL = 3.8; EXPRESSED IN PLACENTA, SIGNAL = 4.4; EXPRESSED IN HBL100, SIGNAL = 6.2; EXPRESSED IN HELA, SIGNAL = 5.5; EXPRESSED IN HEART, SIGNAL =   4; EXPRESSED IN BT474, SIGNAL = 3.8; EXPRESSED IN FETAL LIVER, SIGNAL = 4.4; EXPRESSED IN ADULT LIVER, SIGNAL = 4.4
caggaggtccagagcagaagatactgttgctaggcttggatctatttttacaattggttttaggtattgaccaatatcctgccaacaaaggtggttctaggtgaatcctcttgattgttttttacatgtggtatgaatcacttagccctcccacactaaagatggaggatccctgatcagaaaatataaagaagccatatatgtctccatctgtgttttaaaatccttactttttccaacagtgtctgctgcacagagctttacatccccgggagcctctacccccaattcagcagcatatttggaatatgctgaatcctcccgctgaggtgacaacaaaaagtcagattcctctctctaaaataaagaccctttttcctctgattgaagccaagaaaaaggatcaagtgactgctcagga

SEQ ID NO: 4488 - DNA, 475 bp, Homo sapiens
  MAP TO AC011632.2; EXPRESSED IN BONE MARROW, SIGNAL = 2.2; EXPRESSED IN PLACENTA, SIGNAL = 1.3; EXPRESSED IN HEART, SIGNAL = 1.5; EXPRESSED IN ADULT LIVER, SIGNAL = 1.9; EXPRESSED IN LUNG, SIGNAL = 1.4; EXPRESSED IN HELA, SIGNAL = 1.2; EXPRESSED IN HBL100, SIGNAL = 1.6; EXPRESSED IN BT474, SIGNAL = 1.6; EXPRESSED IN FETAL LIVER, SIGNAL = 1.5; EXPRESSED IN BRAIN, SIGNAL = 1.6
ttttctagctccaaaaagatatttcacatacttagacttttttttctatgtgaagtagtttctttttcatattcatttagtggctcaagctgatgaatcagttagataaaattctcacattcttagtcttctgagtagaactcattaagtactgtagaaaaaaacacccaagtttcaaagatgccagttgattcggtcattttcagattaccctatttgattcacactggaattactgagcaaacttacttatttttctgagacagtgtctcactctgttgccaaggctggagtgcaatggcatgatcacagcccactgaagcctggacctcccaggctcagacgatcctcccacctcagcctcacaggcgtacttctcctcatgtatgtcttcgttgtctttctctgtggcctattttcattttcaaatacagacagtataggaaaaagctaaaggattcagtgctgttttccc

SEQ ID NO: 4489 - DNA, 453 bp, Homo sapiens
  MAP TO AC008267.1; EXPRESSED IN BONE MARROW, SIGNAL = 0.77; EXPRESSED IN BRAIN, SIGNAL = 0.75; EXPRESSED IN PLACENTA, SIGNAL = 0.61; EXPRESSED IN BT474, SIGNAL = 0.99; EXPRESSED IN HBL100, SIGNAL = 0.75; EXPRESSED IN FETAL LIVER, SIGNAL = 0.86; EXPRESSED IN LUNG, SIGNAL = 0.63; EXPRESSED IN HEART, SIGNAL = 0.86
agcagccaattctcaaatcgtcactttcaaataccgagtgcatttcagtcttggtagcactgtgtaacgtcacttcagtcagcaaatggccttccattcttgtgataagtacagaagagaagtctcattttaggatcctagctgctttgtcatgtcatttgacctagtacttcgaaaggtgatgtgtgtgggcctgggattgtctgagtggtcagtgatgcctcaggctttccctaaactgaaggaggtgacaagacgaatggtcacggtttgtccttggagctcttgtttactgtctctctccctttagagcccttcactgggttacacctcagatgctgtgtgtccctgttaatgaagacatcccagaagtgtctgatacggtgttgaaggcaatcacaggtcagtgaaaccaagagcctttttattgggatgttttccccttaaagttaa

SEQ ID NO: 4490 - DNA, 416 bp, Homo sapiens
  MAP TO AC012130.1; EXPRESSED IN BRAIN, SIGNAL = 2.6; EXPRESSED IN BONE MARROW, SIGNAL = 2.9; EXPRESSED IN PLACENTA, SIGNAL =   3; EXPRESSED IN FETAL LIVER, SIGNAL =   3; EXPRESSED IN ADULT LIVER, SIGNAL =   3; EXPRESSED IN LUNG, SIGNAL = 2.3; EXPRESSED IN HEART, SIGNAL = 2.4; EXPRESSED IN HELA, SIGNAL = 2.5; EXPRESSED IN HBL100, SIGNAL = 2.8; EXPRESSED IN BT474, SIGNAL = 2.6
gctgagactctgaagcctccaaagaattaaaaagacacaaactagcattcagaggggctaacaggactcatttagagtcagacctgagatctaatccaaaccagcccgaatgcctaccttccaaggttacaggaaaagttaaaggagatgagtgtaaagttggctgattcagtgtgctagattgcaaacacagctaccaattcttcccatccctgcatgcacaacccttgcaaagtgacttttgtagctcctccaagttaagaggtggagtctatttctctaccccttgaatctgggcttgaccgtgaaacttgctttggccaaaagaacagtagcgaatgtggtacaaatgcttggccattggctgctcgttcttgttgctcttgggaatgctgggaccaccctgtgaagaagct

SEQ ID NO: 4491 - DNA, 464 bp, Homo sapiens
  MAP TO AC011281.2; EXPRESSED IN BT474, SIGNAL = 1.5; EXPRESSED IN BRAIN, SIGNAL = 1.2; EXPRESSED IN BONE MARROW, SIGNAL =   1; EXPRESSED IN PLACENTA, SIGNAL = 1.8; EXPRESSED IN ADULT LIVER, SIGNAL = 1.5; EXPRESSED IN FETAL LIVER, SIGNAL = 1.1; EXPRESSED IN HEART, SIGNAL = 1.2; EXPRESSED IN HELA, SIGNAL = 1.1; EXPRESSED IN HBL100, SIGNAL =   1
ttgccactactggggatagggaagctctttttactaacaaaaaagatttatcagagtttacaagctcagtgtccccagctcaatcatagtcctcccaaatgtccccaatccaagttgcagggtcctattcttttccaatcactgccctcactttccagtagacatatggcaaggctgtacatgcacctttcattgcaggtcagccacttgcataagagcttgtatctgtttttcagccctttctctataggagataaggagaattctctacaggagaatttcagccccttctctaaaggagataagactctgactcagcgcattcttagaagatttgaggcgcagtatctgcttctgaaaccaggaggagttaatgaccttgatttcatcactttctttcataactttgtccactgaacttaggagtaaccaactaccttcattattttctttggttctccaca

SEQ ID NO: 4492 - DNA, 453 bp, Homo sapiens
  MAP TO AL049596.11; EXPRESSED IN BRAIN, SIGNAL = 0.96; EXPRESSED IN LUNG, SIGNAL = 1.2; EXPRESSED IN HBL100, SIGNAL = 1.3; EXPRESSED IN HELA, SIGNAL = 1.9; EXPRESSED IN HEART, SIGNAL = 3.5; EXPRESSED IN FETAL LIVER, SIGNAL = 1.4; EXPRESSED IN BT474, SIGNAL = 1.3
cacaatgttccagatgccagccacgaatgcctctgccctgtgtcactacatgttcttttctgagaaacattcaatcactgagtgttacacactatggttgaaagaaatgatccactcaccaccatccaccctctctcatcctctgtgtgaatatcccaataacagaggctgaagacagaaagtttgtccctgtttcttcacaccagggacattacttggtgacctggtgaatggcatgggcaaggtagcccatgttgctggaggttatccctgccacagagatgcggccgtcctttgccatgtagatggagaactccttggtcagccaccccacctgttcaggctttagctctgtgaaacaagacatgccaatttggtcagtgatgtgttgccagttgtgagtggaacccttcttcttgaggttgaagaccagctgagtccgcatgctaatga

SEQ ID NO: 4493 - DNA, 390 bp, Homo sapiens
  MAP TO AL049646.17; EXPRESSED IN BT474, SIGNAL = 1.1; EXPRESSED IN FETAL LIVER, SIGNAL = 1.2; EXPRESSED IN BONE MARROW, SIGNAL = 0.93; EXPRESSED IN LUNG, SIGNAL = 1.1; EXPRESSED IN HELA, SIGNAL =   1; EXPRESSED IN HEART, SIGNAL = 1.2; EXPRESSED IN ADULT LIVER, SIGNAL = 1.2; EXPRESSED IN BRAIN, SIGNAL =   1; EXPRESSED IN PLACENTA, SIGNAL = 1.1; EXPRESSED IN HBL100, SIGNAL = 1.1
ttctcatggcatccttgtccttaatataaaatagtgtccatgcggtaaccttgcctgaagcaaggttttggagcagcaagattgatattagatgtggatatttgtgctgtgggctattaaagaccactcacacactcacacatgcacacactcatagtcacctgtccttgtgacttagaattcaatgttggaaagaaagtgtttgccttgagtgaatattttgaagtgggggaaatgaccacattctgtaatcctgcagcctgaaaacagactcctgctgaaggaagtcggacccacgggggaaggaagagtctctgtgattgaacagctgctggatgaggtaagtgttgccaaaggagccagtctctctgaagagttcagcctggcatt

SEQ ID NO: 4494 - DNA, 478 bp, Homo sapiens
  MAP TO AC012665.1; EXPRESSED IN LUNG, SIGNAL = 2.6; EXPRESSED IN PLACENTA, SIGNAL = 2.8; EXPRESSED IN ADULT LIVER, SIGNAL = 2.9; EXPRESSED IN BONE MARROW, SIGNAL = 3.1; EXPRESSED IN BRAIN, SIGNAL = 2.4; EXPRESSED IN HEART, SIGNAL = 2.4; EXPRESSED IN HELA, SIGNAL = 3.6; EXPRESSED IN HBL100, SIGNAL = 3.1; EXPRESSED IN FETAL LIVER, SIGNAL = 3.2; EXPRESSED IN BT474, SIGNAL = 2.5
cactttcacaccgacacagcaaagcgcaaccacacgagaattagagagacaaaacgaacgcaatttttgcgtgcacactcgggcacacacttggactcactcacgcacccacccagagcctctgagtcacgaacaaacacgcacgcgcggggctacacactcgttcccctcccagctttctgctggagcaggggaacagggaagatggcccgagaaggccttggcattgcagtgaccccctcccgccccccgcatccgattcaatacgaggaaggaggtgggcggggtgggggagacagacgggttctcgcccctctcccccgctcccaggctcttgagactttccgttcccttaccgccccaccttctgtactaaactttttccttccacatcttcccgcctgggccctgcagcgccgacctctgctggaacccggagcttttcttgcacctccccgggaagagggtcccaaagatg

SEQ ID NO: 4495 - DNA, 431 bp, Homo sapiens
  MAP TO AC012071.2; EXPRESSED IN BONE MARROW, SIGNAL = 1.5; EXPRESSED IN LUNG, SIGNAL =   1; EXPRESSED IN PLACENTA, SIGNAL = 0.98; EXPRESSED IN HBL100, SIGNAL = 1.1; EXPRESSED IN HELA, SIGNAL = 1.4; EXPRESSED IN HEART, SIGNAL =   1; EXPRESSED IN ADULT LIVER, SIGNAL =   1; EXPRESSED IN BT474, SIGNAL = 1.4; EXPRESSED IN FETAL LIVER, SIGNAL = 1.1; EXPRESSED IN BRAIN, SIGNAL = 1.2
tataccccattgtgtggtgggataatcactctgtgatttttcttcccattcacattatcaaacttatatgtcttttctcctattaatatgccttttgtcatttgattttcagtgacccttcaaaagacaaaggggaaattggtccctacaacatcttagttgcaaatttcaaaatactgtttacctggctcattcttgtgaaccaggccatgtatgccctatgttaaaggcccacttatggatcagctgtctgtggatcaagcatctacctgcatgcaaaccactttcgtcctggttagagaaggtggagaagcagcggacatgaacactactcctgcagaagcaagggcagagcaacttaccacagaaatgggggtgggtgggcaggttgcaatggatatgtcgcatcttgtgccaggtgacaatgctac

SEQ ID NO: 4496 - DNA, 394 bp, Homo sapiens
  MAP TO AC011330.4; EXPRESSED IN BT474, SIGNAL = 1.6; EXPRESSED IN BRAIN, SIGNAL = 1.7; EXPRESSED IN ADULT LIVER, SIGNAL = 1.4; EXPRESSED IN LUNG, SIGNAL = 1.2; EXPRESSED IN BONE MARROW, SIGNAL = 1.4; EXPRESSED IN PLACENTA, SIGNAL = 1.7; EXPRESSED IN HEART, SIGNAL = 1.2; EXPRESSED IN HELA, SIGNAL = 1.3; EXPRESSED IN HBL100, SIGNAL = 1.1; EXPRESSED IN FETAL LIVER, SIGNAL = 1.2
cacctcacgtctagggcttctttcatatccactacattccccctcttccaggtgtctcctgaattagcctcctgtacttaccaagagccagagtggaccctgagaaatgtagcaactcaacctattccttctctgagttgctttcctctagtctcaaatcacccttcctttccaccttttctctctttccttcccaacaccctcatccccaggctaggtcccttatacaagacacacctggggaatgaccacatcagccagtgccttagagagacggagcaactctgctgtgccttgaagtcccagactcccattgtgctgcacatcatacttgacacagtcatagatgtcagggatcttactgatatcatagcgcccactcttctgtcgaaag

SEQ ID NO: 4497 - DNA, 477 bp, Homo sapiens
  MAP TO AC000052.8; EXPRESSED IN BT474, SIGNAL = 1.1; EXPRESSED IN BONE MARROW, SIGNAL = 0.73; EXPRESSED IN FETAL LIVER, SIGNAL = 1.5; EXPRESSED IN LUNG, SIGNAL = 1.2; EXPRESSED IN HELA, SIGNAL = 0.73; EXPRESSED IN ADULT LIVER, SIGNAL = 1.6; EXPRESSED IN PLACENTA, SIGNAL = 2.3; EXPRESSED IN HBL100, SIGNAL = 0.67; EXPRESSED IN BRAIN, SIGNAL = 1.4; EXPRESSED IN HEART, SIGNAL = 1.2
aggctaggcacaccagaggagaagcaaatgtgcggggggctgacacacctttctaacatgggcccacaccctggatccttgcagcttgggcagataagtggcccaagtcaggatggaagcatgtatgctccagctcagttccagccaggattcattcctccccggcatgggggggctccagcccggccaccagactttcctgaaagctcagaaattcctcccagccatatgtatcgatcgtacaagtacctgaatcgagtacactctgccgtctggaatgggaaccatggtgctacgaaccaaggacccttgggcccagatgagaagccccacctggggccaggaccctctcaccagcctcgcactctcggtcacgtgatggattcccgagtcatgagaccacctgtcccccccaaccagtggactgaacaatcaggcttcctacctcatggagttccttcctcagggtacatgcga

SEQ ID NO: 4498 - DNA, 415 bp, Homo sapiens
  MAP TO AF067844.1; EXPRESSED IN BT474, SIGNAL = 2.5; EXPRESSED IN FETAL LIVER, SIGNAL = 3.2; EXPRESSED IN BONE MARROW, SIGNAL =   2; EXPRESSED IN LUNG, SIGNAL = 4.4; EXPRESSED IN BRAIN, SIGNAL = 0.96; EXPRESSED IN PLACENTA, SIGNAL = 2.9; EXPRESSED IN HBL100, SIGNAL = 2.9; EXPRESSED IN HELA, SIGNAL = 2.5; EXPRESSED IN HEART, SIGNAL =   2; EXPRESSED IN ADULT LIVER, SIGNAL = 1.2
gggggaaaataatacctggcttccttaatgattatatttaagacttatcaagagactattttctatttaacaattagaaagttaagcaatacattatttttctctggaatccagtgtttcttttaaatacctgttaagtttgtatgcaacatttctaaagttacctacttgttaattaaaaattcaagagtttttttttcttattctgaggttatctttttaccacagttgcacaatatccttttgaagaccataacccaccacagctagaacttatcaaacccttttgtgaagatcttgaccaatggctaagtgaagatgacaatcatgttgcagcaattcactgtaaagctggaaagggacgaactggtgtaatgatatgtgcatatttattacatcggggcaaatttttaaa

SEQ ID NO: 4499 - DNA, 413 bp, Homo sapiens
  MAP TO AF134471.1; EXPRESSED IN BT474, SIGNAL = 4.8; EXPRESSED IN ADULT LIVER, SIGNAL = 5.7; EXPRESSED IN FETAL LIVER, SIGNAL =   5; EXPRESSED IN BONE MARROW, SIGNAL = 5.3; EXPRESSED IN LUNG, SIGNAL = 5.4; EXPRESSED IN BRAIN, SIGNAL = 4.3; EXPRESSED IN HELA, SIGNAL = 4.8; EXPRESSED IN PLACENTA, SIGNAL = 6.7; EXPRESSED IN HBL100, SIGNAL = 5.1; EXPRESSED IN HEART, SIGNAL = 4.2
gttttcaagaggccctccactaatttgatcatcatctttggatgaactaactcttcattacctttacaagaaaatgcttggaaaggaagtggaaggctgatctgaagagtggcaggggctgcttcacttcctctgcagtttcctggagctgccttgctccgcctcagggaatttgctgggagaggctctccagcatccagatccccctgcaaaggtgtttcgcgatctgcaggaacaggccccaggagcatcccttggggccgaatgtgcagtgggcgatgcccctcctgacccaacagatccaagacgagcatgatcaatacagtcttgtggccagccttgacaatgttaggaatctctccactatcttaaaagctattcatttccgaaaatgtgctgtgtgtttcgcaact

SEQ ID NO: 4500 - DNA, 431 bp, Homo sapiens
  MAP TO AF134726.1; EXPRESSED IN LUNG, SIGNAL =  14; EXPRESSED IN PLACENTA, SIGNAL =  12; EXPRESSED IN HEART, SIGNAL = 8.7; EXPRESSED IN ADULT LIVER, SIGNAL =  13; EXPRESSED IN FETAL LIVER, SIGNAL =  11; EXPRESSED IN BONE MARROW, SIGNAL =  11; EXPRESSED IN BRAIN, SIGNAL =  10; EXPRESSED IN HELA, SIGNAL =  12; EXPRESSED IN HBL100, SIGNAL =  10; EXPRESSED IN BT474, SIGNAL =  11
aagtgtacagtttgatggatttcatataatacacccagttcaggatatagaacatttccagcaccccagaactccctcctgatgctccccatcaatacccctcgaaggtaacctattttcccatccatactccccagagggaacccctattttgaaggccattaattcttttctccctgtgtctccgaatctcacaatgttctcccctcctcgcccctgtcccaggtcttcagacccagctgctggtagaagtgacagggttgggttccagagccaatcctggggatcctcagccgcatttctcccacgtcatccttcgaggggtcccagagggtgccgaactaggccaggtgcccttggagcccgtgggacctccggagcgaggtctcctcgcagcctcgctgtcgcccacgctgctgtccacccctaga

SEQ ID NO: 4501 - DNA, 458 bp, Homo sapiens
  MAP TO AC007912.2; EXPRESSED IN PLACENTA, SIGNAL = 0.8; EXPRESSED IN HBL100, SIGNAL = 0.75; EXPRESSED IN BRAIN, SIGNAL = 0.72; EXPRESSED IN HEART, SIGNAL = 0.97; EXPRESSED IN HELA, SIGNAL = 0.65; EXPRESSED IN BT474, SIGNAL = 0.85; EXPRESSED IN BONE MARROW, SIGNAL = 0.96; EXPRESSED IN FETAL LIVER, SIGNAL = 0.65; EXPRESSED IN LUNG, SIGNAL = 0.67; EXPRESSED IN ADULT LIVER, SIGNAL = 0.73
aattcaagctaacttttcagcacatttacatgcatttttctaagtactttgcatttctcgtctcatttagttctcacaaatattattatccctacattagatatgagaaagaaattgagggacaggaaggttacatcatatgcccaaggtcacccagcttgcaaggggtggagccatttgtcttattctattaaggctgttataacaaaatactataaactgagtggcttataaacagcaaacatttatttctcacagttctagaggctgggaagtccaagatcaaggcaccaatagatttggtgcctgctcccttgttcatggctgccacctcttgttgtcttctcatggtagaagggccaaggcagctctctggggcctcttttacaaaggcactaatctcattcgtgagggttccaccttcatgacctaatcatgttccaaagtcctcacctcct

SEQ ID NO: 4502 - DNA, 467 bp, Homo sapiens; identical to SEQ ID NO: 2909
  MAP TO AC007743.2; EXPRESSED IN FETAL LIVER, SIGNAL = 1.3; EXPRESSED IN HEART, SIGNAL = 0.82

SEQ ID NO: 4503 - DNA, 477 bp, Homo sapiens
  MAP TO AL034403.17; EXPRESSED IN PLACENTA, SIGNAL = 0.92; EXPRESSED IN FETAL LIVER, SIGNAL = 0.8; EXPRESSED IN BT474, SIGNAL = 1.3; EXPRESSED IN HEART, SIGNAL = 0.94; EXPRESSED IN BRAIN, SIGNAL = 0.73; EXPRESSED IN ADULT LIVER, SIGNAL = 0.92; EXPRESSED IN HELA, SIGNAL = 0.94; EXPRESSED IN LUNG, SIGNAL = 0.79; EXPRESSED IN HBL100, SIGNAL = 0.78; EXPRESSED IN BONE MARROW, SIGNAL = 1.1
caggcagctcctgatacaaggaggaagctgcagaaacaggccatgagaccagacagtagagaggacctcatgaaagtggccatctcggtcttttacaatagggatagggaggaggcctgggacagaggaaagagacacaagaaaaagacagaggctttaatggacacctcttaggcccaaaaactccagaatccctgggatacatctgctaactgctacaaatgtggcaagtcagggcattttaataaggattttcccgacagcatgaggaagccaccatgaccctgtccaatctgcaatggggaccactggagggcagattgtccccagagatgcaggtcaccaggtccagagccagtctccaaaatggtccatcaagactgatgattcctgggggctcctctttccggttccagtggtccaaaccaccattaccacacaggagccccaggtatttctggaaattgaagggaggaa

SEQ ID NO: 4504 - DNA, 461 bp, Homo sapiens
  MAP TO AP000038.1; EXPRESSED IN HBL100, SIGNAL = 1.5; EXPRESSED IN HELA, SIGNAL = 0.94; EXPRESSED IN BRAIN, SIGNAL = 1.2; EXPRESSED IN PLACENTA, SIGNAL = 1.2; EXPRESSED IN BT474, SIGNAL = 2.2; EXPRESSED IN BONE MARROW, SIGNAL = 1.4; EXPRESSED IN FETAL LIVER, SIGNAL = 1.3; EXPRESSED IN LUNG, SIGNAL = 2.4e+02; EXPRESSED IN ADULT LIVER, SIGNAL = 0.93; EXPRESSED IN HEART, SIGNAL = 0.9
ccaagaggtacaaactcagaaatgtcttcaacaagatcatggagtggcattttttataatttttcgaggcttccacagaagtaatccaagaaggtagcagaacaaagtatgaagtcatcttctgtttagcttttgaagctgggccagtgaatcttctttgctgatattctgcatctgctaccccagactacatgttgcctgagggaacagaaagctagcggacaggtctttaagaagttgatctgccctacctgtctttaagctgtttctttaccaaatcaatagtaacgggagtcatctcattactgggagttttgaaagggactgtattatctgttttttgagatttggcatctgatgatccataggccgtataactataaggaatgccataggatgagccgtaaggcattgtctggtaagtgttctggtagtacatattcacttctgcgggttgactg

SEQ ID NO: 4505 - DNA, 381 bp, Homo sapiens
  MAP TO AJ003147.1; EXPRESSED IN PLACENTA, SIGNAL = 3.7; EXPRESSED IN HELA, SIGNAL = 5.6; EXPRESSED IN HBL100, SIGNAL = 5.5; EXPRESSED IN HEART, SIGNAL = 6.3; EXPRESSED IN BT474, SIGNAL = 6.5; EXPRESSED IN ADULT LIVER, SIGNAL = 2.8; EXPRESSED IN FETAL LIVER, SIGNAL =   5; EXPRESSED IN BONE MARROW, SIGNAL = 4.2; EXPRESSED IN LUNG, SIGNAL = 3.5; EXPRESSED IN BRAIN, SIGNAL = 4.5
tctatgtctgcaggttttccctacctctcccctcactgcccccaagatacagggaaaaatggccacccacccacagctggagttctgtggcaaggctctgctacattgaataaaacaaaagtaaaataaaatgtgtgtgtgcacataggcttaccaggtgtgaatcgtcccccaaagctaaagagatgaaggacatgcttttcccaaagcaaacaacctgaacacacaaaggctgtgatttcttacccagtaacatcatttccccgacactgctgtcatcttccttctctgacgtgagttgttgagtaggatccaagctcacacattcttcctggcagtgaaatacattcaaatcctcaaagaccaccagctcctgaaaga

SEQ ID NO: 4506 - DNA, 470 bp, Homo sapiens
  MAP TO AL034547.11; EXPRESSED IN HEART, SIGNAL = 1.2; EXPRESSED IN BONE MARROW, SIGNAL = 0.9; EXPRESSED IN ADULT LIVER, SIGNAL = 1.1
ttgggcatcataggggatacattaaaggtatgatttattaagagagacaacacataacgccaattaagggacccagagtcagagaagagaccttagctatacatcaaagattggcaaatgaatgtcaatttgtgttttaagttaaaataaaaatgtttaaggcatatatgaatcattttcaggagcccttactttaaataattttttaaatcaatctacccactactagctttgcatttgttgcatgagtcatgcttcaactccactctgaggaaaatactctgagactatagcatgattcctcacacacagtcagctgcctggagtgtcttattttaagcttcccaagaaaattgaagtacaaagaaacaagtgcttcctcagcatcttggaaattgggattaagggtcaaaaaggttaagatttcatgctgagaacggttgagcccaatcacaaagatctatggaaga

SEQ ID NO: 4507 - DNA, 456 bp, Homo sapiens
  MAP TO AL034380.21; EXPRESSED IN HELA, SIGNAL = 1.1; EXPRESSED IN HEART, SIGNAL = 1.1; EXPRESSED IN LUNG, SIGNAL = 1.4
atattcggaatcatggacccaagagttcaaatgacctcagaagtcacacaagttcaacccttgtcaaatgtctgtttgtcttctacataacacccatagcaaaaagtgtgccaggttttactccagggacaggaaacttacctacatctctcctcatcctccagatcccaaaaaaacttacttgtatgtcacacttggacttaaatctacagacaacacgtagccaggttttaaagcattaacataacttggccaggttttttttttctttttttttttttttaagatgatcactctggtgattatgctgaggacagacttggaaggaaaagaggaagaaaagaaacagaacagtcagaagtttgtggcaagacaccaggtgagagataacagggacccgaaaaaacaaaaggcagtggagaaagagaggggaaaccagattcaaaagcaaaaacc

SEQ ID NO: 4508 - DNA, 372 bp, Homo sapiens
  MAP TO AC007682.1; EXPRESSED IN PLACENTA, SIGNAL = 0.84; EXPRESSED IN BT474, SIGNAL = 0.91; EXPRESSED IN HBL100, SIGNAL = 1.3; EXPRESSED IN LUNG, SIGNAL = 1.1; EXPRESSED IN ADULT LIVER, SIGNAL = 0.82; EXPRESSED IN BONE MARROW, SIGNAL = 1.1; EXPRESSED IN FETAL LIVER, SIGNAL =   1; EXPRESSED IN HELA, SIGNAL =   1; EXPRESSED IN BRAIN, SIGNAL = 1.1; EXPRESSED IN HEART, SIGNAL =   1
ggaagagagacctgagctggcagggactctcttaccctctcaccatgtgatgccctccacatgttatgatgcagcaagaaggccctcactggttgctagtgccatgctcttcgacttcccagcctgcagaactataagaaataaacttattttctttataacttacacatttatggtattttcttatagcaacaaaaaataaagatggggtggagaaatatatttatagaaagtatttttttaagtaaatgagaaattagacataatgtttttaactctagagaaattgaaaacagagcacagcacatcggataaattcaataactatcttaagaatcagcaaaacaacatgcagatggctgattggcaata

SEQ ID NO: 4509 - DNA, 470 bp, Homo sapiens
  MAP TO AL109836.9; EXPRESSED IN ADULT LIVER, SIGNAL = 0.98; EXPRESSED IN HBL100, SIGNAL = 1.1; EXPRESSED IN HEART, SIGNAL = 1.1; EXPRESSED IN LUNG, SIGNAL = 1.1; EXPRESSED IN BONE MARROW, SIGNAL = 1.1
tctttcagaaatgaatgacagataaagatattcacagacaaacaaaaacaggaaaattcatcaccactacgccttccttacaagaaatgctaaatggagttctgtaagttgaaatgaaaggatgctaagtaacattataaaaccacataaaagcataaaactcactggtgatggtaaatacataaatcaaatgtagaatattctagtactgtaatgttggtatgttatgcattgtttttctaattgtatttagttttctatctgtgttttattgcatcaagctgatttctttaaaatagttgctttgaattattattcaataaatttgtataccttgatttctttagggtcatttactggaactttatgagtttccttggtgttgtcatgtttgcctgattcttcgtcacctatgtgcctgtgcatttgaaggaacaaacaattcttccaaattgtagagacggatttca

SEQ ID NO: 4510 - DNA, 462 bp, Homo sapiens
  MAP TO AP000043.1; EXPRESSED IN BT474, SIGNAL = 0.63; EXPRESSED IN HEART, SIGNAL = 0.99
caggcgatcgattctacaaagaactctacaaagattctacattctttattctatatagattctgtaaaagaagaatctaagcactttgttctgcaccgtccaaacatgagtcattgttttcagggcatcatttggcttttaacacaaagacccagcagagggagccgtttcctaacatgaaaggagctataggccctgctaagacagcaactgttattagtattattccactagagctgccatagaggggtgacgtcaacaacagaaatgtattttctcacagttctggagactggaagtctgaaatcaaggtgtcagcagaattggttccttctgagatctctcttcttggctcatagatggcggatttctgagtcttcacatggtcacccctctgtgtctgtgtcctaatctcctcttcctattaggacatcagttatatcagattaaagccccctctcc

SEQ ID NO: 4511 - DNA, 472 bp, Homo sapiens
  MAP TO AP000089.1; EXPRESSED IN BONE MARROW, SIGNAL =  47; EXPRESSED IN FETAL LIVER, SIGNAL = 0.65; EXPRESSED IN LUNG, SIGNAL = 0.64; EXPRESSED IN HELA, SIGNAL = 0.64; EXPRESSED IN HEART, SIGNAL = 0.84
ctcagtgaaattgggaagaggatcagaaatatttatggtattaaacatttacatgctgatgcatcatagtttgtaaaaaataagcaaatttggatggcaaaagaagggcatgtctagaacaaaattaaaaaggcctattaggaaatccttgtggaaatcatgtacctgtcaaggcaggcatggttgacagcatttgaatatctaatagtaaaagcctatcgtataccacctagcaggactagaggaatagatgtccttgatcagatcacaaaaccaatacaggagaaagacctagatgtggcagggggtttcaacctttctggggcaactaccacaggtctattcgagaagtaccatagtaatagaattaaaagctgctatgctgacattataatgtacccagaaggaaaaaaaaaagcgagagggagaaagcagaagggaattattaccacagagctgattctggccaaca

SEQ ID NO: 4512 - DNA, 471 bp, Homo sapiens; identical to SEQ ID NO: 778
  MAP TO AP000044.1; EXPRESSED IN BT474, SIGNAL = 0.87; EXPRESSED IN BONE MARROW, SIGNAL = 0.99; EXPRESSED IN HELA, SIGNAL = 0.75; EXPRESSED IN ADULT LIVER, SIGNAL = 1.1; EXPRESSED IN BRAIN, SIGNAL = 0.88; EXPRESSED IN PLACENTA, SIGNAL = 1.1; EXPRESSED IN HBL100, SIGNAL = 1.2; EXPRESSED IN FETAL LIVER, SIGNAL = 0.79; EXPRESSED IN LUNG, SIGNAL = 0.97; EXPRESSED IN HEART, SIGNAL = 0.82

SEQ ID NO: 4513 - DNA, 459 bp, Homo sapiens
  MAP TO AL049694.9; EXPRESSED IN PLACENTA, SIGNAL = 0.61; EXPRESSED IN FETAL LIVER, SIGNAL = 0.66; EXPRESSED IN LUNG, SIGNAL = 0.59; EXPRESSED IN HEART, SIGNAL = 0.85; EXPRESSED IN BRAIN, SIGNAL = 1.5; EXPRESSED IN HBL100, SIGNAL = 1.3; EXPRESSED IN HELA, SIGNAL = 1.6
caagaggccaaaggagagagaaacagaagagaaaattaggtaattttccttggaaatttagaagacacaggagtagatgggattgaccctggacagaatttttgttttaattggaggcaaggataagggagggtggtacgataatagtaactgaaataaatggtgggaatatgaagcacaggctgggaagatcactggacaggatcaaactgtaagtttctgaatttaagcgcttcggctcgaacacgcctccccacctggccatcagcctgctggcatctccccagcacccacctctctgccacgtgatggtagatgggtcgatgtcgagacgggcaaatttactcacttcctcttctgtcagtgtgctcggatcagtcttatttattcccagtttctaatgattaagaagaaaaaaggtgagaagtttgagaagaaacagaaagcaaagggtcacca

SEQ ID NO: 4514 - DNA, 459 bp, Homo sapiens
  MAP TO AC007681.2; EXPRESSED IN HEART, SIGNAL = 0.96; EXPRESSED IN FETAL LIVER, SIGNAL = 0.59; EXPRESSED IN ADULT LIVER, SIGNAL = 0.77; EXPRESSED IN PLACENTA, SIGNAL = 0.7; EXPRESSED IN LUNG, SIGNAL = 0.65
agggccatggtgaaagtaagctgtccctctgtttctctactcactccttccacatgatccattcagggccatgaactagccctagcattcatgtatcctgcacagggttcctagctttttccctcttcaccctcagtgtctgtatcacctttccaatagctgttggtgttttctctctgaaggtctgctcaaagtatgtgcaatactttggtctctctcagtggaagcagtgcttcctggatgcatctagtgagccattttgtcccctctgaagacaactgccaatctctgcagcatgagctgcttcgtgcccaggagctccaaggtgccaccaaccacaagggctacagccatgcagagcatgagcatgcaggcctaggtgtccagggtgggaatggggctctggctttttcgaacagtgggcacaggcatgctgttcccaccatcagctcaggcact

SEQ ID NO: 4515 - DNA, 475 bp, Homo sapiens
  MAP TO AC006483.2; EXPRESSED IN LUNG, SIGNAL = 0.95; EXPRESSED IN BRAIN, SIGNAL = 0.7; EXPRESSED IN HEART, SIGNAL = 0.95; EXPRESSED IN PLACENTA, SIGNAL = 0.8; EXPRESSED IN BT474, SIGNAL = 0.75; EXPRESSED IN HBL100, SIGNAL = 0.84; EXPRESSED IN FETAL LIVER, SIGNAL = 0.72; EXPRESSED IN ADULT LIVER, SIGNAL = 0.7; EXPRESSED IN BONE MARROW, SIGNAL = 0.97; EXPRESSED IN HELA, SIGNAL = 0.67
gtgttcttcccttgctttgcctgtaaacggatgtgtttatttatgaacagtgtcaagccccattgtggaaatgtactttttacaaaacaaggtatcaaaaggctgtttgtgttgcactgaaagactaagcagaggtgccacagaaaacatgtttcccgtcagaacgcatccaaggaacagacttcatttcctcacacaacaaggatgtaggactaggctgggaagggagggtaccccacttgaaggaggggctgtggctctcagcacaacccagcacggccttgatccctgactcccaggaggcacggaaggacaagaaagcagccaccagctccagacaaatccagcccaaggggaaacacactgacatccacagtccatgtggtgacgaagagcagttggtaccgcatggctttaaattgtttgtatttctgtcaggaggcccatggaaaaaaagcagggctctcagcagctg

SEQ ID NO: 4516 - DNA, 472 bp, Homo sapiens
  MAP TO AC007041.3; EXPRESSED IN LUNG, SIGNAL = 0.98; EXPRESSED IN ADULT LIVER, SIGNAL = 0.84; EXPRESSED IN HEART, SIGNAL = 0.84; EXPRESSED IN PLACENTA, SIGNAL = 0.86; EXPRESSED IN BT474, SIGNAL =   2; EXPRESSED IN BONE MARROW, SIGNAL = 1.7; EXPRESSED IN HBL100, SIGNAL = 1.8; EXPRESSED IN FETAL LIVER, SIGNAL = 1.5; EXPRESSED IN HELA, SIGNAL = 1.2
aaaaacataagaaacaataggggggtctttaccttattgtacattagaccctcactttgaattttcaggaaagtagaactttttcaaaagactaatatctaaaagcaaaagcaatttggcatgttttaaccaacattaaatattttacatatattataaacacacacacaaacacacatacatgtatacatacaaataaaaagggttttggttttttttttacctaaatgcaaactggatgaggatccatgtgatgaaagtgatggcggtggcgtaagtgaatgtcctggagtttggcttggcagaggcatgcctattggacttggagaggaggaaaatcccagactattgtaaaatggttgccctatgggtgctaggctgctactagatcttttgtacaagtcagagctagtagatagagactctctccttgtggcactactacttgcagaactgccaactgaagaagaaa

SEQ ID NO: 4517 - DNA, 465 bp, Homo sapiens
  MAP TO AC009225.1; EXPRESSED IN LUNG, SIGNAL = 2.6; EXPRESSED IN HEART, SIGNAL = 1.1
tcacatatagaaaaatgtctgaaaaggtgtataccaaatgtagcagtgagctactgtttcctgcagaactttcaagagtttttattttctttcttttgcttaactgtattacccaaaatttttacaatgaatgtatactgccattttaagacgaaaccacaatacaagctatatttttaaaggaaaagaagcatagttcctttaataaaggaattatttaattaaggactaatttcgagtccaggaaacaccaggaaccacagacattcacaataccaccacctaccatgcagggagcagcagctgaccaggctttccctacatcccctaaactcaatgagacagatgttccctgaatatcagctggtgggagtaggtaaagacaaaaagagaaacaaaatgcctctcaccgtcaaggtgattataatctcattgctaaaataagccaaggcagcagttagccta

SEQ ID NO: 4518 - DNA, 472 bp, Homo sapiens
  MAP TO AC007091.3; EXPRESSED IN HEART, SIGNAL = 1.4; EXPRESSED IN BT474, SIGNAL = 0.88; EXPRESSED IN FETAL LIVER, SIGNAL = 0.93; EXPRESSED IN LUNG, SIGNAL = 1.2; EXPRESSED IN ADULT LIVER, SIGNAL = 0.89; EXPRESSED IN BRAIN, SIGNAL = 0.85; EXPRESSED IN PLACENTA, SIGNAL = 0.81; EXPRESSED IN BONE MARROW, SIGNAL = 1.2; EXPRESSED IN HBL100, SIGNAL = 0.75; EXPRESSED IN HELA, SIGNAL = 1.2
tggatgcaggaaaggaactcggcacctgctgaatggtgagactgaaaaagctgtaacacaagcagggctgaaacactgccctcccccgctcaccatgttgtgggcaacaaggagagaagagctgaggccattctgggagcccagacctaggggctccctgagccagggctgtaagaccctctttggggctctgtggtttctggtgtctccaagcttccaggcaccactatgttcctctcatccagagacaggtgcctacagcagaagccacccacaatgcatctgatccagctgaagactttcatggagccagcacctgtggtggtgcctgtagctgcccaccccaccacagcagccagtgtggcacactgcatagaccccacactcacttgctcacatgccccttgcctctctgcacctggcttgcccttggcagtcatgggatccaggccagtagcatgaggtgagtgca

SEQ ID NO: 4519 - DNA, 470 bp, Homo sapiens
  MAP TO AC008274.1; EXPRESSED IN HBL100, SIGNAL = 0.76; EXPRESSED IN ADULT LIVER, SIGNAL = 0.71; EXPRESSED IN PLACENTA, SIGNAL = 0.93; EXPRESSED IN LUNG, SIGNAL = 0.59; EXPRESSED IN HELA, SIGNAL = 0.83; EXPRESSED IN FETAL LIVER, SIGNAL = 0.75; EXPRESSED IN HEART, SIGNAL = 0.85
ttgaaagcagacagaacaacgttacctataggagaacattaatgtgaataataatggatttattatccaaaatcatggaggccagaaggaagtgtcgcattttttcaaatgctgaaagaaaagaacggttaactacaaattctttatctggcaaagctattcttcaggaaaaaaagaaaatgaaaacattctcagacaaagacaaattaaaagaacctgccactaatagccctcatcttaaatactggctaaacaaagttcttctttcttaaagaaaatgataaaagaaggaactatgaagtatcagaaggaagaacaaaaagagcaaaaatatgggtaaatacaatagactgttcttttccacatacatgttctaaatcatatttgatgatcagaacaaaagttgtaaaccatatgacattcaagacaataatatttaaaagtggggaaggtaaagggactgacccaaa

SEQ ID NO: 4520 - DNA, 476 bp, Homo sapiens
  MAP TO AC009300.1; EXPRESSED IN BRAIN, SIGNAL = 0.8; EXPRESSED IN HEART, SIGNAL = 0.85; EXPRESSED IN BONE MARROW, SIGNAL = 0.74; EXPRESSED IN HELA, SIGNAL = 0.88; EXPRESSED IN PLACENTA, SIGNAL = 0.88; EXPRESSED IN BT474, SIGNAL = 0.72; EXPRESSED IN ADULT LIVER, SIGNAL = 0.75; EXPRESSED IN LUNG, SIGNAL =   1; EXPRESSED IN FETAL LIVER, SIGNAL = 0.82; EXPRESSED IN HBL100, SIGNAL = 0.7
ttcttaagataaggaaacaaaaagaagtcaaaagaggccaaatcaggactgcaaggtgtatgcctgttgatttctcactgaaactattgcaaaaatgcccttgtttgatgagggaaaggaataggattattgtcgtgatggagaaagactgtctgattaagctttctcgggcatttctctgctgaagctttggctaaatttctcaaaacattctcataataagcagatgttattattctttgaccctccaggaagtcaacaagcagatatcttgaacattttccccaaaatgttgccatgacttttgctcttgactggtggtttgtttttggtttgactgcactgtttccgcctcttggtagccattgctttgattgtgctttgtcttcagaaccatactggtaaatctatgtttcatttcctgctacaattcttcttcttcaaaaaaaaaaaaaagcttcaggatattgatccca

SEQ ID NO: 4521 - DNA, 439 bp, Homo sapiens
  MAP TO AJ229042.1; EXPRESSED IN BONE MARROW, SIGNAL = 1.1; EXPRESSED IN HEART, SIGNAL = 1.1; EXPRESSED IN ADULT LIVER, SIGNAL = 2.1; EXPRESSED IN BRAIN, SIGNAL = 1.2; EXPRESSED IN LUNG, SIGNAL =   1; EXPRESSED IN HELA, SIGNAL = 1.4; EXPRESSED IN HBL100, SIGNAL = 1.2; EXPRESSED IN PLACENTA, SIGNAL = 1.2; EXPRESSED IN BT474, SIGNAL = 1.1; EXPRESSED IN FETAL LIVER, SIGNAL = 2.1
tcaggttatttactgagaagcagctctctctaaatcatatagaattgctgtgatagagactaagatacctctcatccaagagatgtttgtctttcaatagttgagtctgagtgaatctctaattcaatgcttctcaaccttcgtactactgacacttggggctgggtaattctttgttaatgggagactgtcctgtgccttataggatgtttagcagcttctctgatctcttcccactagaagccaacagcactccctctcccccatttgtgacaacagaaatgtctctggacaatgccaaacatcccctggcgggcaaaatcaccctctccctcttgagaaccattgctctcgtgcaaggatagcaaggatgtttcaacttgcttattgacaggccatggatatctggaggactgagtggaggaggattctgaaggct

SEQ ID NO: 4522 - DNA, 410 bp, Homo sapiens
  MAP TO AL008626.1; EXPRESSED IN FETAL LIVER, SIGNAL = 2.7; EXPRESSED IN LUNG, SIGNAL = 2.6; EXPRESSED IN BONE MARROW, SIGNAL = 2.7; EXPRESSED IN HELA, SIGNAL = 2.8; EXPRESSED IN HEART, SIGNAL = 2.1; EXPRESSED IN PLACENTA, SIGNAL = 2.8; EXPRESSED IN BT474, SIGNAL = 2.5; EXPRESSED IN ADULT LIVER, SIGNAL = 3.2; EXPRESSED IN BRAIN, SIGNAL = 2.5; EXPRESSED IN HBL100, SIGNAL = 2.6
tcaaaacaggatcacaggtcactgtggaaatactagctattcatttaactagagtgataatcaaaagacttcaaaagcaatacagaaagttacgtggatgtaaaaatccttaacctcatcaaaactcagtttctctaagtaatcaaaaacctaataaacacaacatgaaattatcttaataaaatatacaatctttgtttctcaggccagttaccaaaaggattttgtttttattaaaatcttctggcagtatgattgcttctttttatgggaaacccatttagatatcctggagtcaaacctgatgaaaaggcacttgaatttaatcagacacaggaagaacatgttcaaagctatgagtgtacaccacattaaagaggaacataaacaggaaaaccaacaccttgagc

SEQ ID NO: 4523 - DNA, 398 bp, Homo sapiens
  MAP TO AL021391.2; EXPRESSED IN HBL100, SIGNAL = 1.4; EXPRESSED IN ADULT LIVER, SIGNAL =   2; EXPRESSED IN FETAL LIVER, SIGNAL = 1.7; EXPRESSED IN LUNG, SIGNAL = 1.4; EXPRESSED IN HEART, SIGNAL = 1.5; EXPRESSED IN HELA, SIGNAL = 1.5; EXPRESSED IN PLACENTA, SIGNAL = 1.7; EXPRESSED IN BT474, SIGNAL = 2.3; EXPRESSED IN BRAIN, SIGNAL = 1.7; EXPRESSED IN BONE MARROW, SIGNAL = 1.5
ctgttgagcgttctttgcagcccacagatgtccaagggttgccaggggcatagagccctgccttgggtgggaccaggcccacgcggggtgtcggcctaatccaaggagggagttccctgccttggtaagttggtgcaagacccggagctcttatgcatacacccaacaggtggtgatcccccgagtccagcccacccgcccagcagtgcgcaggcagccaggggttcaaggacccacccacatccgtgcctgacaagtctcccctccacccgactcctgctgcccttagcatatcctcccctcgagggcccccagtgagatttgctggcctgggtgtcagaatgcccctggggtcactcggaccatcttctttaatgtcttcacctgcttaggccatc

SEQ ID NO: 4524 - DNA, 487 bp, Homo sapiens
  MAP TO AC006344.2; EXPRESSED IN BT474, SIGNAL = 0.93; EXPRESSED IN HBL100, SIGNAL = 1.3; EXPRESSED IN FETAL LIVER, SIGNAL = 0.93; EXPRESSED IN PLACENTA, SIGNAL = 1.1; EXPRESSED IN BONE MARROW, SIGNAL = 1.4; EXPRESSED IN LUNG, SIGNAL = 0.87; EXPRESSED IN HELA, SIGNAL = 0.81; EXPRESSED IN ADULT LIVER, SIGNAL = 0.92; EXPRESSED IN BRAIN, SIGNAL =   1; EXPRESSED IN HEART, SIGNAL = 0.86
tccttggtctctaatcaagtcctacaaataaatagtaatgtatatttattccaagcaagcatataatcagagagtagcgataacactgaattttccactaacgttaaaagaattattttattaattaaaacaatacatcttataactattacacaaaacaatttggaattatctagtgaacataatacaatctaaattttgaagcacttgccaatgtaaacctataatgaaacaattattagtcctaatcaaatgttgatgtccatttcaggccattcaaaaccaatggcttccattatcctcaacaatctaatgcaggagcagaaaaccaaatactgtgttttctcacttataagtgggagctgaatgataagaacaagtggacacatgggggaaacaacacatactggggcctgttggagggtggatggtaaaaggaggaagagcaacagaaagaataactaatggatgctgtgcttcataccga

SEQ ID NO: 4525 - DNA, 486 bp, Homo sapiens
  MAP TO AP000150.1; EXPRESSED IN PLACENTA, SIGNAL = 0.73; EXPRESSED IN LUNG, SIGNAL = 1.2; EXPRESSED IN HEART, SIGNAL = 0.81
tccattcctatgaaatctccagaataagcaagtctgtatatagtgacagaaagtagaccagtgattgctgggcctggaaggttaggggaaaatgaggagggactgctaatgcgtatggagtttctttttgaaaatgttctaaatttagaccgtggtgatgtcagcacatcctgtgaatatgctaagaacaccgaaccgtacacttcatttgagttgtatagtgtgtaaattatgtctcaacaaagctattataaaaaatacaacacagggattcttggatttacctctcttcatacaagattgggatagaggcataggagctattgataacaaaaagccagcactggaagcatggcatgagtctcttgggggcttcattagcagtggaataattctccagggagtccacaaacaacagtggcagagctgcaaggaggaagataatgggagtgttaggattctggatgaggtgatgttgggcaagag

SEQ ID NO: 4526 - DNA, 1973 bp, Homo sapiens
  MAP TO AL022718.1; EXPRESSED IN HBL100, SIGNAL = 1.4; EXPRESSED IN PLACENTA, SIGNAL =   2; EXPRESSED IN HELA, SIGNAL = 1.8; EXPRESSED IN HEART, SIGNAL = 1.6; EXPRESSED IN BT474, SIGNAL = 1.5; EXPRESSED IN ADULT LIVER, SIGNAL = 2.4; EXPRESSED IN FETAL LIVER, SIGNAL =   2; EXPRESSED IN BONE MARROW, SIGNAL = 1.6; EXPRESSED IN LUNG, SIGNAL = 2.3; EXPRESSED IN BRAIN, SIGNAL = 1.5
ttgaatggtttaggaaggaggttcaactgtttccatatgtgatgattaggcgttgtccatctgccagcaacaacatcataatccctttgccccaggtgcactaatttagtaaggaaatcatagagtcctccatgaaaaccaataatgacctgaaagtcagggtaagtgtcatgatagatatcgccataaggtgtgtatagtatctcctttatgacctgacctcggctgctgaacacagctagtggggtacctgtattatcacaggctacataatattcttcaccactgcttaactccatggcaataaggtgaccttggagatcataatacagagatgtaatctccgagcttgtgtggttgtacaaatgagtaactcttatggggttggtaaggtctgcataaaagaactgaaggtgctgccctaggctggacttactcgcgacacgtcgcccaagcccatcatagtaatactgcacagtccagccagaagccttattgtaggctttctgcagcaggccattagaattatattcaaaaatatcatttcccctctgcctcagaaagccatcttcatccattttatactgaatttctcctaatctggtgatgcggtctcggaggtcatatcggagaggagtaagacgagcactcttcccatggcttaagaggttgatgtttccattcagatcgtaactataacgccactgggttttgtcatttacagaaacagtctgaagttgcccatcagcatcgtattcatagaagtaccttgttatattggcatctactcctacccttatgtcacatattaccatgcggcccacattatcatattgaatggtcatccagtaggcaattgcctttaggatttcatattggacttcaatgacttgtccattggcactgaagattttggtgtgtttcatcactgtagtagttatgacctgatttaaatcgtaattaattacactgaattttccaaactgctctgttctgccagagacatcaacatatcggtaaagatctataggcaaaggggtttcattgattacagcttgcatgcttgtgactcggaaattgttgtagctgtagtcgaaccgtgcattcacaaggccttcttcactgaatctgaaaatctggcgtccaataagaggtcctgcaggaaccaaaacaaaaacagtaagaagctaggcgatcaatgtggaagagtcagaaaggtctagtgttattttatttagtactggtgcttttatattcataatacaatattagagactgatctctgatatcaaatgcctgggcatattacctcatggatatatattctcatagtggtaatcctcaaatataaaaaattaaaatactctatagttatagaaaattttaattatagaaactacagaagtaataacacatccagtagcccagggtgatgaaattgatacttcttgctataatcactgacaaaaatgctttcatttcatttaacctttgctacaaagtcagagggtcaggttttgacaaattccagcattaaagtaactggatttgggcattctataaacccaaagggtgaaatacattagaaagttctgacttgtgaagatattttgtcatcaactgaggcttataaaggttacacagggcttgagctagtttcagtgagacttatatcttgccgtttcatctttgagaagatttggtgctgagcaggaatgggtatacagttacactaggcacttggatttcaaattacttgagagctgaaagaaagaaatgcactatatgtttttaagaaatcagctttcatcagactataacatgctttacattttcaatgtcagataatttgataagtaaagtgaaagttgggttgaatgtgtgtagattaatgcttctatctcacactgtggtcagtaaaaatgtcataagaaaatagtgatgttgttgtacacaccaccactctttcacaa

SEQ ID NO: 4527 - DNA, 422 bp, Homo sapiens
  MAP TO AL009182.13; EXPRESSED IN HBL100, SIGNAL = 0.99; EXPRESSED IN FETAL LIVER, SIGNAL = 1.2; EXPRESSED IN LUNG, SIGNAL =   1; EXPRESSED IN BONE MARROW, SIGNAL = 1.3; EXPRESSED IN HELA, SIGNAL = 1.2; EXPRESSED IN HEART, SIGNAL = 1.1; EXPRESSED IN PLACENTA, SIGNAL = 1.3; EXPRESSED IN BT474, SIGNAL =   1; EXPRESSED IN ADULT LIVER, SIGNAL = 1.5; EXPRESSED IN BRAIN, SIGNAL = 1.2
tttctgcacaaagcaaccagatggatattaatgccattaattataattgtgaaaatgaggttgaggggacacaagttagggaagtgaaatggaaaggtgtgatcatgtgatggaaggtgaggtccaggatatggacactgttcggacatgtttattctgttttgcagccatggtcgaaggccttcaggtcacagtgcccgacaagaagaaggtggccatgctcttccagcccactgtgcttcgctgccacttctcaacatcctcccatcagcctgcagttgtgcagtggaagttcaagtcctactgccaggatcgcatgggagaatccttgggcatgtcctctacccgggcccaatctctcagcaagagaaacctggaatgggacccctacttggattgtttggacagcaggaggactgttc

SEQ ID NO: 4528 - DNA, 387 bp, Homo sapiens
  MAP TO AJ011929.1; EXPRESSED IN HBL100, SIGNAL = 2.8; EXPRESSED IN ADULT LIVER, SIGNAL = 2.9; EXPRESSED IN FETAL LIVER, SIGNAL = 2.4; EXPRESSED IN LUNG, SIGNAL = 1.8; EXPRESSED IN HEART, SIGNAL = 1.2; EXPRESSED IN HELA, SIGNAL = 5.8; EXPRESSED IN PLACENTA, SIGNAL = 3.3; EXPRESSED IN BT474, SIGNAL = 2.4; EXPRESSED IN BRAIN, SIGNAL = 3.2; EXPRESSED IN BONE MARROW, SIGNAL = 2.1
tacacaagagccaggaccgcaccctgtagcctttctgtgcaaacaacttgaccttactgttttagcctacccctcgtgtctgcgtgcagcggctgccgctgctttaatacttttagaggccctcaaaatcacaaactatgctcaactcactctctacagttctcataacttccaaaatctattttcttcctcatacctgacgcatatactttctgcttcccggctccttcagctatactcactctttgttgagtctcccacaattaccattgttcctggcgtggacttcaatctggcctctcacattattcctgataccacacatgacccccatgactgtatctctctgatccacctgatattcaccccgtttccccatatttcctt

SEQ ID NO: 4529 - DNA, 1990 bp, Homo sapiens
  MAP TO AC006059.3; EXPRESSED IN HBL100, SIGNAL = 1.2; EXPRESSED IN HELA, SIGNAL = 1.9; EXPRESSED IN PLACENTA, SIGNAL = 1.3; EXPRESSED IN HEART, SIGNAL = 1.7; EXPRESSED IN BT474, SIGNAL = 1.4; EXPRESSED IN FETAL LIVER, SIGNAL = 1.7; EXPRESSED IN BONE MARROW, SIGNAL = 1.4; EXPRESSED IN LUNG, SIGNAL = 4.6; EXPRESSED IN BRAIN, SIGNAL = 2.8
tttaccacctatcatgggaactcatttctagtgacagagagctttaaactgatagtaatagttttgtaaacccagcccaaatttctcctcctgaaattccctctccctaagttttcaatctactctctgaatcacacaaaacaagacttcttattcctttcagatatttggaaatagtgattctgtccctaattctgatattcttccaagctaaacaataacagactctccttgggagaagaaaggaaagagaatattgctcaccgataagatgatgtggaacttctcgatcgacttcttgagtgactataggagacagaccttgttctgtgtcttgatttggtttcagatttacttcgagatctacttggactcctggactggctatcatcatcccgactaggcgtctgctcatcacttgaactctcctgatttcttggtctacggtttaagcgtgctgtctttcttacttcatcaaagagagacccaggccgaactttatttttgcttttaatttctattctcaagccttgtggtttcatttcaggcacagtggtcaacaccttaacttccacagcactggatgtggcagcattaggtgctgccaggttccccacaccttgcaggggcttccatttcttatcaatgaggttgatctggctcttctcagccacctccttcttcccggtactttctccagcactagccaagctagcagagctgctgtcctgtttccccacttcacccaacactttactttcggacatgctgctttcctgttttactacctctgcttgaggatgttccgttgccatatcctgcttcaaaacaatgtttatatctggggtatcaagccgtgcatttcctagaggggaagtctcctctacttttgctggggaactcctatcaggagtgcagatctccatgttgtcatctgtttgaagcacatcttccactccattgggaacactttcttcaacgtgctgaatgttttgtaaacaggccacattttcctcagtatttaaagctgtgggagaaatactgagtttactatcatctttagtaaactgatcaagatctgatgaaacagtcactgtatcatgtttacctgaaaggtcctcttcactggatttctcagtttttagaatattatcttttatggtttcattgttttcagaaacttttttctcttttgattcctgagtaacttgcttgtcatcaatctcctcctcctcctcttcaccaaattctagtggaggctgccagtgaaatgcttgctttcgttttggagccttatgctttttgtcttttttccctttcaatttctctttcacttttttggtgtgttctcttttaagattttcctttgacccatgtttgtgcttttgtggctttcccctattgttttccgaattggaacaggacccctcagagtcagaagttgatgtgcgctgtttgcttgatttccaagcaccattatcatcaggcagtgaagtatttgtggacgacttggttgtgggtttgactttgatgtgaatttcactaacctctgattcagaatcggatgtggcctcaccttcttccttgtcagaggatggatgggagtcatttttactgtttttagtgacatctcgttctgaatttgactcagagtcccatttactaccagcataattcttccttttgggcttactgccatttctaaggtgatcagaaagattctctttcaaagttcttttttttgaatgagggcattcccgttcagacttggatttttcttcacctctgtttttttcttgtttattatgtgttctttccatttggccctgcttctctttttcctgggctgactgtgtggcctgaacacttgactgctcactgtctgaagaataatctaaagatgatctgctctcgctatactttctcacacatgaagacctgtctctacctttgacatatttactgtgaagtgtcttttcagagctgctgc

SEQ ID NO: 4530 - DNA, 358 bp, Homo sapiens
  MAP TO AJ011930.1; EXPRESSED IN HBL100, SIGNAL = 5.1; EXPRESSED IN FETAL LIVER, SIGNAL = 5.4; EXPRESSED IN LUNG, SIGNAL =   5; EXPRESSED IN BONE MARROW, SIGNAL = 5.5; EXPRESSED IN HEART, SIGNAL = 4.4; EXPRESSED IN HELA, SIGNAL = 5.7; EXPRESSED IN PLACENTA, SIGNAL = 4.8; EXPRESSED IN BT474, SIGNAL = 4.9; EXPRESSED IN ADULT LIVER, SIGNAL = 6.1; EXPRESSED IN BRAIN, SIGNAL = 4.9
catttcaggggttttgcttgcaattaacgatttttggctaatcctcccttttcaagtggctcaagttgtaaatgtctgattttccatttttccatgacagtggtaccatgagccacaggactgcactgggaggatacggtgttctctggtggttgtgctgcttttctgatcgatgaagtaatatgcacatagcaagcagctcaggcagcagcacagacacacagcccgccacggcctcggcaacacagagacacacagcccgccacggcctcagcagcacagagacacagcccaccacggcctcagcagcagagacacagcccaccacggcctcagcagcagagacacagcccaccac

SEQ ID NO: 4531 - DNA, 419 bp, Homo sapiens
  MAP TO AL021155.1; EXPRESSED IN BONE MARROW, SIGNAL = 1.8; EXPRESSED IN BRAIN, SIGNAL = 1.7; EXPRESSED IN HBL100, SIGNAL = 1.8; EXPRESSED IN ADULT LIVER, SIGNAL = 2.2; EXPRESSED IN FETAL LIVER, SIGNAL = 1.9; EXPRESSED IN LUNG, SIGNAL = 1.8; EXPRESSED IN HEART, SIGNAL = 1.9; EXPRESSED IN HELA, SIGNAL = 1.8; EXPRESSED IN PLACENTA, SIGNAL =   2; EXPRESSED IN BT474, SIGNAL = 1.7
gatcctgctctctgcctttgagactatagacagtttagaggaaaccaggaggaaatgtttggttctctttctgcaccactggggggctgccaaatgataaacagacccccaaaggagattctgcccctttgataagaagtaggaggtggggagaaggtattgtgggcatggtaatgaaataagcccacatttactaattccacaaaggcaccccttggccctgaaggctgttaacaagaggaagcgatgtccaggtgaccttttctcaaagagtgtggttcccagagacaacaaaccccaaagtgactctaacagtgtcacacactggaatgggggaaggcggccggggtggcagggggtgcttacctttgcagcccaggccactggaggagctgatccggtccatcttcctcccaaag

SEQ ID NO: 4532 - DNA, 417 bp, Homo sapiens
  MAP TO AJ229042.1; EXPRESSED IN BONE MARROW, SIGNAL = 2.4; EXPRESSED IN ADULT LIVER, SIGNAL = 2.9; EXPRESSED IN FETAL LIVER, SIGNAL = 2.8; EXPRESSED IN BRAIN, SIGNAL = 1.9; EXPRESSED IN LUNG, SIGNAL = 2.6; EXPRESSED IN HEART, SIGNAL = 1.9; EXPRESSED IN HELA, SIGNAL = 2.8; EXPRESSED IN HBL100, SIGNAL = 3.6; EXPRESSED IN PLACENTA, SIGNAL = 2.7; EXPRESSED IN BT474, SIGNAL = 2.3
aaaacactttgcagctggtgagaaggcaataaaaagttgagttttaaactcattgctataaattattcttatagtactttgcaaattcagaatttcaaacggcattttctttttctaaattgcccacagtactcgaggttcctgaagctaagctgacggaagagggaaagtgtgtgataaatacatgtgcagctttctgttcaacttgaacaatgattttgtggtggatgcaacctgcaagggtaacaaaattcgttttgcaaatcattcggtaaatccaaactgctatgcaaaagttatgatggttaatggtgatcacaggataggtgtttttgtcaggagagccatccagacttgcgaagaactgttttttgattacagatacagccaggctgatgccctgaagtatgttggcat

SEQ ID NO: 4533 - DNA, 1945 bp, Homo sapiens
  MAP TO AL021808.1; EXPRESSED IN HBL100, SIGNAL = 2.1; EXPRESSED IN HELA, SIGNAL = 2.2; EXPRESSED IN PLACENTA, SIGNAL =   2; EXPRESSED IN HEART, SIGNAL = 2.1; EXPRESSED IN BT474, SIGNAL = 2.3; EXPRESSED IN FETAL LIVER, SIGNAL = 2.3; EXPRESSED IN ADULT LIVER, SIGNAL =   2; EXPRESSED IN BONE MARROW, SIGNAL = 2.1; EXPRESSED IN LUNG, SIGNAL = 1.9; EXPRESSED IN BRAIN, SIGNAL = 2.1
gcactcactctacggggtgcggatagtgctccccactcagactccggggatcccgcgggccgacagatctgcgccggggccctgagccgcctgagcctgtaccttcgaggccagtaatagtcggagcctggaaactgtgcacccactcgattccagctctgcgccacttggtgaatccggaccacagggtcccagacagccgctgccgacgccaggggcgaggcgcagtgagcttcctctcgagttcctctccccgcgccaagtactgcaactcgctgcggagacagcagaggtctgaccgccccgctgaggtctcagaacagcaaagcaagttactgggactgccgaagtcccgcgtgtcccccgttcccgcgggtgccgggcctggagagtgctaagcaccctgagactcgcgctttcctagcgcgtgaatcccaaccgtcaaccgaacactgcgctcttcgactctgtccgattctgcagacgtccgaaacctcggaagccaaaaccgtgcttgaactcactgcccgcgcctcatctctcctcatgggcagtttcctgagcaaactggaactttcgccctcgtccccagcccaggtgcgcaccgacttgcccgagaggcccacgaaacgccggccacctcagccccttcaccaagttcatcgggttcagttcgtccaccgcgcccaccctgccccacggtatagacctgtgaggaggcggccaaacctggatcctgccaatccaaccacgtggctggccaacgaggcctggaggcgctttcccatgaagaagtcccagaattcccccctggggcctctcccttcagactggtgggaaagttacttaaagcggactatttggtctcttcgacatcccaggccaatttggagcccagtgaccatcaggatcactcctcctgaccagagagtgcccccttccacttctcctgaagatgtaattgcccttgcaggactcccgccctctgaggagctcgcagatccatgttcaaaggagacagtgttgagggccctcagagagtgcagaaaagggaaagggaggttggaagaaccactattccctgagagtctggacagtaagagaaggagtccagagaccagaccatcggcatttaagcccctgatgaaaaatggaaccctcacttcttttgtgcccaggcctgggccgctgaagagaagtctccactcctggggctcagatcacagcttgactaagaggcccaattgctcctccatgagctccttggccagcatatacagaggtggcaccctcagctccaaaaggaatgctattggcagctcttacagctcttgcagaaatttctcagacccttggaagagaagtgttcccagtgtatcattcgagacaccagagtggccaataaaaaaggaaaaaagttgtcatcggccttcctctccagtcccactggtatcagattttgagtccctaggaggatctgaaagttctgggcagcaaaaccagaagattccacagctgccgtctagccctgagaacctggtgtcagagatcccacctccccagcttggttatgcagtctctgatgagaacttgactttggggaagaaagctgagctacaggtaagcaacaacgcaggagaagatacaactgaggtcaacacagaccctttccctgagacttggcttgctattcagccttccttgtctcttgctctgccttcttcagaaacagatctaacccagggagcaaatcctcagttggaaaacttaagaaaaatgcagaagtctctaggtccactggcctctccacagtccacgggagaggcaaccagtgtggcccattctcctttgaagacacccagcctaccgaccccacctgggtgctcacagtcagagctccttccaggcacctctccagactcaaagcccacagctactttcatcc

SEQ ID NO: 4534 - DNA, 478 bp, Homo sapiens
  MAP TO AL049697.8; EXPRESSED IN BT474, SIGNAL =   1; EXPRESSED IN FETAL LIVER, SIGNAL = 1.9; EXPRESSED IN HEART, SIGNAL = 0.92; EXPRESSED IN LUNG, SIGNAL = 4.1
ttgggaggttttagccttttctgatatctcctgtttagtttggctgtttaaagtcttaggtgttttgacaaagtattccatttaagtcactgtaataaatcttccctcctggatttttgtcttgaggctacatgctggccactgttttttatttcattattacagcttaagaaattacttgttttcctgaagtagaattgccatatccaatccagtttttctctagttcttacgtaagaagaattctaaaaattaaatatatagaacattgttatttggcaattttagtggaatttctcgaagaacatcaccgggtcctagagtctagattaggctctgttacccgagaaattacagataacagagcatgtgctaaagaagaattggaaagcctctaccggaagattatcagctatgtgttactccgctctggccttggatcccctacagacatcaagactgtcagagaggtaacagg

SEQ ID NO: 4535 - DNA, 458 bp, Homo sapiens
  MAP TO AL008633.1; EXPRESSED IN FETAL LIVER, SIGNAL = 1.2; EXPRESSED IN BT474, SIGNAL = 1.1; EXPRESSED IN HEART, SIGNAL =   1; EXPRESSED IN ADULT LIVER, SIGNAL =   2; EXPRESSED IN BRAIN, SIGNAL = 1.1; EXPRESSED IN LUNG, SIGNAL =   1; EXPRESSED IN BONE MARROW, SIGNAL = 1.3; EXPRESSED IN HELA, SIGNAL = 1.9; EXPRESSED IN HBL100, SIGNAL = 1.3
cccagctctaggagggaatccctcttttggcttgaggagaggagagggaagagtaaagaggatattgtcttataacttggatatcagctcagccacagtagagtagggcaccagggagagtccttaggcccccattccaggccctagctcctggatgacattgttagatacaccctgggccagaaggaaactcatttccttgaagagaaggacctggtcctgacaggattaatcatttactgactaaacagtccttatgccttgagtaaacatcagtggtacccaggaaatacttaccatgggcttcaggccttgggtgaaacccagggccttgttcacttcagatgtgaccagtgcattcccagatatggtgggcatgagaaactccttctacttgagaaaaggagagggaagagtaaaagagactttgtcttgcagcttaggtaccagcttggcca

SEQ ID NO: 4536 - DNA, 387 bp, Homo sapiens
  MAP TO AL022166.1; EXPRESSED IN HEART, SIGNAL = 0.96
tcatccattcactctttcaacgagtgcttattaaggtctactacgtgccagtctagtcaactgggattcataggtgaacaaatctcaagcaccctggccctcgtgaatggtacatacaagagcaaggaaacagaaaataaaatgcaaaccttttacattactaattatatagaagggtagaaggagacaatcactttgggtggggcaggtggtggtggtggtggtggtaagctaacacacagcagggtagggtgcattcgggtcgttgagaatgggagaagagaaagggagtagagcattcactgccatatgcaagggtacacaggtaggcttcattggaggggtgacattggaggaaagaaatgaagaaggtgagagggtttgcct

SEQ ID NO: 4537 - DNA, 444 bp, Homo sapiens
  MAP TO AL109823.11; EXPRESSED IN BRAIN, SIGNAL =   3; EXPRESSED IN HEART, SIGNAL = 3.5; EXPRESSED IN FETAL LIVER, SIGNAL =   3; EXPRESSED IN ADULT LIVER, SIGNAL = 3.6; EXPRESSED IN LUNG, SIGNAL = 3.3; EXPRESSED IN BONE MARROW, SIGNAL =   4; EXPRESSED IN HELA, SIGNAL = 3.2; EXPRESSED IN PLACENTA, SIGNAL = 3.8; EXPRESSED IN HBL100, SIGNAL = 3.9; EXPRESSED IN BT474, SIGNAL = 3.9
atttgggacaagcagtgaccaactgtgtctggagaaactgcaacagctaggcaagatgctctgggctctctactccatcccgccaaagaacacatcaagataaatggacaaatgaggccaaaataagacggaaggaggtacacagaggggaggggaggggggcacgactgagcagagggcatgatggcaggggtgagacagatgctaagtgtgtgtgttcaggtggaactgcctggtacccacctaggtccagtctctcacagagggggcccaggccctgtaagacagccagctgcaacttgaaggccagcgtgtgcgagtaaactggtccagccctggcactgatgggggcctgggtgactagggagccagccagctttggcaggacatctttgcagaaccggctgcgaagaaagtcaccacacttgcttcccagggtacgta

SEQ ID NO: 4538 - DNA, 376 bp, Homo sapiens
  MAP TO AL118508.9; EXPRESSED IN BT474, SIGNAL = 1.2; EXPRESSED IN BONE MARROW, SIGNAL = 1.4; EXPRESSED IN HEART, SIGNAL = 1.9; EXPRESSED IN FETAL LIVER, SIGNAL = 1.4; EXPRESSED IN LUNG, SIGNAL = 1.3; EXPRESSED IN HELA, SIGNAL = 1.2; EXPRESSED IN PLACENTA, SIGNAL = 3.4; EXPRESSED IN HBL100, SIGNAL =   2; EXPRESSED IN ADULT LIVER, SIGNAL = 1.8
gcaccagaaggtcacactccagtggcaggagaacgatgggcactgccccatccctctcttagcttcaaggcctgccctgggtgtgaggggcagtacactgctgatggtgctggcccagtagcattgtgcatcccatgcagcccagccctggcatacaagcctggcacacaggcaccagacctagctgcttctccagtcacctgcttgcctgctgtggggcctcagggcacactctgccctcacccattttaggagctgcctcttcctcaaagccttctgagtcctccccttcccttatgggtgagcccctccctgcccctgagatctctgggggcacctgtgcgacttcttcccgaggtgccctatacaacccctt

SEQ ID NO: 4539 - DNA, 426 bp, Homo sapiens
  MAP TO AC007156.2; EXPRESSED IN PLACENTA, SIGNAL = 0.92; EXPRESSED IN FETAL LIVER, SIGNAL = 1.1; EXPRESSED IN BONE MARROW, SIGNAL =   1; EXPRESSED IN BRAIN, SIGNAL = 0.96; EXPRESSED IN HBL100, SIGNAL = 0.96; EXPRESSED IN HELA, SIGNAL = 1.1; EXPRESSED IN HEART, SIGNAL =   2
aaggaggtcatggggacaggaggccatgaggacagggggtcatggggacgtggctcatgcctggtgcagaccagaggggtgctgattgaattgtatttactggagagaagctgtgggatccgtatctgttgagatgctggacatgagagtaagggaggactctaggctgcccccagtttctagcaggaatgatttggacacagttcagagggacagcaatcagaaagaggatgaggattctgcaggaaggggatggaatgacctggagcgtgttgagtttggtgtcagagaggattgtgctgcaactgtctgcagaaaggttcaggcagacgttagaagttggtgcacaagcaaaaagcaacaggggagtctcacagcaagatgtaccatatgacagagaaaaagtgcaaggacaggactcttgga

SEQ ID NO: 4540 - DNA, 409 bp, Homo sapiens
  MAP TO AL118517.5; EXPRESSED IN BT474, SIGNAL = 1.2; EXPRESSED IN HEART, SIGNAL = 1.3; EXPRESSED IN FETAL LIVER, SIGNAL = 1.2; EXPRESSED IN ADULT LIVER, SIGNAL = 1.1; EXPRESSED IN BRAIN, SIGNAL = 1.1; EXPRESSED IN LUNG, SIGNAL = 1.5; EXPRESSED IN BONE MARROW, SIGNAL = 1.9; EXPRESSED IN HELA, SIGNAL = 1.3; EXPRESSED IN PLACENTA, SIGNAL = 1.4; EXPRESSED IN HBL100, SIGNAL = 1.6
tgaatgatatatcccaatcagtgtgttgtattttaagtttggaaaatatcatatttagaagcaatcagtactcaaaaggacacataatttttgaagcatcttacctttaatgcctttaataaagttccacatcatccagtttccttttccttctccaacatcatcccctactctcatacccatagctcatgcttcttctgccattcttagcttatagctcttcttccaacacaacttttcacctttcactatcagctgcctcttcctggaatagtcctctatccaatattctcatggctaacattccttccagtttcagttcaaatctcactttctccatgaatcctgtcttgaccaccatatttcaaactacagtccagatctcttccccaaccagcacttccaactt

SEQ ID NO: 4541 - DNA, 1984 bp, Homo sapiens
  MAP TO AC002094.1; EXPRESSED IN PLACENTA, SIGNAL =  31; EXPRESSED IN ADULT LIVER, SIGNAL = 4.9; EXPRESSED IN BT474, SIGNAL =  31; EXPRESSED IN LUNG, SIGNAL = 7.6; EXPRESSED IN BRAIN, SIGNAL = 1.5; EXPRESSED IN HEART, SIGNAL = 1.9; EXPRESSED IN HELA, SIGNAL =  36; EXPRESSED IN HBL100, SIGNAL =  11; EXPRESSED IN FETAL LIVER, SIGNAL = 8.8; EXPRESSED IN BONE MARROW, SIGNAL = 1.9
aaacaaacaaacaaacaaacctcattactatagggaattaatctgcagtcttcttactaggtatttataatccatgtgtgagaacaatctcaaaggaaaagagaactgtatcagaaaatttagcgtaaggtatttatttggacagcctttaaatgtttattttctaaaggtagaacatttatttctacagatttaccttcagctttaacaaaaaattggccgtcaaaacctgagtcctgtcctcttgctctcctccccggacagcatgaacttcaccacttgctccaccctctccaccaactaccagtccctgggcactgtccaggcacccagctatgtgcccagctggtcagcagtgtggccagtgtctatgcaggcatcaggggctctggttcccggatctccatgtcctgcttcaccagcttccagggcagcatggggtccaggggcctgcccgcagtgatggccgggggtctggcaggaatgggagtcatccagaatgagaaggaaaccatgcaaagcctcaacgaccacctggcctcctacctggacagagttaggagcctggataccaagaactggaagctggagagccaggagcacctggagaagaagggaccccaggtcagagactggagccatgacttcaagaccatcgagaacctgagggctcagatctttgcaaatactgtggacagtgcccacattgttctgcagatcgacaatgcctgtcttgctggtgatgactttagggtcaagtatgagacagagctggccatgtgccagtctgtggagagtgacatccatgggctccacaaggtcattgatgacaccaatgtcacttggctgcagctggaagcagagatcaaggctctcaaggagaagctgctcttcatgaagaagaaccatgaagaggaagtaaagggcctataagcccagattgccagctctgggttgactgtggaggtagatgcccccaaatctcatgaccttgccaaaatcttggcagacattgggcccaatatgacgagctggctccgaagaacttagaggagctgggcaagtactggtctccgcagattgaggagagcaccgcagttgtcaccacgcagtctgccgaggttggagctgctgagatgacgctcacggagctgagacatacagtccagtccttggagatcgacctggactccatgagcaatctgaaggccagcttggagaacagcctgagggaggtggaggcctgttacaccctgcggacggagcagctcaacaggatcctgctgcacttggagtcagagctggcacagacccgggcagagggacagcactaggcccaggagtatgaggccctgctgaacatcaaggtcaagctggaggctgagatcgccacctaccaccgcctgctggaagacagtgaggacttcaatctttcaatcttggtgatgccctggacagcagcaactccatgcaaaccatccaaaagactaccacctgccggatattggatggcaaagtggtgtctgagaccagtgatgccaaagttctgataccttaagccagcagaagcaggggaccctttggggagcaggaggccaataaaaagttcagaggttaaaaaaaaagaaaaaaaaagaaaaaatattggcattgttatggcattaacagctatatatatgtacttttttcaaaacaacatttatagcataacttgaattttctatttattagtatatacatttttcttcttttgaaatgtgtattttctagtttattggatattgaaaacaatctttgatttatcattgtaatttaagttcactgtctcttttccagcaattattcttttttctcttttgtgcagtagtagaaaacaaaatccaagcaagcatagaccggcaagatattcagctgtctggaagtctggagattttgtccagcaagaagccccctaacaaaaggcagaatgccaaactgagtgctg

SEQ ID NO: 4542 - DNA, 1966 bp, Homo sapiens
  MAP TO AC005242.1; EXPRESSED IN BRAIN, SIGNAL = 1.5; EXPRESSED IN HEART, SIGNAL = 1.3; EXPRESSED IN PLACENTA, SIGNAL = 1.4; EXPRESSED IN ADULT LIVER, SIGNAL =   1
tgcacagtctctcttttcttgcaggacatgttctctggatgtcagctgagtcattaaagtaactctgcatgtcagtagacagaccttggtagaaccacaaggctcccagagacacccatctctcctcatttttttggtgtgtgtgtcttcaccgaacattcaaaactgtttctccaaagcgttttgcaaaaactcagactgttttccaaagcagaagcactggagtccccagcagaagcgatgggcagtgtgcgaaccaaccgctacagcatcgtctcttcagaagaagacggtatgaagttggccaccatggcagttgcaaatggctttgggaacgggaagagtaaagtccacacccgacaacagtgcaggagccgctttgtgaagaaagatggccactgtaatgttcagttcatcaatgtgggtgagaaggggcaacggtacctcgcagacatcttcaccacgtgtgtggacattcgctggcggtggatgctggttatcttctgcctggctttcgtcctgtcatggctgttttttggctgtgtgttttggttgatagctctgctccatggggacctggatgcatccaaagagggcaaagcttgtgtgtccgaggtcaacagcttcacggctgccttcctcttctccattgagacccagacaaccataggctatggtttcagatgtgtcacggatgaatgcccaattgctgttttcatggtggtgttccagtcaatcgtgggctgcatcatcgatgctttcatcattggcgcagtcatggccaagatggcaaagccaaagaagagaaacgagactcttgtcttcagtcacaatgccgtgattgccatgagagacggcaagctgtgtttgatgtggcgagtgggcaatcttcggaaaagccacttggtggaagctcatgttcgagcacagctcctcaaatccagaattacttctgaaggggagtatatccctctggatcaaatagacatcaatgttgggtttgacagtggaatcgatcgtatatttctggtgtccccaatcactatagtccatgaaatagatgaagacagtcctttatatgatttgagtaaacaggacattgacaacgcagactttgaaatcgtggtcatactggaaggcatggtggaagccactgccatgacgacacagtgccgtagctcttatctagcaaatgaaatcctgtggggccaccgctatgagcctgtgctctttgaagagaagcactactacaaagtggactattccaggttccacaaaacttacgaagtccccaacactcccctttgtagtgccagagacttagcagaaaagaaatatatcctctcaaatgcaaattcattttgctatgaaaatgaagttgccctcacaagcaaagaggaagacgacagtgaaaatggagttccagaaagcactagtacggacacgccccctgacatagaccttcacaaccaggcaagtgtacctctagagcccaggcccttacggcgagagtcggagatatgactgactgattccttctctggaatagttactttacaacacggtctgttggtcagaggcccaaaacagttatacagatgacggtactggtcaagatgggtcaagcaagcggccacaagggactgaggcaagcacaatggtttcaaagaaagactgtaagctccatgattagcataaagcactaaccatgtctccatgtgacccgatggcacatagatgttgtagaataagttatgggtttttatgttttgttttgtgtttttccaaaacttgaacttgcaggcaagccttggttgggtatttgatttatccagaatgcttctctttagggaacaaggatgtttttaatggcataacaaaggcaagactctgccttaatttttgaaaagctgctaactacatgaacacaaatgtgtatttttgttgcagtgtagttttccttttg

SEQ ID NO: 4543 - DNA, 1992 bp, Homo sapiens
  MAP TO AC002467.1; EXPRESSED IN BT474, SIGNAL = 2.6; EXPRESSED IN FETAL LIVER, SIGNAL = 1.6; EXPRESSED IN HELA, SIGNAL = 2.6; EXPRESSED IN PLACENTA, SIGNAL = 2.6; EXPRESSED IN BRAIN, SIGNAL = 1.5; EXPRESSED IN LUNG, SIGNAL = 1.4; EXPRESSED IN BONE MARROW, SIGNAL = 1.3; EXPRESSED IN HEART, SIGNAL = 1.2; EXPRESSED IN HBL100, SIGNAL = 2.1
acctgttacccgtgcttcacttgaaaatgttcatcctcctattgccccaccaccaactgaaatccctgagcgttttataatgccaccagacaagcaccatatgagccatattccgccaaagcagcacatcatgatgccaccacctcctttgcaacatgtgccacatgagcactataatcagccacatgaggatattcgtgctcctccagcagaattgtccatggctccacctccacctcgatcggtcagtcaggaaacctttcgtatttcaacaagaaaacacagcaatttaataaccgtccctattcaggatgactcaaattcaggtgctagagaaccaccacctcctgccccagcacctgctcaccatcatcctgaatatcagggtcaaccagtggtatcgcaccctcatcatattatgcctccacagcaacattatgcaccacccccacctcctccaccaccaataagccatccaatgccacatcctccccaggctgcaggtactcctcacttggtatatagccaagctccacctccaccaatgacctctgctccaccaccaataacccctccccctggacatattattgcccagatgccaccttatatgaatcatcctcctccaggacctcccccacctcaacatggtggtccacctgtaactgcaccccctcctcaccattataatcctaactcattaccccagttcactgaagatcaaggaactctgagccctccatttacacaaccagggggaatgagtcctggtatatggcctgcaccaagagggccaccaccacctccacgattgcagggtccgccttctcaaaccccacttcctggaccacatcatccagatcagacaagatatagaccgtattaccaatgataatagtattttgaatggaagatatgagggggaaaaaaacttatgtgtagtcaatcttttaagctttgactgttttgggaaggaagagtacctcttatcgaggtagtataaaacacatagggtcttgtttcttaaaatggttttaaatcttgaccttaagattgatttcaagtaccatactgtagtacagataagtggctcagttgagcacagctatattttaacatctctttgttcccctagtttagtaaattgacccagaggtgaccatttgtaaaaaatttgaaaaaatttttcattgttttacttcaaaagtattgttttgttaaacccaacgtttagtttttcttgtgatacattttgttaacctgtgtaaaaggattaaatttcaatatggttgtaaaaatgctatttttatgtgaatttaagtgcagccacatactgttttttaaaccatatgttttaccactaatttcccaaagttataataaaatcctgaaagtaaaaatctactagaatttgctgtaaggcagactgttaaatgatagagaattatttcacattttaggcactgaaatgttgaggtttcgaggtatagtaagtatacaatgcacttcacttggatgccttttcatttttaggcagcctcaggagcaccaaaatacattggaattctagtactaagatatatttgttcgtaatgttaaaagacattactaattatttggaaagagatggccaaaataatcaactctacaggcttcaagctggtgggggaatgctgttactcattaatgcttttttactgaatggtcggaatcacatatgcaccacacatactgatcttaagtaacattattttatagaactgtttaaatgggtttaaatggtgttctttagatgaaatgtgttctgttttgttcattgtcttaaactgaatagggctgaataggctttatgtaattcttcatttcatggtagagtttgatgctgtgtttaagtgggttcttgtttataggattttcaactacagtttgaatgccatggaggaatttgaataatatattaatgaaggacatattcttgtaatcacaaatttg

SEQ ID NO: 4544 - DNA, 445 bp, Homo sapiens
  MAP TO AC007189.6; EXPRESSED IN HBL100, SIGNAL = 1.8; EXPRESSED IN HEART, SIGNAL = 1.8; EXPRESSED IN PLACENTA, SIGNAL = 1.8; EXPRESSED IN HELA, SIGNAL = 2.1; EXPRESSED IN BT474, SIGNAL = 1.7; EXPRESSED IN FETAL LIVER, SIGNAL =   2; EXPRESSED IN ADULT LIVER, SIGNAL = 2.1; EXPRESSED IN LUNG, SIGNAL =   2; EXPRESSED IN BONE MARROW, SIGNAL = 1.7; EXPRESSED IN BRAIN, SIGNAL = 1.5
cacttttgcaaacagcctcccagctagatattagcagcactagaaactcaccaagacatcactatctcacctttctctgtccttcagaaagttcttgcttatatcgatcccaaatctatcttcccatagtttctaaaaatttgggcccaaataacccagttatattattgacataaaaattaaatgtcattccacatacaatgcctctttgcatattagtggaatcccttcccccatctctacctaaagacttgcaatttgtccttaaaacccagctcaagcccctccaggaatctggtgaccctgttaaccaccagtatcaccaccaagctgtgttcctggtgctctttgttcatatagacatcttggtacatatcagcctccattaaaaactgctgtgctcctctagactatgagctccttgagggtagggtcggtttctttc

SEQ ID NO: 4545 - DNA, 477 bp, Homo sapiens
  MAP TO AL109759.1; EXPRESSED IN LUNG, SIGNAL = 2.5; EXPRESSED IN HEART, SIGNAL = 3.6
ttttgctcattggcagactcataaacatcctcacagctaagtctttcacatctttttcctatttcatttcagcttctgcatacatctattatagtactgatctaattttatatgcattttggggtacgtttatctccccaaaaggtggcaaattttttccttttccttcctgtgttttcggactgtagtacgtaagctttcattaaatgttttcaataataaatataaatgtataccttaaaatcaggaagatgtcttcaataactgttctgaaagtacattttaataaatcatgtgatatataatcatatcacagaaagatatttagctttacccagcatgcatatccctatgaataagaaaattcattctcttaacggaaataatcatctttgctttactgaatgtcatattcaagacactaattccagttttgcaccatctcataagtgatatgccctatcaacaaaggaaaaa

SEQ ID NO: 4546 - DNA, 416 bp, Homo sapiens
  MAP TO AL121675.8; EXPRESSED IN LUNG, SIGNAL = 6.8; EXPRESSED IN HELA, SIGNAL = 7.9; EXPRESSED IN PLACENTA, SIGNAL = 9.5; EXPRESSED IN HEART, SIGNAL = 7.9; EXPRESSED IN FETAL LIVER, SIGNAL = 8.6; EXPRESSED IN ADULT LIVER, SIGNAL =   7; EXPRESSED IN BT474, SIGNAL = 6.9; EXPRESSED IN BRAIN, SIGNAL =   7; EXPRESSED IN BONE MARROW, SIGNAL = 9.3; EXPRESSED IN HBL100, SIGNAL =  11
aaaagcaaggcttagggaggttaaaccacctgcctcaagttgacaagtaagaggcacaaagagcctttgagaccacagagccgggactcctaatggcctcaagacagaaagagccaagggaagaagcaggggaaagtggccagataggatgggcagctcttcatcctgtggaagcagcagcacctgcgtctcagagcctctctaatttgtcattgggatgggaggttctggtggagaggggtggccttgaggccttctggcctttgctgttcctccaccctgacctccccatccccgccccgcagcccatgcaggtgctgttttccggtgaggccacccaccgcaagtactattccaccacccacggtgctctgctgtccggccagcgtgaggctgcccgcctcattgagatgtac

SEQ ID NO: 4547 - DNA, 421 bp, Homo sapiens
  MAP TO AC010183.6; EXPRESSED IN BONE MARROW, SIGNAL = 1.2; EXPRESSED IN LUNG, SIGNAL = 1.4; EXPRESSED IN PLACENTA, SIGNAL = 0.97; EXPRESSED IN HELA, SIGNAL = 1.3; EXPRESSED IN HBL100, SIGNAL = 1.3; EXPRESSED IN HEART, SIGNAL = 1.4; EXPRESSED IN BT474, SIGNAL = 0.98; EXPRESSED IN FETAL LIVER, SIGNAL = 1.3
ggctggttgcctttatcatctcttatctgggatatggtaatagcatctgagccggtctctctacttctattgccactgacacccatccattgtttacaatatccacagcattgatctcaaagtgtagatctgaacatctcccctccctgcccaaaaccctcaatagctccccatggctcttgatgcctaacataacctacaagttttggcctctgcagacctctccagctacctccacaactagagccactctcatttttgctttccagcccatgtcctcctccttcctcagttggcttctgttaagttcctctaatgtgtagtgctccctcctgccacagagcctttgcacatgctgttcctctgcctcctccccttggcttactaattccagctcaagagttacttcctcagggcagcc

SEQ ID NO: 4548 - DNA, 392 bp, Homo sapiens
  MAP TO AP000080.1; EXPRESSED IN LUNG, SIGNAL = 1.5; EXPRESSED IN HELA, SIGNAL = 1.4; EXPRESSED IN PLACENTA, SIGNAL = 2.2; EXPRESSED IN ADULT LIVER, SIGNAL =   1; EXPRESSED IN BT474, SIGNAL = 2.9; EXPRESSED IN BONE MARROW, SIGNAL = 2.3; EXPRESSED IN BRAIN, SIGNAL = 1.8; EXPRESSED IN HBL100, SIGNAL = 2.6; EXPRESSED IN HEART, SIGNAL = 1.6; EXPRESSED IN FETAL LIVER, SIGNAL = 1.6
cattcgagtcaatgcctgtgaaaatcaattccatgagaattattttcagtgaatgtcacattgcttgcttatctcctttgcctaagcaacccactcagcaacattcctggaaatatctaaactccatcgcagataatccaactgtattgttatttcaatgtacatttgtaacatgatgaaataacatgtaactaaaatcacattgcatttcacagaatgccaaaatgcgttactgattgaaatcaaatatttgaatggtacctcctgcatatgaatgaaggtggaaacctgttctagcatcattatcccacatgatctgagtggcagccaatatctatcgcctttctcaaaaccccaagtgacactatctgtgctgccatcttctctgttcc

SEQ ID NO: 4549 - DNA, 494 bp, Homo sapiens
  MAP TO AC010930.2; EXPRESSED IN BONE MARROW, SIGNAL = 1.1; EXPRESSED IN LUNG, SIGNAL = 1.1; EXPRESSED IN PLACENTA, SIGNAL = 1.1; EXPRESSED IN HELA, SIGNAL = 1.1; EXPRESSED IN HBL100, SIGNAL = 1.1; EXPRESSED IN HEART, SIGNAL = 1.1; EXPRESSED IN ADULT LIVER, SIGNAL = 1.4; EXPRESSED IN BT474, SIGNAL =   1; EXPRESSED IN FETAL LIVER, SIGNAL = 1.2
aggtgggatagcacaggttgaactctaatcatatatactgtagaaggtatatatagaaggtgaagaagccctgtaaaaattgacaaggagatttccaggagccatgcttccctctaatatcacctcaacacatccagctgtctttttgttggtaggaattcctggtttggaacacctgcatgcctggatctccatccccttctgctttgcttatactctggccctgctaggcaactgtacccttctcttcattatccaggctgatgcagccctccatgaacccatgtacctctttctggccatgttggcaaccattgacttggttctttcttctacaacgctgcccaaaatgcttgccatattctggttcagggatcaggagatcaacttctttgcctgtctggtccagatgttcttccttcactccttctccatcatggagtcagcagtgctgctggccatggcctttgaccgctatgtggccatctgcaagc

SEQ ID NO: 4550 - DNA, 395 bp, Homo sapiens
  MAP TO AL022101.1; EXPRESSED IN HEART, SIGNAL = 0.95; EXPRESSED IN PLACENTA, SIGNAL = 0.9; EXPRESSED IN ADULT LIVER, SIGNAL =   1
cctcagtgctccctgttctctttgtcttttctcaatcccttttccctttggattctgagtggtccccacttctattccctttaccttccactgagtaaaggccggtttctgttcccacagtggaccctgtatggtgagcagtcctttctctgaggatctggacaatggccaaagcctccctgagcttcctcgccaacaccatcagaagactctgggccgcacttgggttacttctctgcctgaccctgctgttctttccctggacacctgagccctatctactagccctcctgggtcacctcacctggggcgatccttctgtgtaagcagcatatgaagcccttccagcaatgctttcaatggctccagatgaagcgtcttcatcagcgatacca

SEQ ID NO: 4551 - DNA, 455 bp, Homo sapiens
  MAP TO AC007172.6; EXPRESSED IN BONE MARROW, SIGNAL = 1.3; EXPRESSED IN BRAIN, SIGNAL = 1.9; EXPRESSED IN HELA, SIGNAL = 1.6; EXPRESSED IN LUNG, SIGNAL = 1.7; EXPRESSED IN HEART, SIGNAL = 1.4; EXPRESSED IN HBL100, SIGNAL = 1.4; EXPRESSED IN PLACENTA, SIGNAL = 1.4; EXPRESSED IN ADULT LIVER, SIGNAL = 1.2; EXPRESSED IN FETAL LIVER, SIGNAL = 1.4; EXPRESSED IN BT474, SIGNAL = 1.4
agtcagcttcagagccttggggagtacttcttgactgagttagctgtggaaaagacccctaacaaagtcatctgatcttttgggagtttatcagctcacatccatgaggtgtgaaagtttaacactttgttaatctttgcatcataatcacatagtgataaaggataaaaatgaaacccatccttagccacggatcgctaaggcaattaccaatgctccctggcaccatttcctcaatttggtgctccttagtcctgtactctttttgtcaaacacaagctggtttctctttttacctgcatgaggcgctccaactggtaaaatttgcaatgcaaatcttcgaagttttgcttgaaaagttccctgagcccatagtcaaacatgatcttgaccagaacactgaatgcctgttcttcaggcatctgtaacagataggcaagttgttgggtagggag

SEQ ID NO: 4552 - DNA, 424 bp, Homo sapiens
  MAP TO L78833.1; EXPRESSED IN FETAL LIVER, SIGNAL = 3.4; EXPRESSED IN ADULT LIVER, SIGNAL = 1.7; EXPRESSED IN LUNG, SIGNAL =   2; EXPRESSED IN BONE MARROW, SIGNAL = 2.1; EXPRESSED IN BRAIN, SIGNAL = 2.3; EXPRESSED IN PLACENTA, SIGNAL =   2; EXPRESSED IN BT474, SIGNAL = 1.9; EXPRESSED IN HEART, SIGNAL = 1.9; EXPRESSED IN HELA, SIGNAL = 2.4; EXPRESSED IN HBL100, SIGNAL = 2.3
tctatttgggggaatttgaggattttttccctcactaacatcatttggaaataatttcatgggcattaattgcatgaatgtggttagattaaaaggtgttcagctagaacttgtagttccatactaggtgatttcaattcctgtgctaaaattaatttgtatgatatattttcatttaatggaaagcttctcaaagtatttcattttcttggtgccatttatcgtttttgaagcagagggataccatgcaacataacctgataaagctccagcaggaaatggctgaactagaagctgtgttagaacagcatgggagccagccttctaacagctacccttccatcataagtgactcttctgcccttgaggacctgcgaaatccagaacaaagcacatcagaaaaaggtgtgtattgttggccaaa

SEQ ID NO: 4553 - DNA, 483 bp, Homo sapiens
  MAP TO AL132642.1; EXPRESSED IN BRAIN, SIGNAL = 6.1; EXPRESSED IN HELA, SIGNAL = 5.9; EXPRESSED IN HBL100, SIGNAL = 6.3; EXPRESSED IN PLACENTA, SIGNAL = 3.2; EXPRESSED IN ADULT LIVER, SIGNAL = 1.6; EXPRESSED IN HEART, SIGNAL = 8.1; EXPRESSED IN BT474, SIGNAL =   9; EXPRESSED IN FETAL LIVER, SIGNAL = 4.5; EXPRESSED IN BONE MARROW, SIGNAL =   6; EXPRESSED IN LUNG, SIGNAL = 2.4
tacccctcagggagctgtagctgtttaaaacatcatggaaagatgtagcggagagactctggggttggtcaaacctgggttttaatcccagctctgccactaactaactgtgactttggcccaggtggcacagctctctgagaggcagattcctcatgtttcatccaaggagttacagagcctggcaagcagcaggtgctcacagggttaggaacagtcgcactccctgaggcctgggactctgagtcaggcagggagatctgccagccttggcagcagcagcaagtccctacctgccttctccttgatgacggcccagtcctcaaagctgtcgatgtgttccttcagccgcgagcagagctgcacgttgcccacgtagtccaggaggacatcgatgatgggccccgcccagcggctcacctctggggcagatacgaactcacagaactgaaagagaacatgccgggaccaagaagtgagttc

SEQ ID NO: 4554 - DNA, 1962 bp, Homo sapiens
  MAP TO AC010680.3; EXPRESSED IN HEART, SIGNAL = 7.4
taaagagcaccgactttgccaccagtctcagtgtaaaagatgcagtacgtgtcgacagtggaaattacatactgaaggccaaaaatgttgcaggagaaagatcagttactgtgaatgtcaaggttcttgacagaccagggccacctgaaggacctgttgttatctcaggagttacagcagaaaaatgcacactagcttggaaacccccacttcaggatggtgggagtgacatcataaattatattgtggaaaggagagaaaccagccgcttagtttggactgtggttgatgccaatgtgcagactctcagctgcaaggttactaagcttcttgaaggcaatgaatatactttccgtataatggcagtaaacaaatatggtgttggtgaacctcttgaatctgagccagtagttgccaagaatccatttgtagtaccagatgcaccaaaagctccagaagtcacaacagtgaccaaggactcaatgattgttgtatgggaaagaccagcatctgatggtggtagtgaaattcttggatatgttcttgagaaacgggataaagaaggcattagatggacaagatgccataagcgtctgattggagagttgcgcctgagagtaactggactcatagaaaatcacgattatgagttcagagtttctgctgagaatgctgctggacttagtgaaccaagccctccttctgcttaccaaaaggcttgtgatcctatttataaaccaggacccccaaacaaccccaaagtcatagacataaccagatcttcagtattcctttcttggagcaaaccaatatatgatggtggctgtgaaattcaaggatacattgttgaaaaatgtgatgtgagtgttggtgaatggacaatgtgcactccaccaacaggaattaataaaacaaacatagaagtagagaagctgttggaaaagcatgaatacaacttccgtatctgtgctattaataaagctggagttggagaacatgctgacgtccctggacctattatagttgaagaaaaattagaagcaccagacattgatcttgacctagaactaaggaaaatcataaatataagggcaggtggctccttaaggttatttgttcctataaaaggtcgtcctacaccagaagttaaatggggaaaggtggatggtgaaatccgagatgcagctataattgatgtcactagcagtttcacctctcttgttcttgacaatgtcaaccgatatgatagtggaaaatatacgcttacattagaaaacagcagtggaacaaagtctgcctttgttactgtgagagttctggacacgccaagtccacctgttaacctgaaagtcacagaaatcaccaaagactcagtatcaattacatgggaacctcctttgttggatgggggatccaaaataaaaaattacattgttgagaaacgtgaagccacaagaaaatcatatgctgctgttgtaactaactgccataagaattcttggaaaatcgatcagctccaagaaggttgcagttattactttagagtcacagctgagaatgagtatggtattggccttcctgcccagactgctgatccaattaaggttgcagaagtgccacaacctcctggaaaaataactgtggatgatgtcaccagaaacagtgtctctctgagttggacaaaacctgaacatgatggtggcagtaaaatcattcagtatattgtggaaatgcaagctaaacacagtgagaaatggtcagagtgtgctcgagtaaagtctcttcaggcagtaattaccaacctaactcaaggggaagaatatctttttagagttgttgctgtaaatgaaaaggggagaagtgatcctcggtcccttgcagttccaatagttgccaaagatctggtaattgagccagatgtaaaacctgcattcagtagttacagtgtacaggttggccaag

SEQ ID NO: 4555 - DNA, 355 bp, Homo sapiens
  MAP TO AL122001.5; EXPRESSED IN BT474, SIGNAL = 4.1; EXPRESSED IN FETAL LIVER, SIGNAL = 3.3; EXPRESSED IN BONE MARROW, SIGNAL = 4.3; EXPRESSED IN LUNG, SIGNAL =   3; EXPRESSED IN BRAIN, SIGNAL = 3.9; EXPRESSED IN HBL100, SIGNAL = 3.3; EXPRESSED IN HELA, SIGNAL = 2.8; EXPRESSED IN PLACENTA, SIGNAL =   3; EXPRESSED IN ADULT LIVER, SIGNAL = 2.9; EXPRESSED IN HEART, SIGNAL = 2.1
ttacagagggtagaagctgggtctcaacatgtctacttccagcagacactcaggaccgctccagtcatggctccagatcctacctggcaggagggaagcgactgatatcccctctgtcaaaagtgaagcatcgaaggttcggactgcaggcccaggaggcaggggatggggctgcagattggccaccctcagactgcagttcccagtgggagatggcttcattcacaaaatccttggcactcagctgctccagcttagcacttacatgatcccaggcagcaaagttattgaccagtgcaccatacttctgctctgagaggagactgacacggattgatggccaaagatctccaaa

SEQ ID NO: 4556 - DNA, 453 bp, Homo sapiens
  MAP TO D84394.1; EXPRESSED IN BT474, SIGNAL = 5.1; EXPRESSED IN FETAL LIVER, SIGNAL =  16; EXPRESSED IN BONE MARROW, SIGNAL =  37; EXPRESSED IN LUNG, SIGNAL =  62; EXPRESSED IN BRAIN, SIGNAL = 9.5; EXPRESSED IN HBL100, SIGNAL =  39; EXPRESSED IN HELA, SIGNAL =  30; EXPRESSED IN PLACENTA, SIGNAL =  14; EXPRESSED IN ADULT LIVER, SIGNAL = 8.5; EXPRESSED IN HEART, SIGNAL =  13
ctaccctgcggagatcacactgacctggcagcgggatggcgaggaccaaactcaggacactgagcttgtggagaccagaccagcaggagatagaaccttccagaagtgggcagctgtggtggtgccttctggagaagagcagagatacacatgccatgtacagcatgaggggctgccgaagcccctcaccctgagatggggtaaggagggggatgaggggtcatatctcttctcagggaaagcaggagcccttcagcagggtcagggcccctcatcttcccctcctttcccagagccgtcttcccagtccaccgtccccatcgtgggcattgttgctggcctggctgtcctagcagttgtggtcatcggagctgtggtcgctgctgtgatgtgtaggaggaagagctcaggtagggaaggggtgaggggtggggtctgggttttcttgtccca

SEQ ID NO: 4557 - DNA, 450 bp, Homo sapiens
  MAP TO D87675.1; EXPRESSED IN PLACENTA, SIGNAL = 3.6; EXPRESSED IN HEART, SIGNAL = 4.1; EXPRESSED IN ADULT LIVER, SIGNAL = 2.3; EXPRESSED IN BT474, SIGNAL = 5.2; EXPRESSED IN LUNG, SIGNAL = 4.9; EXPRESSED IN HELA, SIGNAL = 4.5; EXPRESSED IN HBL100, SIGNAL = 4.9; EXPRESSED IN FETAL LIVER, SIGNAL = 3.8; EXPRESSED IN BRAIN, SIGNAL = 7.6; EXPRESSED IN BONE MARROW, SIGNAL = 6.1
attgctaccgagtcctgcactcattaaaccagatgacagtgcatgctctgagaggtgtaaatctctagtcctggtggccagttaaattcctcagtaaatgtttggtagatgctgcctaataaaccagtccaggttgccactgggaggattaaaagaagtaaacgtgtatacatgaacagagagacagtgccttttcatgctaaatgtggttccccacatctcctctgattagaggtgtgctctgaacaagccgagacggggccgtgccgagcaatgatctcccgctggtactttgatgtgactgaagggaagtgtgccccattcttttacggcggatgtggcggcaaccggaacaactttgacacagaagagtactgcatggccgtgtgtggcagcgccagtaagtggacccttcttcgagcctggccacctttcgtctctctcgccact

SEQ ID NO: 4558 - DNA, 464 bp, Homo sapiens
  MAP TO AC007638.1; EXPRESSED IN HEART, SIGNAL = 0.99
ttccattcttcagtaaagcaccaaaactttagctaagaattgttaacggagaaaaaaaagatcagcctgaaacagattcttcagcaaagttgcccatcctcacggaggctcacaaagagttaaataaccaaagttatctttatattagctttcctgtcatcaatgtgaattgtccttccaggacagatatttgagagtgggcttagccaaatctttattacatgctgtttttctggatctgttctcagagaggagctttcgtattctcaatctctcttcctttcctagcccctaaacaaaaacttggagaacagcatttgtatcaaggtaaagatctggtatcaaataatccatatgatattattaatgcctttttggatgttatcgaccgaattgtgtcccctcccctgccccattcatatgttgaagtcctagctcccagtactcagaatgtggctatattt

SEQ ID NO: 4559 - DNA, 457 bp, Homo sapiens
  MAP TO AC011446.2; EXPRESSED IN HBL100, SIGNAL = 9.3; EXPRESSED IN HEART, SIGNAL = 5.9; EXPRESSED IN FETAL LIVER, SIGNAL = 4.4; EXPRESSED IN LUNG, SIGNAL = 6.6; EXPRESSED IN BRAIN, SIGNAL = 6.6; EXPRESSED IN PLACENTA, SIGNAL = 9.9; EXPRESSED IN BT474, SIGNAL = 7.7; EXPRESSED IN ADULT LIVER, SIGNAL = 4.7; EXPRESSED IN BONE MARROW, SIGNAL = 7.4; EXPRESSED IN HELA, SIGNAL = 7.4
attggtggattcacaaaccctgagctagacacagggtgctgattggtgtgtttacaaaccttgagctagatacagagtgccgattggtgtatttacaatccctgagctagacataaaggttctccaaggccccaccagactcaggagcctagctgccttcacccagtgtatcctgcaccggggctgcaggtggagctgcctgccagtcccgcgccgtgtgcctgcactcctcagcccttgggtggtcggatgggactgggcgccgtggagcagggggtggcgctcgtcgaggaggctcgggcggtacaggagcccacggagggggtgggaggctcaggcatggcgggctgcaggtcccgagccctgccccacggaaaggcagctaaggcccggcgagaaattgagcgcagcgccggtgggctggcgctgctgggggacccagtataccctctgcagc

SEQ ID NO: 4560 - DNA, 1985 bp, Homo sapiens
  MAP TO AC006078.1; EXPRESSED IN ADULT LIVER, SIGNAL =  24; EXPRESSED IN BT474, SIGNAL =  11; EXPRESSED IN FETAL LIVER, SIGNAL =  12; EXPRESSED IN PLACENTA, SIGNAL =  17; EXPRESSED IN BRAIN, SIGNAL = 5.2; EXPRESSED IN LUNG, SIGNAL =  10; EXPRESSED IN BONE MARROW, SIGNAL =   6; EXPRESSED IN HEART, SIGNAL =  22; EXPRESSED IN HELA, SIGNAL = 7.9; EXPRESSED IN HBL100, SIGNAL = 3.4
tcaagaaagtactgttcaaccaatgattacttcaatgattacttcaaccaatgattacttcatctgtggggttgagatttattacaacaatggggtgcggaaatcactatgcctgctccattatacagcctcaggagtcaaaaaatcatgactaatatgggatatataccaggaaagggactaggaaaaaatgaaaatggcattaaagttccacttgagactgagagaaatcaagaaagaaaaggaatagggtatcctttttaggggtggccactgtagagcctcctaaacccattccattaacttggaaaacagaaaaaccggtatgggtaaatcagtggccgctaccaaaacaaaaactggaggctttacatttattagcaaaggaacaattagaaaagggacatattgagccttcattctcgccttggaattctcctgtgtttgtaattcaaaaaaaatccggcagatggcataagttaactgacttaagagccgtaaatgccgtaattcaacccatggggcctctccaacccgggttgccctctctggccatgatcccaaaagactggcctttaattataattgatctgaaggactgcttttttaccatccctctggcggagcaggattatgaaaaatttgcctttactataccagccataaataataaagaaccagccaccagatttcagtggaaagtgttacctcagggaatgcttaatagtccaactatttgtcaagctcttcaaccagttagagacaagttttcagactgttatatcattcactatgttgatgatattttatgtgctgcagaaatgagagacaaattaattaactgttatacatttctgcaagcagaggttgccaatgctggactggcaatagcatctgataagattcaaacctctactccttttcattacttagggatgcaaatagaatatagaaaaattaagctacaaaaaatagaaataagaaaagacacattaaaaacattaaatgactttcaaaaattgctaggagatattaattggattcggccaactctaggcattcctacttatgtcacgtcaaatttgttctctatcttaagaggagacccagatttaaatagtaaaagaatattcactccagaggcaacaaaaaaaattaaattagtggaagaaaaaattcaaccagcacaaataaatagaatagatcccttagccccactccaacttttgatttttgctactgcacattctccagcaggcatcaatgttcaaaatactgatcttgtggagtggtcattccttcctcacagtacaattaagacttttacattgtacttggatcaaatagttacattaattggtcaggcaaaattacgaataataaaattgtgtggaaatgacccagacaaaatagttgttcctttaaacaaggaacgagttagacaagcctttatcaattctggtgcatggcagattggtcttactgattttgtgggaattactgataatcattaccccaaaacaaaaatcgtccagttcttaaaattgactacttggattttacctaaaattacgagacatgaacctttagaaaatgctctgacggtgtttactgatggttccagcaatggaaaggcagcttacatagggccaaaagagcaagtaatcaaaactcattatcaatcggctcaaagagctgagttggttgcagtctttacagtgttacaagattttaatcaacctattaatattgtatcagattctgcatatgtagtacaggctacaagggatgttgagacagctctaattaaatatagcatggatgatcagttaaaccagctgttcaatttattacaacaaactgtaagaaacagaaatttcccattttacattactcatattcgggcacacactaatttaccagggcctttaactaaagcaaatgaacaagctgacttactggtaccatctgcattcataaaagca

SEQ ID NO: 4561 - DNA, 444 bp, Homo sapiens
  MAP TO AC011493.2; EXPRESSED IN BONE MARROW, SIGNAL = 6.9; EXPRESSED IN LUNG, SIGNAL = 8.2; EXPRESSED IN HELA, SIGNAL = 7.4; EXPRESSED IN PLACENTA, SIGNAL = 9.3; EXPRESSED IN HBL100, SIGNAL =  15; EXPRESSED IN HEART, SIGNAL = 5.5; EXPRESSED IN FETAL LIVER, SIGNAL =   5; EXPRESSED IN ADULT LIVER, SIGNAL = 1.3; EXPRESSED IN BT474, SIGNAL =  12; EXPRESSED IN BRAIN, SIGNAL = 2.5
tgtttagcatggattgagagatgagtaaaagctttgctacattcttcacatttgtaggttttctcaagtatgaattatcttacgttcagtaagttttttttaatccaaaatgtgtttattgagatggtttcccactcatcttgattcagagtgcttttagtgctgcttcctcctgaaggaacatccttctgtaagccttgcttttcctcctgtaggctggcagaggacagtggagcagccaacacacaaaactaccatttgtgcatgactaaagaccgtggtgactttatagcatcctgggcatttcacatccatgaagtaggaattggggctctgcaccaggcgtttcttcttgtgtttcctcttctcttctggagagggatgaaggagatcctttgtgagaggcatgtcctcttgtgggaaggttgtcatcaccggaaagct

SEQ ID NO: 4562 - DNA, 1984 bp, Homo sapiens
  MAP TO AL009178.4; EXPRESSED IN BONE MARROW, SIGNAL = 1.5; EXPRESSED IN PLACENTA, SIGNAL = 1.6; EXPRESSED IN HELA, SIGNAL = 1.6; EXPRESSED IN FETAL LIVER, SIGNAL = 1.7; EXPRESSED IN ADULT LIVER, SIGNAL = 1.7; EXPRESSED IN BT474, SIGNAL = 1.5; EXPRESSED IN BRAIN, SIGNAL = 1.2; EXPRESSED IN LUNG, SIGNAL = 1.8; EXPRESSED IN HEART, SIGNAL = 2.8; EXPRESSED IN HBL100, SIGNAL = 1.4
caaaataaacagggctttccctgtgagggacagaaataaagaggattcagagaaggccactctgaggaggagacattggacctaccacgtgaaaagaaagagaaggaattcacttcaagaagggtgaattctcatcaagaccagtgaaagagtatttcaagctgtcttggtgctgcacatttggcagtaaaaccaggagcttggagtacagtggtctgaagcagcaggtccagcgacagctgccagaggagggtgggcctcaggctgaccccgggcaggagctctgtgctgaccgtggagtctgctggggccactgtgctatgtcttccactgctggccaaaccttcgcccagggtcctggcagtggccagaggaaaacaagccaaccacgttcagacacgttcctggagctgggaggagtctctctggaactgggaggtgtctctccggagctgggaggagtctctctggagctgggaggagtctctccggagctgggaggagtctctctggaatgaggaggagtctctccagaactgggaggagtctctccggaactgggaggagtctctccggagctgggaggagtctctccggaactgggaggagtctctccggaactgggaggagtctctccggaactgggaggagtctctccagaactgggaggagttgctccggaactgggaggtgtctctccagaactgggaggagtctctccagagctttgaggagtctctccggagctgggaggagtctctccggaactgggaggagtctctccggagctgggaggagtctctccggaactgggaggtgtctctctggagctgggaggagtctctccggaactgggaggagtctctccggagctgggaggagtctctccggagctgggaagtgtctctcccgaactgggaggagtttccctggaaccccctcccctcccagggctgagtcagcgtccgagccgggagctggggctgccttccagaggctggctccctccactgagagaggctcagccctccctgggcatttgggctgtgtgggagacagagacacctgcatgagaccatcctagaagggaggaatcgcatgggtgggggcagctaccaacagcgtggaacactcagggcctgaggctggaggagcctggtttgctcagaaacagaggaggctggcgtggctgggacatggccctgggagattggcagacatggggcctgaaatgtcttcaaaggctgccgacagtggagcatgggggcagtgtgaggcaggagctgagggtcagccctccacaggccaaatgtgtccaagcccggttccttgagagctaagcccaggccttcaggagctgaaccatgcctgccttcctcactggccacatacgccctgtggagggctccatggttacacacacaccgtggagtgggtccatggccacacacacactgtgcagtgatgacccatactcaccgtggagtgcgcccttgaccacacactcaatggggggtccagcaggcaacagaaggaagcagtgaggctcttattctttgtgtagtcgtgagtcgcttagcaacgtttcagtccatgatggatggcacagacaacggtgggcctctgagatgatcgtggagctggaagacttctactgccttgtgatgtcattgcacaatgcatttctcacgcgtttgcggtgatgctggtataggcaaacctactgcgttaccagttgtataaacgtatagctcgtacagttgtgcatagcacattctacttgataatgatgatgcgtgctatactatacattttattgttattttagagtgtactcctcctactaattagaaaaacaagttaattgtaaagcagctgcaggcaggtcctgtgggaggtgtccagaagaaggcattgtcatcacaggaggtgacggctctgtgcgtgtcattgcccctgcagaccttccagtgggaccagatgt

SEQ ID NO: 4563 - DNA, 362 bp, Homo sapiens
  MAP TO AC012119.1; EXPRESSED IN HELA, SIGNAL = 1.7; EXPRESSED IN HBL100, SIGNAL = 2.4; EXPRESSED IN HEART, SIGNAL = 2.8; EXPRESSED IN FETAL LIVER, SIGNAL = 2.8; EXPRESSED IN LUNG, SIGNAL = 2.4; EXPRESSED IN PLACENTA, SIGNAL = 3.1; EXPRESSED IN BT474, SIGNAL = 1.8; EXPRESSED IN ADULT LIVER, SIGNAL = 1.7; EXPRESSED IN BRAIN, SIGNAL = 2.2; EXPRESSED IN BONE MARROW, SIGNAL = 2.7
ggctggctttctatgagctgcatgaaaagacttttcctataacagtagggaaaaaaaagcccaagctgcttaaactgtcacaaccaatcacaaacatatttttttcctgcaaaagctgggaagactgcaagctaaaataagagcatgactgtggcaatttaaccctccctcccagtctggctctgccagccagccacctgctcccagtcccctgattgtgaaaaagtagactcagtttgtacctgttggagaagtgattgggcagctggacgacctcagtgatggcttcagggttccgcttggcgatgctgcacacattcagcttgctgtagcactcttcctgcacctcagcaatcatcctt

SEQ ID NO: 4564 - DNA, 472 bp, Homo sapiens
  MAP TO AL035697.18; EXPRESSED IN FETAL LIVER, SIGNAL = 0.83; EXPRESSED IN BONE MARROW, SIGNAL = 0.79; EXPRESSED IN HBL100, SIGNAL = 0.91; EXPRESSED IN ADULT LIVER, SIGNAL = 0.73; EXPRESSED IN BRAIN, SIGNAL = 0.84; EXPRESSED IN PLACENTA, SIGNAL = 0.81; EXPRESSED IN BT474, SIGNAL = 0.8; EXPRESSED IN LUNG, SIGNAL = 0.79; EXPRESSED IN HEART, SIGNAL = 0.87
tcagccaaaaggaaggaggtggtgctataatttacggcgggaaagtgaaaaaagaaagaacattcctgggtcacttctctaggctgcctctgactaactccactgacaactttaaatccacatcagaggttgcatttgaaacagaaagacaagaaatacctgcaactaatgttgtcctgtggagtggccggtggcaggggacagctgaaagatccacacagaaggacaggggacttgcagacatggggtcggggtgaggagtggggactgcaaggagactgacagcgtggagctgccagctgtacaaagcttgctatacctatcagggttgaggactcatttttgtgtttcgacacattcttggcacgttccccttgagcatgaggcagaacgcaactgcctttgcttattttatctagagaatgatgaccaaggtgctctttccctaaagagaaggcagaacaagaggaga

SEQ ID NO: 4565 - DNA, 440 bp, Homo sapiens
  MAP TO AC011700.3; EXPRESSED IN FETAL LIVER, SIGNAL = 5.4; EXPRESSED IN ADULT LIVER, SIGNAL = 5.4; EXPRESSED IN BT474, SIGNAL = 5.9; EXPRESSED IN BRAIN, SIGNAL = 6.1; EXPRESSED IN BONE MARROW, SIGNAL =   6; EXPRESSED IN LUNG, SIGNAL = 6.3; EXPRESSED IN HELA, SIGNAL = 4.9; EXPRESSED IN PLACENTA, SIGNAL = 7.3; EXPRESSED IN HBL100, SIGNAL = 4.8; EXPRESSED IN HEART, SIGNAL = 5.5
cttttccagagaaggagccggagggagcacctaatgggctctgaaatggataggccatcaagggaagggggaaggggtggcggaaggtggacgtggtgaagcccgtggtggcagagagaggcgactggtgcaggggctggtggtggccgccagcggcagggccggaggcagactggtcagaggagtttttgcggacaaccaggggcagtgcttctgtctggtcagtggaactggccatctgcacattgccaaaggtgtccagggggttcggaatgatgacgtcgccaaagcactgcaggcgctggttggcggtgtggaaattgtggttttccccattgactgcaaatctggcctgggggatctggagaggtgggaagacctgaggaacctggcgggagggcttggccgaaaagactttgaccacagtgtccacaacttgc

SEQ ID NO: 4566 - DNA, 1974 bp, Homo sapiens
  MAP TO AC006501.5; EXPRESSED IN PLACENTA, SIGNAL = 1.9; EXPRESSED IN FETAL LIVER, SIGNAL = 1.2; EXPRESSED IN ADULT LIVER, SIGNAL =   1; EXPRESSED IN BT474, SIGNAL = 1.3; EXPRESSED IN LUNG, SIGNAL = 3.1; EXPRESSED IN HEART, SIGNAL = 2.3; EXPRESSED IN HELA, SIGNAL = 2.3; EXPRESSED IN HBL100, SIGNAL = 1.3
ggaaactgccaactagggacattaggaagttcagaggtggggaagagtgatataagcctgttgactgagagatgggcacagtgttaccatgggatggtaacaatattaaaaagattctggcgcccactgattcatgcttctccctattcccagtccagtggtctttatggagagcagggctgtagagtcccacctacctaggttagaattcagcactgccacttagctgagttactctgggctggttaagtgggtcctggccaccaccgtaagtgttcaaaactcacttgctaccttctctttcctttgagcacagctcttttatgaacagttacactctgagcatgttcgtgtgtggtttgtaatgttaccttacattttcctacaaaggcaattcgtggcagctctggctgacctgcaagaggctgtgaaactctgtcccaccaatcaggaagtcaagaggcttctggcccgcgtagaagaggagtgcaaacaactccagaggagtcaacagcaaaaacagcagggcccgctaccagctccactcaacgactccgagaacgaagaggacaccccaacccctggcttaagtgaccactttcactctgaggagactgaagaggaagaaacttctccccaggaagaatctgtttccccaactcccaggtcccagccatcctcatctgtcccttcctcatacatccgaaaccttcaagaagggttacagtccaaaggaaggccggtatcgccacagagcagggcaggaatcggcaagtccctgagagagcctgtggcccagccagggctgctcctgcagccctccaagcaggcccagatcgtgaaaaccagccagcacctgggctctggccagtcggcagtgagaaatggcagtatgaaagttcagatctcttctcagaaccctcctccaagtcccatgccagggagaatcgctgccactcctgctgggagcagaacccagcatttagagggaacaggtactttcactacaagagctggttgtggccactttggggatcggctgggccccagccagaatgtccgcctgcagtgtggtgagaatggccctgcacaccctttaccaagtaagacgaaaaccacagagaggcttctgtctcattcctccgtggctgtggacgcagcccctccaaaccaaggtgggctggcgacctgcagcgacgtgcgacacccagcttccctcaccagctcaggctcttctggttctccatccagcagcataaagatgtcaagttcaaccagtagtttgacttcgagcagcagtttttcagatggcttcaaggtccaaggaccagatactagaattaaagacaaggttgtaacccacgttcagagcggtacagctgagcacagaccccgcaacacgccgttcatgggcatcatggataagactgcgaggttccaacagcagagcaatcctccaagccgcagctggcactgtccggcaccagaggggctgctgacaaacacgtcttctgcagctggcctgcagtctgctaacactgagaagccctctctcatgcaagtgggaggatataataaccaagccaaaacctgttctgtttctaccctgagtgcaagtgtccacaatggggcacaagtgaaggagctagaagaaagcaagtgccaaattccagtccactctcaagagaacaggataactaagactgtttctcatctgtaccaggaaagtatctccaaacagcagcctcatattagtaatgaagcccacaggagccacctcactgcagccaaaccaaagcgatcatttatagagtcaaatgtgtgaaccttaagaaatccccatttgtggaatttggaaacgtgtgttgactcctggtggtaaattaaatagtttttttcatcagaaaaattattttttagccattttttttctttggggtggatctgatgccattgatatatctaaaatgtggg

SEQ ID NO: 4567 - DNA, 403 bp, Homo sapiens
  MAP TO AC012132.1; EXPRESSED IN HBL100, SIGNAL = 1.4; EXPRESSED IN HEART, SIGNAL = 1.3; EXPRESSED IN FETAL LIVER, SIGNAL = 1.3; EXPRESSED IN BT474, SIGNAL = 1.1; EXPRESSED IN LUNG, SIGNAL = 1.2; EXPRESSED IN PLACENTA, SIGNAL = 1.4; EXPRESSED IN HELA, SIGNAL = 1.3; EXPRESSED IN ADULT LIVER, SIGNAL = 1.5; EXPRESSED IN BRAIN, SIGNAL = 1.5; EXPRESSED IN BONE MARROW, SIGNAL = 1.7
tctgggcctatcaatcgttctacttcagagagatttatttagttaattatgttgaggatctgggaactttgattgggatagtggtatgaggagagaaaagagatcatttggaaggtaatttactttagaagaaagcagacatggtggaagagaagcattagaacacttggacatccatgaagtagtcctaaagttactggctgcctagtagttaggggaaaaggatttccaaaaaggaggagacttcaagccccccatcctgatgactgaccctttccacacatcccatgcttaggacttgtgtggcatcagatgcaaatacaggttccagaataagaaacagaccgatcaaatgctcatggcagttcttgctgaagctgcagctgtgctgggtagcatcatc

SEQ ID NO: 4568 - DNA, 388 bp, Homo sapiens
  MAP TO AC012367.2; EXPRESSED IN BONE MARROW, SIGNAL = 2.4; EXPRESSED IN HELA, SIGNAL = 1.9; EXPRESSED IN HBL100, SIGNAL = 2.1; EXPRESSED IN HEART, SIGNAL = 1.8; EXPRESSED IN FETAL LIVER, SIGNAL = 1.7; EXPRESSED IN LUNG, SIGNAL = 1.9; EXPRESSED IN PLACENTA, SIGNAL =   2; EXPRESSED IN BT474, SIGNAL =   2; EXPRESSED IN ADULT LIVER, SIGNAL = 2.4; EXPRESSED IN BRAIN, SIGNAL = 3.3
ttggtgtttggattgctgtctgtcctcttacggacttaagcacctttttcaagaaagcataaagaacttaagaaaagtctgatcttggagtttgacacagactttgggtggcagcccagcagcattttccacctctgggaagggggcaccttgcctctttcattttggtttggagactggatttcccatcacagttttaatgccacatgcacttctgctttctggttgttcaggtttgctccaaccacaggtccaaaagagaaagagagtttgcaatgttcataacaattacataggcacaacgctaaagctgaagtatttaatcaatgggataaattcaccaatgagatcttggtgtgagtctctgcctgcatttctgaagccctct

SEQ ID NO: 4569 - DNA, 416 bp, Homo sapiens
  MAP TO AC012443.1; EXPRESSED IN FETAL LIVER, SIGNAL = 1.3; EXPRESSED IN ADULT LIVER, SIGNAL = 1.7; EXPRESSED IN BT474, SIGNAL = 1.4; EXPRESSED IN BRAIN, SIGNAL = 1.7; EXPRESSED IN BONE MARROW, SIGNAL = 1.2; EXPRESSED IN LUNG, SIGNAL = 1.4; EXPRESSED IN HELA, SIGNAL = 1.3; EXPRESSED IN PLACENTA, SIGNAL = 1.7; EXPRESSED IN HBL100, SIGNAL = 1.5; EXPRESSED IN HEART, SIGNAL = 1.3
aaagcctgctcttctaggggcctgaatacctctggaatgcactcactgccctacgtaattggaaatagcagtgactcaaacaacatcagaggtacgtgactctcatgtcaggaaagaacttttatacacatcttcaagtgagaaggttgttttttttcctttgtcttcttacgttgttggtctcccaaggttgttttttgtggaggctctggcagaggctctaatgcagaggaaggaaggtctcttccaatgcaggaggattctgctcgctaataaggaagcaataacaaagagtggaaacaaatccatcttaccttcctggttacagctggatccagatagcctttgagcttgtgaatgtatgtatggggaggatcttcacgtggaatcgttcctgcagaaagcagcaaaagtcc

SEQ ID NO: 4570 - DNA, 422 bp, Homo sapiens
  MAP TO AC012447.2; EXPRESSED IN HBL100, SIGNAL = 2.6; EXPRESSED IN HEART, SIGNAL = 2.5; EXPRESSED IN FETAL LIVER, SIGNAL =   3; EXPRESSED IN BT474, SIGNAL = 2.9; EXPRESSED IN LUNG, SIGNAL =   3; EXPRESSED IN PLACENTA, SIGNAL =   3; EXPRESSED IN HELA, SIGNAL = 2.7; EXPRESSED IN ADULT LIVER, SIGNAL = 3.7; EXPRESSED IN BRAIN, SIGNAL = 2.6; EXPRESSED IN BONE MARROW, SIGNAL = 2.7
agtatgtggcatgggacctggccagttgtctgagtgagaaactctcatttctgaggaactggaatgggagcggacccctgatgtatgatctggataaaatctccaactaccctctaaccttatattctttgaataaaataaccacaacagaaaaagtattgcaaatcaagatattaactggaaaacaaagggggcggggggttgggtagagcagaagaaagggaaaaatctgcactcaccgggactgtggcaatccttttttactgagatctgccctcacacgttctcctacatgtctgtaaatttccactaagctgtttattgctgcatctcgaacctagatataaaagaagagatcttacagctgctctgtgtcatcccccagcaagtcctgctgggacacaacaggccatataccaccc

SEQ ID NO: 4571 - DNA, 411 bp, Homo sapiens
  MAP TO AC007382.2; EXPRESSED IN BT474, SIGNAL = 0.66; EXPRESSED IN BRAIN, SIGNAL = 0.98; EXPRESSED IN HEART, SIGNAL = 0.98
ttaaagaccagcttcttcttatggtaaatgtaatgaatggtgtattgtatagttctctcatttttctcagtgactgtagaggctggtactgcaagagacagctccatctgcagctggaagattatttattaacaagtcttactagcatagtactgtactgttaagtcttatgcaggcaatgagtttaaataaatacttttatttacatattaaattatagaatactgattccagtatgactgaactctaaggattctcttcacacaggtatctacaggaggtgggttatacagatactattctagatgtgaaatctaaacgagtgcgagctttgttgggcttttcaagtgatgtcacggacagggaagatgacaaaaatcaggactcagttgtaaatggcacagaggctga

SEQ ID NO: 4572 - DNA, 407 bp, Homo sapiens
  MAP TO AC007251.1; EXPRESSED IN BT474, SIGNAL =   1; EXPRESSED IN FETAL LIVER, SIGNAL = 1.3; EXPRESSED IN BRAIN, SIGNAL = 1.1; EXPRESSED IN BONE MARROW, SIGNAL = 1.2; EXPRESSED IN PLACENTA, SIGNAL = 1.1; EXPRESSED IN HELA, SIGNAL = 1.1; EXPRESSED IN HEART, SIGNAL = 1.7
acatgtttgagcaccgattgaaaatctaccttgtatcagctactgtgctaggctaggagagcacttattggtgatacactatgaaaaagtacaatatgtgccaccaagcagtctaaaaggaaagaaatatacaattagatggctatcgtctatgccaagtgcaaggaaagactatggatggtttattatgccagaatagagaaagggtgcaatcttagcatattgcataaaagctctttgggggaggtgattcttaaaggggagagtgggactggcctgaaaatggaaacagcagagcaggcagtaagaagaaaggggactgaggaggagtggggagtggtgcttggaggagctcagcttgcaggtgcagaacagtgaaaagctttggcttcagggaagtagctgga

SEQ ID NO: 4573 - DNA, 472 bp, Homo sapiens
  MAP TO AC007092.3; EXPRESSED IN HEART, SIGNAL =  14
atccagggtgccacactaagggaggagttagccattttgcatggaatatgctttttttcatgacaatattttttctctgactcaataatatagatgtcacattgttcagtccaaaagaaaaaattgcaacagctggaaaaaatcctagtcattgtatgcaaaacagtgaaggaaagccaaaggacgagggagaaaaaaaaaacactctttgatgggaaagaaaaacagcaagaaaagagagagacctagaaagatgtgtcatgggaccaactttaatcctgcatcctctgccacatttagcttctctgccatcaacctgccatatttcttcatgggctcggccactagtacttcagatcctcccaggagtcccatggctcttccaaggagtatacaagtggcacagagagtgtggcaacttccaaacattaaagggaaaaaggagtctccttccacgccatcatcattttta

SEQ ID NO: 4574 - DNA, 365 bp, Homo sapiens
  MAP TO AF019413.1; EXPRESSED IN BRAIN, SIGNAL = 2.3; EXPRESSED IN HELA, SIGNAL = 2.1; EXPRESSED IN HBL100, SIGNAL =   2; EXPRESSED IN HEART, SIGNAL =   2; EXPRESSED IN ADULT LIVER, SIGNAL = 2.1; EXPRESSED IN FETAL LIVER, SIGNAL =   2; EXPRESSED IN BT474, SIGNAL = 2.1; EXPRESSED IN LUNG, SIGNAL = 1.9; EXPRESSED IN BONE MARROW, SIGNAL = 2.2; EXPRESSED IN PLACENTA, SIGNAL = 1.9
atttgccagtcacctcaaccagccagttccaccctcagcttctctcagaagggagcaccacactcctcaagctcagtgaatgtatcccggcatgggtggggccagagcctgtgatatctcgaggtgggctcggcaggacaccggggtgtggaagggggaagcgagcacctgactcagacagcgcgggagctcgcaggagtcacgaggccacagcgacttcattgtctgactgggcctggacctataaacttcccacctcagccttgggccaagcctggaagataaaaatggagcaccccatggcgcccctcactcagattctcccctgggcttctcccacgcagccccagaagaggacacaccag

SEQ ID NO: 4575 - DNA, 429 bp, Homo sapiens
  MAP TO AC012553.2; EXPRESSED IN BONE MARROW, SIGNAL = 1.3; EXPRESSED IN HEART, SIGNAL = 0.98; EXPRESSED IN FETAL LIVER, SIGNAL =   1; EXPRESSED IN PLACENTA, SIGNAL = 4.4; EXPRESSED IN HELA, SIGNAL = 0.96; EXPRESSED IN HBL100, SIGNAL = 1.2; EXPRESSED IN BT474, SIGNAL = 1.5; EXPRESSED IN ADULT LIVER, SIGNAL = 1.2; EXPRESSED IN BRAIN, SIGNAL = 1.3; EXPRESSED IN LUNG, SIGNAL = 1.6
agagtaatcgtcagggtgcgaaattccttggtggccagatgcccatggcaagcagaaattatcctggcagcatcactaagaggtcgatgtccacagaagattctccagggatgcaagcagcatgggcaggtggaggttttgaatttcataccctgattcatagttttcacaattccatgtgcaatttcagaaagattcatcattgactgctgacatgtcgccctttggcgtggaggaacgggaggagcccttgtctgtgctctctgaccccgagctgctctggttctgctgttctgaccctgcactggaggtcactgtggatgaggatgtcgatgaggagcgagtcttttccttaaagtctgtgataatgacggtgacgttgcccacagttactgccaactgctgtgcagtgctcctgtccacgttttt

SEQ ID NO: 4576 - DNA, 358 bp, Homo sapiens
  MAP TO AC012446.1; EXPRESSED IN BONE MARROW, SIGNAL = 6.3; EXPRESSED IN PLACENTA, SIGNAL = 5.5; EXPRESSED IN FETAL LIVER, SIGNAL =   5; EXPRESSED IN ADULT LIVER, SIGNAL = 5.9; EXPRESSED IN LUNG, SIGNAL = 5.6; EXPRESSED IN HEART, SIGNAL = 4.4; EXPRESSED IN HELA, SIGNAL = 5.1; EXPRESSED IN HBL100, SIGNAL = 5.8; EXPRESSED IN BT474, SIGNAL = 5.6; EXPRESSED IN BRAIN, SIGNAL = 5.1
agaacttgtggggtgggagctagtcctgggcggctgggctccagagccctaactccattctttaaactatgccacctgaccaggcagctggcaagtgcttgagagcacagacctgggagccaaactgtctggatttcaatattggacctgctatttacttgttggctgaccttggacagagctttctgtgcctcagtttcatcatgtataaagtgggaagataattattcctgactcctagggttgtgatgaggatgaaataaatatcagtaaagcacaaagaaccccactttggatgtggcgtatgtgcataaatgtccagagcatagtggttcacagcatccaggtctacctctgg

SEQ ID NO: 4577 - DNA, 375 bp, Homo sapiens
  MAP TO AC007552.4; EXPRESSED IN HELA, SIGNAL = 0.68; EXPRESSED IN HEART, SIGNAL = 1.1; EXPRESSED IN FETAL LIVER, SIGNAL = 0.62; EXPRESSED IN ADULT LIVER, SIGNAL = 0.8
agcagattgcacctaaaccctgatcactatgcccactatattcatttattcatctctcacttttcaatccactctaacctgaacctgctcattactacatcaaaatcgttcttgctacagttaacaatattctatgcagaactcaatcccatagttgttttcaaacattattgtattccctcagctgtcatttactctgttgaccaccttccccctcttaaaaccctatctgctcttggattctgtgaacgcacattctatggacattgttcttgccttgtacctctttgacagcttcttagtcttttgcaggttcatcatcttctacttggccatcgaatgctcgttgtctcaaggcttagtcccaggctctct

SEQ ID NO: 4578 - DNA, 408 bp, Homo sapiens
  MAP TO AL021579.1; EXPRESSED IN LUNG, SIGNAL =   3; EXPRESSED IN HELA, SIGNAL = 2.9; EXPRESSED IN HBL100, SIGNAL = 2.4; EXPRESSED IN HEART, SIGNAL = 2.6; EXPRESSED IN BRAIN, SIGNAL = 2.6; EXPRESSED IN BONE MARROW, SIGNAL = 2.5; EXPRESSED IN PLACENTA, SIGNAL = 2.9; EXPRESSED IN ADULT LIVER, SIGNAL = 3.4; EXPRESSED IN FETAL LIVER, SIGNAL = 2.9; EXPRESSED IN BT474, SIGNAL = 3.4
cattccttttgatcttctgcctcatttatagacaccatcttccatttctaggagatagatcatacagtgcttgagtataaggtaaaatgttatagttcatctttcagttttttgtcttgccaactcttaactgttaaataccttttgaactcttacttttccttcaaggattcaaaacaggccattattttgtgatatgattgattatgttaatttgtcatgtggaactaaactctcaagatatgggatcttactttttcaggaacagatgaaacagcagcagtggcagcagcagcaacagcaaggtgtacttccacagactgttccttcacaaccgtccagtagtactgtccctcctccaccacacagacctctttatcagcctatgcagcctcatcctcagcattt

SEQ ID NO: 4579 - DNA, 480 bp, Homo sapiens
  MAP TO AB020863.1; EXPRESSED IN HELA, SIGNAL = 1.9; EXPRESSED IN HEART, SIGNAL = 0.85; EXPRESSED IN LUNG, SIGNAL = 1.8
agtaaaatccagaaatacggttatgaataaaattttttgaattgttgcaaaaaatatttacctcattgtattacgctgaaaagccgaataatccatcatgttgctcaaattgttttagaatgaactttaaaatgtaaaaatgtcatttttttcctgatttcttttttttcagtttttatcattttttttttattatactttaagttctaggggtgtttgacaagtcaaacacattcttatattactctatgacatcggagaaagattggggcaagtctgcccagagaacagtggagccgagtgtgacagctggagggccccagccaggtctgacttgctttgagttcatgtgtcttttattcctagcgtcaagcagaatgagcgctacggccagttgactctggtcaactccacctcggcagacacaggtgaattcagctgctgggtgcagctctgcagcggctacatctgcaggaagga

SEQ ID NO: 4580 - DNA, 472 bp, Homo sapiens
  MAP TO AC012513.2; EXPRESSED IN PLACENTA, SIGNAL = 2.7; EXPRESSED IN HBL100, SIGNAL = 2.5; EXPRESSED IN HEART, SIGNAL = 2.7; EXPRESSED IN ADULT LIVER, SIGNAL = 2.6; EXPRESSED IN LUNG, SIGNAL = 2.5; EXPRESSED IN BRAIN, SIGNAL = 2.7; EXPRESSED IN HELA, SIGNAL = 2.5; EXPRESSED IN BT474, SIGNAL = 2.2; EXPRESSED IN FETAL LIVER, SIGNAL = 2.5; EXPRESSED IN BONE MARROW, SIGNAL = 2.9
atttcatggactcggtctggtggcccctccaccttctgcctactggaacttgctgagcctgggaatctagggatggtcctcccatggctcagcactggagccattgcccataccttgcatagattcagagagactgtggtctcctggccgtgacccacttcctctcatttggcctctgtttctcctctccctgctgcctcaggtctcatcatccatgaaggaccctcggtgtaccgcatctttaaacggtggcaggctgtcaaccagcagtggaaagtgctgaactatgacaagacaaaagacctggaggatcaaaaggcaggaggcaggaccaacccccggacctcctcatccacccaggccaatatcccctcctcggaagaggagaccgcaggcacccctgcccctgagcagggccctgcccaggctgccggccacccctcaggccctctgtcccatcaccactgtgctt

SEQ ID NO: 4581 - DNA, 466 bp, Homo sapiens
  MAP TO AF024533.1; EXPRESSED IN BT474, SIGNAL = 2.3; EXPRESSED IN LUNG, SIGNAL = 2.1; EXPRESSED IN BRAIN, SIGNAL = 2.7; EXPRESSED IN BONE MARROW, SIGNAL = 3.3; EXPRESSED IN ADULT LIVER, SIGNAL = 1.8; EXPRESSED IN FETAL LIVER, SIGNAL =   2; EXPRESSED IN PLACENTA, SIGNAL = 3.1; EXPRESSED IN HEART, SIGNAL = 2.6; EXPRESSED IN HELA, SIGNAL = 2.5; EXPRESSED IN HBL100, SIGNAL = 2.2
tcttctaactggtccccgtgggggtgcagggtggggaggaggtggggactgacctgcagacggcacgctccttactgttcacaactataggatgtttcatgttctcaaagggtgcctacacaagttgagactctgtggttggcttggcctagggcccgcccttcacctgctcctcctgcaaactccctgccacctcctgactcagcagccgagaggagaacctaccgaggttgttgtccgtcagcacctccttcacccgcttggttatgccgtaggtgtccagctccggggacatggctactaattcttggatgctgagggccgagtgtccggagagaggcagcggggttgtgggctgggagtcggatgctggcgggtcactgggctctggtggcttgctgtccttgctcgcctcgatggggggacagggctgctggaccagctcggtcaggctcttcaccgactc

SEQ ID NO: 4582 - DNA, 472 bp, Homo sapiens
  MAP TO AL080312.4; EXPRESSED IN HEART, SIGNAL =  23; EXPRESSED IN LUNG, SIGNAL = 0.91; EXPRESSED IN BONE MARROW, SIGNAL =   1; EXPRESSED IN BRAIN, SIGNAL = 0.93
ggggacacattcagtccataacaactaagttacagaatatcaagaaatcctgccttgatctttccatgaccagccccgctctgaagtgctcagtcaacgttagcatacaaaaagacatcactttggagattccaaggattttaggagttgtatgccaggaaataggacaaagaccaaatatatatatatttcacaatatcacatgtacacttataataaattttatggtatgtggattatacctcaattaagctgttttttcttttaaaggccaaaacatgtttggatgtaacccaaaacgtcaggacttcaggtgcctcctgaccctgaccacgggctggcaccttttcttcctcctgcgtcgtgtcctgcgctctgtgttgaaactgggttcccattaattattaatttttctccagagaatacttgttaaagaagaattaatgctattgttttagagcaaatgctgccc

SEQ ID NO: 4583 - DNA, 358 bp, Homo sapiens
  MAP TO AL022143.1; EXPRESSED IN PLACENTA, SIGNAL = 2.3; EXPRESSED IN ADULT LIVER, SIGNAL = 2.8; EXPRESSED IN FETAL LIVER, SIGNAL = 1.6; EXPRESSED IN BONE MARROW, SIGNAL = 1.9; EXPRESSED IN BRAIN, SIGNAL = 1.4; EXPRESSED IN HELA, SIGNAL =   2; EXPRESSED IN HBL100, SIGNAL = 1.6; EXPRESSED IN HEART, SIGNAL = 1.7; EXPRESSED IN BT474, SIGNAL = 2.1; EXPRESSED IN LUNG, SIGNAL = 2.3
tacctggttacaggccatcccaggattcctttgatggtaacactcagtgagggtgatgacatgagctggcgcttgccccaggcaccctcagtcctattgttggatcatctggttggggacttcaggcctagagaacctttgtcctctggggcagtgcgccttccagtgatttccttggcataatggacatgggcgagggggcagcttgtttcttgttggacaatcttttttaaagtgtccttgcaaagaacactggtaacaagtcctactgggtgattggcctgctccattttctgttctctgaacgaccaaggtttgtttgtctgaggatgatgaaggctgtggcctttctctgatc

SEQ ID NO: 4584 - DNA, 471 bp, Homo sapiens
  MAP TO AC007033.3; EXPRESSED IN FETAL LIVER, SIGNAL = 0.77; EXPRESSED IN ADULT LIVER, SIGNAL = 0.8; EXPRESSED IN HEART, SIGNAL = 0.94
gaattggaactaaaactgtgtagccttaaagtgctctggcctgaaaatctagagaaggcttcagcaggagaaagcaggagaggacatggttattttcagtaagtcatagaagggaagatggctaacagaaatgaaatggacacagaacatcaccaaagtagcatgaaggtatcagatcccctgagataggtcttagccaaataattccactcctgcacattagagtttgacatctaaggcccctccatcttttttccagtcaagacctacacaaatgggtgagggcttgctacatgagaagtaagcaggaacaatacgagaaccaagacaagctacaagcaggacatgaacacatcaaaaggcttctgaaaagacacgtctacctagcctgtgaccaggtcaactccctcattaagtttagcccctttaaaaaatatatcttgtttatggtgcctttggtttctccctttt

SEQ ID NO: 4585 - DNA, 418 bp, Homo sapiens
  MAP TO AL021917.1; EXPRESSED IN LUNG, SIGNAL =   4; EXPRESSED IN PLACENTA, SIGNAL = 2.1; EXPRESSED IN ADULT LIVER, SIGNAL = 2.3; EXPRESSED IN BRAIN, SIGNAL = 1.8; EXPRESSED IN BONE MARROW, SIGNAL = 2.4; EXPRESSED IN HEART, SIGNAL = 1.8; EXPRESSED IN HELA, SIGNAL = 2.6; EXPRESSED IN HBL100, SIGNAL = 2.9; EXPRESSED IN FETAL LIVER, SIGNAL =   2; EXPRESSED IN BT474, SIGNAL = 2.2
ctgtgaagtttcaggccctcttcaggcaccatgaccccactggctcctgtgagtgcagggcagatgaagatggggctgtcatcagaccctaacctgaagaagggcctcacaggcacagtaaaggctgaacggggacatgtgtagatgtgcgatctgtccctcatgttgtagaaggagacatctccagcttcatagtccaggaagacgcccacccggcaaagggactccttcaaagggagaatcctctcaggggaggacagggcccggtattggtttccaaacatctccagggtccagaagccattctgaggaatcagcaggacctcccctttcctctcaacactgtgtctgcagacccccacagtccacaccatcacgttttccacctccacctcccagtaatgtttccctgaggcga

SEQ ID NO: 4586 - DNA, 464 bp, Homo sapiens
  MAP TO AC007842.1; EXPRESSED IN LUNG, SIGNAL = 2.1; EXPRESSED IN PLACENTA, SIGNAL = 2.9; EXPRESSED IN BT474, SIGNAL = 4.2; EXPRESSED IN BONE MARROW, SIGNAL =   2; EXPRESSED IN FETAL LIVER, SIGNAL = 1.8; EXPRESSED IN HELA, SIGNAL = 0.78; EXPRESSED IN ADULT LIVER, SIGNAL =   1; EXPRESSED IN BRAIN, SIGNAL = 0.82; EXPRESSED IN HEART, SIGNAL =   1
ggcctttagacttcattatcaccttactgaacatcagagaatacattctggtgtgaaaccctacgagtgtaaggaatgtgggaaagcctttagtcgtgttagagaccttagagtacatcagacaattcatgctggagagagaccttatgaatgtaaagaatgtgggaaggcctttagacttcattatcaactaactgaacatcaaagaattcatactggtgagaggccttatgaatgtaaggtttgtggcaagacctttagggtacaacgacatattagtcaacatcagaaaattcatactggtgtcaaaccctataaatgtaatgaatgtgggaaggcctttagtcatggctcataccttgttcaacatcagaaaattcatactggtgaaaaaccctacgaatgtaaagaatgtggtaagtcctttagttttcatgcagaacttgctcgacatcgtagaattc

SEQ ID NO: 4587 - DNA, 374 bp, Homo sapiens
  MAP TO AL021997.1; EXPRESSED IN FETAL LIVER, SIGNAL = 1.1; EXPRESSED IN BONE MARROW, SIGNAL = 1.2; EXPRESSED IN LUNG, SIGNAL =   2; EXPRESSED IN BRAIN, SIGNAL = 1.3; EXPRESSED IN PLACENTA, SIGNAL = 1.2; EXPRESSED IN HBL100, SIGNAL = 1.2; EXPRESSED IN HELA, SIGNAL =   1; EXPRESSED IN HEART, SIGNAL = 0.99
ccagttataagccctgtccgtaggttttattatttagtgtactaataaaaaaaagtatgactttaatacaaagttaatactttgcaaactgtatgttgatatgactgcgttcttttgtaatcctttatggtttatgtattttaaaaaaaaaattattctgagaaggagtccagggacttcaccttactgccaaggaggttcacggtacaaaaaagagatgaagaactcctggatgttaaaggaatgcccctcactctgatctgggatttcaggaggaaacaggccacagcgctcagatactaaacctgttctttctacctgcggcgccggctcatccagctgcctctccaaatactccaatagcaccaccacct

SEQ ID NO: 4588 - DNA, 413 bp, Homo sapiens
  MAP TO AL022145.1; EXPRESSED IN FETAL LIVER, SIGNAL = 1.2; EXPRESSED IN LUNG, SIGNAL =   1; EXPRESSED IN PLACENTA, SIGNAL =   1; EXPRESSED IN BRAIN, SIGNAL = 1.1; EXPRESSED IN BONE MARROW, SIGNAL = 1.2; EXPRESSED IN HEART, SIGNAL = 1.1; EXPRESSED IN HELA, SIGNAL = 1.1; EXPRESSED IN HBL100, SIGNAL = 0.97
gaaagacggaatggagcaaggcagcaggggactccattgctggagagttcaatgtctggcctcacagaggtccaagtgatggcccagcctctgtctgctgatcccttgctctggggctaatgatgggctaggaatggtgagagttaggatctctgattggtactaattctcaggttgggatttccttgtcttcggtggcttgtggacgtgtgctgtgttgcacatataggcatgcttcctttctctcaccctgcagggagccgcttcatcttgctggaggggagccagctggatgccagtgactggctgaaccctgcccaagtggttctcttctctcagcagaactccagcggaccctgggccatggacctctgtgcccggcggctcctggacccctgtgaacaccaatgtga

SEQ ID NO: 4589 - DNA, 381 bp, Homo sapiens
  MAP TO AL024509.1; EXPRESSED IN PLACENTA, SIGNAL = 1.9; EXPRESSED IN HELA, SIGNAL = 1.6; EXPRESSED IN HBL100, SIGNAL = 1.7; EXPRESSED IN HEART, SIGNAL = 1.5; EXPRESSED IN BT474, SIGNAL = 1.5; EXPRESSED IN ADULT LIVER, SIGNAL = 1.4; EXPRESSED IN FETAL LIVER, SIGNAL = 1.6; EXPRESSED IN BONE MARROW, SIGNAL = 1.4; EXPRESSED IN LUNG, SIGNAL = 1.6; EXPRESSED IN BRAIN, SIGNAL = 1.2
aaaaaccagaggaggggaacgagtggagagaagaaacccttgtttccctttctgagttgtaaaaagcttttatcaaggtttacatttagtcatgcttctgtcctctagtggatggcagcatgtgatgaactcagagaaactcttctcccaaattggccagtaagaactctgcaaaaactgtggatgagctgagcttacctcccataattttattttgaaaataaaaaattttccccacatagtaaacacagttatcttcacgagtgtgggaatgattaagaaaaaaaaaccaagcttagattttgcaagatgggtgacctgaagttttgcctagagggagagaagggtctcttcctcctttcactctgttcttgacagcgc

SEQ ID NO: 4590 - DNA, 464 bp, Homo sapiens
  MAP TO AF165138.1; EXPRESSED IN HEART, SIGNAL = 0.96; EXPRESSED IN ADULT LIVER, SIGNAL = 0.68; EXPRESSED IN PLACENTA, SIGNAL = 0.83; EXPRESSED IN BONE MARROW, SIGNAL = 0.97; EXPRESSED IN LUNG, SIGNAL = 0.61; EXPRESSED IN HELA, SIGNAL = 0.66; EXPRESSED IN FETAL LIVER, SIGNAL = 0.62
tgggttccaatgagagaagctatgctatgattctcatgcggttatatagttaaaaagacctttgttggcatagtcttggacagcatacatgttccaactttaaatattgctgagtgaataaataaacatatgagactgggaaatgtcgtcagggttcaacctagaaacacaaagccagtatcatgatcttgtaattattataatgttaatcctttagccatcttaaaaggcttggactcatgtctctcactcagccaaaagcagcagaaggtccaagttcctcagctacctcccaaccttggatgagccgtttcttatctttccgctgctctttattcagctttccatggccaagagaaaaacctgtcttccttctgttgatgttccctgccccacgttgagggagctgaggcgagagctgcagaggatccgtaaggagctgtgggtaaggtgaggacagcagc

SEQ ID NO: 4591 - DNA, 465 bp, Homo sapiens
  MAP TO AL049548.6; EXPRESSED IN BONE MARROW, SIGNAL = 1.6; EXPRESSED IN LUNG, SIGNAL = 0.81; EXPRESSED IN FETAL LIVER, SIGNAL = 0.66; EXPRESSED IN BRAIN, SIGNAL = 0.77; EXPRESSED IN HEART, SIGNAL = 0.88
ccataagccttaggcactcgtgatgacaactcccgctattataatttaagagtggacagatgaattgattctgggtccttgtggcacacttgttaaaacttcctggcaggacagggtccccctgtgtacacagttgaaaacttgcagtccaagtgactcacaggctcttcagttaccatggtgatattccattacaggagctgatagattccagagagattggtgcaagccgtctcagcagagtggagtcgctggctcccgaagtgaaacagaacacaactgccagtgggtgtgagctcatgcacacggagatgcaggccctgcgtgccgactggaagcagtgggaagacagtgtattccaaacgcagagctgtttggagaacctggtcagccagatggccctttcggagcaggaattctcaggccaagtggctcaactggagcaggccctggaacagttcagtg

SEQ ID NO: 4592 - DNA, 408 bp, Homo sapiens
  MAP TO AL109982.1; EXPRESSED IN BRAIN, SIGNAL = 1.1; EXPRESSED IN ADULT LIVER, SIGNAL = 1.2; EXPRESSED IN HEART, SIGNAL = 1.1; EXPRESSED IN BONE MARROW, SIGNAL =   1
gccatagatacctttcccccaaggcctgacttgctcccagaagaggctttagccatagggaaactttcacacctgaactctgcagggtggttcttgaccatcacatgaggctggtctgacctgagcatctgttggtttgctggcttctaccagggtccaagcttggctgtacttgctttcattgcagccttgagtatactaagggcctgcatcatagctcttctacttgctgaccatgtctgactggcagagagttttagcaaggtggcatttgcagccatgcaccagcctgcccattccatctctcaactgcacaactacaccttcctcagacctgtggccaagccccacatggctttcccagagcatgtgtgtgggcagaccttgccttccctgctctaacagcgt

SEQ ID NO: 4593 - DNA, 488 bp, Homo sapiens
  MAP TO AL049780.2; EXPRESSED IN ADULT LIVER, SIGNAL = 0.77; EXPRESSED IN PLACENTA, SIGNAL = 1.1; EXPRESSED IN FETAL LIVER, SIGNAL = 0.64; EXPRESSED IN LUNG, SIGNAL = 0.71; EXPRESSED IN HEART, SIGNAL = 1.1
tagtcttcggatctgcacccactccgtcctgtcaaagtttgccacggccttctccgcctgcgtggcagcaagaacagtaccaaccacagaaaagttgccctggttcctcacaccaaagttcctagatgaaaactctctcggctcagggggccttgggtagacattatggtccccatcagtgccagcctcacctgtactgcacgacttcctgtggaccatgggtttcaatgggaacgcccggtccactccaactcgtttctttgtaaaggggataaagtcctggttattggctttgggataccaggattgagggcctgacgagtaaaacaaaccatttccttggccctgggaatcactttctggatcttgctggctgattccagtacagtggggataggagtagctccgggcttttgtttgggtgttccatttggggtgagtatagactttatccagaatcaactctttgttgctcaaaagctgcttct

SEQ ID NO: 4594 - DNA, 471 bp, Homo sapiens
  MAP TO AP000147.1; EXPRESSED IN HELA, SIGNAL = 0.59; EXPRESSED IN ADULT LIVER, SIGNAL = 0.71; EXPRESSED IN HEART, SIGNAL =  79; EXPRESSED IN LUNG, SIGNAL = 0.76; EXPRESSED IN BRAIN, SIGNAL = 0.7
tgactgtggggactttgattagaacacacacaaaaaatcaagtgactagcttatttttaatgatatttttatttttaggcacacacacaaatgatgaataagaagataatgcatgttagcagttatatttatttctggcatttttccttatgtacctgtctgtcttgattattatacagaaatttacttgaaattaagataatccttcatcaaaatcacagtttttaaagttctattcagtgctgctctttttcaatcctgttgatgaaaaaaatcttttaaatgtgtttattttcttgttttcaaatgactaaggggaatgatgccagaatagcaaaacaaacaccatttttccatgaatatctggctcataaaattggttttggacggtttgtagaaaaatattttttatgtgtgggatttgtcacttttgaaggtgctaatcttgatctgctgggtcgctttaaggag

SEQ ID NO: 4595 - DNA, 420 bp, Homo sapiens
  MAP TO AL022316.2; EXPRESSED IN BRAIN, SIGNAL = 0.99; EXPRESSED IN BONE MARROW, SIGNAL = 1.1; EXPRESSED IN HEART, SIGNAL = 1.1
agtgtcagacccatgggaaggaggggagccagcatcgtggctgaggccctgacccagacgttggctcacagaaggcaggaaatgcagcccctggggctcccgggggtgaaaggcgccaagctcatgcttttttcgtacctcagagccttcttggaaaagcgatgacatccccagcctcaagacaaggatgggaaactaaggcacgggctccagacccaggcctgccacttgctctggctcaggcacgctctgaccttcagcttcctcgcctgctcttccagtccacagctcacctgacacctgcggggcaggcgcagatccaaataccccccggctcgcgcctcaccccccgagggagcagagcaaaccacttgcgcgagtccctttgggtccgcttccagcctttcatctgctttgctc

SEQ ID NO: 4596 - DNA, 377 bp, Homo sapiens
  MAP TO AC007738.2; EXPRESSED IN PLACENTA, SIGNAL =   3; EXPRESSED IN HBL100, SIGNAL =   3; EXPRESSED IN HELA, SIGNAL = 3.4; EXPRESSED IN HEART, SIGNAL = 3.1; EXPRESSED IN BT474, SIGNAL = 2.3; EXPRESSED IN ADULT LIVER, SIGNAL = 3.3; EXPRESSED IN FETAL LIVER, SIGNAL = 3.4; EXPRESSED IN BONE MARROW, SIGNAL = 2.5; EXPRESSED IN LUNG, SIGNAL = 3.1; EXPRESSED IN BRAIN, SIGNAL = 2.9
gagcaaaatgacaacaaattttcttcattataattgcaaatttttttattcactaaaaaatggattttttatactacaaccattacctgattccaatcacagatttttatttttaaagaaaagataataagacaactcaaataaaaaccagatatttaaatttttggttaaatacataactattctcaaacaaacaggaaaaagccttacctccaaacttaaaaatcccccatcatgggtagcagtgacttgaggtgatggttcaaaccattcacaggattttcccagtaaattcttcaaagttttcacagatgaaacagttaaagcaccagagcatcgagctaaagtcactgcactgtctgcccaccaattgacat

SEQ ID NO: 4597 - DNA, 458 bp, Homo sapiens
  MAP TO AC007911.3; EXPRESSED IN BT474, SIGNAL =   8; EXPRESSED IN ADULT LIVER, SIGNAL = 8.4; EXPRESSED IN LUNG, SIGNAL =   8; EXPRESSED IN BRAIN, SIGNAL = 5.7; EXPRESSED IN PLACENTA, SIGNAL = 7.9; EXPRESSED IN HELA, SIGNAL = 7.4; EXPRESSED IN BONE MARROW, SIGNAL =   6; EXPRESSED IN HEART, SIGNAL = 6.8; EXPRESSED IN HBL100, SIGNAL = 6.9; EXPRESSED IN FETAL LIVER, SIGNAL = 8.2
tgcagagacaacactttgggcaatggctcacttttcagtattataggtatttgatcaacaattctcttgaatactccctaatcatggtgatggactacattacatatatcagagatcattttagtccctttagctttaggaaccggtcccttaggcaaggatcctgttcttggcccaggagatcaaacctcttcaatgtgaacaaaatcagagaaacacaaacccaagagaaagggcactgccacaaagggaatattttcttaaggcctggatggcagttggccaatcagaaagccttccaaatattgaagcatgtgataggcccctcagtacgagctgggagcatcttgtatcaccactgtggcaagaagcaatccaacttggccaagaggcaagaggtcatccatagaaaggaatcccaagaaaagagacactaaagagggcacgcagatattttt

SEQ ID NO: 4598 - DNA, 447 bp, Homo sapiens
  MAP TO AL049696.8; EXPRESSED IN BONE MARROW, SIGNAL = 1.2; EXPRESSED IN HELA, SIGNAL = 1.3; EXPRESSED IN ADULT LIVER, SIGNAL = 1.1; EXPRESSED IN BRAIN, SIGNAL = 1.5; EXPRESSED IN PLACENTA, SIGNAL = 1.3; EXPRESSED IN BT474, SIGNAL =   1; EXPRESSED IN LUNG, SIGNAL = 1.3; EXPRESSED IN HEART, SIGNAL = 1.1; EXPRESSED IN HBL100, SIGNAL = 0.84; EXPRESSED IN FETAL LIVER, SIGNAL = 1.2
aaccaccacagcagtgagcacaccaagcaacttatcttttcaacatgtacatcgagccaacatgtataaacagtccagaaactttcactccaaaatatcaaaaatagtttctcccgagcaatgcagtgaaggaagtgtaggaaagagacttttactttttgctttatgtatgtttagatcactgaaagtattctagtaagtctaaaataaataaaaataaagggaaagcccttgaattagtgccaaacatttaaaaatacatgttattttgtagttataatcttctcaaaaaacataataatgtttttgtgatatcttaggactagcttcagaaacaaaggaatcctgagatccaaactccagcagcaaacaggcacactaacaacgcagggagccagtcttcccatcccactctgtgtgatctgctccaggtcaggaccatatcca

SEQ ID NO: 4599 - DNA, 364 bp, Homo sapiens
  MAP TO AC007327.1; EXPRESSED IN FETAL LIVER, SIGNAL = 4.3; EXPRESSED IN ADULT LIVER, SIGNAL = 6.2; EXPRESSED IN LUNG, SIGNAL = 3.2; EXPRESSED IN BRAIN, SIGNAL = 4.9; EXPRESSED IN PLACENTA, SIGNAL = 2.6; EXPRESSED IN HELA, SIGNAL = 7.2; EXPRESSED IN BT474, SIGNAL = 5.5; EXPRESSED IN BONE MARROW, SIGNAL = 4.9; EXPRESSED IN HEART, SIGNAL =   5; EXPRESSED IN HBL100, SIGNAL = 5.4
aagaggaggaggagagagggcagcatgacaggacagacttgccccatctgttactccttctccaatatcaccagtgaaaaccaggattccccagacttttgccatcccggttcccatctgttgcgtttcttaccattgatgaaagccattgacaagaataaaagtgactgataaaataatagcatgggggaaagtaaaatctacaatatgcttctgggaatttgtcttaccagcgtggataaggttgtgcatcgcagcgttggttgtggaaacagtctgtgtgtccacttagactgtagtccagccacaaagggggacattctgcagctggaacagaaggaagagaaggcccacatggaaaaat

SEQ ID NO: 4600 - DNA, 430 bp, Homo sapiens
  MAP TO AC007993.8; EXPRESSED IN PLACENTA, SIGNAL =   4; EXPRESSED IN HELA, SIGNAL = 4.2; EXPRESSED IN HBL100, SIGNAL = 3.6; EXPRESSED IN HEART, SIGNAL = 4.5; EXPRESSED IN FETAL LIVER, SIGNAL =   4; EXPRESSED IN BT474, SIGNAL = 3.7; EXPRESSED IN ADULT LIVER, SIGNAL =   4; EXPRESSED IN BONE MARROW, SIGNAL = 3.8; EXPRESSED IN LUNG, SIGNAL = 3.9; EXPRESSED IN BRAIN, SIGNAL = 4.1
taggaaactggattggagggggccatcggaggtgggaaggaggccagcagcgggggtgggggtggggaggcaggcagggcttatgctcctctgacatgaggaaactgagtcaggagacggtgcagtgcccaagaacacacagcaagcccggtggctgagccttggtccggtaccagccccagggagagcgtcggagcgcggccccgacggcagccgcagcctcccgccgtgtagggtcgaggcttggaatgacccacgtcccaatgtcgccttcccagatggtgttcgtgcgcaggccgtggcccgccttgaccacagtgcttctggccctgctcgtctgcctaggggcgctggtcgacgcctaccccatcaaacccgaggctccccgcgaagacgcctcgccggaggagctgaaccgctactacgcctc

SEQ ID NO: 4601 - DNA, 388 bp, Homo sapiens
  MAP TO AC008018.18; EXPRESSED IN BRAIN, SIGNAL = 3.5; EXPRESSED IN BONE MARROW, SIGNAL = 2.7; EXPRESSED IN LUNG, SIGNAL = 3.5; EXPRESSED IN PLACENTA, SIGNAL =   3; EXPRESSED IN HBL100, SIGNAL = 2.9; EXPRESSED IN HELA, SIGNAL = 3.6; EXPRESSED IN HEART, SIGNAL = 3.8; EXPRESSED IN FETAL LIVER, SIGNAL = 3.1; EXPRESSED IN BT474, SIGNAL = 3.1; EXPRESSED IN ADULT LIVER, SIGNAL = 2.4
cacatcatgaagacctccccatcagcccagagctggccccttgtcctgggccactgagacccagaagtaccaaggctggagtcagcttgcagcacagccagggtcgaggtcactccctccctgaggactctagcacggcacagcccctctgcctctctcctggtggtggcgttgaaacagcaccctctgcttcggtcctcgacaggatggcagagaaggaggcagtcaataagatgtccctgcacaaccttggcacggtctttggccccacgctgctccggccctccgagaaggagagcaagctccctgccaaccccagccagcccatcaccatgactgacagctggtccttggaggtcatgtcccaggtatgggaagacaggctcca

SEQ ID NO: 4602 - DNA, 430 bp, Homo sapiens
  MAP TO AC007349.1; EXPRESSED IN BT474, SIGNAL = 4.1; EXPRESSED IN ADULT LIVER, SIGNAL = 4.1; EXPRESSED IN LUNG, SIGNAL = 2.1; EXPRESSED IN BRAIN, SIGNAL = 4.4; EXPRESSED IN PLACENTA, SIGNAL = 2.4; EXPRESSED IN BONE MARROW, SIGNAL = 4.6; EXPRESSED IN HEART, SIGNAL = 4.8; EXPRESSED IN HELA, SIGNAL = 5.7; EXPRESSED IN HBL100, SIGNAL = 4.9; EXPRESSED IN FETAL LIVER, SIGNAL = 2.9
atttggtagcagggctgttgctcatcattggaggcaatcagcttagcaaggcaaagactggctgtcctttgtctgagggtacagaaaggtatccagaaactctgcaaagtttcattaggaaccaagggcaagggaaacttgtgatcataccagctaggatagacctatggctgcagtggtttcaatagtcacctgaaggctactgttaacttttaagctgcagctacctgttcagctctgccttgcttggttagatcctgtgaatttaaatggtcttcactgattgtgttcttactgctcatgtcttttggcaaaagcagtatagccagttgggtggagcttgggttaagcgtatacatcctaactttggcatctactacatgtgggacctaaggcaagttagatagtcgttccacaattctcagttttc

SEQ ID NO: 4603 - DNA, 497 bp, Homo sapiens
  MAP TO AC008266.1; EXPRESSED IN BONE MARROW, SIGNAL = 1.3; EXPRESSED IN HELA, SIGNAL = 0.74; EXPRESSED IN ADULT LIVER, SIGNAL = 1.2; EXPRESSED IN BRAIN, SIGNAL = 0.73; EXPRESSED IN PLACENTA, SIGNAL = 0.73; EXPRESSED IN BT474, SIGNAL = 1.1; EXPRESSED IN LUNG, SIGNAL =   1; EXPRESSED IN HEART, SIGNAL = 0.79; EXPRESSED IN HBL100, SIGNAL = 0.79; EXPRESSED IN FETAL LIVER, SIGNAL = 0.81
agcatctgtacccgtcgccagctgctctcctgagttttaaaagcatttcccactgcctccttagcatctccacctggaggtctccttagcccctcacagcagcaggtcccaaagggaacacattattccttcctccacccagtgcccatcttggtccaaagcacttccatccttcccgctgctcgaactccttcctcgcctcccaccagcgcactgattccactgtcgcatgtgtcttgggtgcttcctttctgttctccagccccactgctggagcctgtttcagagtcctgtcttctctcacgggggtcactggcatagcttctaagaagtccgtcactggacccaccctgcagctattcactaagttcactgtcatggccatgctgatgcacctctctgcggtcctcaaagtgtggtctagggaccagtagccacagaatcacctgagaacgtgctagaaatcctagacctactggatcagcagctctgaagtg

SEQ ID NO: 4604 - DNA, 411 bp, Homo sapiens
  MAP TO AC008132.26; EXPRESSED IN BONE MARROW, SIGNAL = 8.5; EXPRESSED IN LUNG, SIGNAL =  11; EXPRESSED IN PLACENTA, SIGNAL = 9.1; EXPRESSED IN HBL100, SIGNAL = 7.9; EXPRESSED IN HELA, SIGNAL =  11; EXPRESSED IN HEART, SIGNAL = 8.6; EXPRESSED IN FETAL LIVER, SIGNAL =  10; EXPRESSED IN BT474, SIGNAL = 7.8; EXPRESSED IN ADULT LIVER, SIGNAL = 9.4; EXPRESSED IN BRAIN, SIGNAL = 8.9
atcccactgccagctgaacctcagttcctgaaacacagtgagtgaggacggacctcaggctgtctcttcgggtcacacccagtgtgaaaagatggcagatacagcaccagggcagacactcgcccccaggggtggctcccccagatcccaggcctctaggccctgtagatgcaagtttcccctgctgccacgcaggcgaggggagcctttgatgctgccacctcccttagagctggggtaccgggtcactgctgaagacctggaccaggagaaggaggcggctttccagcgcatcaagagtgcactgcaggttgaggacaaggccatttagtactgcagaccctcacggccttcccacactttgtcctcacttgcaacagaggcttctggtctgcctgccatttctaaagc

SEQ ID NO: 4605 - DNA, 487 bp, Homo sapiens
  MAP TO AC008430.2; EXPRESSED IN FETAL LIVER, SIGNAL = 1.1; EXPRESSED IN LUNG, SIGNAL = 1.5; EXPRESSED IN BRAIN, SIGNAL = 2.5; EXPRESSED IN PLACENTA, SIGNAL = 0.97; EXPRESSED IN BONE MARROW, SIGNAL = 0.92; EXPRESSED IN HEART, SIGNAL =   2; EXPRESSED IN HELA, SIGNAL = 1.9; EXPRESSED IN HBL100, SIGNAL = 0.99
cgtgatcaacaaccagaagctatcagtacagaaccagaatcataatgcagaagggaagtgtctattaagtgactactttcaaagcaaagaaggaagagagggtcatgagaagcaagaattatttccttaatttagagatcgataacagatctgtaaaggggatgaagagtaaatagcatggtggtgcaaattcaaatcatttaaaaaaatcctatcaaatcgaacagacacatgttgtatatgcattgtttctaatacattcatattttttcctgtttttgtttccagaatgctcaggcccactgggaattgaaggtggaattatatcaaaccagcaaatcacagcttcctctactcaccgagctctttttggactccaaaaatggtatccctactatgcacgtcttaataagaaggggcttataaatgcgtggacagctgcagaaaatgacagatggccgtggattcaggtaacagatgggatggg

SEQ ID NO: 4606 - DNA, 387 bp, Homo sapiens
  MAP TO AC008526.2; EXPRESSED IN PLACENTA, SIGNAL = 1.2; EXPRESSED IN HELA, SIGNAL = 1.8; EXPRESSED IN HBL100, SIGNAL = 1.2; EXPRESSED IN HEART, SIGNAL = 3.4; EXPRESSED IN FETAL LIVER, SIGNAL = 1.3; EXPRESSED IN BT474, SIGNAL = 1.1; EXPRESSED IN ADULT LIVER, SIGNAL = 1.1; EXPRESSED IN BONE MARROW, SIGNAL = 1.1; EXPRESSED IN LUNG, SIGNAL = 1.6; EXPRESSED IN BRAIN, SIGNAL =   2
ggaagaaaatgtgcagagccaatttgttttaatttttgtaactagtcagagacagtagctgatgtttataacttccttctctcattacttattccatgtttcctttgccctctctcagccaggacctcagctggtcaaagtcctttacatgacagagttacccaaattttcatttgtgatgtgtctgaattctgcccttttttaattgtagctttttattaacttttactattagacatgctaaccctaagaagtgcccaaagaatcccctgaattccagacaaggtctcctcaccctgttggatagtttcaacacagtcacaattaagataatgaacatatttgtaaccccaaagaacttccttctgcccctttataattcagccc

SEQ ID NO: 4607 - DNA, 424 bp, Homo sapiens
  MAP TO AC007981.31; EXPRESSED IN HBL100, SIGNAL = 3.5; EXPRESSED IN HEART, SIGNAL = 3.4; EXPRESSED IN FETAL LIVER, SIGNAL = 3.9; EXPRESSED IN ADULT LIVER, SIGNAL = 1.9; EXPRESSED IN LUNG, SIGNAL = 5.2; EXPRESSED IN BRAIN, SIGNAL =   5; EXPRESSED IN PLACENTA, SIGNAL = 2.2; EXPRESSED IN HELA, SIGNAL = 4.2; EXPRESSED IN BT474, SIGNAL = 2.8; EXPRESSED IN BONE MARROW, SIGNAL = 3.6
accttgttcttctcatgcccgcatccatgcttgcagctgggaagggggcaggaatcagcgaggtgacctgggctgagtcctgggaatgggaagaggtggcaggaaggggatctgaggaggagaacagggggcctggtggtctgtgcttcttcccagacatgggagctgtagaggggacccctgcagcagatgctaagggggccagtaggcccaggcagtcttgggacttgtgtgtctcctgctgtacatccatactgggtgctttagaaatggcaggcagaccagaagtccctgttgcaagtgaggacaaagtgtgggaaggccgtgagggtctgcagtccgagatggccttgtcctcaacctgcagtgcactgttgatgcgctggaatgccgcctccttctcccggtccaggtcttcaacagt

SEQ ID NO: 4608 - DNA, 359 bp, Homo sapiens
  MAP TO AL031074.1; EXPRESSED IN PLACENTA, SIGNAL =   1; EXPRESSED IN ADULT LIVER, SIGNAL = 1.3; EXPRESSED IN BONE MARROW, SIGNAL = 1.1; EXPRESSED IN HEART, SIGNAL = 0.94
atccatgggttgcacagttctgtggacaaaacacagtttccctggctgggtagcacgctcactcactgcctcccttggctgtggaaagggggttccccttccccgtgtgtctctcagatgggctgctgtaccacactgctcttccttctcttggtggatcatgccagccttttagtcaattttgatgagagaacctggataccttggttgccagtgaaggatacacacgcttacggtttttgtcgatggaagcctccaaaggtagctgcttctaatgggccatcttggcccctacctcctgagaaagtcttgatctcatatgcatcttctgaaaaacatcccagaggcaaaatatgcag

SEQ ID NO: 4609 - DNA, 454 bp, Homo sapiens
  MAP TO AC007333.2; EXPRESSED IN BONE MARROW, SIGNAL = 1.2; EXPRESSED IN LUNG, SIGNAL = 1.4; EXPRESSED IN BRAIN, SIGNAL = 1.2; EXPRESSED IN PLACENTA, SIGNAL = 1.4; EXPRESSED IN HELA, SIGNAL = 1.4; EXPRESSED IN HBL100, SIGNAL = 1.2; EXPRESSED IN HEART, SIGNAL = 1.2; EXPRESSED IN FETAL LIVER, SIGNAL = 1.4; EXPRESSED IN BT474, SIGNAL = 1.4; EXPRESSED IN ADULT LIVER, SIGNAL = 1.4
aggggttaaaatctgagggctctctgcaggcagcactcccagcattttacagctgtctcagttaagggagtcaccttgctctaggccatactcccttttcagagcagccttattcaataactgatggatgtgcacgtgcaaaatcccagctctgtcacttgaatttgagggttgtagctgtacagttccatatacagttgactgaggactttgttgagactatattacagtccaacttttcctgttcagtaccactttattcacatcccttccataagtgttgattccaaaagcttcctgtacactagtctccatttcaaattctgctttctggggaataagatctgcaacagttggtattagaagtagttggagaaagcagatgctgagatgggattttggagctggatcacttgctgctgtccaagtggcaaggaggactcgttggtggtaa

SEQ ID NO: 4610 - DNA, 388 bp, Homo sapiens
  MAP TO AC007220.1; EXPRESSED IN BT474, SIGNAL = 1.3; EXPRESSED IN BONE MARROW, SIGNAL = 1.5; EXPRESSED IN BRAIN, SIGNAL = 1.7; EXPRESSED IN HELA, SIGNAL =   1; EXPRESSED IN HBL100, SIGNAL = 1.4; EXPRESSED IN HEART, SIGNAL = 1.4; EXPRESSED IN ADULT LIVER, SIGNAL = 1.4
ggaggtgtaagaatcgagcgttttggtcaaagaggactttgctcttatctgtgcatttatgtggtattttagcttttttttgggtgacaatttgttcacatataccttgtataatatcactacaaattaatgataaagatgacaattgtgtgtggtgtgtgtgtgtgtgtgtgtgtgtgtgtttgtagccaactgagaacagatcccagagctcctggccatcttacctgcaataggcctgcaaacttgaccactccccagccaagcctggacacatcaggctccaccaaactcatctggtaaatatccacagccaggaatcgctggaccatgccgccatccttggtgatcactgtacatgcaatcaagtcgctgttatctgggagga

SEQ ID NO: 4611 - DNA, 408 bp, Homo sapiens
  MAP TO AC007444.1; EXPRESSED IN HELA, SIGNAL = 5.7; EXPRESSED IN HEART, SIGNAL = 4.7; EXPRESSED IN FETAL LIVER, SIGNAL =   6; EXPRESSED IN ADULT LIVER, SIGNAL = 6.2; EXPRESSED IN BRAIN, SIGNAL = 4.5; EXPRESSED IN PLACENTA, SIGNAL =   6; EXPRESSED IN HBL100, SIGNAL = 5.4; EXPRESSED IN BT474, SIGNAL = 4.8; EXPRESSED IN LUNG, SIGNAL = 5.7; EXPRESSED IN BONE MARROW, SIGNAL = 5.7
gagcctaaaggggtttcagcacagtccaagttttccctctctctgaccttctcctccagccccatggcagcgtcttgaggagatgtaactcaaaacagaaacccaaggtgaaattcttcttgatcaaagcctgttaagctcaaaacttatatagagaagagaaaagaaatattttctttttaaaaggtctctctttcctcttcagcctctactgagaaccaccaccccaaacctgaaagccccaaacagacagtgtctgctcggctggctttagtgaggttagacaaagataaaccacatggtggtggctgccccaagccccagcaattccaagaattactaactgaatccatggccacatcagcccatcttctggtgaagctaacgtcatctggcttgtgtcctgaa

SEQ ID NO: 4612 - DNA, 466 bp, Homo sapiens
  MAP TO AC008469.2; EXPRESSED IN BONE MARROW, SIGNAL = 1.8; EXPRESSED IN HEART, SIGNAL = 1.7; EXPRESSED IN BT474, SIGNAL = 1.5; EXPRESSED IN FETAL LIVER, SIGNAL = 1.9; EXPRESSED IN ADULT LIVER, SIGNAL = 1.5; EXPRESSED IN BRAIN, SIGNAL = 1.8; EXPRESSED IN PLACENTA, SIGNAL = 1.6; EXPRESSED IN HELA, SIGNAL = 1.9; EXPRESSED IN HBL100, SIGNAL = 1.9; EXPRESSED IN LUNG, SIGNAL = 1.7
tgattttgtcagctgttgagctatatttcttcatttcttctataggcccatgaattctgggctttcaaatcctaagtgaatatcaacttagagccagagttcccctgtcaagagtaccaagctttgcttgtgtgacccttgcttaaagggcactctcctctgagacacacatggcttatccccctacctgggttacagaactctttcgtttgtttagtctgctattaggatcttagggaagaatagaagagtcctgcctgcaccagtgtgaatgcctgtgcctggaatgcttgtcctcagcttccctgggctggctccttctgggaagctttcctccactcttcccagatttcccatgaatagcatgcttgtagcaccatggccgctcacaccccctgtgcagatggcattgcgatcgtctctctccttgcctatattcttctctggagtacaggcgctaagggtg

SEQ ID NO: 4613 - DNA, 366 bp, Homo sapiens
  MAP TO AC007450.1; EXPRESSED IN LUNG, SIGNAL = 1.3; EXPRESSED IN BONE MARROW, SIGNAL = 1.3; EXPRESSED IN BRAIN, SIGNAL = 1.2; EXPRESSED IN PLACENTA, SIGNAL = 2.2; EXPRESSED IN HBL100, SIGNAL = 1.7; EXPRESSED IN HELA, SIGNAL = 1.5; EXPRESSED IN HEART, SIGNAL = 1.3; EXPRESSED IN BT474, SIGNAL =   1; EXPRESSED IN FETAL LIVER, SIGNAL = 1.8; EXPRESSED IN ADULT LIVER, SIGNAL = 1.3
attttaattgcccacatggccacacaggatcctgactttgttagtttttcttgtagctaggtgtggctatgtcatgaagttctggacaatggcatgtgactagaagagagatatgccacatccaggttgtgctcttaaaagaaaggaacatgccatcttatttttcccccttgctcctgctagctggaatggaaaagtgatggtgggaatcggaggagccatcttgggctgtgcaacggaacccgtgaagtattgcagagtgaaaaggcagaggcaggctgggccagcaatagcttcacaaagagctgccaaaccaacttgggccttcgtaggaggaagaaatacacttcggtttgcgtcattgtt

SEQ ID NO: 4614 - DNA, 1994 bp, Homo sapiens
  MAP TO AC004230.1; EXPRESSED IN FETAL LIVER, SIGNAL = 5.3; EXPRESSED IN LUNG, SIGNAL =  68; EXPRESSED IN BRAIN, SIGNAL = 5.9; EXPRESSED IN HBL100, SIGNAL = 5.8; EXPRESSED IN HELA, SIGNAL =  12; EXPRESSED IN PLACENTA, SIGNAL =  51; EXPRESSED IN BT474, SIGNAL =  45; EXPRESSED IN ADULT LIVER, SIGNAL = 9.2; EXPRESSED IN BONE MARROW, SIGNAL = 5.6; EXPRESSED IN HEART, SIGNAL =  37
acatccacctctccttttgccttggggctcttcaagtgtagatcgaggtctggcatagagattttgggagctttaaagtgcatatctggcatcttgaacttaggagttttccacttgccatttgggccttccacagctacttctggcatgtcagcatctaatttgggacctttgacatccaattctggaccttttaactctccctccagctttggggcagaaacatcaacatctcctttgattttgggtccctttaaattgaaatcaacatcaggcatggagatcttgggggtcttgaagtgcatctcaggcatcttaaacttggggcccttcagcttcccttctggaccttcaaggctcacatctgggacttcaacatccaccttgggtcctgagacatcaacgtcagccttgggcaagttcacatccacttctgggccctctcctttgaagccaggcatgctgaacttgggcattttcatcttaggcatcttcaggtgccagtctgggccatgaacatccacatctggggcatcaatgtccactttgggccctctgatgtcaacatctggcactttcatttcaccttctaccttgggaacagacacatccatatcccctttgactttggggcctttcaagtttaagttcacatcaggcatggagatcttgggggtcttgaagtgcatctcaggcatcttaaacttgggccctttcaactttgcatcaggacactccagctcaacatcaggcacctccacatccacactggggcctgttaaatctccctccaattttggcaaagacacatccacatcccctttgactttggggcctttcaagtgtaagtccacatcaggcatggagatcttgggggccttgaagtgcatctcaggcatcttaagcttggggcccttcagcttcccttctggaccttcaaggctcacatctgggacttcaacatccaccttgggtcctgagacaacaacatcagccttgggcaagttcacatccacttctgggccctctgctttgaagccaggcatgctgaacttgggcattttcatcttgggcatcttcaggtgccagtctgggccatgaacatccacatctggggcatcaatgtccattttgggtcctttgatgtcaacatctggcactttcatttcaccttctaccttgggcacagacacatccatatcccctttgactttggggcctttcaggtgtaagtccacatcaggcatggagatcttgggggtcttgaagtgcatctcaggcatcttaaacttgggccctttcaactttgcatcaggacactccagctcaacatcaggcacctccacacccacactgggacctgttaaatctccctccaattttggcaccgacacatccacatcccctttgactttggggcctttcaagtgtaagtccacatcaggcatggagatcttgggggccttgaagtgcatgtctggcatcttaaatttagggcctttcaactttgcatcaggacactccagctcaacatcaggcacctccacaccccacactggggcctgttaaatctccctccaattttggcaccgacacatccgcatcccctttgactttggggcctttcaggtgtaagtccacatcaggcatggagatcttgggggccttgaagtgcatctcaggcatcttaaacttgggccctttcaactttgcatcaggacactccagatcaacatcgggcacctccgcttccacaaaaggacctttgacatcaacttgcggccctctgagatcaccttccagttctggcacagaagcatctatctctcccttcagtttgggtcccttcaaattcaagtccacatctggcatggagaccttgggagcttttatattcaacttgggcatcttaaatttggagcctttcaactttccttctggtccctcaatatccaaatcaggagcatcagtgtccacactgggtccagacacat

SEQ ID NO: 4615 - DNA, 359 bp, Homo sapiens
  MAP TO AC010736.3; EXPRESSED IN BT474, SIGNAL = 2.1; EXPRESSED IN FETAL LIVER, SIGNAL = 1.8; EXPRESSED IN ADULT LIVER, SIGNAL = 1.6; EXPRESSED IN LUNG, SIGNAL =   2; EXPRESSED IN BONE MARROW, SIGNAL = 1.5; EXPRESSED IN BRAIN, SIGNAL = 1.6; EXPRESSED IN PLACENTA, SIGNAL = 1.9; EXPRESSED IN HBL100, SIGNAL = 1.8; EXPRESSED IN HELA, SIGNAL = 1.9; EXPRESSED IN HEART, SIGNAL = 1.8
gacatgcggtatctctgtggtattagaatttcatttgggaacaattgggagaaaagtgtcttaaaggttcctgagggggttgataaagtcaatggtaaaatgactgaaggatactcttcaagtcagtaatgctggtgaacattgcattgatggtgagctccagcggggaataagttacccttcaaggaagagagcatagtttggttactgtgatcctgccctggcagtgagatccagcataaagcagacgtcgcaaccggctggctgcctggaggggtccgcgatccagacctccagcactggctgctggagagaagcagcctggactccaacctgtcagtcctggagcaagtcaggag

SEQ ID NO: 4616 - DNA, 405 bp, Homo sapiens
  MAP TO AC009961.3; EXPRESSED IN BONE MARROW, SIGNAL = 1.5; EXPRESSED IN HELA, SIGNAL = 1.4; EXPRESSED IN FETAL LIVER, SIGNAL = 1.5; EXPRESSED IN BRAIN, SIGNAL = 1.2; EXPRESSED IN PLACENTA, SIGNAL = 1.2; EXPRESSED IN HEART, SIGNAL = 1.3; EXPRESSED IN HBL100, SIGNAL = 1.5; EXPRESSED IN BT474, SIGNAL = 1.4; EXPRESSED IN ADULT LIVER, SIGNAL = 1.2; EXPRESSED IN LUNG, SIGNAL = 1.3
tccgcacactgtatcttttcagtaaaaacaccagactgtaaatatttcatttttgtgtgccaaaaagttcctatcacaactgttcaactctgctggtgtagtgcaaaagatgacagaggcaatacaaaaccaagtatatatggctaaatttggctctcagtttgctaaaccctgctctagggttttccagatatactatcatatcatctgcaaatagagatagttttatttcttctgttctgttgtacttctactgattcctcttgtttaactgtattggctaatattcccagtaatatgatgaataatagcgtaattactagatatccttgccttgctcctgatggtactagtaaaaatgtccttggtgttttccattatgatgatgactttaaggtgtgtgtg

SEQ ID NO: 4617 - DNA, 1974 bp, Homo sapiens
  MAP TO AC004682.1; EXPRESSED IN LUNG, SIGNAL = 4.5; EXPRESSED IN BRAIN, SIGNAL = 2.2; EXPRESSED IN HEART, SIGNAL = 3.1; EXPRESSED IN HELA, SIGNAL = 2.9; EXPRESSED IN HBL100, SIGNAL = 2.2; EXPRESSED IN PLACENTA, SIGNAL = 3.1; EXPRESSED IN BT474, SIGNAL = 1.9; EXPRESSED IN ADULT LIVER, SIGNAL =  88; EXPRESSED IN FETAL LIVER, SIGNAL = 1.3e+02; EXPRESSED IN BONE MARROW, SIGNAL = 6.6
accctggaccataaaggagcaaataaaaaagactcaagactgaacacaacacagaaatgggtcaaaagaaagctctttattgattgactcagcaatgcagggctggcacccatcagcttcaaaccacatcttatcgcatccactcctgtccactcccgtccactttgccctcttccaggctgaaatcttgctttcaggcaagggcttccggccagccttgcattagttctcagctatggtcttctgaacccagtcctggatggaagtcaccttcacatacacaccatactcagccacagcacagctcttatcaaagcttaagatcccagtcgcataccaggtgtcctcctccaggtcgtgaacggcaaaggcactgcccgcatcgccatagcaggtgtcttcttggtacttagacatgccagcacagaaggtgtgttcattcagtatgggctgcacccctacagggctcttcggtgtcttcttttcggggactgtgctgccttcataatgccttatgcattggtcttggtcagccacaggcagcatgacatacttcagatggtcagtaaatttaaaattggcatttcgcccccagccagaaacataacccacacgccctacttctgcataatcctttgaaggtaggcagatgggcatcactctctcattaacagacaccttctgtttgagtttgatgagcccaatatctacctgggagtagttagggtgtagaacaaccttctcaatctctacaagctgctttttccccacatagagtgttaaagtaggggcaatgtctttcgctgttgcattttctgaatggttcaggaagagatttttagccgtggtcagcagccattgttcattgatcagcgtggcacctgtggtgagattatggtgggaaaccatcttagcctgccagggaaagctgcctttggcatccaggtgtccacccaggatccgctgcactgggtttgccggattcttgggcttcccacatactgtcaaggagagcaagacactcgtgagtggaaatgtgcaagagcctttccatctgagaaaggggtgaaagcatgggcggctgtcactgctgcgtaaagtagaaagatttaaatgctttgcccttaccacctgctgatctcatttccaatagttgcagttttaaaataattctgttttttaaattgtttacattacaaaaagctctatttcccacttttctaacaaaggaagtgggaaatactgagatttttgagccctggctggtgaactgtattatatttaaacaattatcccaataaaggaatttccacaattccctgaaattcattgaaagggctaggggctacaataattcattctctctaaagaaagatgaatctagagcagcactggctggagctcagattttgtagatggtgcagttaatacgaggcaggttggcatttccacaccagtaagagcagaagaggctgggcctttgcctcttgttctgagaatgaaaggagagagcaacagctcctcctaataacgagaagcaggagttccagcccatgtccagcctcctgctaggcttccatggattaagattttatgtcattccttgacttgttctccctggagcttgcttctccttagacccagggctctctagcaggctctctgtatgcacaggctctcctaatctgtgggcgatgtagacaatggattcagccagtgcccttcaggccctaatgaacaagacccttggtgacccttagggagtcatcacctaactgcttaagtctctccctggccagctgcggttctcccacatccctcctcctggctcttgtgtgctcagaggaagccgcactggaaggctgtgcctctaggacgttccccgctggacgcctgcctgctctcttaagtgctcagcacccacctgcttcacattcaggaagtttatctccaacagccttatttatccactgc

SEQ ID NO: 4618 - DNA, 453 bp, Homo sapiens
  MAP TO AC010812.2; EXPRESSED IN LUNG, SIGNAL = 3.5; EXPRESSED IN BONE MARROW, SIGNAL =   3; EXPRESSED IN HELA, SIGNAL = 4.1; EXPRESSED IN FETAL LIVER, SIGNAL = 3.2; EXPRESSED IN BRAIN, SIGNAL = 2.9; EXPRESSED IN PLACENTA, SIGNAL = 3.1; EXPRESSED IN HEART, SIGNAL =   3; EXPRESSED IN HBL100, SIGNAL = 3.6; EXPRESSED IN BT474, SIGNAL =   3; EXPRESSED IN ADULT LIVER, SIGNAL = 3.3
tgcccaatagaactgcaatgacaagaatgttctagatccaccctgttcaatagggtcatcacctgctacgagtggcaacggagcacttgaaatgtgacagatgtgactgattaatttaattttttattttattttagttaatgataatataactaattcaaattttaatagccacacatgaccagcagctactgcttgaaaagcacggttctctactgacctcagaaatggtacccagaaccaagccaaccagccttctgatgtggagaccagcaggggctgggtagacagacacttctttctcatgaacccgacaagcttccagaaccgactgcaacgtgcaccgcctgtgaggctggtcttcacacatggtcagcaggatggagtgcaggggctcgcagagctgcaggggctggaggcagacagggccggtgagaggagagagcagccaga

SEQ ID NO: 4619 - DNA, 374 bp, Homo sapiens
  MAP TO AC010825.2; EXPRESSED IN PLACENTA, SIGNAL = 1.6; EXPRESSED IN HBL100, SIGNAL = 1.5; EXPRESSED IN HELA, SIGNAL = 1.6; EXPRESSED IN HEART, SIGNAL = 2.5; EXPRESSED IN BT474, SIGNAL = 1.5; EXPRESSED IN FETAL LIVER, SIGNAL = 1.7; EXPRESSED IN ADULT LIVER, SIGNAL = 1.5; EXPRESSED IN LUNG, SIGNAL = 1.8; EXPRESSED IN BONE MARROW, SIGNAL = 1.3; EXPRESSED IN BRAIN, SIGNAL = 1.2
tggttgaacacagaacacccattactgggcagatgagatagcaatttattagtctcttacactcacagcttgggaaggaggtacctgcttgccacccagggccccatgacagttgaccttgagaacagagctaacaaccaggggctgtggagtcaagcttatagtatagagagggtgaagtgccccctgattcctgcaggaggatgtgattggcttgtctgagtaatttcacaggctgtcagggaactaaaatccactactcaagaagaagaaggggctgtgcctggtccccttgataaacaggtttgtttggtgaggggactttatctgagggagcagattgaggaaaaatatgttaggccaggtaaggcgat

SEQ ID NO: 4620 - DNA, 1960 bp, Homo sapiens
  MAP TO AC006059.3; EXPRESSED IN BRAIN, SIGNAL = 1.9; EXPRESSED IN HELA, SIGNAL = 1.3; EXPRESSED IN PLACENTA, SIGNAL = 2.1; EXPRESSED IN FETAL LIVER, SIGNAL = 1.3; EXPRESSED IN LUNG, SIGNAL = 2.2; EXPRESSED IN BONE MARROW, SIGNAL = 2.2; EXPRESSED IN HEART, SIGNAL = 1.1; EXPRESSED IN HBL100, SIGNAL = 1.9; EXPRESSED IN ADULT LIVER, SIGNAL = 1.1; EXPRESSED IN BT474, SIGNAL = 1.8
ctttcggacatgctgctttcctgttttactacctctgcttgaggatgttccgttgccatatcctgcttcaaaacaatgtttatatctggggtatcaagccgtgcatttcctagaggggaagtctcctctacttttgctggggaactcctatcaggagtgcagatctccatgttgtcatctgtttgaagcacatcttccactccattgggaacactttcttcaacgtgctgaatgttttgtaaacaggccacattttcctcagtatttaaagctgtgggagaaatactgagtttactatcatctttagtaaactgatcaagatctgatgaaacagtcactgtatcatgtttacctgaaaggtcctcttcactggatttctcagtttttagaatattatcttttatggtttcattgttttcagaaacttttttctcttttgattcctgagtaacttgcttgtcatcaatctcctcctcctcctcttcaccaaattctagtggaggctgccagtgaaatgcttgctttcgttttggagccttatgctttttgtcttttttccctttcaatttctctttcacttttttggtgtgttctcttttaagattttcctttgacccatgtttgtgcttttgtggctttcccctattgttttccgaattggaacaggacccctcagagtcagaagttgatgtgcgctgtttgcttgatttccaagcaccattatcatcaggcagtgaagtatttgtggacgacttggttgtgggtttgactttgatgtgaatttcactaacctctgattcagaatcggatgtggcctcaccttcttccttgtcagaggatggatgggagtcatttttactgtttttagtgacatctcgttctgaatttgactcagagtcccatttactaccagcataattcttccttttgggcttactgccatttctaaggtgatcagaaagattctctttcaaagttcttttttttgaatgagggcattcccgttcagacttggatttttcttcacctctgtttttttcttgtttattatgtgttctttccatttggccctgcttctctttttcctgggctgactgtgtggcctgaacacttgactgctcactgtctgaagaataatctaaagatgatctgctctcgctatactttctcacacatgaagacctgtctctacctttgacatatttactgtgaagtgtcttttcagagctgctgctatgctttttatgtgaaacgctattttttttcccactggatctaagtctcctcttagctcgccttccatcatcactgctaatagaagtatatgaagatgatctactacactgtgaatgatcactgtatttatttcgtgaatgagatctagatgatggagacctagaccttgaatgtgaactagctagactacgtgatcttgtatatgatctggaataagatctactcctagaagatctgctccttgaccttggtgagctttctgaacttctatcactgtattttgaataagtgctctgatcactttccgaatttttttctcttttatggtaggatgatgagctaccagtctctttaatatttgctaaactgtaagtgctttggatgggtagcaaatgggttgttttagctttcatttcctgaattcgctcataagagggcttccaaggtttctgtccaggcttccatcttgaaggggggggactgtcactcagtggtattacaggaatattttctgctacaactggttgtactactacattttcattttgtgccatggttgctcttaaaggttctgttttaactggtttattttcacttaactgagaagctgtttttcttggtgattttgatgctctctttcggtgcccagacttggaactagatctggactttgatctacttcgagaatgtgatgaggactttgacgcagtccttgatcttgagc

SEQ ID NO: 4621 - DNA, 1966 bp, Homo sapiens
  MAP TO AC005829.1; EXPRESSED IN BT474, SIGNAL = 2.5; EXPRESSED IN ADULT LIVER, SIGNAL = 1.9; EXPRESSED IN BRAIN, SIGNAL =   2; EXPRESSED IN HELA, SIGNAL = 1.6; EXPRESSED IN PLACENTA, SIGNAL = 1.7; EXPRESSED IN FETAL LIVER, SIGNAL = 1.3; EXPRESSED IN LUNG, SIGNAL = 2.3; EXPRESSED IN BONE MARROW, SIGNAL = 2.9; EXPRESSED IN HEART, SIGNAL = 1.3; EXPRESSED IN HBL100, SIGNAL =   3
tatgttggtgcttgtggaggccttgtgttcctctggtgcagttaaagccttattttgggtgtaactttcagactgcaccagtgaatcctgagcaggttctagttcagtaggtggacctgtgacttcagtcaggcttcgatgcagagtctgaacccggtctggacgaggagctgtagtcttctccagggctgtagaatgtccagtctctgtagtgggttctggaatgatggcaagtcccaggtctggaggctgagttgaggtctcctccgtggttggagatggtttaacctctgtagtaggttttgtagttatggtaagctccaggtccagaggttgaacggtggcttgagtcaggtgtgaatgctgagcctgacccttgtctgaaggtggaagtgtcacctcagggtgtcctggaggaggagctgtagtcatcagggctgtagaaggttcaacctctgtcatggattttggagtgatggtaaaccccaggtccaaaggttgaactgtggctcgagtcaggtgtgaatgctgagtctgaacctggtctggatgtggaagtgtcacctcaggatgctttggagaaactatagtcctcttcgggggtgtagaatgtccaacctccgtagtaggttctggagtgatggtaagtcccaggtccaaaagttgaactgtaacgctgggtgacactggatgctgagcttgatcctgacctggtgttggatttgttaccccttgatatactcgaagttggggtacaactttcttaggaggctgagttggggtctccttcatggttggagaaagttcaacctctgtcttggattctggagtgatggtaaaccccagatccaaaggttgaactgtggcttgagtcaggtgtgaatgctctggaggttgagctacaactacattagggaactctggagtctgagctggggcctcctgatgggttagggaagactcaccctcctcagcggtctgtggatgctcagctgcagcctcctgctgggttggagaggggttctcattattaataggttccggagattgaaatgaagtctcctgttgaactgctaaaggtccagcttcttctgatgactctggaagcagaggtgggcccccgtgctggatggcgggaggttctacatcattacctgaccctgagagccgagttgtagcctcctggtggactagagaagttcccacctctgcactaggctctgctgctatggtgagctgcacgtctggaggcttcacagagacactgggtgaagctaaatgatgagtttgatggtgacctggaggtgaaactgtgacttcatgatgttctggaggctgacctggggtctcctgctgggtcggagaagattcgacctccctaggagactcagaaggctgaactggctgctgctgctcactgatggaaagttcatgctccataggaggaactggaggctcaattggggcctcctgttgggttgcagaaggttccacctcctctggaaactgaattggggtctcctgctgggcttgggaagattctgtctcattggtaggctctgaagttatggtaacctccacatctgcaggtttaactgtaatgttgggcaagtgataataagcttgatcctcacctggaggttgaactgacacctcatgattcggtagagttagactctccatagaggactctggaggcagagctggggcctcctgctgcattgaagaaggttcttcctcaaggagctgtggaagctgtgctggggcttcttgctggagtgaagaggactggatgtcttcaagggtctctggattttgagtttcgggctctagatggaattgagaaggtccaacttgctcagagggccctggaggctcatctgacttcacccggagttctggaggcaggctaccgggatacggtgtatctgtactggaatattcattctgcaaagtctgtttctga

SEQ ID NO: 4622 - DNA, 1975 bp, Homo sapiens
  MAP TO AC005962.1; EXPRESSED IN ADULT LIVER, SIGNAL = 1.5; EXPRESSED IN BRAIN, SIGNAL = 1.3; EXPRESSED IN HBL100, SIGNAL = 1.1; EXPRESSED IN HELA, SIGNAL = 0.99; EXPRESSED IN HEART, SIGNAL = 1.3; EXPRESSED IN BT474, SIGNAL = 1.1; EXPRESSED IN LUNG, SIGNAL = 0.96; EXPRESSED IN BONE MARROW, SIGNAL = 1.2
tccagagacaagacagcacctagtataatggtctacacataaggatgctcatcatatgggcctaaaaccttggttctgagcccctgagccctgaaagggaaagtagtgacttcatgtatctgtgtctgtggttcattttcttcaggtgtatggagaaaacaccatggaaacagggaacctcacgtgggtatcagactttgtcttcctggggctctcgcagactcgggagctccagcgtttcctgtttctaatgttcctgtttgtctacatcaccactgttatgggaaacatccttatcatcatcacagtgacctctgattcccagctccacacacccatgtactttctgctccgaaacctggctgtcctagacctctgtttctcttcagtcactgctcccaaaatgctagtggacctcctctctgagaagaaaaccatctcttaccagggctgcatgggtcagatcttcttcttccactttttgggaggtgccatggtcttcttcctctcagtgatggcctttgaccgcctcattgccatctcccggcccctccgctatgtcaccgtcatgaacactcagctctgggtggggctggtggtagccacctgggtgggaggctttgtccactctattgtccagctggctctgatgctcccactgcccttctgtggccccaacattttggataacttctactgtgatgttccccaagtactgagacttgcctgcactgacacctcactgctggagttcctcaagatctccaacagtgggctgctggatgtcgtctggttcttcctcctcctgatgtcctacttattcatcctggtgatgctgaggtcacatccaggggaggcaagaaggaaggcagcttccacctgcaccacccacatcatcgtggtttccatgatcttcgttccaagcatttacctctatgcccggcccttcactccattccctatggacaagcttgtgtccatcggccacacagtcatgacccccatgctcaaccccatgatctataccctgaggaaccaggacatgcaggcagcagtgagaagattagggagacaccggctggtttgagagtgacaatggtaggtttcttctctttggctttgttttccctttgtgaagtggagagggagctactacctttgctctcttcatagtgtgttgaggttcatcatagcagggaatgaattttgaaactaagcaacttcgtgttttaggaaaaaagaaagtatcctctttggtggttaaggtttgtgataaagagttttaacacactcgcaacaatgagaattgttcacatggcccctgaaaaccacaccttccttttcaccttcttggtggacagtttcctgttgacagcatttcccctgtgcgaacatttctattttccgtattttgagctctcttcccaatatttccttttggtgtgagtctgggttgttgggaacagcacagaatttggagtcttaagctctaaattagaggccctgacccatcattgaccaaactgatgacttcgagtaagccacccagcttttcttggcctcatgatttctccctcaccaatttgcttaaattagtatgtgcccctaaaatattctatgtttgttatgagattcaaataaaaaaattttgtgataaaacaacaagtaaatcatataactatatgttatcttccaagcttttaaaaatgattgtattttattttcaaatatgaaattattatgagtattcaagctttttctctctatatttacattttaatataatatacaaattttgaataaaagatcatgggcaatgcatgcacattatgaaacttatgtcattatgtataaatgctcatgtatacactactcgattcaagaaccagaagttaccaataacttgccttcacctgtattgtcctctccattgtgttcaccttgattcctatccagaagaaatcactctgttgaa

SEQ ID NO: 4623 - DNA, 381 bp, Homo sapiens
  MAP TO AF067844.1; EXPRESSED IN HEART, SIGNAL = 1.3; EXPRESSED IN FETAL LIVER, SIGNAL = 1.3; EXPRESSED IN ADULT LIVER, SIGNAL = 1.6; EXPRESSED IN BT474, SIGNAL = 1.6; EXPRESSED IN BRAIN, SIGNAL = 1.6; EXPRESSED IN BONE MARROW, SIGNAL = 1.9; EXPRESSED IN LUNG, SIGNAL = 1.2; EXPRESSED IN HELA, SIGNAL = 1.5; EXPRESSED IN PLACENTA, SIGNAL = 1.5; EXPRESSED IN HBL100, SIGNAL = 1.4
ctgagatttcccagagcaggagagtatgtagatggaagagcaaaaggcccatggctaaaccctgaaagtgtcagcatttagaggtgaggagaggaagagttgctgtagaagaagaaggaatagcctgtggggatcaccaggagggcaaagttacgtcaagacagtgggtttcctgggcccacctcgtttttgtgtggcacactcacgcaaatggacactttttacaccttgcactggatattagttctcttcttgtgtgtgggctgctttccctcttgttgagatttcaggtctccagggactggggtcatgtctgtcctttgtagttccccaaaccaggcacagcacttcaccttgaggtgatgcttgctaatgcttggc

SEQ ID NO: 4624 - DNA, 489 bp, Homo sapiens
  MAP TO AF139813.1; EXPRESSED IN BRAIN, SIGNAL = 7.4; EXPRESSED IN BONE MARROW, SIGNAL = 8.9; EXPRESSED IN HELA, SIGNAL = 8.7; EXPRESSED IN HBL100, SIGNAL = 8.2; EXPRESSED IN HEART, SIGNAL = 7.1; EXPRESSED IN FETAL LIVER, SIGNAL = 7.7; EXPRESSED IN LUNG, SIGNAL = 8.5; EXPRESSED IN PLACENTA, SIGNAL =   8; EXPRESSED IN BT474, SIGNAL = 7.4; EXPRESSED IN ADULT LIVER, SIGNAL = 8.5
gtaaaacagtggtccccagcctttttgacaccaggcaccggttttgtggaagacaattttttccatggacaaggggtgggggagggagatggtttcaggatgaaactgttccacctcagatcatcaggcattagttaggttctcataaggagcgcacaacctagatccctgtcacgtgcagttcaccgtagggttcacactcctatgagaagctaatgccactgctgatctgacaggaggcagagctgggataaccagcaggcagagcttggaggtaatgttcattcacccactgctcacctcctgccatgcagcctggaggtgcacagtctatgcaccttcggtaccagtctatggaccaggggttggggacccctgatataaaaggtaagttgactgaaaaatctgttgcaagtaaaacaaaacatgtctatccctgaatctagggatggaggcagttccaattatagcacatcacagaggttggag

SEQ ID NO: 4625 - DNA, 465 bp, Homo sapiens
  MAP TO AJ009611.1; EXPRESSED IN BONE MARROW, SIGNAL = 3.2; EXPRESSED IN LUNG, SIGNAL = 2.5; EXPRESSED IN HBL100, SIGNAL = 3.2; EXPRESSED IN HELA, SIGNAL = 2.9; EXPRESSED IN PLACENTA, SIGNAL = 5.3; EXPRESSED IN HEART, SIGNAL = 2.4; EXPRESSED IN FETAL LIVER, SIGNAL = 2.8; EXPRESSED IN BT474, SIGNAL = 2.2; EXPRESSED IN ADULT LIVER, SIGNAL = 2.3; EXPRESSED IN BRAIN, SIGNAL = 2.7
ttcctggtggggttagaggcgggacgtgagaaacgtggcaggtggtggccaggctgtgggggagccagggtatttcttgatggggttagatgggggatgtaagaattgcagcgggtggtggccaggctgcagctgctcgctgagggcccccttgtagctttccaggcagaggggaagcccaccccttccctcacacgctgtgtgcaggctgtgggcccatcagtcctgtcaaagccaccctggttctgtccccataggagggctccccgaggactttctgaactccctggagaagatggaggacggcaagttgaaggtcaccctcaagtacccccattacttccccctcctgaagaaatgccacgtgcctgagaccaggaggaaagtggaggaggccttcaactgccggtgcaaggaggtgagaaggcacggccagggggccccagaacagtgggtctggagctt

SEQ ID NO: 4626 - DNA, 475 bp, Homo sapiens
  MAP TO AC010183.6; EXPRESSED IN BT474, SIGNAL = 1.1; EXPRESSED IN FETAL LIVER, SIGNAL = 1.3; EXPRESSED IN ADULT LIVER, SIGNAL = 1.1; EXPRESSED IN BONE MARROW, SIGNAL = 0.94; EXPRESSED IN LUNG, SIGNAL = 1.4; EXPRESSED IN BRAIN, SIGNAL = 1.1; EXPRESSED IN PLACENTA, SIGNAL = 1.1; EXPRESSED IN HELA, SIGNAL = 1.1; EXPRESSED IN HEART, SIGNAL = 1.3
gctgaatcaggctccaactcttcttcagcctctgctccccgaccctataacccttctattacctcccctccccacacctggtctggtttacagtttcgttctgccactagctctcccccacctgcccaacaatttcctcttagagaggtggctggagctgaaagcatagtcagggtacgtgtgcctttttctctatcagacctttcccaaatcagccagcatttaggctctttctcatcagaccccactaaatatatacaggaattctgatatctaactctctcctacaatttaacatctagtgacttaaatgtcatcctaacttctaccctcttcccagatgaatgggaaagagttttttctctagcccaatctcatgctgataacctccagcttcatgagccagacctccagaaaggcattaaagcagtttcccaagaggatccccaatggagctatcaggcagattccccag

SEQ ID NO: 4627 - DNA, 373 bp, Homo sapiens
  MAP TO AC010083.1; EXPRESSED IN LUNG, SIGNAL = 7.9; EXPRESSED IN ADULT LIVER, SIGNAL = 0.95; EXPRESSED IN HEART, SIGNAL = 0.89
atggttgagtgataggcagctttcatttattcatttgtttagcttattatttattaattcaaaaaatatttgttaagtgcaacctcaagtttgaggaccactgattggaagaaaggtgaagatctgggcacagtgcagtgtggccatcatgcccagtatcttgctgttccatctctggttagcatctccaaaacaatacaacttttatcaaaaggcaagcaaaggcacgcttatttccaaatgaggcacaggcttcaaaatactcaccatcatccataattccaatggtaacacctttccctgtgtatcccagctcccaggcttcagccacattcaaatcaaggccaggagtgccatcagcttgcccagtatt

SEQ ID NO: 4628 - DNA, 396 bp, Homo sapiens
  MAP TO AL008715.1; EXPRESSED IN BONE MARROW, SIGNAL = 2.3; EXPRESSED IN HBL100, SIGNAL = 2.3; EXPRESSED IN PLACENTA, SIGNAL = 1.8; EXPRESSED IN FETAL LIVER, SIGNAL = 1.3; EXPRESSED IN LUNG, SIGNAL =   2; EXPRESSED IN HEART, SIGNAL = 1.9; EXPRESSED IN HELA, SIGNAL = 2.2; EXPRESSED IN ADULT LIVER, SIGNAL = 2.4; EXPRESSED IN BT474, SIGNAL = 1.9; EXPRESSED IN BRAIN, SIGNAL =   2
tgcacactttgatgacctggggcagctgagcaaaaaaatcaagggtcagggtcctagcatctacccacacagcacgcatgaccttgggcaggttacttaataactgctctgtgctttatggtactcttctgcaaaatggatattcatcataacttataggactgttgggagaatcaaataagataacgaaatactcagcatagcacagtgactaatacacgttagtcttaattaaataagggactattgttattacctggggtatatttttaaccaaactagtttcttcctattgacctgtaggcactgaattcaccactcactgtgacccagaggcagaacaataataatgatgatactgagagctaacggtgatggcagcagcttactaggacc

SEQ ID NO: 4629 - DNA, 481 bp, Homo sapiens
  MAP TO AC007653.1; EXPRESSED IN HBL100, SIGNAL = 0.71; EXPRESSED IN FETAL LIVER, SIGNAL = 0.6; EXPRESSED IN HELA, SIGNAL = 0.71; EXPRESSED IN HEART, SIGNAL = 1.3
tggcttctcctcctcctttcttctcattccatgaatttctctcccatggtttttaatttaataatattgaaatagtaatccatgatgaactatattttattttaccaatccccatttttggactttagataaattccagtgtttttctattaaagtgctttggtgaatgggcatggccagaggaaatgtttaataaagccaagtgtttacaccgggtttagagttcattttctactaagtcttagtggctcaatattcatacatttactaacctgatacaatccatccttcagaggaaccgcatcggctcagaaaacccaagcgatgtttttcgttttttggtggaagaacgcattcagtgctgtcagacccggaaagtccgctacacggagagggtggattacctgatgcagttacctgtggccatggaggcggcaaccaacaagggtaacaattccaaagcgggaaattggtactgtgt

SEQ ID NO: 4630 - DNA, 464 bp, Homo sapiens
  MAP TO AP000240.1; EXPRESSED IN PLACENTA, SIGNAL = 0.69; EXPRESSED IN HEART, SIGNAL = 0.88
cagtttgtcacttcaggcagttattaaggtctttcccaccttaaagaatataaacctatttctttagttctgcagcctaagttaaaaggtgaagtaagtgctaacatttctttttttaagaaagagcatcaatttcagcacagactttccacctagcactgaaaatgtcactgggaaattgtagtccttaacctaaaagcttaaaatctcaattatacggatgaatcagttgagactcatgaataatatgaaaaggtcttttaatcataaaaaggcctggacaatgaaatgaatcactttgaggttagctatttttatagaaaatgagatttttttttttcaaatagttgaaagcgtgaatggtgcaactggaaatcattccaacagtgcaggaaaaaatagagctataaataaaatgaagaaacaagtaagcaactaggaaacggaagagcaagctgaagcag

SEQ ID NO: 4631 - DNA, 466 bp, Homo sapiens; identical to SEQ ID NO: 3491
  MAP TO AP000311.1; EXPRESSED IN FETAL LIVER, SIGNAL = 0.79; EXPRESSED IN HEART, SIGNAL = 0.87; EXPRESSED IN PLACENTA, SIGNAL = 0.71; EXPRESSED IN BT474, SIGNAL = 0.62; EXPRESSED IN HELA, SIGNAL = 0.74; EXPRESSED IN BRAIN, SIGNAL = 0.83

SEQ ID NO: 4632 - DNA, 380 bp, Homo sapiens
  MAP TO AL021938.1; EXPRESSED IN PLACENTA, SIGNAL =   7; EXPRESSED IN HEART, SIGNAL = 5.9; EXPRESSED IN ADULT LIVER, SIGNAL = 6.4; EXPRESSED IN LUNG, SIGNAL = 7.6; EXPRESSED IN BRAIN, SIGNAL = 6.7; EXPRESSED IN BONE MARROW, SIGNAL = 8.3; EXPRESSED IN HBL100, SIGNAL = 7.8; EXPRESSED IN HELA, SIGNAL = 7.9; EXPRESSED IN BT474, SIGNAL = 7.8; EXPRESSED IN FETAL LIVER, SIGNAL = 6.5
aggaggatgccagtgaaggcatgccttgctcctagacacccagttactggtagaacaagaattacgatccaatgtcagtgcccattccaacatatcaaatttttgatgcattcaatattgcttgagatggctacagtccaggaattctggtttaatatgatttgacagattgcaaagtgaatggttgcataacacagcctttatcatttctaaaaagctgcctaaaatagataggccttaagaattttcttttgttgaccctaacttagagcttgttcccatcggatgctctcccacagtcactttctcccctctgtctgtctcaggcctccccactgacccagctggcacagatctagcctccattacatgccacatgc

SEQ ID NO: 4633 - DNA, 471 bp, Homo sapiens
  MAP TO AC009507.1; EXPRESSED IN HEART, SIGNAL =   1; EXPRESSED IN FETAL LIVER, SIGNAL = 1.3
gctaatgccacatgtccaacttgctaacaacagagatcaaatcttagctgctcaaatggctctacccctcaagaagactgcaaagctatttgttggcaagttgatcagattaggctgtttttgtcttgaaaggggcagcaactcaactttaatagaatcagcatacgtttggtgtatgggttttacttttctacctgcagaacccaacctagcctccctctgagtttacacagtgtttcatccactgacacaggatttctcatgctttgcagtggccatacggcaaggcggtccactggagctatcacttactacaccacctgcaagctgctgtcccagtggagcaaaggaaaggcctgataaagcaacagctggggcacctgcttgcaaatgatgccctggaaagatgaagaatctttccccagaatgttgtatcacactaaatcaatgacttttaatggtgctattttc

SEQ ID NO: 4634 - DNA, 402 bp, Homo sapiens
  MAP TO AL022099.1; EXPRESSED IN ADULT LIVER, SIGNAL = 3.3; EXPRESSED IN BT474, SIGNAL = 2.8; EXPRESSED IN LUNG, SIGNAL = 2.7; EXPRESSED IN BRAIN, SIGNAL = 2.7; EXPRESSED IN BONE MARROW, SIGNAL = 2.7; EXPRESSED IN HBL100, SIGNAL = 2.5; EXPRESSED IN FETAL LIVER, SIGNAL = 2.1; EXPRESSED IN PLACENTA, SIGNAL = 3.2; EXPRESSED IN HEART, SIGNAL = 2.5; EXPRESSED IN HELA, SIGNAL = 2.5
tccaggctcaggatacaagctgatgctggctctattattctcaggtctgggaggcagtggcacctttcccacagctccaccaggcagtgccccagcggggaatctgttttggggctccaactccacatttgttttcaacacttccctagtagagaatgcctgcaggagctctgtgtctgcaacaggcttctgcctgagaaccaggctttcccgttcatactctgaaatctaagtgaaagctgagaagcctccttcactcttgcattctgtgcacctgctggcttaacacaacatggaaaccatcaaggcttgtatcagccagcactcttcaaagcagcagcccaagctgtacctggggccctttgagccaaagctggaatcagagtggccaggatgtaggaa

SEQ ID NO: 4635 - DNA, 495 bp, Homo sapiens
  MAP TO AP000186.1; EXPRESSED IN PLACENTA, SIGNAL = 0.69; EXPRESSED IN FETAL LIVER, SIGNAL = 0.94; EXPRESSED IN LUNG, SIGNAL = 0.63; EXPRESSED IN ADULT LIVER, SIGNAL = 0.8; EXPRESSED IN HEART, SIGNAL = 0.85
caaaacaggctggaaaatgtagtcttacttccaggaagtcacacacctgccaagagtcaggagttctaaggggtgaagaaaggctttttaagcgaggcaaccaaccacctctgtccaggtggccaggaagattaaatgtccaggtggtgttacatacagctcaacccttatcctacaaagcatagtttctcacccaccacagccaagcgaaagtcatcaagtgtctcctgttgtttcccacgttctaaaattggaggaaagttattgcacaagtgcctaagtagtgcagctgatccatctggaaaggctgttcttaaaccttggcttaaaacacctccaaattccttaaacagcatagcaaaatcaagaacatattttcaaaagacaatttaatcaatatctcttacattgaaacacacacacacatatatacacgcgccttttataaatacatattttatagcacttttagaaatgggggaaatgtcacgaaac

SEQ ID NO: 4636 - DNA, 363 bp, Homo sapiens
  MAP TO AL021878.1; EXPRESSED IN BONE MARROW, SIGNAL = 1.2; EXPRESSED IN HBL100, SIGNAL = 1.1; EXPRESSED IN HELA, SIGNAL = 0.95; EXPRESSED IN HEART, SIGNAL = 1.5; EXPRESSED IN ADULT LIVER, SIGNAL =   1; EXPRESSED IN BT474, SIGNAL = 1.3; EXPRESSED IN FETAL LIVER, SIGNAL = 1.1; EXPRESSED IN BRAIN, SIGNAL = 1.5
ctcatcttccattcccaaggcctttccttctggtgtcagcagaagggactttgtactccataacatatgttgcccaatgggcttgcatgcccactgccaagtccagctccacctccaggcccttgccctactcttccttggcctttggaaaatccagtccttcatgccatgtataaatgtccttccccaggacgtcccccaaacctgcttccccttctcagcctggcttctgatccagcctgtggtttaacccaccacccatgtttgctggtggtggggcatcctcaggacctctgccgccctccaggacctcctccctcacctggtcgaagcagtatggtgtgttctggaagtccacatgca

SEQ ID NO: 4637 - DNA, 465 bp, Homo sapiens
  MAP TO AL031778.1; EXPRESSED IN HELA, SIGNAL = 2.8; EXPRESSED IN HEART, SIGNAL = 3.1; EXPRESSED IN BRAIN, SIGNAL = 2.3; EXPRESSED IN BONE MARROW, SIGNAL = 0.94; EXPRESSED IN LUNG, SIGNAL = 0.96
acaggagaagaaccccaagccaagggcccaaaaaagcagtaagcagcaaacaacaaataggttctcctcctgtcctcccaggtagggatggttaccttgccctacttagtcacctttatgaccagatacagaactgctcagtatcgagaaagagacaaaccctgcaatctgagacattcagcaaaaaagtgcagggaagttcagagctcatagtgaactgcctttccaacaccgtgtttatcttccagctagagctcccaaatgtccatggctgtagtcacctaagtccttgcctcagataccagcagagtctgagctagcttgagcccttaatcatcccttctcatttctggctgaaacctatcacaccctccaaaaaagactgactatgccccagcggctcaaggatactcaccaggcactttctcttacctccgcacagagtccacttcttgtctggcatca

SEQ ID NO: 4638 - DNA, 479 bp, Homo sapiens
  MAP TO AC008176.1; EXPRESSED IN HELA, SIGNAL = 0.64; EXPRESSED IN HEART, SIGNAL = 0.84; EXPRESSED IN BONE MARROW, SIGNAL = 0.69; EXPRESSED IN ADULT LIVER, SIGNAL = 0.8; EXPRESSED IN BRAIN, SIGNAL = 0.74; EXPRESSED IN FETAL LIVER, SIGNAL = 0.65; EXPRESSED IN LUNG, SIGNAL = 0.83
tgaactatatgagatgagggtttatgattatcaagcataccattaactctgagttcttccacaaaaatgaaatcttagagtatctatccaatgaattctacttagttgtttaatattaacgccataactgaatattaactctacaactaatacaactgaatattaactctacaaccagtaaaaaagcacgttaaatattcaaggaagacatataaacattctgagtttatgtgtttataataatataactcacatgtattgcatgtaaagccaggcgcagcactgtgctgatcagcaaagtgtttgcacctgcagcgaatgggctggctaccattcaaggggacataaaggtaagccctgcactggcagccagtcacttggcagggcagatcaatggggcactgctgaggaatcgcttccaagtcagttttatgttgtttatacctaaaaaaggagaaagagagagaaatataaacaca

SEQ ID NO: 4639 - DNA, 429 bp, Homo sapiens
  MAP TO AL034380.22; EXPRESSED IN BRAIN, SIGNAL = 1.9; EXPRESSED IN BONE MARROW, SIGNAL = 1.7; EXPRESSED IN PLACENTA, SIGNAL = 2.5; EXPRESSED IN HELA, SIGNAL = 1.9; EXPRESSED IN HBL100, SIGNAL =   2; EXPRESSED IN FETAL LIVER, SIGNAL = 2.2; EXPRESSED IN LUNG, SIGNAL = 1.7; EXPRESSED IN HEART, SIGNAL = 1.6; EXPRESSED IN BT474, SIGNAL = 1.7; EXPRESSED IN ADULT LIVER, SIGNAL = 2.7
agaatgcccacagactttccctagctttacacctcagtgggaccatagatacacggtaaacttactgctaatacctcatactaccagggaggtctctgcttcctgccttatcttctgggaaacctgtgctccccggtctatcaatattagactcagaaagcgggagaggggatgatgtccctgtgggatgcatggtaccacatgaagccagtgagtacctagaaaggggtttgtggaaaccacaggggcagtcaagtgtcaggcgcccactcacctgagtcaatccaccaatctccttcacagacacatagaggcgatagaggtccagaggtttcctacccacagcaggcagatttgtcatgcccatggccttctcctcagtgaaggccagataacggtccacccacatcttcctctcaggctcaccac

SEQ ID NO: 4640 - DNA, 414 bp, Homo sapiens
  MAP TO AL031665.18; EXPRESSED IN BT474, SIGNAL =   2; EXPRESSED IN BRAIN, SIGNAL = 1.9; EXPRESSED IN PLACENTA, SIGNAL = 2.4; EXPRESSED IN HELA, SIGNAL = 2.4; EXPRESSED IN HBL100, SIGNAL = 2.9; EXPRESSED IN ADULT LIVER, SIGNAL = 1.8; EXPRESSED IN FETAL LIVER, SIGNAL = 2.7; EXPRESSED IN LUNG, SIGNAL = 2.3; EXPRESSED IN BONE MARROW, SIGNAL = 2.4; EXPRESSED IN HEART, SIGNAL = 2.8
gctgtgttgaagcgagtgtccgcccttgagtttacaaatcatgttgtgccagctgtgccgtgagggactctgggctgggatggggcaggtgagcaacctccgacccgcaggttttaccaacgctgccatctgccccagaccctgcactgggagaagcggggaaatcgggcgctctggaccaggcctccggtactctgagtttgggcagaagacagttccctcctccaccctggccggctccgtggcgtacctggtcaccgacacccaagccgaagtaaccgtgtgtcaccacttcccaatgcaagaagcagacgagcgcgtcctgcctgcaggtgatggccggcgctgccgatgcgaacagtacctccaggcccgccatgagcgcccgcgacttcggcgtctggaggaaagaag

SEQ ID NO: 4641 - DNA, 451 bp, Homo sapiens
  MAP TO AL031678.2; EXPRESSED IN PLACENTA, SIGNAL =   4; EXPRESSED IN HELA, SIGNAL = 3.4; EXPRESSED IN HEART, SIGNAL = 3.4; EXPRESSED IN HBL100, SIGNAL = 4.3; EXPRESSED IN FETAL LIVER, SIGNAL =   4; EXPRESSED IN ADULT LIVER, SIGNAL = 4.5; EXPRESSED IN BT474, SIGNAL = 3.2; EXPRESSED IN BRAIN, SIGNAL =   3; EXPRESSED IN BONE MARROW, SIGNAL = 4.3; EXPRESSED IN LUNG, SIGNAL = 4.3
agaaatgccaccatctcctgcacgttctctcaaggacttcaggatatgctgttgccacctcatgtaagtagacaggctttgaggctggcaggaacttggaagccacctaatagagccctcatcttcctgaggggactggaggccaagggagccgcagggctcgcccaaggcactcaatgaatgagagacagagggagctaggactccttcaagataaaagatcagatatgaaggaaataaattctctggcttctctcttcatcagccagacttcgttctccctgtcaatgaatccatcaatgaagatgggttgcagcatatgcaaatatatgtaaatacatttagatagaggaagctgggggcacaggtaccctggggcccttctctcccagggtacctgtgcacaggactccggcgaagacccagcactggccgtacttgactggcttgt

SEQ ID NO: 4642 - DNA, 389 bp, Homo sapiens
  MAP TO AL035091.2; EXPRESSED IN FETAL LIVER, SIGNAL = 1.3; EXPRESSED IN HBL100, SIGNAL = 1.1; EXPRESSED IN HEART, SIGNAL = 1.2; EXPRESSED IN PLACENTA, SIGNAL = 1.4; EXPRESSED IN BT474, SIGNAL = 1.1; EXPRESSED IN ADULT LIVER, SIGNAL =   1; EXPRESSED IN BRAIN, SIGNAL = 1.2; EXPRESSED IN LUNG, SIGNAL = 1.4; EXPRESSED IN BONE MARROW, SIGNAL = 0.97; EXPRESSED IN HELA, SIGNAL = 1.1
ttggacctgtacccaccttctttcctttagaagagatcggagatctctattgagtcttctgatccttattttatcactaagctagactcagcatgagagaaggggtatggaggcattactgatcaggatcagctcccaagacatgggcctgagaaaactgtcactgaaggaagaattatctagaacttacttcagggcaccctaagcatgatactcaagtcattaatactagggacttgtataatttcctctgtggagaggggagcggtctgaaaacatcctaaatgctttacccaagcatcaccagcatctctccgggatctgacacaaatgctgtttttacctgtgatgtttgttgtggcctcattgccatgttgagacacagggtg

SEQ ID NO: 4643 - DNA, 397 bp, Homo sapiens
  MAP TO AL035446.4; EXPRESSED IN PLACENTA, SIGNAL = 1.1; EXPRESSED IN HELA, SIGNAL = 1.2; EXPRESSED IN HBL100, SIGNAL = 1.3; EXPRESSED IN HEART, SIGNAL = 1.1; EXPRESSED IN FETAL LIVER, SIGNAL = 1.5; EXPRESSED IN ADULT LIVER, SIGNAL = 1.6; EXPRESSED IN BT474, SIGNAL = 1.2; EXPRESSED IN BRAIN, SIGNAL = 1.3; EXPRESSED IN BONE MARROW, SIGNAL = 1.3; EXPRESSED IN LUNG, SIGNAL = 0.96
tcttctttcctcactgtctacttccttttttctgtgtttttctatgtaaaaaagcttgtcctcacacaataaaacaactctaaatctgtcatgagaagtcagacataggaaaaaaaatagaggaaaaacttcagaagccaaacaagccataataaattgaataaaatccagaagtgaaggaaaatatttgcaagctggattacagtagggaatatcatctattcagatcaagcattatgaaaaagattataaaataattggctaaggttaatacttggaagatgcccatggaatgtgggacactggatttttgaagtaaatgaaaggctcaggatattgtccaacatgaatacagcagacaaagctgaagttgaagaagcagttcaacatgttccgc

SEQ ID NO: 4644 - DNA, 484 bp, Homo sapiens
  MAP TO AC008277.1; EXPRESSED IN BONE MARROW, SIGNAL = 0.81; EXPRESSED IN FETAL LIVER, SIGNAL = 0.83; EXPRESSED IN HEART, SIGNAL = 0.95; EXPRESSED IN BRAIN, SIGNAL = 1.1; EXPRESSED IN PLACENTA, SIGNAL = 0.74; EXPRESSED IN BT474, SIGNAL = 1.1; EXPRESSED IN LUNG, SIGNAL = 0.89
cacatgagaactgtttaaagtgttgagtaaaacttacacttaaaaaattgtttttgaagattgatagcctaaatacactgttctcaaatagcttataacatttactctgtaggaaaattgctcatttgagttctcattcacaggtgctggttcctgagctagtccatttagatacaaactgcaaattattggtgattatctagttataatatacaaatgcttcttttacttcccagaatcagatagtaattcagaatcagatacagaaggatcagaagaagaagatgatgatgataaagaccaagatgaatcagatagtgatactgaaggagagaaaacttcaatgaaactgaataaaacaacttcctctgtcaaaagcccttccatgagtctcacaggtcactcaacacctcgtaacctccacatagcaaaagccccaggctctgctcctgctgccttatgttctgaatcccagtcacctgct

SEQ ID NO: 4645 - DNA, 434 bp, Homo sapiens
  MAP TO AL109942.4; EXPRESSED IN BT474, SIGNAL = 2.3; EXPRESSED IN FETAL LIVER, SIGNAL =   2; EXPRESSED IN BONE MARROW, SIGNAL = 2.9; EXPRESSED IN BRAIN, SIGNAL = 1.9; EXPRESSED IN HEART, SIGNAL = 2.2; EXPRESSED IN LUNG, SIGNAL = 2.5; EXPRESSED IN PLACENTA, SIGNAL = 2.3; EXPRESSED IN HELA, SIGNAL = 2.3; EXPRESSED IN HBL100, SIGNAL = 2.8; EXPRESSED IN ADULT LIVER, SIGNAL = 2.4
tttattctttcttgtggctggagaatattccattttatggatatactgtattgtatttatccacgcatcagttgatgaacactggggctgtttcggcctttggctatcgagagcaacgctgccgtgaacgtgggtgtacaagattttgtgtggatgtgtgttttcatttctcctgagtagattcctaggagtagagtttctgggtcatatggtaattctaacatcagaagaactacagctggatgtgtttcattcacttcccaaaatcttttctgaagcgaaagaagcaatggtattttgcagaggggtctcggactttcaaatccaagttcctttgctctttggacctacgtcaagccattatcatagagctaatgaaggagaactggatgtgtgaggtattacagggaaagatgaagtagctgggagcaggg

SEQ ID NO: 4646 - DNA, 479 bp, Homo sapiens
  MAP TO AL078591.17; EXPRESSED IN BT474, SIGNAL = 5.8; EXPRESSED IN ADULT LIVER, SIGNAL = 8.9; EXPRESSED IN BRAIN, SIGNAL = 4.9; EXPRESSED IN BONE MARROW, SIGNAL =   5; EXPRESSED IN PLACENTA, SIGNAL = 5.9; EXPRESSED IN HELA, SIGNAL =   5; EXPRESSED IN HBL100, SIGNAL = 5.1; EXPRESSED IN FETAL LIVER, SIGNAL = 5.1; EXPRESSED IN LUNG, SIGNAL = 5.4; EXPRESSED IN HEART, SIGNAL = 5.1
caatcagacacaggtatgggcttaaagtttcactgaaatacttaggtagcaaaatatatgaaaaagtaatagaaaagtaaaaagataaaattaaaaaaatattgcacagccacattacctagaaagtaaagttgatgtttaaaaagcactaaacatggatgatataaattatcttccatataaaaaggtataaatatttcttagaacttatcagcatctacattttaatataatacattatttgaaacattgttgaatgaggtaattgtccagtcgctaacaatgcttttatactattggaaatatttgagggcagcaaccagaaagaatttctctaaaaatatttccgaatcaagaacagctatatgtgcagctctcccaatgagtgaatcagctgtattgggcaatgcattgatgacattatagcgaaccaaattacagtccttgctttgcagaacgggtcgaagcaagttgtggat

SEQ ID NO: 4647 - DNA, 421 bp, Homo sapiens
  MAP TO AL078602.10; EXPRESSED IN PLACENTA, SIGNAL = 2.1; EXPRESSED IN HELA, SIGNAL =   2; EXPRESSED IN HBL100, SIGNAL =   2; EXPRESSED IN HEART, SIGNAL = 1.8; EXPRESSED IN FETAL LIVER, SIGNAL =   2; EXPRESSED IN ADULT LIVER, SIGNAL = 2.4; EXPRESSED IN BT474, SIGNAL = 1.9; EXPRESSED IN BRAIN, SIGNAL = 1.9; EXPRESSED IN BONE MARROW, SIGNAL = 2.4; EXPRESSED IN LUNG, SIGNAL = 2.1
agcgataactctggctggtgtaatgaccccagatggtgtgatgactctggcaggctggcacgtgtgatgactctagcacatgcgatgaccctggagggtgtgatgaccccagctggtatgatgattctggcaggcatgatgactctagcaggtgtgatgaccctggagggtgtgatgaccccagctggtgtgatgactctggctggtgtaattatcccagctgttgtgatgactctggcaggtgtgacgaccctggctggtgtgatgactctaacaggtgtgatgactctggctggtgtgatgaccctggcaggtgtgatgaccctggctagtgttatttatgattctggcaagtgtgatgattccggcctgtttgatgactctggctggtgtaattaccccaactggtgtgagaaccctg

SEQ ID NO: 4648 - DNA, 457 bp, Homo sapiens
  MAP TO AC008177.1; EXPRESSED IN LUNG, SIGNAL = 0.59; EXPRESSED IN HEART, SIGNAL = 0.79; EXPRESSED IN FETAL LIVER, SIGNAL = 0.75; EXPRESSED IN HELA, SIGNAL = 0.84; EXPRESSED IN ADULT LIVER, SIGNAL = 0.67
tcctagtagtgcctagagaaacagtgaatgctcaataaatgtaattgctgttaataaaacaatatttacctattaaaacatcattaatccctattcgatgaaatgtcatttgacactggggagtaatctaacaaactacatgaagatagtgataattatgttgctaactgtactcaggaaaagggactcaagcttcacatttttggctgtttatgaaggcaaatgtcttcccatggagagatgcaaaaagacattcttaccagaccaatggtggctgctccaatcccaatgagagggctgacagaaataataaccaaggtcagtttccaacccctgaaaaatcccaacaggaaaccacagatggtcgaggtcatgcgctgaatgaaaagggccatttggtcagctatggcatcattgattttattaatatcactagaaaccagaaagattttggtca

SEQ ID NO: 4649 - DNA, 430 bp, Homo sapiens
  MAP TO AL050342.36; EXPRESSED IN PLACENTA, SIGNAL =   4; EXPRESSED IN BT474, SIGNAL = 3.6; EXPRESSED IN FETAL LIVER, SIGNAL = 4.7; EXPRESSED IN LUNG, SIGNAL = 5.8; EXPRESSED IN HEART, SIGNAL = 3.8; EXPRESSED IN HELA, SIGNAL = 4.6; EXPRESSED IN HBL100, SIGNAL = 4.7; EXPRESSED IN ADULT LIVER, SIGNAL = 4.6; EXPRESSED IN BRAIN, SIGNAL =   4; EXPRESSED IN BONE MARROW, SIGNAL = 4.7
gtgagctccaggaggacaaggcacatgctcctccttcaccttgcatccccagctctcagcccagggcctggcacacagtgggtacataatgaaatttgcaaaatgagtggacaactcaggctacactcctcagcccttcaggcctgttttctattgggtgaaattagaaagcgggacaagaagattgtaaagggtaagtccaaccctgcatcaagaatctgacccaggcatcctcctctgcctgcttttgtaaaaatgggaaggtgagtgtgctccccaggcggcccggctgggtcctcgtcctctctgggctctgtgccaggaccatgctgagaatgtggacgtgaaggtgtgtgaagaggtgtgtgaacagccgcacaaactccttcatccccctagttatgatttctcctgaacctgcttccaaaaa

SEQ ID NO: 4650 - DNA, 430 bp, Homo sapiens
  MAP TO AL035660.13; EXPRESSED IN ADULT LIVER, SIGNAL = 1.8; EXPRESSED IN BRAIN, SIGNAL = 1.7; EXPRESSED IN BONE MARROW, SIGNAL = 1.7; EXPRESSED IN PLACENTA, SIGNAL = 2.2; EXPRESSED IN HELA, SIGNAL = 1.6; EXPRESSED IN HBL100, SIGNAL = 1.7; EXPRESSED IN BT474, SIGNAL = 1.8; EXPRESSED IN FETAL LIVER, SIGNAL = 1.8; EXPRESSED IN LUNG, SIGNAL = 1.9; EXPRESSED IN HEART, SIGNAL = 1.9
actttggtgagtcaaagggcactaataagaaatgaaaagataacccacagacatgggagaaaatatttgcaaattttatatctgataagggcctagtattcaaaatacaaaaagaactcctaaaatcaaccataaaagacaaaaaccatgattaaaaactgggcatcagattttaacagacatttctccaaaagaaaatgtacaaatggccaataagcatgtaaaatgatgggtgatatcattagacctcaggaaaatgcaaatcagaaccacaacgagaagccacttcacatgtactatgatagctataatcttaaaaaaaaaaaacctaaaataacaagtgttagtgaggatgtggagaatctggaacattcatacattgctggtgggaacataaaatggtacatcctctgtggaaaacagtctggca

SEQ ID NO: 4651 - DNA, 407 bp, Homo sapiens
  MAP TO AL050349.9; EXPRESSED IN HBL100, SIGNAL = 2.7; EXPRESSED IN PLACENTA, SIGNAL = 1.6; EXPRESSED IN BT474, SIGNAL =   1; EXPRESSED IN FETAL LIVER, SIGNAL = 1.6; EXPRESSED IN BRAIN, SIGNAL = 1.9; EXPRESSED IN LUNG, SIGNAL = 2.9; EXPRESSED IN BONE MARROW, SIGNAL = 1.4; EXPRESSED IN HEART, SIGNAL = 1.6; EXPRESSED IN HELA, SIGNAL = 1.7
caggtctggacaagaggaccttctaaaggcctttccagcttgaaactatgctcatcacaataaccctgaattactcagaaagtacttttacatcccatgagatctcctttcaaaggcacgtcatccattttcggagttccaaaaaagaatgagaattaaaacaaactcaggtgctcgaataggtaagtcaagggatccgtctgcccaaggccatggcctgggtacgaggcattccgggactagcactgccctgtggcgcaggggcgggtggacacgtacatgttgtcatgggccgccttcatggccttggcggcatagcccatgttcttgagcacctcggtgttggtgttggcattctccagggcctcccgctggaactcgatggttgataatgtgccgtcgatctg

SEQ ID NO: 4652 - DNA, 389 bp, Homo sapiens
  MAP TO AL035669.28; EXPRESSED IN BONE MARROW, SIGNAL = 1.6; EXPRESSED IN LUNG, SIGNAL = 1.1; EXPRESSED IN PLACENTA, SIGNAL = 1.3; EXPRESSED IN HBL100, SIGNAL = 1.2; EXPRESSED IN HELA, SIGNAL = 1.2; EXPRESSED IN HEART, SIGNAL = 1.1; EXPRESSED IN BT474, SIGNAL = 1.3; EXPRESSED IN FETAL LIVER, SIGNAL = 1.3; EXPRESSED IN ADULT LIVER, SIGNAL = 1.7; EXPRESSED IN BRAIN, SIGNAL = 1.4
tctgctctgagctcctgtccccagggagggctcgggccctgccttcttgccagtatggacaagcccctctccaggccagaacccctccccccaaggtaggcaccccccagcacccttaacaaatggcttcaagtgcctacctgaaggtcagtagcgccttcagggaggactcctgggtgtccctaagacaaaaagagacagctgacattctcccgccctccccagccacctgcagccacccaacccacccacccactctctgacggaccacaaccttccccatccaccaggggacttggagacccttcatcctgtcccccaagtggccagtgctgggagctgctggcccacccacagggcatgtgacaacgacagaatccacctgtcct

SEQ ID NO: 4653 - DNA, 417 bp, Homo sapiens
  MAP TO AL079338.13; EXPRESSED IN BRAIN, SIGNAL = 2.2; EXPRESSED IN BONE MARROW, SIGNAL = 2.5; EXPRESSED IN LUNG, SIGNAL = 2.3; EXPRESSED IN PLACENTA, SIGNAL = 2.2; EXPRESSED IN HBL100, SIGNAL = 2.1; EXPRESSED IN HELA, SIGNAL =   2; EXPRESSED IN HEART, SIGNAL =   2; EXPRESSED IN FETAL LIVER, SIGNAL = 1.5; EXPRESSED IN BT474, SIGNAL = 2.5; EXPRESSED IN ADULT LIVER, SIGNAL = 2.8
ggggatggtgacagtgaaacactttttagtttaaattaattgagtggcccaattccctgcccttacccttaggcataacacggaaaatgtcttggaagcaaggtgaatccaagaattagtcttattcactaagtacttattatgtatgtatatgtgtatgtatttattataagcgtgcacaaacatattctctggggttattgttgaacaagagctcatatagttgacaagctccgtgtttatgaatgcaccatgggtactgatcagtgcttgtggcagactgtgtcttccaagatggcatgcgatgcgctttccatcccacagctcttcttacagtgtaataatgatactcccctcattgggaaatgggatctacagttattccttgagcaacacaggtttgagctgcacaggtct

SEQ ID NO: 4654 - DNA, 469 bp, Homo sapiens
  MAP TO AL033397.7; EXPRESSED IN HELA, SIGNAL = 0.78; EXPRESSED IN BRAIN, SIGNAL = 0.86; EXPRESSED IN HEART, SIGNAL = 0.89; EXPRESSED IN PLACENTA, SIGNAL = 0.7; EXPRESSED IN ADULT LIVER, SIGNAL = 0.87; EXPRESSED IN LUNG, SIGNAL =  33; EXPRESSED IN FETAL LIVER, SIGNAL = 0.71; EXPRESSED IN BONE MARROW, SIGNAL = 0.81; EXPRESSED IN BT474, SIGNAL = 0.72
ccctgatttcccaaaatgtggttgagatctaaagtttattttgttgtacaacttcctttggagttttacttgcttccagtacaaggcaaatttttccggcttccatgaagattgaagataggtaactcctttatagagtttcagcttgcttccaagagaagccaaatttgagatttttcctgcttctaggatggtagagagcagtcttcagcttgggactcatccctaagtaagtaactgaattggggtttgttttggctaaagttaatatgaacaactagctggtcttaatttctccttaccattagaacactcagtaattttacaagttgtgccattgttttttggcttaactgcttttttgttgttgtttgtttctgtttttgttgttgtttcagtctttttcccattgggtttgatcaaactatctgacttgatcaaatctgaaggaaagttccaaattatgagg

SEQ ID NO: 4655 - DNA, 474 bp, Homo sapiens
  MAP TO AC007906.2; EXPRESSED IN LUNG, SIGNAL =  23; EXPRESSED IN HELA, SIGNAL = 0.86; EXPRESSED IN BRAIN, SIGNAL = 0.84; EXPRESSED IN HEART, SIGNAL = 0.92; EXPRESSED IN PLACENTA, SIGNAL = 0.82; EXPRESSED IN BT474, SIGNAL = 0.83; EXPRESSED IN BONE MARROW, SIGNAL = 1.1; EXPRESSED IN HBL100, SIGNAL = 0.75; EXPRESSED IN FETAL LIVER, SIGNAL = 0.83; EXPRESSED IN ADULT LIVER, SIGNAL = 0.86
ccataaaatttgggagatcctggaatattatctaattcattcggcaatgaaataaagcacacatagtagccaacaatttaaaactcaaatatgggagtaaatatactcaaatcaaaagtagatggttggacagtttgaactttaacagaacattgaaaggaattaaatttaattcttaaccaacttacccaatttttgtcttctcttttaacttagaacatgtttttgtttttttgctgtctttgtcctttggcttggatttcatccttctacctttcttttcctcttttccttcaactgaagcagtaggaaagttttcagggctcattactcgtggaatattgcgttccccacgctcctttgcttttgctatggcctctgatattatacgattagccttttcttgcttgctttctgattccaccttttttctctgcttcttctcagacatgaccctcacctgggtattctgca

SEQ ID NO: 4656 - DNA, 417 bp, Homo sapiens
  MAP TO AL080274.13; EXPRESSED IN HBL100, SIGNAL = 2.4; EXPRESSED IN HEART, SIGNAL = 2.4; EXPRESSED IN ADULT LIVER, SIGNAL = 3.2; EXPRESSED IN LUNG, SIGNAL = 2.4; EXPRESSED IN BRAIN, SIGNAL = 2.4; EXPRESSED IN BONE MARROW, SIGNAL = 2.7; EXPRESSED IN PLACENTA, SIGNAL = 2.5; EXPRESSED IN HELA, SIGNAL = 2.3; EXPRESSED IN BT474, SIGNAL = 2.5; EXPRESSED IN FETAL LIVER, SIGNAL = 2.6
taagaactgcaaggaagggggctattgcagcacagtaagagacaaattacatttcccattgtaagtttgcagcgaaacattgtaagtatcttgaacaatagggtacacacattaaaatcttcttatgccagaggaagtctatattttataaaaccatacacctgctacttatgctgaaaagttgaagaaaactgggtctgaatcagtgacttatagtggtgcttctcaaactttggggtgcatcaggatcacctgggggctcattcaaacacagatttctggaccccagctgcccccagagattctgattctgcaaatcttgagcagcctgagattctgcagttctatgaagcttccaggtagtgtcaatgctggtgctaggctgaccatagtataggactgctggcttggaggata

SEQ ID NO: 4657 - DNA, 396 bp, Homo sapiens
  MAP TO AL035451.5; EXPRESSED IN BT474, SIGNAL = 5.3; EXPRESSED IN BRAIN, SIGNAL = 5.6; EXPRESSED IN BONE MARROW, SIGNAL = 4.8; EXPRESSED IN HEART, SIGNAL = 4.5; EXPRESSED IN FETAL LIVER, SIGNAL = 5.3; EXPRESSED IN ADULT LIVER, SIGNAL = 5.5; EXPRESSED IN LUNG, SIGNAL = 5.7; EXPRESSED IN PLACENTA, SIGNAL = 5.4; EXPRESSED IN HELA, SIGNAL = 4.9; EXPRESSED IN HBL100, SIGNAL = 4.8
tcaaaatagctgtgccgaagaaactcaaaaaaattcaagataacacacagaaggaactcagaattctatcaaattaatttaacaaatagatgacaataatttaaaagaattaagcagaaattctacagctgaaaaatgcaagtgacacaatgaagaatgcatcagtgtcttttagtagcagaattgatcaagcagaaaaaagaattagtgagcttcaagacagtataattgaaaagcactttctagatcctgttgatgtgcttctttgttttttcttatttctttcatatcaggagaaaaacaaagaagcacaccaaaaggatctagaaaatggcctcaaaaaggcaaatctaagagctatcggccttaatgaggaggtagagaaagaaatagggg

SEQ ID NO: 4658 - DNA, 366 bp, Homo sapiens
  MAP TO AL078600.14; EXPRESSED IN BONE MARROW, SIGNAL = 3.7; EXPRESSED IN HBL100, SIGNAL = 3.4; EXPRESSED IN ADULT LIVER, SIGNAL = 3.8; EXPRESSED IN LUNG, SIGNAL = 3.9; EXPRESSED IN BRAIN, SIGNAL = 3.4; EXPRESSED IN PLACENTA, SIGNAL = 3.8; EXPRESSED IN HEART, SIGNAL = 2.9; EXPRESSED IN HELA, SIGNAL = 3.7; EXPRESSED IN BT474, SIGNAL = 3.4; EXPRESSED IN FETAL LIVER, SIGNAL = 3.4
aagtggaatatccgttgtcatctagaatccatgatcttgtaagattctgaaagtaatcctttcatactgctgataacagttttacaaattattatctgggcataacaataataaaaatgtataaaaggactttacttatgaaatgtaatactaccagaaatgctggttcctaaggataatcttggagtagcaactagtgattccacaagacttaaaatccataattggtgtgtcccaaaaatgtattttcttatcatcatccttgtcacagaaatagcatttactgaacacttacacatcaggaagtatgtaaagcatttctccgctcatcccttacaacaactctgcaaggaaggtagtctcccc

SEQ ID NO: 4659 - DNA, 415 bp, Homo sapiens
  MAP TO AL109615.9; EXPRESSED IN PLACENTA, SIGNAL = 2.3; EXPRESSED IN HELA, SIGNAL = 6.6; EXPRESSED IN BONE MARROW, SIGNAL = 2.3; EXPRESSED IN HEART, SIGNAL = 3.6; EXPRESSED IN HBL100, SIGNAL = 6.5; EXPRESSED IN BT474, SIGNAL = 3.3; EXPRESSED IN ADULT LIVER, SIGNAL = 1.1; EXPRESSED IN FETAL LIVER, SIGNAL = 4.3; EXPRESSED IN BRAIN, SIGNAL = 1.6; EXPRESSED IN LUNG, SIGNAL = 6.1
agcacctactgtgtgccaagcccatggcaaatgctcaaatagacaaagataaataagatgcagttccttcccccaaaagagcgcatgacttggttggggtggtcctgatcacagtagtaatgctaatagcccatgttgtgcaccttctatgtgccaggccctaggctgaatgctttacatacattagttcatttaaactttctagctttttccggttctaggtgctttagcagctgcggcttaaggtgcagacatggcaacgtcaagaaccacaacacacacaaccagtccccaaaatggcacagaaatggcatcaggaaaccccgatcacaaagatacaaatgtcttaatggggtggacctcaagttcctaaggagcatgcaccttgccaagaagcacaacaagaagggcctaa

SEQ ID NO: 4660 - DNA, 411 bp, Homo sapiens
  MAP TO AL035468.3; EXPRESSED IN BRAIN, SIGNAL = 2.7; EXPRESSED IN BONE MARROW, SIGNAL =   3; EXPRESSED IN ADULT LIVER, SIGNAL = 2.9; EXPRESSED IN LUNG, SIGNAL = 2.8; EXPRESSED IN PLACENTA, SIGNAL = 2.7; EXPRESSED IN HEART, SIGNAL = 2.4; EXPRESSED IN HELA, SIGNAL = 3.7; EXPRESSED IN HBL100, SIGNAL = 3.4; EXPRESSED IN BT474, SIGNAL = 3.2; EXPRESSED IN FETAL LIVER, SIGNAL = 2.5
acttcttcaaggccagcatcaagcatttagtcaagtgttttgtggaggatttcctcctgaaccatatggattagggtaccaagtagagctgttgtctcaccttctataataaatttacttctacaaaaaattattttgagctctagactcaagcatttgtgatgattgcagctgcaatgtggaagaacagatattaataacagcatatccaaattgactctttattgaactccctcattaaagtcagaattctttttaaaatacttattactatcattactattatttttatattatttgtagctaatatgcacatggttttaagctattattatgggcacttagtcaatttcatcatcataatctatggacctggaattctagaagtttccatgtttctccaggtaacca

SEQ ID NO: 4661 - DNA, 450 bp, Homo sapiens
  MAP TO AL117344.7; EXPRESSED IN BRAIN, SIGNAL = 3.3; EXPRESSED IN PLACENTA, SIGNAL = 4.2; EXPRESSED IN HBL100, SIGNAL = 5.1; EXPRESSED IN HEART, SIGNAL = 4.5; EXPRESSED IN HELA, SIGNAL = 4.5; EXPRESSED IN BT474, SIGNAL = 4.4; EXPRESSED IN FETAL LIVER, SIGNAL =   5; EXPRESSED IN ADULT LIVER, SIGNAL = 5.3; EXPRESSED IN BONE MARROW, SIGNAL = 3.9; EXPRESSED IN LUNG, SIGNAL = 4.1
cctgagctccatctcctgtcagattagcattagattctcataggagtgtgaaccctgttgtgaactgagcatgtgagggacctaggttgcatgctcattatgagactctaatgcttgatgatctgtcactacctcccatcacccccactggggccgtctaattgcaggaaaacagctcagactcccactgattctaccttatggtgagttgtataattacttctttatatattataatgtaatactaataatagaaataaagtacacaatcaatgtaatgcacttgactcatcccaaaaccatgcccccatcccctcaccctccagttcgtggaaaaattgttttccacaaaactggtccttggtgccaaaaaagttggggaccactgccctagagggtccgatttcggtggcccaccatggtagcttgctcgatagcgcatgctttatt

SEQ ID NO: 4662 - DNA, 455 bp, Homo sapiens
  MAP TO AC007277.2; EXPRESSED IN ADULT LIVER, SIGNAL = 0.84; EXPRESSED IN HELA, SIGNAL = 0.78; EXPRESSED IN LUNG, SIGNAL = 0.64; EXPRESSED IN HEART, SIGNAL = 0.84
ttttgagagacttcgttttctgagaactaattcttcagagacttgcagaagagagcagaagccacctttatgacggacacaattttctttcctctgttcagctcctggctgcctatgaacttatcagcctcatttccatatcaaagaggaggcaggaaaatactcccctgaccgacataaaaagacacattactgcagattgtctaagaacttgttttttttttttttggccaaaattagcaagttattcacagtaataggtgagtcagacaacaatagtgtttaagagaacaaagccactcatcaggaccctgaccccaagcagggtccccagctgccagaacatctctgcacactggcagccaagaggctataaaaaaagaaaaagaggcagccaggaagtctgccactcacccagatgcagcgaccagaacattcattccagggctgctctg

SEQ ID NO: 4663 - DNA, 417 bp, Homo sapiens
  MAP TO AL035703.19; EXPRESSED IN BT474, SIGNAL = 2.7; EXPRESSED IN BRAIN, SIGNAL = 2.9; EXPRESSED IN BONE MARROW, SIGNAL = 2.5; EXPRESSED IN HEART, SIGNAL = 2.4; EXPRESSED IN ADULT LIVER, SIGNAL = 2.4; EXPRESSED IN FETAL LIVER, SIGNAL = 2.5; EXPRESSED IN LUNG, SIGNAL = 2.5; EXPRESSED IN PLACENTA, SIGNAL = 2.7; EXPRESSED IN HELA, SIGNAL = 2.5; EXPRESSED IN HBL100, SIGNAL = 3.5
gtatgcaaatgaacccctcctgctcctgcaaaaagctgtcagagtaggaagcgctgctgcttccagggacaggctctgggaatatggcccggctgcaggggcttgggcctttaggtttaggggggttgggaggtcagaataggagtaggggtggggctcaccttgagggtctccagcacacctgcagcccttccatgggacactgtggggatggcagagggaaaaataggtatggggctcagagaagtggctctgaatctgaataccactgtcctcacctgggtgaccttggtctttgtcaccgtgctcttgctctgctgcagaggtcatggagtccttgcactgccgtgggtggagccacggcattcaagtggcctggcttgctgaggttctgcatgagggacaactgctctggag

SEQ ID NO: 4664 - DNA, 455 bp, Homo sapiens
  MAP TO AP000557.2; EXPRESSED IN PLACENTA, SIGNAL = 1.2; EXPRESSED IN HBL100, SIGNAL = 1.8; EXPRESSED IN HEART, SIGNAL = 1.3; EXPRESSED IN BT474, SIGNAL = 1.6; EXPRESSED IN FETAL LIVER, SIGNAL = 1.9; EXPRESSED IN BONE MARROW, SIGNAL = 2.2; EXPRESSED IN LUNG, SIGNAL = 1.2; EXPRESSED IN BRAIN, SIGNAL = 2.6
cttctcgcgaagcacattgcggatggttgcatttggaaccacatcggcatgcaggagggacagccccagggtcagcagcctgtgagggagccccggacccggtcagagcaggagcctggcctggggccaagttcaccttatggactctcttccctgcccttccaggagcagctcactgaaatgtgttccccgtctacagaagtaccgtgatacacagacgccccatgacacactgtacacaccaggggccctgtgctccccaggaagagggccctcacttgaagcggggcccgatggccgccacgtgccggttcatgctccccttggccctgccgatgttcagggacatggagcgctgcagcaggctggagaagatctccacttggtcagagctgcagtacttggcgatctcaaaccgctgcaccaggaactgagcgaaaagaggaagacgctgt

SEQ ID NO: 4665 - DNA, 350 bp, Homo sapiens
  MAP TO AL035705.16; EXPRESSED IN HBL100, SIGNAL =   3; EXPRESSED IN LUNG, SIGNAL = 2.6; EXPRESSED IN BRAIN, SIGNAL = 2.9; EXPRESSED IN BONE MARROW, SIGNAL = 2.2; EXPRESSED IN PLACENTA, SIGNAL = 3.5; EXPRESSED IN HEART, SIGNAL =   3; EXPRESSED IN HELA, SIGNAL = 2.7; EXPRESSED IN BT474, SIGNAL = 2.8; EXPRESSED IN ADULT LIVER, SIGNAL = 1.8; EXPRESSED IN FETAL LIVER, SIGNAL = 2.4
accaaacaaatgtgagattgcaccattttactattattttcttaaacgactttcctttaactgcatactttcctattttctcttcctgtatgtgttatttaactagtcaatagtatcttgagttaattttgaagttactatattatatcctccattaattttgttatgaaaaataacaactatgcaagaatggtctgattagtaatttctcatttcagtacgacaaagagattattgtcatcaatacagcagtggcctgttccaataattcaagaaatggaatatttgatttgccaataagtcctggagaagaattggaagtcattgataccaccgaacaaaatctagtg

SEQ ID NO: 4666 - DNA, 420 bp, Homo sapiens
  MAP TO D87009.1; EXPRESSED IN BT474, SIGNAL = 1.4; EXPRESSED IN BONE MARROW, SIGNAL = 2.8; EXPRESSED IN BRAIN, SIGNAL = 1.2; EXPRESSED IN LUNG, SIGNAL = 1.7; EXPRESSED IN HBL100, SIGNAL = 1.2; EXPRESSED IN PLACENTA, SIGNAL = 1.1; EXPRESSED IN HEART, SIGNAL = 1.1; EXPRESSED IN FETAL LIVER, SIGNAL = 0.98
aagagccatcagaatccagccccgactctggagccaggagtcccttctaatatcagcatcatggcctggactcctctccttctccttctccccatgtacctcctcacttgctgcccaggttaatagagatttcaaataccagcctttggagggattcctgtgtctccctttctaattcccaacatgtgtctgttttttgtttcagggtcaaattctcaggctgtgatgactcaggaaccctcactgactgtgtccccaggagggacagtcactctcacctatggctccagcactggagcagtcaatgggggtcattatccttactggttccagcagaagcttggccaagcccccaggacactgatttatcatgcaagcaacaaacactcctggacccctgcccagttctcaggctcagtc

SEQ ID NO: 4667 - DNA, 407 bp, Homo sapiens
  MAP TO AL109627.12; EXPRESSED IN BT474, SIGNAL = 4.3; EXPRESSED IN FETAL LIVER, SIGNAL = 5.1; EXPRESSED IN ADULT LIVER, SIGNAL = 5.6; EXPRESSED IN BONE MARROW, SIGNAL =   5; EXPRESSED IN LUNG, SIGNAL = 5.4; EXPRESSED IN BRAIN, SIGNAL = 4.2; EXPRESSED IN PLACENTA, SIGNAL =   5; EXPRESSED IN HBL100, SIGNAL = 4.7; EXPRESSED IN HELA, SIGNAL = 4.8; EXPRESSED IN HEART, SIGNAL = 4.3
gataggcaccctctgctcacagacaggagatctgtgccagtgggggtgccactctgtgatacctgtgccacgtggaatatttctgggatctgccccatggccaaggtgagccaaggaaaggggcaaaaaaaccaggtaggtattttggacccaacctgggcctggatgctggccctaccttgtgccctctctcccctcctcacagctgagctgcctctttgaccacccaggaaccgtgttcttcagcatcttcatgtccttctggggccatggccttcctggagcactggaagcagggagtgccaccttggcccaccactgggactgcagtgacttccaggaccaggaggcaatgcccagttcagccccccaccactgggactgcagcgacttccaggaccaggagg

SEQ ID NO: 4668 - DNA, 372 bp, Homo sapiens
  MAP TO AC010787.2; EXPRESSED IN PLACENTA, SIGNAL =   2; EXPRESSED IN HELA, SIGNAL = 1.8; EXPRESSED IN HBL100, SIGNAL = 1.6; EXPRESSED IN HEART, SIGNAL = 1.7; EXPRESSED IN FETAL LIVER, SIGNAL = 2.1; EXPRESSED IN BT474, SIGNAL = 3.1; EXPRESSED IN ADULT LIVER, SIGNAL = 2.5; EXPRESSED IN BONE MARROW, SIGNAL = 1.8; EXPRESSED IN LUNG, SIGNAL = 1.8; EXPRESSED IN BRAIN, SIGNAL = 1.5
acaaagccaatgactgagggagctgggattcaaggctacatctttctggtccacagctactatacagtccaatgcaccaggtgaagtccagtacctcagtctgaatctatcttcctgcctctggaaaagacagcagggaggcacaccaggtgggagagtgctcaggagcacagtctgcagagatctgcctaaaggagccctgtgtggaaggtggtctctcacctgttgtttcggttgatggctgccaccatgagtgctgtccagccaagtctgtgctttgcattgacatctgcaccttctgacaacagcctaaaacaagacagaggaatattttcagtgtatggcttgacatctgcaccttctgacaacagc

SEQ ID NO: 4669 - DNA, 433 bp, Homo sapiens
  MAP TO AC010809.2; EXPRESSED IN BT474, SIGNAL =   5; EXPRESSED IN ADULT LIVER, SIGNAL = 6.9; EXPRESSED IN BRAIN, SIGNAL =   6; EXPRESSED IN BONE MARROW, SIGNAL = 5.3; EXPRESSED IN LUNG, SIGNAL = 6.6; EXPRESSED IN PLACENTA, SIGNAL = 6.1; EXPRESSED IN HBL100, SIGNAL = 5.6; EXPRESSED IN HELA, SIGNAL = 6.2; EXPRESSED IN HEART, SIGNAL = 5.4; EXPRESSED IN FETAL LIVER, SIGNAL = 6.2
gcacactagcatgggtcaaggagtctagtttgtattaatattagccatctaactgaaaacttaaagggtgacccaaatcagatcagctttaaagaggtaggtaggtatttagccaaagagattcatttggctttgatcccacaactaggcactctaagaattccactataaggagattgctgctctgaagttggaaggttaatttgtgacaaatacctgggagcaggagctttaatcacaaagcctgctctgagtaaccatcctcctcccactcctaggtgcctttggtggttttcaaaagggaaaaagaaatcgccaggaagctggagtttgatggcctatatatcaccgaacagccatctgaagatgacatcaaggggcagtgggaccgcttggtgatcaacacaccgtgagtgtccctctaccccaacct

SEQ ID NO: 4670 - DNA, 408 bp, Homo sapiens
  MAP TO AL109752.7; EXPRESSED IN LUNG, SIGNAL =  26; EXPRESSED IN PLACENTA, SIGNAL =  22; EXPRESSED IN BRAIN, SIGNAL =  13; EXPRESSED IN BONE MARROW, SIGNAL =  18; EXPRESSED IN HEART, SIGNAL =  13; EXPRESSED IN HELA, SIGNAL =  31; EXPRESSED IN HBL100, SIGNAL =  35; EXPRESSED IN ADULT LIVER, SIGNAL = 4.6; EXPRESSED IN FETAL LIVER, SIGNAL =  29; EXPRESSED IN BT474, SIGNAL =  26
tccacaaaacattctgccttccttctaaagattttacaatgcattgttatcattaaccagtcttttactattaaacttaaatggcccattgaaacaaacagttcaaagattcttcttccaccactgattaagactagggtggcaggtattagggataatattcatttagccttctgagctttctgggcagacttggtgaccttgccagctccagcagccttctgatccactgccttgatgacacccacagcaactgtctgtctcatatcacaaacaccaaagtgacccagaggaggatagtctgagaagctctcaatacacatgaggttgccaggaaccatatcaatgatggcagcatcaccggacttcaagaatttagagccatcttccagcttcttaccagaacgg

SEQ ID NO: 4671 - DNA, 433 bp, Homo sapiens
  MAP TO AC011897.2; EXPRESSED IN FETAL LIVER, SIGNAL =   4; EXPRESSED IN BT474, SIGNAL = 3.8; EXPRESSED IN ADULT LIVER, SIGNAL = 4.1; EXPRESSED IN BRAIN, SIGNAL = 3.5; EXPRESSED IN BONE MARROW, SIGNAL = 3.6; EXPRESSED IN LUNG, SIGNAL = 4.4; EXPRESSED IN PLACENTA, SIGNAL = 3.8; EXPRESSED IN HBL100, SIGNAL = 3.8; EXPRESSED IN HELA, SIGNAL = 4.1; EXPRESSED IN HEART, SIGNAL = 3.1
tagtgactagaggggctggggtttgagcctgagtttgtgcaatttcaaacttttggcttattctctgcagttcactgagcacattgaatgaggaattctagacccttggtcctaagtagctactggtattgtttctcccctacaccctacttattacaggatttggagttaagattaaactttctccaggctccccgttaacgtttcctgattttgttccttcagcttgcctgaaatcccctggctcctttgttgcaaatggcctcacttactgtacttccctaggaggtcatccatggatgaccatgttcactaccatttatccattgaagacttgtgggtcactctctgcctcaccacctccatttctaccttcattcatgatgatttcaaaatccaagtaaatgataaaaccgacaaactggtctctcaa

SEQ ID NO: 4672 - DNA, 377 bp, Homo sapiens
  MAP TO AC011242.2; EXPRESSED IN HEART, SIGNAL = 2.2; EXPRESSED IN BT474, SIGNAL =   2; EXPRESSED IN FETAL LIVER, SIGNAL = 2.8; EXPRESSED IN ADULT LIVER, SIGNAL = 2.6; EXPRESSED IN BRAIN, SIGNAL =   2; EXPRESSED IN BONE MARROW, SIGNAL = 2.3; EXPRESSED IN LUNG, SIGNAL = 2.7; EXPRESSED IN HBL100, SIGNAL = 2.2; EXPRESSED IN PLACENTA, SIGNAL = 2.3; EXPRESSED IN HELA, SIGNAL = 2.5
ttgaaagtgaaccctccagctccagtcaagccttcagattactacatcccaggccaacattttgactgcaacctcatcagaaacataagctaagttgcttccaaatttctaatccataaaaactgtgcaagataataaatgcttatagttgttttaagccatgaaattttggagtcatttgttaatacagcaatagataactaatacagatgaagtaaactatactctgaacccagtagaagagagagctcataacatgaaaaatggtacaaacaattcatgtatcatttaatacacgtaagtgtgaaaaatataaattaccagatttaagagacatgcagagacttcaaagtaatgggaaggagcagaagaaaaca

SEQ ID NO: 4673 - DNA, 412 bp, Homo sapiens
  MAP TO AC012002.2; EXPRESSED IN HELA, SIGNAL = 1.2; EXPRESSED IN HEART, SIGNAL =   1; EXPRESSED IN FETAL LIVER, SIGNAL = 1.1; EXPRESSED IN BT474, SIGNAL = 0.96; EXPRESSED IN BONE MARROW, SIGNAL = 0.92; EXPRESSED IN LUNG, SIGNAL = 1.5
cgtgtctctaaaaaccagaacaagaagacagacagtttaagagtgaaagctatttgctgacttagaccaagtgaaagccaacgctaaccaaaaaaacattttccatgtaaaaacattccttttaatatttcttaacctagagctctactcatcaaaaagagaaagagagaaaaaagattactgcttaaaatctcagcaaagggaacccagtacttaactagaccagctcccagagtgaccagatgcaaatctctttcacaaatagccacagggcagcacggcctcctctaggaacaccggccccaactgcccacccgcgggggcttccaggcctccaggtgccaagacatcccaccaggggccaaccacatgggacctctggggtagggcttccctacagtcagcctccaac

SEQ ID NO: 4674 - DNA, 388 bp, Homo sapiens
  MAP TO AC012062.1; EXPRESSED IN LUNG, SIGNAL = 8.7; EXPRESSED IN BONE MARROW, SIGNAL = 3.2; EXPRESSED IN HEART, SIGNAL = 5.1; EXPRESSED IN BT474, SIGNAL = 4.8; EXPRESSED IN FETAL LIVER, SIGNAL = 6.8; EXPRESSED IN ADULT LIVER, SIGNAL = 2.6; EXPRESSED IN BRAIN, SIGNAL =  11; EXPRESSED IN PLACENTA, SIGNAL =   5; EXPRESSED IN HELA, SIGNAL =  10; EXPRESSED IN HBL100, SIGNAL = 4.4
tggccatcatatctctgtgcagcagctgctgccaccctaatacttttagaggccctcataatcacaaactgtgctcaactcactctctacagctctcataatttccaaaatctattttcttcttcacacctgacacatatactttcttctccctggctccttcagctaaactcactctttgttgagtctcccacagttaccattgttctgggcccagacttcaatctgtcctcccacattattccagataccacacctgaccctcatgattgcatatctctgatccactggatgttcactccatttccccacatttccttcttccctatttctcactctgatcacacttggtttattgatggcagttccaccagtcctaatcgccatt

SEQ ID NO: 4675 - DNA, 424 bp, Homo sapiens
  MAP TO AC011186.2; EXPRESSED IN PLACENTA, SIGNAL = 1.5; EXPRESSED IN HELA, SIGNAL = 1.3; EXPRESSED IN HEART, SIGNAL = 1.5; EXPRESSED IN LUNG, SIGNAL = 1.4; EXPRESSED IN BRAIN, SIGNAL = 1.3; EXPRESSED IN HBL100, SIGNAL = 1.3; EXPRESSED IN BT474, SIGNAL = 1.3; EXPRESSED IN ADULT LIVER, SIGNAL = 1.4; EXPRESSED IN FETAL LIVER, SIGNAL = 1.5; EXPRESSED IN BONE MARROW, SIGNAL = 1.2
aaattgtgtacccattgttatctttttaaaaatgttctcattgctaataaaaatatataatttcaacttttgtgtatagaaggtgttgatatgtcttttaaaacttctagtaatcttaaggatttctgtatagaatatggaaatttaaagaaaaaaaatttagtcttcttaatgaaatcaatgttgattgggtgaagacaaacatcttcattctccccttcagtctggcctcttggcctcttcctgtaagcatccaagagtaaatcatatagcttgttaccgtacagtgaatttcagagggagatgatgatgatgatgatggtgatgatgatgatggtgatgacgatgatggtgatgatgatgatgatgatggtgatgatgacggtgatgatgatgatgatgatgatggtgatgatgatgatgg

SEQ ID NO: 4676 - DNA, 421 bp, Homo sapiens
  MAP TO AC011232.3; EXPRESSED IN LUNG, SIGNAL = 1.8; EXPRESSED IN BONE MARROW, SIGNAL = 1.5; EXPRESSED IN HELA, SIGNAL =   2; EXPRESSED IN FETAL LIVER, SIGNAL = 1.6; EXPRESSED IN BRAIN, SIGNAL = 1.9; EXPRESSED IN PLACENTA, SIGNAL = 1.3; EXPRESSED IN HEART, SIGNAL = 1.8; EXPRESSED IN HBL100, SIGNAL = 1.6; EXPRESSED IN BT474, SIGNAL = 1.7; EXPRESSED IN ADULT LIVER, SIGNAL = 1.5
ttcaaagaaaatgccaggaacttaccaaatcataaataaaatgttttatctaatgaattttttgttagtataattctaagcaatctctttgttatgattttgccccttttaggctggatcagtgcatgtaagaattcgacgagatgccaatgaacaaatggttcttgctcatgtgaccaacaggctgtacactctagtgtctactctaactgttcaaattttcaaggatgactggattaggcctgccttattgtctgggcctgttgcagccaatgtcctaaacttttcagatcatcacgtaatcccaatgcctcttttaaagggtactgatgatttgaacccagttacatcaactccagctaaacctagtagtccacctccagaattttcatttaacactcctgggaaaaatgtgaaccca

SEQ ID NO: 4677 - DNA, 421 bp, Homo sapiens
  MAP TO AH008338.1; EXPRESSED IN PLACENTA, SIGNAL = 1.1; EXPRESSED IN HELA, SIGNAL = 1.1; EXPRESSED IN HBL100, SIGNAL = 0.98; EXPRESSED IN HEART, SIGNAL = 0.96; EXPRESSED IN FETAL LIVER, SIGNAL =   1; EXPRESSED IN ADULT LIVER, SIGNAL =   1; EXPRESSED IN BONE MARROW, SIGNAL = 1.1; EXPRESSED IN LUNG, SIGNAL = 1.2
cctcaatatctccatcaagttcatcatagaagaatctatgacatttatatatttataaacttatcctatagcataaattttgtagctaatgaaaagctaaaccaactctaatttcttataacaaaaacataaccagtaataattaatatctgcagaatattccactttatgaaacaattgcactcacattatcttctttacagggtccacctggtgaagtcattcagcctttaccaatcttgtcctccaaaaaaacgagaagacatactgaaggcatgcaagcagatgcagatgataatattcttgattactcggatggaatggaagaaatatttggttccctcaattccctgaaacaagacatcgagcatatgaaatttccaatgggtactcagaccaatccagcccgaacttgtaaaga

SEQ ID NO: 4678 - DNA, 385 bp, Homo sapiens
  MAP TO AC011998.2; EXPRESSED IN PLACENTA, SIGNAL = 1.3; EXPRESSED IN HELA, SIGNAL = 2.2; EXPRESSED IN HEART, SIGNAL = 1.4; EXPRESSED IN LUNG, SIGNAL =   2; EXPRESSED IN BRAIN, SIGNAL = 2.1; EXPRESSED IN HBL100, SIGNAL = 2.2; EXPRESSED IN BT474, SIGNAL =   2; EXPRESSED IN ADULT LIVER, SIGNAL = 1.2; EXPRESSED IN FETAL LIVER, SIGNAL = 1.6; EXPRESSED IN BONE MARROW, SIGNAL = 1.2
cctaaagtcccttttccatccatgttaaatatactcaacagggcattgttcactaggttaaattctgcagagccatctgactccaaaagttgcattagtatatctgccactcgaggaagattttctccagtggtaaattgaggcagttctttaattgcttgacgtcaaatagatacatcttcatcttcacagaggtctaactgtgcattgatagcagaatcagccaattctgtaaaatgcttaaagaatttcagaataaattgagctgctaatcgtttttccttagtaccacctttcacaccatccagtatcacttgataggcatctttatgctggcccactcgctccgtggtatcggccatgatgccatagttgccgtaaagct

SEQ ID NO: 4679 - DNA, 443 bp, Homo sapiens
  MAP TO AC012064.1; EXPRESSED IN PLACENTA, SIGNAL = 3.2; EXPRESSED IN HBL100, SIGNAL = 3.4; EXPRESSED IN HELA, SIGNAL = 4.2; EXPRESSED IN HEART, SIGNAL = 2.8; EXPRESSED IN BT474, SIGNAL = 2.5; EXPRESSED IN FETAL LIVER, SIGNAL = 3.2; EXPRESSED IN ADULT LIVER, SIGNAL = 3.4; EXPRESSED IN LUNG, SIGNAL = 2.9; EXPRESSED IN BONE MARROW, SIGNAL = 3.3; EXPRESSED IN BRAIN, SIGNAL = 3.3
agaggatgtgtgacatgggcattttaactagtcttaagttagtattaagtactatggccagactgagtcctgttgggttttgttttgtttttgctgttatttgttttttagagatgtgctctctcatttctgttgcccaggctagtctcaaactcctgggctcaagtaattctcccacctcagcctcctgagtagctggaattacagacacgtactgccatgcctggctctcccactgtttttaaggttatgaaactcaagtattttctttccataatgtaggtaatcaatattatcaatgctgcccaggaaagtagtcccatgcctgtgacagaagccctagaccgtgtgctggaaattctaagaaccactgagttatattcaccacagtttggtgctaaagatgatgatccccatgccaatgaccttgttgggggcttaat

SEQ ID NO: 4680 - DNA, 397 bp, Homo sapiens
  MAP TO AL021921.1; EXPRESSED IN HEART, SIGNAL = 1.1; EXPRESSED IN BT474, SIGNAL = 1.2; EXPRESSED IN ADULT LIVER, SIGNAL = 1.1; EXPRESSED IN FETAL LIVER, SIGNAL = 0.92; EXPRESSED IN BONE MARROW, SIGNAL =   1; EXPRESSED IN HELA, SIGNAL = 0.97
tgcctgtgttctttccagtgttattttctggccaagaattacatcaaagtatttacatacatggtctccttcagtcttcgcagcagactgtgacatttaccccaattcacagataaggaagcagacactcagagaggccgacttgccccaggtcacacaattaaaaaggggatttgagaggccagcccaggtctgtgtgaccgcagatgggttcctctcagtcagtgggtccccacttctcacacagcagctgctcaataagtggtgaggctgttgggatccccttggatcacgcagcagcactccttcctgcccctgtgcccctgccaggctctgagcgccatctttgctgtggcccaggatgtagccaaagcagcctttggaggcaagtgaggag

SEQ ID NO: 4681 - DNA, 442 bp, Homo sapiens
  MAP TO AL021939.1; EXPRESSED IN LUNG, SIGNAL =   1; EXPRESSED IN HBL100, SIGNAL =   1; EXPRESSED IN HELA, SIGNAL = 1.2; EXPRESSED IN PLACENTA, SIGNAL = 1.2; EXPRESSED IN HEART, SIGNAL = 1.1; EXPRESSED IN BT474, SIGNAL = 1.4; EXPRESSED IN FETAL LIVER, SIGNAL = 1.4; EXPRESSED IN ADULT LIVER, SIGNAL = 1.6; EXPRESSED IN BONE MARROW, SIGNAL = 0.99
aacgacaagcaaagacagggtttaagaaaagaataaaagacaagacagggcagctgtgtgaataaagaaatggagatgcttggagcagcaacatcaatcattccacccatggctggtacctgataaaagctgtgcaactcaagaagaggagtttgctgaacagaagctgtgactctgcaaggccactaattaatgttaaaattgagcagagagttaagggaatcacacaatgtactgatcctgctttctcggaaatggcactggattgactggcttgctcccaggcattgcactgtgataaaacagatccagcttgacagggccatggaggggagggagaagaacccccggggacatacctggttggcaaagctggacctgacggttgccggaatgcactcatccaggttggcgtcctcaaagatgatggcaggattcttgc

SEQ ID NO: 4682 - DNA, 468 bp, Homo sapiens
  MAP TO AC007383.2; EXPRESSED IN LUNG, SIGNAL = 5.5; EXPRESSED IN ADULT LIVER, SIGNAL = 0.91; EXPRESSED IN BT474, SIGNAL =   1; EXPRESSED IN HEART, SIGNAL = 1.1
ctgcttcatcctgattctgcggcattccaaactgtggtatccttgggggttctcttaacattgctatggtgcagaagatttaaaatcaggtatggctgtggggccagaagtccctcagtgaaattctcaacttaaatctgccttatactctctgatttatcatttgggtttctttttttgtggtggccttttagctgatgttcacaaggaatagagtcacgtgatgtatgaagggaaacatatacacttctctgaggttgacaataagcccttgtgctcatatagccccaaactgtgcaagcagaggcgactcaacggctacgccttctgtatcagacacgttctggaggacaagactgcccccttcaagcaatgtgaatatgtggccaagtataacagccaacgctgcaccaaccccatccccaaatcagaggatcgtaggtaagggctaatcatgagaatcaatcc

SEQ ID NO: 4683 - DNA, 498 bp, Homo sapiens
  MAP TO AC007064.22; EXPRESSED IN HEART, SIGNAL = 1.1; EXPRESSED IN BRAIN, SIGNAL = 0.92
gcctcttaacaagtcacattcagcatctttactcattgttctgtgaaagtatatatgtatattttatgaacatgtcatactttttctgattgaaaaatatccaaccctattgcaggagtgacagtaattcctcagctgcttatttttattcttttcagttttctcgatgtttacataatagtacggtgcttctggctgattttcagtacgtcctggcaacactttgcctgactgccatgggtacaaatactgatagaagaggagcataaagccagtggccaataggtagcttatgatgagctgcacggcaattaatgagtcacaacaattcagcaaagttttccctccaaagaacctaaataccaatatcattatcacattttctaaaaactgaaagctgtagtgtaggattctatggccccacctctgtctcccgtcaattattttgtcatctgacaactgcagtttcactgctgaccagcaggagaagttgatggc

SEQ ID NO: 4684 - DNA, 462 bp, Homo sapiens
  MAP TO AL121578.1; EXPRESSED IN BT474, SIGNAL = 1.3; EXPRESSED IN HELA, SIGNAL = 5.8; EXPRESSED IN HEART, SIGNAL = 1.2
tgaaatgcctcaattaccctgtattcattagtagaagtgagtaagcaaagggtattctctaacccaagaaggaaatgcttcccctctaagcaaattttctgccttttttcctgatggtactagatctgctgtcttttctccagctgggattttatacaacaccagccaaacaagtgactcttgttttctttcctcaccctagacttccatgctcattataaagaacaggaactataattgaatgaaatgagttgattctgtgaagagatcattagaatgacactagaagcctttttccatcttgtttattccagaccagccttaacagcatgatgagcgtttacagtgaaacgggagactatggcaacgtgaaagtcagtggtgaaatccttctccatatcagctactgctacaaaactggtgggctgtacatttttgtcaagaattgcagaaatctggcca

SEQ ID NO: 4685 - DNA, 384 bp, Homo sapiens
  MAP TO AC010809.2; EXPRESSED IN PLACENTA, SIGNAL = 1.1; EXPRESSED IN HELA, SIGNAL = 0.98; EXPRESSED IN HEART, SIGNAL = 1.2; EXPRESSED IN ADULT LIVER, SIGNAL =   1
tgtgcattcttgccattagctcaaatgccctatttaagtccactactgttagttaagctgctattagggaataaatgactaaaagcaactgggagaaagaggaaaacctaagactttcacaactgaaatcatctgctcctgggtgcattttgctaactacagttgagaagccaaaattcttccagaatgaagaagtctgggctacaggtgactagcttctgccaccagaagatcagcctaatgtgcaccaaccgatgtgatctcttctcaggtggaacagcctttgaggtccaagaaggccgtctggcacaaactgttatcaaagcaacggaaacgggcagtggtggcctgtttcaggatggcccctctctacaacctgcccag

SEQ ID NO: 4686 - DNA, 381 bp, Homo sapiens
  MAP TO AL009172.1; EXPRESSED IN BT474, SIGNAL = 1.6; EXPRESSED IN HBL100, SIGNAL = 1.4; EXPRESSED IN HELA, SIGNAL = 1.6; EXPRESSED IN HEART, SIGNAL = 1.8; EXPRESSED IN FETAL LIVER, SIGNAL = 1.5; EXPRESSED IN BRAIN, SIGNAL = 1.8; EXPRESSED IN LUNG, SIGNAL = 1.1; EXPRESSED IN BONE MARROW, SIGNAL = 1.8; EXPRESSED IN PLACENTA, SIGNAL =   2; EXPRESSED IN ADULT LIVER, SIGNAL = 1.8
ttatagggcacagaaaggcgaggtaggacgtattcacaaggatgaagaatggccgagccaggattcgaacccgagaactgtggctccagaaaacaagccttaatctgttaaacatcggaggccgcgcatgcgctgacacgcccctgctatgaacgccacgtcccagccaaactgcaccccggatgtcgtccccacttctcgctccaaggagcgcggggccggactctgaacgcctcgcccgccaattcaaagggttggccctaactttgaacgccccacccaccacgtggaatgttccaaacgccccgccccccgcactgtcactcaccgcaagtcccgctgcagcacgtcactgatgaaggtctcgtagcgcagcacttt

SEQ ID NO: 4687 - DNA, 435 bp, Homo sapiens
  MAP TO AL022097.1; EXPRESSED IN PLACENTA, SIGNAL = 2.7; EXPRESSED IN HEART, SIGNAL = 2.7; EXPRESSED IN FETAL LIVER, SIGNAL = 2.8; EXPRESSED IN ADULT LIVER, SIGNAL =   3; EXPRESSED IN BT474, SIGNAL = 2.6; EXPRESSED IN BRAIN, SIGNAL = 2.9; EXPRESSED IN BONE MARROW, SIGNAL = 3.2; EXPRESSED IN LUNG, SIGNAL = 2.8; EXPRESSED IN HBL100, SIGNAL =   3; EXPRESSED IN HELA, SIGNAL = 2.7
gagtgagtgaaggtgacaggccacgaatgggccactcgcgagtgtgtcgggagccgtgggtcatgacagacccaagtacgtgcccctgggtttgatataaaaagagaataagggtagaaaagaaacaaagctcatatctatatatttcatttatttacatgccgtttgatttctagcttgttcaaccctagttattgcaaatatcaagtgtagtatcatgggtcatgggaaaaggctgctggattcaaaactcggctttgtgtgcacccttggacacgctgcagacccttccaggcctcagtgtcttcatcttcttcatctatgatgtggaataattgcaggatccgctcataggcttgttgagaacatcgaacaggacaatgcctgtgaaccgctgtcacaagcctctcagtcacgtttactgcacaggtggag

SEQ ID NO: 4688 - DNA, 477 bp, Homo sapiens
  MAP TO AC008283.2; EXPRESSED IN HELA, SIGNAL = 0.59; EXPRESSED IN ADULT LIVER, SIGNAL = 0.71; EXPRESSED IN HEART, SIGNAL = 0.81; EXPRESSED IN PLACENTA, SIGNAL = 0.6; EXPRESSED IN FETAL LIVER, SIGNAL = 0.67
aaaagccataatgcaaagctcatttactccaaaattctggaaaaccaatgtaatgtaaaggagtcaggcgtatttgtgtgccttactgttgttgttcatgcatacgtataaatgccatggtaagagtattacaacaccagcataaaaaatattaaccatgggctttaaattgttagttatgctgggtgataacctatctcttttgttttttatattgaaaagaagcaaaatatttaatcattaattacctagtcaaaaacactggtttcacagttaacaatttttaatattttctaatgattttactgacctcactttccatttctattaaagccaaaatgacaatagtacgtgatagtacagtggaagcccctgcagtcagacatcatgatgatatgtcctgtgataaagtacatgtagatataaatgaggctgggtaaatttccttctttctcttccttccctctcctctcagga

SEQ ID NO: 4689 - DNA, 348 bp, Homo sapiens
  MAP TO AL030998.1; EXPRESSED IN BONE MARROW, SIGNAL = 1.5; EXPRESSED IN HEART, SIGNAL = 1.3; EXPRESSED IN FETAL LIVER, SIGNAL = 1.8; EXPRESSED IN ADULT LIVER, SIGNAL = 1.8; EXPRESSED IN BT474, SIGNAL = 1.7; EXPRESSED IN LUNG, SIGNAL = 1.3; EXPRESSED IN PLACENTA, SIGNAL = 1.2; EXPRESSED IN HELA, SIGNAL = 1.6; EXPRESSED IN HBL100, SIGNAL = 1.4; EXPRESSED IN BRAIN, SIGNAL = 1.6
acgttgtatgtctggggtgggtgcatttttttttttttaataattagccaagttgtggtgctttgagttttttgagtctgtggtttaatatctgtcaacaattttggaaaattatcagccattttatttgaagtctttcttctgtcacatatttcttttccttatacaattagaattgcatttatattagggagtttgatattatcccacagatcctggatgatatatttcattttcttccttttctttttcctagtgtttcagtttggacgagttttatcgacatatctttaaggtcactaatgattttctcagctgtgtcaagtctcctgataaggccaataaaga

SEQ ID NO: 4690 - DNA, 482 bp, Homo sapiens
  MAP TO AL009173.1; EXPRESSED IN HELA, SIGNAL = 1.4; EXPRESSED IN PLACENTA, SIGNAL = 2.2; EXPRESSED IN HBL100, SIGNAL = 1.3; EXPRESSED IN HEART, SIGNAL =   1; EXPRESSED IN BT474, SIGNAL = 0.92; EXPRESSED IN ADULT LIVER, SIGNAL = 1.2; EXPRESSED IN FETAL LIVER, SIGNAL = 1.2; EXPRESSED IN LUNG, SIGNAL = 1.7
tgcctttatccattgctgtggcatcccacacaatattatctctaaccataggacacatttatagtaataagttcacacccacagaattaactggacttatatggcctactaaagattaatttgttatttgaaatagaaaaaaaaaacctggaaggttaggatgctgtggtaaacgatacaatatgtggcttaaaccacgtggccaataagtggtgcaatttctttcataacaaagaattaaagggtaggtgggagtggctcttcttaatagtacagttcataatttccttgaacattttttttcccattttcacagtcttggtcttggtatatttggaaatcctagtgtacaagggaagaatacttccaccagaaaaaaagaaaaaacagatcatgggtttgatgagcaggaagctgagactaccccagtggccttttcttgagctcctgatgccactaaatcaacaggcacagaagggagt

SEQ ID NO: 4691 - DNA, 402 bp, Homo sapiens
  MAP TO AL031003.1; EXPRESSED IN BT474, SIGNAL = 2.3; EXPRESSED IN BRAIN, SIGNAL = 2.2; EXPRESSED IN HELA, SIGNAL = 1.6; EXPRESSED IN HEART, SIGNAL =   2; EXPRESSED IN FETAL LIVER, SIGNAL = 2.2; EXPRESSED IN LUNG, SIGNAL = 1.8; EXPRESSED IN BONE MARROW, SIGNAL = 2.4; EXPRESSED IN PLACENTA, SIGNAL = 2.1; EXPRESSED IN HBL100, SIGNAL = 1.9; EXPRESSED IN ADULT LIVER, SIGNAL = 2.1
ctactgggttatccctgggcagccatttccagagcctcacgtccatacactcttcactggagcccagtgggcagctctgtgctcacggtgctgggcaactgtatatctgtgcccttatatatatgtcatctccttccatcccccaaagtcccactggcattaccaacctagagcagtctggaacaaaacacgctgtgccatcccactcagggcactgaggctaggctgtacaccaggaagttacagcctgccctctgccagtccaatgagggacggcacactcaccatcacgcctggcgccagggtcggccgcttcctgtagtagtcaccgtgggagagcttcaggttgaggagcagggcgcagtgtgcagctgtgtagaggctgtctgcgttcatcagcat

SEQ ID NO: 4692 - DNA, 405 bp, Homo sapiens
  MAP TO AL022396.1; EXPRESSED IN PLACENTA, SIGNAL = 6.2; EXPRESSED IN ADULT LIVER, SIGNAL = 6.6; EXPRESSED IN BT474, SIGNAL = 5.3; EXPRESSED IN HBL100, SIGNAL = 6.3; EXPRESSED IN HELA, SIGNAL = 6.6; EXPRESSED IN HEART, SIGNAL = 4.3; EXPRESSED IN FETAL LIVER, SIGNAL = 5.5; EXPRESSED IN BRAIN, SIGNAL = 6.4; EXPRESSED IN LUNG, SIGNAL = 5.6; EXPRESSED IN BONE MARROW, SIGNAL = 5.6
attgtctctgtctgccctggctcctgatgacttctccggagagagggctgagatggggtcagagagaggaacaacagcaaggtgcctgtgggcacctccatttcagggaggttcctcttcacctgcaatgtggggccatgggtgcttttcaagtgcatataagaagacttggagtccaccctggagagtgcttctctggctgaactcccaatctagtctgcgtgaaggaaggcagatttcttctgataacaatactttgacccaaatctctgccaaacagtgacctggggctatgacgctacgtctagtcagattccctcttcaatacgaatggtaccatgttccaatcattccttctggagtcggaacagaggaatattttgttcgttgtcctgttggagacaa

SEQ ID NO: 4693 - DNA, 484 bp, Homo sapiens
  MAP TO AL049871.2; EXPRESSED IN FETAL LIVER, SIGNAL = 0.67; EXPRESSED IN BRAIN, SIGNAL = 0.68; EXPRESSED IN LUNG, SIGNAL = 1.3; EXPRESSED IN HEART, SIGNAL = 1.1
cgaattctgtgaaaatgagggtttcttaactcacactgagagcggaaaggggcagacccttttcataactccctcaagtgtgtgttacctttctttaccagcatggtaagcaacaggacatatcccagcctcggacatgtctgtatgatccaaggtacccaaagtcagacagagtaaactcaagcctggcactggctttctgccgcttcatgtgctttggaaaaagcaggagaagcaatagcagcaggagtccccagcagctggagccgcaagaatgaactgcaaagagggaactgacagcagctgcggctgcaggggcaacgacgagaagaagatgttgaagtgtgtggtggtgggggacggtgccgtggggaaaacctgcctgctgatgagctacgccaacgacgccttcccagaggaatacgtgcccactgtgtttgaccactatgcaggtaagaaaaagtgggaaactctctgcatccag

SEQ ID NO: 4694 - DNA, 444 bp, Homo sapiens
  MAP TO AL031114.1; EXPRESSED IN PLACENTA, SIGNAL = 1.2; EXPRESSED IN ADULT LIVER, SIGNAL = 1.3; EXPRESSED IN BT474, SIGNAL = 1.5; EXPRESSED IN HELA, SIGNAL = 1.3; EXPRESSED IN HBL100, SIGNAL = 1.4; EXPRESSED IN HEART, SIGNAL = 1.2; EXPRESSED IN FETAL LIVER, SIGNAL = 1.1; EXPRESSED IN BRAIN, SIGNAL = 1.3; EXPRESSED IN LUNG, SIGNAL = 1.1; EXPRESSED IN BONE MARROW, SIGNAL = 1.5
ttgctcacttctattttctggaagagattttaaagaattggtatcatttcttccttaaatttttggtaggattcaacctaccaaacactatttcagcttagtgagttctgttttaagaggatattaattattgattcaatttcatcaattgatattggcatactcagattatctgtttctccttgtatgagttttggtagtttgagtctttcaagaaattggtccgtttcatataagtttcatttcatcaaaatcatgggcatagagctgttcataacatttctttattatccttttgatgttcataggctcagtagtgatagctcctctttcatttatgatattagtaatttgtatcttccttctttctttcttagatagcctgattagaggtttatccattttatggatcttttcaaagaaccagcttttggtttcattgat

SEQ ID NO: 4695 - DNA, 453 bp, Homo sapiens
  MAP TO AL031120.1; EXPRESSED IN BRAIN, SIGNAL = 2.6; EXPRESSED IN BONE MARROW, SIGNAL = 2.9; EXPRESSED IN HEART, SIGNAL = 2.7; EXPRESSED IN FETAL LIVER, SIGNAL =   3; EXPRESSED IN ADULT LIVER, SIGNAL =   3; EXPRESSED IN BT474, SIGNAL = 2.9; EXPRESSED IN LUNG, SIGNAL =   3; EXPRESSED IN PLACENTA, SIGNAL = 3.2; EXPRESSED IN HELA, SIGNAL = 2.9; EXPRESSED IN HBL100, SIGNAL = 3.2
actgccaaattgggtctctgaggttgtaaaactcagaaaaggatattgcaagcattctggccatattacaaatctcatgtgagagctcactctgaatcaaaggagctctcacattcttttttagtccaagtgattcctagatgtggaagccgatttcctggaacactcaaacgaggtcacagttcatcagctgcctcccataaaccaaccctctcaagtttcaactctcatttgaaacttcttgggatatcttgatccaaacagatcacctgaaaagctcccttataaggtcaagtgatcacaggggtcttcttcttcttcttctttttattgtgataaaattcatcatttttcccatttttaagtgtacagttcagtggcattaagtacattcacattatattgcagtcatcaccacgatccatcttcagaacgttttcatcttcccaaagc

SEQ ID NO: 4696 - DNA, 425 bp, Homo sapiens
  MAP TO AL023279.1; EXPRESSED IN BRAIN, SIGNAL = 5.6; EXPRESSED IN BONE MARROW, SIGNAL = 6.2; EXPRESSED IN HELA, SIGNAL = 7.1; EXPRESSED IN HEART, SIGNAL =   6; EXPRESSED IN BT474, SIGNAL = 7.4; EXPRESSED IN ADULT LIVER, SIGNAL = 5.9; EXPRESSED IN FETAL LIVER, SIGNAL = 5.7; EXPRESSED IN LUNG, SIGNAL = 5.5; EXPRESSED IN PLACENTA, SIGNAL = 8.3; EXPRESSED IN HBL100, SIGNAL = 6.3
ataaagtgctccctcccagcacacacccctattgcactcaacacttcccagatgacctcctcggggacacagctgccctttatgaagatcatactgagaataagaatcaggagacagttcttgggcatgccctggtcatcaatcaggcttccctcataggtgaggtctaatgtgtcttcaaagaaataggagtggttgtcggggtccatatcagtcagggcaatgccaaaaattagctctatgaactcatgggctttcccgaagatcatgggaaaatagtccttatacttcttgatgacagtcgtcagcatctctgcctttgtgacaggctcttttgtttgatatttgaggagaagaaactgcaccaactcagccaccttttcatccagggcatacctgggcaaggattcactttctggcaaggc

SEQ ID NO: 4697 - DNA, 410 bp, Homo sapiens
  MAP TO AC011421.2; EXPRESSED IN PLACENTA, SIGNAL = 1.3; EXPRESSED IN HEART, SIGNAL =   2; EXPRESSED IN BRAIN, SIGNAL = 2.3; EXPRESSED IN LUNG, SIGNAL = 2.5
gcacttttctttcattgggggaaggcgtgaggaaagtaacaaacagcagcggagttttaaactttaaatagacaggtctgagtgcctgaatttgccttttcattttacttcatcctccaaggagttcaatcacctggcgtgacttcacttcttttaagcaaaagagtggtgcccaggcaacatgcgtgactggagcactttaggcaaactccttgacaaggttcaagcctacttaactgctggagggaaggtgtggctgtcagtacttttcattttccaaatcctgctgctgaagacagtggttgagtcagcctggggagatgagcagtctgcctttcgttgtaacactcagcaacctggttgtgaaaatgtctgctatgacaagtctttcccaatctctcatgtgcgct

SEQ ID NO: 4698 - DNA, 467 bp, Homo sapiens
  MAP TO AL022334.1; EXPRESSED IN HBL100, SIGNAL = 3.6; EXPRESSED IN PLACENTA, SIGNAL = 3.5; EXPRESSED IN ADULT LIVER, SIGNAL = 3.3; EXPRESSED IN HELA, SIGNAL = 3.4; EXPRESSED IN HEART, SIGNAL = 3.2; EXPRESSED IN FETAL LIVER, SIGNAL = 3.2; EXPRESSED IN BT474, SIGNAL = 3.4; EXPRESSED IN BRAIN, SIGNAL = 3.7; EXPRESSED IN LUNG, SIGNAL = 3.2; EXPRESSED IN BONE MARROW, SIGNAL = 3.7
aaaggcagtgtggagagagcctggatccttcttgataatctccccccagagggttcattaggtaagcactattgtccttacagcccagtcgccattgctttgattttctgcaacttgaagctgaaagcattctttactgattgggtgaggatgccttcacctccttaggaagcacataggaagttcaggcacaaggagacaggagggaaagcgctgacctatgggtcagccaacatggactctccctgactccaccaccaattagtggcctgacccagggcaaagtcacttcctctcactccattttcttcctgggaaaatgaggggctgcatgacagcagtggcgtctcctaacagtgactcacaagccccccaaagcctcagtgagctgcctgaacttttactgatgccagtgaggggtggagagggtccatactgagctcaattgtgacggtttggaggtgact

SEQ ID NO: 4699 - DNA, 402 bp, Homo sapiens
  MAP TO AL022344.1; EXPRESSED IN BT474, SIGNAL = 2.2; EXPRESSED IN LUNG, SIGNAL =   3; EXPRESSED IN BRAIN, SIGNAL = 1.7; EXPRESSED IN BONE MARROW, SIGNAL = 1.4; EXPRESSED IN HBL100, SIGNAL = 3.7; EXPRESSED IN HEART, SIGNAL = 2.8; EXPRESSED IN FETAL LIVER, SIGNAL = 2.7; EXPRESSED IN ADULT LIVER, SIGNAL = 2.8; EXPRESSED IN PLACENTA, SIGNAL = 3.4; EXPRESSED IN HELA, SIGNAL = 3.1
tgtctcggttagctgcacacagtgtccacagaatgatgaacagaggtggtaaaggtaaaatgggatcacacctgtgtctccatgccaacaatgacttcctagcacaggatgcattttcatgcagttaatattcatttggatcgtgggttgcctctagtcttagtgcttaggatgcgagtgtgtggtgtctgagagcattctgatactcaccggcttttgtccttgtcagatccttgcactgctggatgctctgagtacggtgcatagtcagaagatgaagaaggccaaggagcagcggcacctgcacaataaagagcacttcagagccaagcagaaggaggaggaggagaagctgaagcggcagaaggacctcaggaagaagctcttcagaattcaggggca

SEQ ID NO: 4700 - DNA, 462 bp, Homo sapiens
  MAP TO AJ239323.2; EXPRESSED IN HBL100, SIGNAL = 1.9; EXPRESSED IN HEART, SIGNAL = 0.93; EXPRESSED IN BRAIN, SIGNAL = 0.94; EXPRESSED IN BT474, SIGNAL = 1.1; EXPRESSED IN FETAL LIVER, SIGNAL =   1
ccctgcatgagtaagaattggaagaatcaaacaaaatgcatgagatcagtaatctgcagaaataaactctttctcagaaagtggtacaatgttagtagcttctacaatggaaagatccaaaataatggtggcttcaataagatgggagtttatttttcccgcacataaaggtctaagccattacggtggctctactctttaaaattgtcagggatccaacctgcttctgtcttcttgctccatccactctctgacattactctcatcttcatggtcagattggctcaccacttaccttcattctagtcaatgagaagggtgaaagctgacatgtataaattgtgggaagaaacacccttagagtggagatggctgcatcaggatcgtagaacttgataataatctcagatcttgttacacagctccctttgtttactactgtggaacagaagcagcatttga

SEQ ID NO: 4701 - DNA, 447 bp, Homo sapiens
  MAP TO AL031000.1; EXPRESSED IN LUNG, SIGNAL = 1.2; EXPRESSED IN BRAIN, SIGNAL = 1.3; EXPRESSED IN BONE MARROW, SIGNAL = 1.1; EXPRESSED IN HBL100, SIGNAL = 1.7; EXPRESSED IN HELA, SIGNAL = 1.2; EXPRESSED IN HEART, SIGNAL =   1; EXPRESSED IN BT474, SIGNAL = 1.5; EXPRESSED IN ADULT LIVER, SIGNAL = 1.1; EXPRESSED IN FETAL LIVER, SIGNAL = 0.96; EXPRESSED IN PLACENTA, SIGNAL = 1.3
tgcctcaattataggagcagatgtattatggtaaatactgagatcagaaagcatgtgtaactgtgtcatagagtgattacatccaggcattattgccagccaagatcgataaatatgaccaataagtataattgttctctgtgtcagcccttgttgagggaatactcacagcagtggtgatcactgctattatggctatgattaaattactcatggtgactggttgtcctgctttcctcaggttttcttctgctatctgtgacagcttcttgatctgtccgcaggtagttggctgtgttcaataggtgttgcttgtgacagttggggtcctcctcagcatcagtcttgacatggctgcaactggggggttctcgggttcctcccagagtctcttatttggcatctggctcatgataaggctttagatgtcttgatggcacccaaatt

SEQ ID NO: 4702 - DNA, 451 bp, Homo sapiens
  MAP TO AL022477.1; EXPRESSED IN BRAIN, SIGNAL = 1.9; EXPRESSED IN BONE MARROW, SIGNAL = 2.2; EXPRESSED IN HBL100, SIGNAL = 1.9; EXPRESSED IN PLACENTA, SIGNAL = 1.9; EXPRESSED IN FETAL LIVER, SIGNAL = 1.9; EXPRESSED IN LUNG, SIGNAL = 1.9; EXPRESSED IN HEART, SIGNAL = 1.6; EXPRESSED IN HELA, SIGNAL = 1.8; EXPRESSED IN ADULT LIVER, SIGNAL = 1.9; EXPRESSED IN BT474, SIGNAL = 2.2
tttttccacttgtccagcttctaaaggaatagaaaagcccagtaaagactgatggatttcacataatgactaacatctataaattactgctgtcatatataacctccttgaagaatgcatcatccctctgcaaaaaattcaaaagtgatggttaaaatttcaaaatattaaaatacaaatgaaaacatggccaaatattcacgaagaaagggtgatgtcctagtctgctcaagctgccataacaaaaaaaataccaaatgtattaaataacaaaaaatttattttcttaaagttctgatggctggtaagttcaaggtcaaggttcttgtcaactcagttcctagtgagggctcacttccaggcttgcagacaaccaccttttggctgtgtccttacatggtaaagagaaagagagacagtaagctctctggtgtttcttcttatatgggca

SEQ ID NO: 4703 - DNA, 451 bp, Homo sapiens
  MAP TO AL020993.1; EXPRESSED IN BT474, SIGNAL = 1.2; EXPRESSED IN HEART, SIGNAL = 0.82; EXPRESSED IN ADULT LIVER, SIGNAL = 0.67; EXPRESSED IN HELA, SIGNAL = 1.5; EXPRESSED IN LUNG, SIGNAL = 0.91; EXPRESSED IN HBL100, SIGNAL = 1.1; EXPRESSED IN PLACENTA, SIGNAL = 0.67; EXPRESSED IN BRAIN, SIGNAL = 0.97; EXPRESSED IN FETAL LIVER, SIGNAL = 0.66
ccagtgaggatgtgagcagggccacagctgctcctgcagggcaggggtagcgacacaaggccacagcctccggaaaccccactctcccagctctttgccaccgaaactgagatgccagcaattacgcagggtctcctgggccctctcatccatgtagcggccccaccaaagctctccctagcccctgggaaaggccctcgagggctcagatttcacccccagcaagtgcccagtgggctgaggcccctctgaacaggccctacaggcaccagggaccataagcagaaggggcagcaggaagcgcagaggacagggtggcatgggcagcctccaggtgctgggagggggctcaccttgccagaaggaaagaaagatgacggacttgaccatgaagaacttgaggacggggctgtaggggctgagcagctcccgggtggcgaagtagaagagg

SEQ ID NO: 4704 - DNA, 459 bp, Homo sapiens
  MAP TO AL034424.9; EXPRESSED IN BRAIN, SIGNAL = 0.74; EXPRESSED IN HELA, SIGNAL = 0.61; EXPRESSED IN ADULT LIVER, SIGNAL = 0.71; EXPRESSED IN LUNG, SIGNAL = 0.64; EXPRESSED IN HEART, SIGNAL = 1.3; EXPRESSED IN FETAL LIVER, SIGNAL = 0.61
cctgtctcagatttttggggttcacaggggccaccatggcttcagcacttctctgctcctgtcagttgcccttttaacaaggagaggcccagaaccttctccaggcagctgctatcagggagagcttaattcttttgtttttgccgctttgcatttatttttaggtttactggccatggcatatattaataataccggttttccattgatggatgcactggaaacatttcttctggaatattcttattcaagtttttttttgttttttttttttaatgtcaagctgatttagtaaaggtgttaaataaatattaccacggacgggtgggggacatactgcgtgtgctgtcctgcctctcttctaagggcacagaggtggaagccctggcaccttcggaggattagagggagtcgggccgacatgttggggaaactgggggaggattgggtctccctttg

SEQ ID NO: 4705 - DNA, 426 bp, Homo sapiens
  MAP TO AL022578.1; EXPRESSED IN PLACENTA, SIGNAL =  11; EXPRESSED IN HEART, SIGNAL = 9.2; EXPRESSED IN ADULT LIVER, SIGNAL =   7; EXPRESSED IN LUNG, SIGNAL =  11; EXPRESSED IN BRAIN, SIGNAL =  10; EXPRESSED IN BONE MARROW, SIGNAL =  10; EXPRESSED IN HBL100, SIGNAL =  12; EXPRESSED IN HELA, SIGNAL =  10; EXPRESSED IN BT474, SIGNAL =  10; EXPRESSED IN FETAL LIVER, SIGNAL =  10
acatcaccctggcaaatgtcatccgacagctgggcagcctgagtaaatatgcagaggacatttttggagagctctttactcaggcaaatacctttgcctctccggtaagctcccttgctgagagggtcgatggactacaagttaaagtcactcagctggatcccaaggaagaagaagtgtcactgcaagtaatcaacacccgaaaagccttcagaagctccaccattcaagaccagaagctttttgacagaaactctctcccagtgcctgtcttagaaacatacaatacctgtgatactcctccccctctcaacaatcttaccccttacagggacgatggaacagaggcactcaaattctacacagacccttcatacttctttgatctttggaagaagaagatgctgcaggacaccagggatatca

SEQ ID NO: 4706 - DNA, 426 bp, Homo sapiens
  MAP TO AL023283.6; EXPRESSED IN BONE MARROW, SIGNAL = 1.5; EXPRESSED IN PLACENTA, SIGNAL = 1.2; EXPRESSED IN HEART, SIGNAL = 1.2; EXPRESSED IN LUNG, SIGNAL = 1.3; EXPRESSED IN BRAIN, SIGNAL = 1.3; EXPRESSED IN HELA, SIGNAL = 1.3; EXPRESSED IN HBL100, SIGNAL = 1.4; EXPRESSED IN ADULT LIVER, SIGNAL = 1.2; EXPRESSED IN BT474, SIGNAL = 1.4; EXPRESSED IN FETAL LIVER, SIGNAL = 1.4
ccattgtccttttctaagccacaaaaaaatttttggtcatgtaccacttatttgctcttatccaataatttactgagttttattagttatctgtctgtcttacttgtcccagtagattaggatggcgatcatgcccaaacctcacagtgacgaataatagcactaggcacagaggtgatgttaagtaaatctgttgtgtttcattttataatacactaaagcaaagacaatcttgactggcaaactgtgcaggatgcaggtaacaaaaaggaaaatgaaaatggattccacaattccagggaagttaaggagaacctgcttagggagcttggggtggagaagagagaatggtattacagtagggagaaagggcccttgattcatgatgcccagtttagagatacctgtggttatgcctgtgatccc

SEQ ID NO: 4707 - DNA, 411 bp, Homo sapiens
  MAP TO AL031228.1; EXPRESSED IN BRAIN, SIGNAL = 1.3; EXPRESSED IN BONE MARROW, SIGNAL = 1.2; EXPRESSED IN HBL100, SIGNAL = 1.3; EXPRESSED IN HELA, SIGNAL =   1; EXPRESSED IN PLACENTA, SIGNAL = 1.2; EXPRESSED IN HEART, SIGNAL = 1.1; EXPRESSED IN BT474, SIGNAL = 1.1; EXPRESSED IN FETAL LIVER, SIGNAL = 1.3
ttgaaaggcagggctctaagcatcattgtgggggttggccaaggtcacagttgtgtcatgggccacgctatgagcaggtgttctgggagggtggtgaaactcatggtgagtggtgcactgtgggtaggagggactgaaggtagagtcacatcacatggaggtgggttggctaaggaagttgggaggttgtgttggttgggccaggaggtgggtgtgattttccttcccactctctcctagatcacacgccgctatgcagagttctcctccgctcttgtcagtatcaaccagacaattcctaatgaacggaccatgcaattgctgggacagctgcaggtgagggtcggacaggagacacttcccagcagcagggctgcttccagtgggtggagtctgaggaggagccagatg

SEQ ID NO: 4708 - DNA, 420 bp, Homo sapiens
  MAP TO AL031447.4; EXPRESSED IN PLACENTA, SIGNAL =   6; EXPRESSED IN HEART, SIGNAL = 5.3; EXPRESSED IN ADULT LIVER, SIGNAL = 8.8; EXPRESSED IN LUNG, SIGNAL = 6.8; EXPRESSED IN BRAIN, SIGNAL = 5.8; EXPRESSED IN BONE MARROW, SIGNAL = 7.1; EXPRESSED IN HELA, SIGNAL = 6.6; EXPRESSED IN HBL100, SIGNAL = 6.4; EXPRESSED IN BT474, SIGNAL =   6; EXPRESSED IN FETAL LIVER, SIGNAL = 5.6
tcccaagacaaatggctacagttctaactttatcattgtctttgaaagaatttcatttttgcagtgtttgtaacctgtttgaagacctctggtcccaattgttttaaccttaaggagccatcctccttttcaacttttaaacacttttggaaaaacacagttaagtaaaaaatgaagttgttaataaatagtttttttcttgcagtccatatatggaggtcagtgttctgagatcttcatccttccagaacagccatgaaactagaagtacaaaagtatcacctaccagtaaaaagtttaccccaagtccctgcattttcattccttctctggtacagggtagatcattattttcacaattgtgtgttgttggggtttccttagctgcaggttacagccacagagtgaggcccaacagtt

SEQ ID NO: 4709 - DNA, 435 bp, Homo sapiens
  MAP TO AL031584.1; EXPRESSED IN BT474, SIGNAL =   7; EXPRESSED IN FETAL LIVER, SIGNAL = 5.8; EXPRESSED IN BRAIN, SIGNAL = 6.3; EXPRESSED IN BONE MARROW, SIGNAL = 7.6; EXPRESSED IN HBL100, SIGNAL = 7.1; EXPRESSED IN PLACENTA, SIGNAL = 6.9; EXPRESSED IN HEART, SIGNAL = 5.6; EXPRESSED IN LUNG, SIGNAL = 7.2; EXPRESSED IN HELA, SIGNAL = 6.6; EXPRESSED IN ADULT LIVER, SIGNAL = 7.9
gaggctttcagcagcatttcgatctatccatatgttatggtttgggccaaattaaccagccaatttcagatctgttttttttttttggaaagcttaggtatatattcacttgaactttctgtcaaatcacagcttgaagaagctatctccaaactgcttttcatgtactggttaaattaaggatgcttctctcaggcagagctcatgttctcctaatttgggctggccatcctttcactggtgctcctcatgctgtgcctccttcttatctgcctctgaagcatcacgctgcctgtgacctttctggtgcccctctgtcttcaagtacctgggctcctggagggcctgggtcagggcctgagtgctcaggagcaggcgggaaaccacaccagagagcccctctcttcctgcccacgcctggagagtcaaggtcag

SEQ ID NO: 4710 - DNA, 448 bp, Homo sapiens
  MAP TO AL034345.3; EXPRESSED IN HEART, SIGNAL = 5.5; EXPRESSED IN ADULT LIVER, SIGNAL = 7.8; EXPRESSED IN LUNG, SIGNAL = 7.6; EXPRESSED IN BRAIN, SIGNAL = 6.7; EXPRESSED IN BONE MARROW, SIGNAL = 7.6; EXPRESSED IN PLACENTA, SIGNAL = 6.9; EXPRESSED IN HELA, SIGNAL = 7.4; EXPRESSED IN HBL100, SIGNAL = 6.9; EXPRESSED IN BT474, SIGNAL = 6.6; EXPRESSED IN FETAL LIVER, SIGNAL = 6.9
aggcctcatagagaaatgcgaatgaatccaaaagccattactgcacctcagatgtttggcagactggacactgctaccaatgactggacagatgggattttttctactctgtggagaaaaacattaaaagctaaaaaaggtatacacaaacctcctttgtgatcattttttccctgctagcgtattaacacagtatttttttgatttttccattttaattacttgcaagtgaaaagtgattttctgttttaattattttcaggtgaaaacattttcctcattttagatggtcctgtggatgccatctggattgagaacttaaattccgttttggatgacaataaaactctgacgttagctaatggagatcgcattcccatggcccctagttgtaagcttctgtttgaagtccacaatatcgagaacgcctctcctgccacggtttcta

SEQ ID NO: 4711 - DNA, 431 bp, Homo sapiens
  MAP TO AL031661.17; EXPRESSED IN BONE MARROW, SIGNAL = 5.3; EXPRESSED IN LUNG, SIGNAL = 5.5; EXPRESSED IN BRAIN, SIGNAL = 4.7; EXPRESSED IN PLACENTA, SIGNAL = 5.2; EXPRESSED IN HBL100, SIGNAL = 5.1; EXPRESSED IN HELA, SIGNAL = 5.4; EXPRESSED IN ADULT LIVER, SIGNAL = 6.9; EXPRESSED IN HEART, SIGNAL = 4.5; EXPRESSED IN BT474, SIGNAL = 4.7; EXPRESSED IN FETAL LIVER, SIGNAL =   5
aatatggtggtctctgtccccatggagccaccgtgagacttgtacatacagcctactttctcaaatctgtgtcaccattgattaaagacatcattattttaagcactattaaggaaaaaaatgctacaaattaaatcatgacacagtatttccttatgccttggaaattttattttctaattattaaaaagctcttttagatttatgtctatcacttttggcatacataaaaaattatatgcaatattactggttacgagctgcagtctctggggtgtccttccaggttgctgatccccactctgcaagttacttgcagacatcctcctgatcttatcagaagcatcaatacttttcagatcaaactcatgcatgttcaggcaatgcacctttgtcacaactgccacctggccaacagtgcttgtaagagg

SEQ ID NO: 4712 - DNA, 471 bp, Homo sapiens
  MAP TO AL034369.1; EXPRESSED IN BT474, SIGNAL = 8.4; EXPRESSED IN FETAL LIVER, SIGNAL = 8.4; EXPRESSED IN BRAIN, SIGNAL =   8; EXPRESSED IN BONE MARROW, SIGNAL = 9.4; EXPRESSED IN LUNG, SIGNAL = 8.9; EXPRESSED IN HBL100, SIGNAL = 8.6; EXPRESSED IN PLACENTA, SIGNAL = 8.6; EXPRESSED IN HELA, SIGNAL = 9.9; EXPRESSED IN ADULT LIVER, SIGNAL =  12; EXPRESSED IN HEART, SIGNAL = 7.3
ccttctgaagtccaacggagaggtttaagtgcttaaaaatagggctgcttgcttccctgcagctagctcctccgggggcaagagcaaagtcagaagtgggggacgctaattaaaggctcactaggctgtggtgggtatttaaaacttttcctcccctccctccaccgtcgggtgtttccctgcctggcgactaaccttttcactacttgtacccagcccactctttgaattttgtctgtagtttaatattttggctcttcgaaaatccagcttccatcaaagtgtttttagcgcctcagtgaagttcgtcccctttgctctttccttaagcaacaggaacctacccccacctcaggtcattcaagccactgacctccttttcccttttgacatccttgttacaaatgaaatgctaaggcaacataccaagaagagtgaggtaaagtctcaggcttcaggtcttttgcgtct

SEQ ID NO: 4713 - DNA, 409 bp, Homo sapiens
  MAP TO AL031664.1; EXPRESSED IN PLACENTA, SIGNAL = 1.9; EXPRESSED IN HELA, SIGNAL = 1.9; EXPRESSED IN HEART, SIGNAL = 1.9; EXPRESSED IN FETAL LIVER, SIGNAL = 1.6; EXPRESSED IN ADULT LIVER, SIGNAL = 2.2; EXPRESSED IN BT474, SIGNAL =   2; EXPRESSED IN BRAIN, SIGNAL = 2.3; EXPRESSED IN HBL100, SIGNAL = 1.8; EXPRESSED IN LUNG, SIGNAL = 1.6; EXPRESSED IN BONE MARROW, SIGNAL =   2
gcttcagcaaaggtggtctctcccatcatgaattctagtaagttttgctaggggaataaaattgtctttaaatcattacatcagcaaagatgtgggtgggatgcagaaaggagccagtaggaccgtctgtgcctctttcttgatccctggactgcacagtggccccagagcacctgagatctccaaccattccaagtacccagggcccaagccctcctccacctccttgtctcctgcgaactggggaacccaaacatggtgtcctctgctcaacgtgtccacaggcatccggatgctggaccagccattcatgacagacatcatcgaggcctcctccatcagtcatatgccacagctgattgacatctacagcgccagctggggccccacagacaacggcaagacagtg

SEQ ID NO: 4714 - DNA, 475 bp, Homo sapiens
  MAP TO AL035700.13; EXPRESSED IN HELA, SIGNAL = 0.62; EXPRESSED IN ADULT LIVER, SIGNAL = 0.69; EXPRESSED IN BRAIN, SIGNAL = 0.76; EXPRESSED IN PLACENTA, SIGNAL = 0.89; EXPRESSED IN HEART, SIGNAL = 0.86; EXPRESSED IN FETAL LIVER, SIGNAL = 0.63; EXPRESSED IN LUNG, SIGNAL = 0.63; EXPRESSED IN BT474, SIGNAL = 0.67
tccccactgaatggaatctccctggcatgaccaatcagttttttctaccccagaatttgaacattgaggggatgatgtagaaatacgaggtcagttggaggttgtttgtggcagtgagtgtccaggggtgatggggccaaccatagctgtggctggtgtccttatgcagctcatctggggtgtgacatgagtgtattcttggctacccagacagggaaattccttctgttttctaaactggtcctctagttttaatgtggagtcttgacaactcctatgatacctccataattcataattcctctccctcaaagttgctagtatctttctcagttatttgcatcaagaacccaaactggcacaacttattcttgttgattccctggagtggaatcaatccttactgtgagcaggattcttccttctctgagaatgtgggtgatgagattctaaaggtaaaggagccaacactttg

SEQ ID NO: 4715 - DNA, 452 bp, Homo sapiens
  MAP TO AL035416.7; EXPRESSED IN HBL100, SIGNAL = 0.96; EXPRESSED IN HEART, SIGNAL = 1.1; EXPRESSED IN BONE MARROW, SIGNAL = 1.1; EXPRESSED IN BRAIN, SIGNAL =   1; EXPRESSED IN FETAL LIVER, SIGNAL = 0.99; EXPRESSED IN BT474, SIGNAL = 1.3
gacaggtacagggaggtcaagttaaatgtatctataagtactccatttataaaattttaattaaaggtctcattttgggtttatgggttctaatgtgaaaatgtcctaataaaaattgagtattatccatgaactgcaagcccaaacaacaaacataaaagaagttaaaactatcagcctggattaaaaactgatcaatacttgatatacaggaataatcctatgaatccctgattaaaatatgaaatactcaaattgactaaatagctcagaaatggcataattatattttttaagacatgccatacctaagaacatctatttcatctttcagggctcttgtttcttctgcaagactagtcaattcatcattcctatgctggaattcgattagctgcttttcaagttcttcacagtgaacacggtaatcatcttttgcagcttcaagcctt

SEQ ID NO: 4716 - DNA, 454 bp, Homo sapiens
  MAP TO AL109823.11; EXPRESSED IN HBL100, SIGNAL = 1.3; EXPRESSED IN HELA, SIGNAL = 1.1; EXPRESSED IN FETAL LIVER, SIGNAL = 1.2; EXPRESSED IN BT474, SIGNAL = 1.2; EXPRESSED IN PLACENTA, SIGNAL = 0.91; EXPRESSED IN HEART, SIGNAL = 1.1; EXPRESSED IN ADULT LIVER, SIGNAL = 1.6; EXPRESSED IN LUNG, SIGNAL = 1.1; EXPRESSED IN BONE MARROW, SIGNAL = 1.1
gcatttagaaagcctttgccagattccccccatgtacagcttcctcacttcaggtaattgagtagtgtcctgtcttgttgacagagtgaatgcctttggatttcttgcttaatcaactcattgtttgtccacaggtgctggcttattctcagactctgtatattgggagagaaaccgttaacctcccccagaaatgtttgtagtcatacctgtgtgatttgtatattttctctattttttggtctcatttgtacttagacaaagaggcagctgaacgtctttcaaaaacagtagatgaagcatgtctgttactagcagaatataacgggcgcctggcagcagaactggaggaccgtcgccagctggctcggatgttggtggagtatacccagaatcagaaagatgttttgtcggagaaggagaaaaaactagaggtgagtgcattgaaggcaga

SEQ ID NO: 4717 - DNA, 450 bp, Homo sapiens
  MAP TO AL118508.9; EXPRESSED IN BONE MARROW, SIGNAL = 2.1; EXPRESSED IN PLACENTA, SIGNAL = 2.5; EXPRESSED IN HBL100, SIGNAL = 1.7; EXPRESSED IN HELA, SIGNAL = 2.1; EXPRESSED IN FETAL LIVER, SIGNAL = 2.8; EXPRESSED IN BT474, SIGNAL = 2.1; EXPRESSED IN LUNG, SIGNAL = 2.9; EXPRESSED IN BRAIN, SIGNAL = 1.7; EXPRESSED IN HEART, SIGNAL = 1.8; EXPRESSED IN ADULT LIVER, SIGNAL = 2.5
tctgagagcatgtggagcaccctttatgacacaaacaagagctcaaggatggtggctggggttcagtctgccgctgcaaataccaaaagctgtcctcattgagtcatccctcccagagcaggaagagcagaggttctgggaaacaaccccaaggagagagacagggcatttgtgagctgtgcagcctccctgctgggacatagggaactctagctggagatgagcagggcctgagtctgagggtggccctgctgaaagcacagtaataggagttataatcagctaagagcaggaaatctactttatttttctaatgttattctttgctttctagataaaacagcatgtaagcatctctgcagttgctgtccccagagcccacttcctggatattgccagctgcctggaccaacctttccgaaagatcagccaggtcacagtgagggtcaa

SEQ ID NO: 4718 - DNA, 373 bp, Homo sapiens
  MAP TO AL132766.1; EXPRESSED IN PLACENTA, SIGNAL =   6; EXPRESSED IN HBL100, SIGNAL = 5.6; EXPRESSED IN HEART, SIGNAL = 6.2; EXPRESSED IN BT474, SIGNAL = 5.9; EXPRESSED IN FETAL LIVER, SIGNAL = 5.9; EXPRESSED IN BONE MARROW, SIGNAL = 4.3; EXPRESSED IN HELA, SIGNAL =   4; EXPRESSED IN ADULT LIVER, SIGNAL = 4.8; EXPRESSED IN BRAIN, SIGNAL = 4.3; EXPRESSED IN LUNG, SIGNAL = 5.8
aaacattgttattgtttttccacagttaaaatctgtgtcttaacaaagttgtcaaaatattgaagaaatgcgaaactgggtaatgggtgcccgtggatacattatactactctctctctgtttatgtacattaaaaataaatctgtaatgcaaaagtcacagcagaaatgaaaaacagacccttctattccctttgagatactacactaattctcacatgccacaaatacctcagaaagtatcaacactgcgctctcattaatgttggtacttttattttctcttgaatttattacattcaggtttttgcccagcactccatggaaactactcttgtcaaggtcactaatgatgtttcctttgctaaatccaa

SEQ ID NO: 4719 - DNA, 430 bp, Homo sapiens
  MAP TO AL109938.4; EXPRESSED IN BT474, SIGNAL = 1.3; EXPRESSED IN BRAIN, SIGNAL = 1.4; EXPRESSED IN PLACENTA, SIGNAL = 1.1; EXPRESSED IN HELA, SIGNAL = 1.2; EXPRESSED IN HBL100, SIGNAL = 1.4; EXPRESSED IN ADULT LIVER, SIGNAL = 1.7; EXPRESSED IN FETAL LIVER, SIGNAL = 1.3; EXPRESSED IN LUNG, SIGNAL = 1.5; EXPRESSED IN BONE MARROW, SIGNAL = 1.4; EXPRESSED IN HEART, SIGNAL = 1.2
gggagagagaaggggacaagaaagctgcagaaatgaaacaaacagctgtgacacatgcaattcaaagattaccacaaagtaatctttgaacacttactatttgtcaggcacgatatacaacagtttatgtttataatcttatttaatcctcacagtaatcttatgtggaacagactcataaagatgaagaagcaaagcaaagagaaggtaaatgacttgcccaagaaacaaatctgataagtgacaaagttaggactcaaatccagtgcccatgctctcatccactgtgcaatggttaactgcagagatggtggtgctgcaaaccgagacctcaacacatgctgggcagcaggtgtggatgggggaagatatgtcattttgcagtcttaagttggaagtggtgtagaggtgtttgatcggagcctggtag

SEQ ID NO: 4720 - DNA, 375 bp, Homo sapiens
  MAP TO AL132773.1; EXPRESSED IN FETAL LIVER, SIGNAL = 0.96; EXPRESSED IN ADULT LIVER, SIGNAL = 1.5; EXPRESSED IN LUNG, SIGNAL =   1; EXPRESSED IN HBL100, SIGNAL = 1.6; EXPRESSED IN PLACENTA, SIGNAL = 1.4; EXPRESSED IN BT474, SIGNAL = 1.6; EXPRESSED IN BRAIN, SIGNAL = 1.3; EXPRESSED IN BONE MARROW, SIGNAL = 1.2; EXPRESSED IN HEART, SIGNAL = 1.5; EXPRESSED IN HELA, SIGNAL =   1
tttgcttataattaaaactattcagggtcccagaatatttccttctgcttctgaaatctgggttatactcttctttgcatgcttgaaatcaatacttcatctgttttcatgactacttcacacatctcagcaatgaactatgcctcctatggtttctctcacaataaactctgaataccacctaattcacctgtgaacttaccaggcctttcacagacactaccattgagtgggttgatgcaggttgcagccttcagtccccgagtactgggttctgataaaattccacagaatccagcatcactgggctcagacggcatccactgtagtaaactatttgtaaatggggacatatcttcccagcaccagtaggac

SEQ ID NO: 4721 - DNA, 472 bp, Homo sapiens; identical to SEQ ID NO: 279
  MAP TO AP000009.2; EXPRESSED IN FETAL LIVER, SIGNAL = 1.6; EXPRESSED IN BONE MARROW, SIGNAL = 1.8; EXPRESSED IN LUNG, SIGNAL = 2.1; EXPRESSED IN HELA, SIGNAL = 1.8; EXPRESSED IN PLACENTA, SIGNAL = 1.1; EXPRESSED IN HEART, SIGNAL = 0.98; EXPRESSED IN BT474, SIGNAL = 4.5; EXPRESSED IN ADULT LIVER, SIGNAL = 1.4

SEQ ID NO: 4722 - DNA, 446 bp, Homo sapiens
  MAP TO AL118496.10; EXPRESSED IN HEART, SIGNAL = 2.8; EXPRESSED IN BT474, SIGNAL = 2.6; EXPRESSED IN BRAIN, SIGNAL = 2.7; EXPRESSED IN PLACENTA, SIGNAL =   5; EXPRESSED IN HELA, SIGNAL =   3; EXPRESSED IN HBL100, SIGNAL = 2.8; EXPRESSED IN ADULT LIVER, SIGNAL =   4; EXPRESSED IN FETAL LIVER, SIGNAL = 3.5; EXPRESSED IN LUNG, SIGNAL = 3.1; EXPRESSED IN BONE MARROW, SIGNAL = 2.7
gaaaacccgagcacagagaggttaattaactagctcaaagtcacacagccactaagacgggaccccagtcctcagacaagcctacagtattgttagttgttggcgtcaattgtgctgagccgagggaggcagcaggcacaaggaacacgggaacagccaaagacagcgccatccccagcgcctatcctacccacgttgtttgtggagatgaacattcacactgtgggatctgagaggggagagggcggtaaggggaggagtatcccatgcggcagcagaacgtggtttatagccttcattccctcaaatatgtgtgtgagaagtatgggggcagctggttggtcctgagctctaatttcacccattggaacatgaaaaactggacctgtgaaaacgttgccctcatccctgaagaggtgagacgtactgccaaggtctctattgcc

SEQ ID NO: 4723 - DNA, 430 bp, Homo sapiens
  MAP TO AL121759.5; EXPRESSED IN FETAL LIVER, SIGNAL = 2.1; EXPRESSED IN HBL100, SIGNAL = 2.3; EXPRESSED IN HEART, SIGNAL = 1.8; EXPRESSED IN PLACENTA, SIGNAL = 1.3; EXPRESSED IN ADULT LIVER, SIGNAL = 2.4; EXPRESSED IN BT474, SIGNAL = 2.2; EXPRESSED IN BRAIN, SIGNAL = 1.5; EXPRESSED IN LUNG, SIGNAL = 1.5; EXPRESSED IN BONE MARROW, SIGNAL = 2.2; EXPRESSED IN HELA, SIGNAL = 2.5
gccatggtggaaagaaactgacttattgttatcattttcctcctccataaactattttccaaactaggtattatggagtgtccctctcaatctgcccccctcactcaggcacacaccccaagcacaggcatgtgtgcacacatgcatgtacaatgacatctcaaatttcccatatcgttaggtgagttcagcctttcccctgacttgaggctcatccattcttccatccaccaccaccattcctgccaggctcccttctgaccccccgaggccattatcaccagcaggcccatggctttgacaccaactatctccacctcccaaaccagccacttgctgatgctccacctcttctggtagaagtttcaacctgagccttgaaggccctctgagaaataacaccagtagcacaggtgtgataggctccaca

SEQ ID NO: 4724 - DNA, 389 bp, Homo sapiens
  MAP TO AL109810.4; EXPRESSED IN PLACENTA, SIGNAL = 2.2; EXPRESSED IN HELA, SIGNAL = 2.9; EXPRESSED IN HBL100, SIGNAL = 2.1; EXPRESSED IN HEART, SIGNAL = 2.5; EXPRESSED IN FETAL LIVER, SIGNAL = 2.9; EXPRESSED IN ADULT LIVER, SIGNAL = 1.7; EXPRESSED IN BT474, SIGNAL = 3.5; EXPRESSED IN BRAIN, SIGNAL = 2.1; EXPRESSED IN BONE MARROW, SIGNAL = 1.7; EXPRESSED IN LUNG, SIGNAL = 2.8
tttgggcattcataccactggtgtttgccctggcaccctcccaagcttgagagaggcttctctccctcctagaccacatcccagcctcccccttgtgttcagcaatgtgagtgatgtgaatgtcttgagcaaggtcatagggccagcatttcctcttgcttactcatctatcactaattcattcactcattcaattacagttttgaggacctactatgtataacacactgctaggctctgaggatagaacagtgtgcaagaccgacatggtcttcacccttaacactgtgctttctggccagggagcaaaccacagaaaagtaaataaacagaaggtgagagaattgcagattgtgaaaagttctttcaggaaaggaaaagaaccaggg

SEQ ID NO: 4725 - DNA, 456 bp, Homo sapiens
  MAP TO AL118501.4; EXPRESSED IN BONE MARROW, SIGNAL = 0.98; EXPRESSED IN LUNG, SIGNAL = 1.7; EXPRESSED IN PLACENTA, SIGNAL = 1.2; EXPRESSED IN HELA, SIGNAL = 1.2; EXPRESSED IN HEART, SIGNAL = 1.3; EXPRESSED IN HBL100, SIGNAL = 1.1; EXPRESSED IN FETAL LIVER, SIGNAL = 1.2; EXPRESSED IN ADULT LIVER, SIGNAL = 1.3; EXPRESSED IN BT474, SIGNAL = 1.3; EXPRESSED IN BRAIN, SIGNAL = 1.2
tgcttacacaggcactggtctggccccttctggaaggaagctggataagcctgtcccctgtttcccctgcagcttttctcttgagaaagagaaataggactgttctgggcaccatatgtttttttctcaccgtcatccttctcagcatgaaggaagaggttgggcaggagctgtgcaaagaaggagaataagttcagggggcaggggaaaggcacttgaaaaggcaagagatgggtgcggctcttctggaaaacaggcagatctttcttctgcctcttcagctcagcttgtccctggctggctctgactttgtgccctcttctttgacgtgggaaggatgatgggcgccagctcctgtgccgggggtgaggaactgcctgagaagtgcttggtctgaggccagcaagtgcaaagtgtgcagcaggactcgctccatcccctttgatgtcaggaatg

SEQ ID NO: 4726 - DNA, 466 bp, Homo sapiens
  MAP TO AC005537.2; EXPRESSED IN ADULT LIVER, SIGNAL = 0.78; EXPRESSED IN BRAIN, SIGNAL = 1.1; EXPRESSED IN HEART, SIGNAL = 0.79; EXPRESSED IN BONE MARROW, SIGNAL = 0.64; EXPRESSED IN FETAL LIVER, SIGNAL = 0.61; EXPRESSED IN PLACENTA, SIGNAL = 0.8; EXPRESSED IN LUNG, SIGNAL = 0.66
tctagctttggggaacatggctgcctcagcaaccatcttatctgctccctctaccccaccgttttgcaaggaggaacgggcattggtttctttctcacactgtcactaccttctcccctttcctttaccattttttcatttgctcttcacttccagtctcccttgcgatcttcttcctttctttctggccagcctctgacttctgcagagtggttccctccacccagacaaaaccctggactgatgccaggcacagggtatgtgacctatgcttccatctcctcttccgtccctgggactgtggccatagatattcacctccatcaggttccactgataaaggagaaggagaggacacagttcatagaaaaggaagctctggccaaactggaagccaccaaacccagggtgtggctcctagagtattgccatctctcaggagccttccaaggcttatcccgtaaca

SEQ ID NO: 4727 - DNA, 372 bp, Homo sapiens
  MAP TO AL109836.12; EXPRESSED IN ADULT LIVER, SIGNAL = 1.7; EXPRESSED IN BRAIN, SIGNAL = 2.4; EXPRESSED IN BONE MARROW, SIGNAL = 1.7; EXPRESSED IN PLACENTA, SIGNAL =   2; EXPRESSED IN HBL100, SIGNAL = 2.2; EXPRESSED IN FETAL LIVER, SIGNAL = 2.4; EXPRESSED IN BT474, SIGNAL = 3.5; EXPRESSED IN LUNG, SIGNAL = 1.8; EXPRESSED IN HEART, SIGNAL = 1.5; EXPRESSED IN HELA, SIGNAL = 2.5
tcatcaccactacgccttccttacaagaaatgctaaatggagttctgtaagttgaaatgaaaggatgctaagtaacattataaaaccacataaaagcataaaactcactggtgatggtaaatacataaatcaaatgtagaatattctagtactgtaatgttggtatgttatgcattgtttttctaattgtatttagttttctatctgtgttttattgcatcaagctgatttctttaaaatagttgctttgaattattattcaataaatttgtataccttgatttctttagggtcatttactggaactttatgagtttccttggtgttgtcatgtttgcctgattcttcgtcacctatgtgcctgtgcatttg

SEQ ID NO: 4728 - DNA, 345 bp, Homo sapiens
  MAP TO AL118511.6; EXPRESSED IN BT474, SIGNAL = 1.7; EXPRESSED IN ADULT LIVER, SIGNAL = 1.7; EXPRESSED IN BRAIN, SIGNAL = 1.7; EXPRESSED IN BONE MARROW, SIGNAL = 1.4; EXPRESSED IN PLACENTA, SIGNAL = 1.8; EXPRESSED IN HELA, SIGNAL = 1.8; EXPRESSED IN HBL100, SIGNAL = 1.5; EXPRESSED IN FETAL LIVER, SIGNAL = 1.3; EXPRESSED IN LUNG, SIGNAL = 2.6; EXPRESSED IN HEART, SIGNAL = 1.6
ataaggcaccatcccatctgaggacgcgctggtaaaggccactcacctgtgcaaacttgggttccgagaacagggtgtcttccccatcgtcctgcctgacatcaggagatggcagcttcccctcgagctgggagggggcagcctcgtgcagtgcactgctgaaggcctggacaggctggggtctctcacgttcggtgctcacgttgggaagaggacgctgctcctgacggagggtgctgggcctttccaccttggcctccctgtccttcggggcaggttcctgccggtagcagggaggcaagaccttttcccccttctccatggacttgatctggctaggggtca

SEQ ID NO: 4729 - DNA, 473 bp, Homo sapiens
  MAP TO AC007366.2; EXPRESSED IN PLACENTA, SIGNAL = 0.59; EXPRESSED IN LUNG, SIGNAL = 0.64; EXPRESSED IN HELA, SIGNAL = 4.7; EXPRESSED IN HEART, SIGNAL = 0.92
tccatcaatccatctgtcaatctatctattttgtatgtttgaggagaccaaaattgagttccttctgcctaaatgggaaagcaagtttttatccctccaggcccctgaatagaaatgagaatgcttccatttctaaaccaaggctttggaagcatttagcaccatcagggaatggggagacatgggaggctgatgatcagcatgacaggcttctggttctctgtcccgatggtctcctctgtgcaaaactgactcttgacttttcacctcagtttctaagacccaccgtgatctgagcaacatgtaacatcaaaaatccagtttggtggctcatgtaggtcaacaggaaagtcatctttagctactggtcttccttctgcttttccctcttgcttatgtaattgtgccccacacaggtttgtatgtccctccactctttcctcaaaaattcttgccatttgatgtcctaggct

SEQ ID NO: 4730 - DNA, 426 bp, Homo sapiens
  MAP TO AP000067.1; EXPRESSED IN BONE MARROW, SIGNAL = 1.3; EXPRESSED IN BRAIN, SIGNAL = 0.99; EXPRESSED IN PLACENTA, SIGNAL = 1.9; EXPRESSED IN BT474, SIGNAL = 1.2; EXPRESSED IN FETAL LIVER, SIGNAL =   1; EXPRESSED IN LUNG, SIGNAL = 1.3; EXPRESSED IN HEART, SIGNAL = 1.8; EXPRESSED IN HELA, SIGNAL = 1.1; EXPRESSED IN HBL100, SIGNAL = 1.1; EXPRESSED IN ADULT LIVER, SIGNAL = 1.2
aaaaagagacagctccacggcgctggcttgtcccagacagtcagtgaagagaagctctgggcagggagaaagttaaataaaaagctgttggtaacatgctctgtgtgtgtgtgtgtgtgtgtgtgtgtgtgtgtgtgcatgcaaaaggaagacgcttggcatgcccctcttctagggaaaggaagatcaagggggttagtataagaagaagaagaaggacagaatggagtcaaagtgagtcctcacagacaactccctgcctttccatgattacaacaacctcctcctctcctccatctccatccctctgcattcgcttcctcctccatcttctccccctcctccttttccttctcctccatctcctccccctcctccttttcctcctcctccttcttttcctcttgcatctcctccctctcctct

SEQ ID NO: 4731 - DNA, 474 bp, Homo sapiens; identical to SEQ ID NO: 665
  MAP TO AC007286.17; EXPRESSED IN ADULT LIVER, SIGNAL = 0.68; EXPRESSED IN BRAIN, SIGNAL = 0.82; EXPRESSED IN PLACENTA, SIGNAL = 0.7; EXPRESSED IN FETAL LIVER, SIGNAL = 0.65; EXPRESSED IN LUNG, SIGNAL = 0.7; EXPRESSED IN HELA, SIGNAL = 0.83; EXPRESSED IN HEART, SIGNAL = 0.84; EXPRESSED IN BT474, SIGNAL = 0.62

SEQ ID NO: 4732 - DNA, 436 bp, Homo sapiens
  MAP TO AL121754.8; EXPRESSED IN BONE MARROW, SIGNAL = 1.2; EXPRESSED IN BRAIN, SIGNAL = 1.1; EXPRESSED IN PLACENTA, SIGNAL = 1.3; EXPRESSED IN BT474, SIGNAL = 1.2; EXPRESSED IN FETAL LIVER, SIGNAL = 1.1; EXPRESSED IN LUNG, SIGNAL = 1.3; EXPRESSED IN HEART, SIGNAL = 1.4; EXPRESSED IN HELA, SIGNAL = 1.1; EXPRESSED IN HBL100, SIGNAL = 1.3; EXPRESSED IN ADULT LIVER, SIGNAL = 1.7
tcgggatgcctgacttgtagaagtaatcacatgtccttaggagtatcacttagcctctttgggcttcattttcctttttcagtaaaacgaaggcattagacttaactgatcactaaagaactttctcattattaacattttaaataatttgtcattttatggcttctatacattctttcatttaacatattttctgagcatctgttatgtacacagcagtcttactggcacttgtaaaacattaacaatagattccttagagagcctaggccataaggcatctgtttccttgtctctctccagcagctcttcccttttgttcccaataacaacagtcacttggaccatggtaacttatctgcatctccattttatgtggctttgctgggtctgccagtcacggtgacattgcagcccagcccaggtatgagcatgt

SEQ ID NO: 4733 - DNA, 374 bp, Homo sapiens
  MAP TO AP000014.2; EXPRESSED IN BONE MARROW, SIGNAL = 2.1; EXPRESSED IN BRAIN, SIGNAL = 1.9; EXPRESSED IN BT474, SIGNAL = 5.8; EXPRESSED IN FETAL LIVER, SIGNAL = 1.6; EXPRESSED IN LUNG, SIGNAL = 1.9; EXPRESSED IN PLACENTA, SIGNAL = 2.6; EXPRESSED IN HEART, SIGNAL = 1.9; EXPRESSED IN HELA, SIGNAL = 1.6; EXPRESSED IN HBL100, SIGNAL =   2; EXPRESSED IN ADULT LIVER, SIGNAL = 1.6
tcccttgtcatgctaggagctggggagtggcttgcagacaccatttcacaatgaagagtgggtcgtggtttgataggcacctgttgtctatggccataccactctgaacatgcccaatctcctctgataggcacccattcctcgtggatggggaaggtgggggtgctgccagggctgtgcccaagtgcctggttccattttttcccccaacaccagacagcagccaatatcccaggacagctctggggctcctacaagctgggagctgttcctgaaaacccactcagctctctgctcctgaagcctctgaatgggtacgggctattgttttatgcgggaaattatctgtcaaaagaaacgccttctgtgttcct

SEQ ID NO: 4734 - DNA, 457 bp, Homo sapiens
  MAP TO AL121763.5; EXPRESSED IN BT474, SIGNAL = 1.6; EXPRESSED IN ADULT LIVER, SIGNAL = 1.4; EXPRESSED IN BONE MARROW, SIGNAL = 1.7; EXPRESSED IN FETAL LIVER, SIGNAL = 1.3; EXPRESSED IN LUNG, SIGNAL = 1.8; EXPRESSED IN BRAIN, SIGNAL = 1.6; EXPRESSED IN PLACENTA, SIGNAL = 2.1; EXPRESSED IN HBL100, SIGNAL = 1.6; EXPRESSED IN HELA, SIGNAL = 1.6; EXPRESSED IN HEART, SIGNAL = 1.8
tctagcatcttcaggagccacatgcatcctggtacattgttattttatctacatatcagtcttttcctacaaatgatgaattcaagtgggacagcggctgtgttaggtcacctctgcagagcttggctaggaggagaagcacagtaaacacgagtgaataaatgaagtcctttctagacctagcacctgtagggagagcaaaggtgtatagatttattacaaattttcaaaaataaaaccatggtaaaatgccatacctgatagaaatgtggccagaaagtgctgatggcgagctctgccttcacccagccctcagtgacgaccccggacacattccacacagggttcccttgggggccaccattcaccttcacgtagacgttcaaggcccctgggctggacctgtcacggctggagaagtagtaatggaagtcgatgcagtgggtgtcattctcct

SEQ ID NO: 4735 - DNA, 430 bp, Homo sapiens
  MAP TO AP000351.3; EXPRESSED IN BONE MARROW, SIGNAL = 4.6; EXPRESSED IN HBL100, SIGNAL =   7; EXPRESSED IN ADULT LIVER, SIGNAL = 4.7; EXPRESSED IN BRAIN, SIGNAL = 2.8; EXPRESSED IN LUNG, SIGNAL = 3.6; EXPRESSED IN PLACENTA, SIGNAL = 2.9; EXPRESSED IN HEART, SIGNAL = 2.8; EXPRESSED IN HELA, SIGNAL = 5.8; EXPRESSED IN BT474, SIGNAL = 4.8; EXPRESSED IN FETAL LIVER, SIGNAL = 3.6
agccacctgagcaatagtccagaagataagcagggcgggcagtgaagaagcacagttttgagatggacatttaaagcaccagccatcgcatggagcactgccaagggacccctcaggcccttcctggaggagtcccaccagccaggccttatgaaagtgatcatactaggcaggcattggtgtggggccagtcaccccagccctctctccctcactcgcggcacctgccccctcctctttgtgaacaccagcaggtacctccttgtgcctccgctgatgcaggagcagctgccccaaggggagtaacccctgccagcacaccctgcagctgagggccaggaagtggacaagaatgaaccctttcttccaaatgatcagctcttccagcccctgctgggggccccacgaccccttccttaggttgacgtgc

SEQ ID NO: 4736 - DNA, 435 bp, Homo sapiens
  MAP TO AL122023.1; EXPRESSED IN HBL100, SIGNAL = 3.4; EXPRESSED IN HELA, SIGNAL = 5.4; EXPRESSED IN BT474, SIGNAL = 5.7; EXPRESSED IN LUNG, SIGNAL = 4.7; EXPRESSED IN BRAIN, SIGNAL = 5.2; EXPRESSED IN BONE MARROW, SIGNAL =   5; EXPRESSED IN PLACENTA, SIGNAL = 4.1; EXPRESSED IN HEART, SIGNAL = 2.4; EXPRESSED IN ADULT LIVER, SIGNAL = 5.9; EXPRESSED IN FETAL LIVER, SIGNAL =   5
ttacagttctggagggtgggaggtccaagaccaccccaatatctggtgagggccttcttgctgtgccctaacatggctgagggcaccacatagcaagagggcaagaacatgcgtgtcagctcaggtctctcttcctcttataaagccaccagccccattatggtggccccaccctgatgattttatctaatcctaattactttccaaaggccctacgttcaactgacatacagatttggggattaagttcccaacacatgcaatgtggggaacagcaaatcatagtagacatctataataaaaaattaagtaatacatatgaggtccttatcatagaagacatagtgaagaatgctcaccaaactggtaaggggaatggtggagaggaagaaggaaacgatgactgaggtttctaccttgcataactgggtggtt

SEQ ID NO: 4737 - DNA, 1971 bp, Homo sapiens
  MAP TO AB019441.1; EXPRESSED IN PLACENTA, SIGNAL = 1.1; EXPRESSED IN HEART, SIGNAL = 2.8; EXPRESSED IN FETAL LIVER, SIGNAL = 1.8; EXPRESSED IN BONE MARROW, SIGNAL = 1.6; EXPRESSED IN BRAIN, SIGNAL =   2; EXPRESSED IN HELA, SIGNAL = 1.9; EXPRESSED IN HBL100, SIGNAL = 2.4; EXPRESSED IN BT474, SIGNAL = 3.3; EXPRESSED IN LUNG, SIGNAL = 0.97
cggtccggtgttctcaaggccgtcccttgtggcactatgcctcctccgaggtggtgattcccaggaaggagacacaccatagcaaaggccttcagtttcccggctggctgtcctacagcctgtgttttggggtcaaagacacgtcattcacatgcggaggaaacaccttctttggcctagacatctgctggtgacaactcaggatgaccaaggagtcttgcagatgggtgacccctacatccctccagactgctagtacctcggctacctggaggaggtgcctctgtccatggtcaccgtcgacacgtgctatggggacctcagaggcatcatgaggctggacgaccttgcgtacgaaatcaaacccctccaggattcccgcaggtttgaacatgttgtttttcagatagtggccgagcccaacgcaacagggcccacatttagagatgatgacaatgagacagaccccctgttctctgaagcaaatgacagcatgaatcccaggatatctaattcgctgtatagttctcatagaggcaatataaaaggccacgttcaatgttccaattcatattatcgcatatatggcaatattacaacttgttccaaagaggtggtccagatgttcagtctcattgacagcattgctcaaaatattgatctgcggtactatatttatcttttgaccatatataataatcgtgacccagcccctgtgaatgaatatcgaattcagagtgcaatgtttacctattttaaaacaactttttttgatacttttcatgttcattcatccacactacttattaaatacgtgccacatgaatctaactatgaacctgaaaggtataacttctgttcccgtatagccctgttacacattggtactccaggcagacattatttattggtagccgtcataataacccagacacagatgagaagtattggtctggagtatgatgataactactgcacatgtcagagaagggcctcctgcattatgcagcgatttcctgggatgacagatgcgttcagtaactgttcttatggacatgcacaaaattgttttatacattcaggccggtgtgtttttgaaacacttgctcctgtgtataacgaaaccatgacaacggttcgctgtggaaacctcatagtggaggggagggaggaatgtgactgtggctccttcaagcagtgttatgccagttattgctgccaaagtgactgtcacttaacaccggggagcatctgccatataggagagtgctgtacaaactgcagcttctccccaccagggactctctgcagacctatccaaaatatatgtgaccttccagagtactgtcacgggaccaccgtgacatgtcccgcaaacgtttatatgcaagatggaaccccgtgcactgaagaaggctactgctatcgtgggaactgcactgatcgcaatgtgctctgcaaggcgatctttggtgtcagtgctgaggatgctcccgaggtctgctatgacataaatcttgaaagctaccgatttggacattgtattagacaacaaacatatctcagctaccaggcttgtgcaggaatagataagttttgtggaagactgcagtgtaccaatgtgacccatcttccccggctgcaggaacgtgtttcattccatcactcagtgagaggagggtttcagtgttttggactggatgaacaccatgcaacagacacgactgatgttgggcgtgtgatagatggcactccttgtgttcatggaaacttctgtaataacacccagtgcaatgtgactatcacttcactgggctacaactgccaccctcagaagtgcggtcatagaggagtctgcaacaacagaaggaactgccattgccatataggctgggatcctccactgtgcctaagaagaggtgctggtgggagtgtcaacagcgggccacctccaaaaagaacacgttccgt

SEQ ID NO: 4738 - DNA, 443 bp, Homo sapiens
  MAP TO D87675.1; EXPRESSED IN BT474, SIGNAL = 2.8; EXPRESSED IN FETAL LIVER, SIGNAL = 1.2; EXPRESSED IN BRAIN, SIGNAL =   5; EXPRESSED IN BONE MARROW, SIGNAL =   1; EXPRESSED IN ADULT LIVER, SIGNAL = 1.1; EXPRESSED IN LUNG, SIGNAL = 4.3; EXPRESSED IN PLACENTA, SIGNAL = 3.8; EXPRESSED IN HEART, SIGNAL = 1.8; EXPRESSED IN HELA, SIGNAL = 3.4; EXPRESSED IN HBL100, SIGNAL = 2.4
tcttgtgagctgcgactttgcataagtagcttgaatgccatgtgcctcagttttcacatctgtaaaagggagatgataatggtacctatgtcatggctctaaacgcgatcatgcacgtgaaagcagttgaagtcttgcctggcagaagtaaatggtggctgctgctgctgctgctgttgtgattgttgttactcaccaaagagatggttttgtttggtttagatgagctgcttcagaaagagcaaaactattcagatgacgtcttggccaacatgattagtgaaccaaggatcagttacggaaacgatgctctcatgccatctttgaccgaaacgaaaaccaccgtggagctccttcccgtgaatggagagttcagcctggacgatctccagccgtggcattcttttggggctgactctgtgccagccaacacagaaaacgaa

SEQ ID NO: 4739 - DNA, 1981 bp, Homo sapiens
  MAP TO AC005074.1; EXPRESSED IN FETAL LIVER, SIGNAL = 1.2; EXPRESSED IN HELA, SIGNAL = 2.5; EXPRESSED IN BT474, SIGNAL = 2.8; EXPRESSED IN BRAIN, SIGNAL = 1.1; EXPRESSED IN LUNG, SIGNAL = 2.9; EXPRESSED IN BONE MARROW, SIGNAL = 0.93; EXPRESSED IN PLACENTA, SIGNAL = 0.99; EXPRESSED IN HEART, SIGNAL = 1.3; EXPRESSED IN HBL100, SIGNAL = 1.8
cagaactagttacatagcaaaaatgtctagtattaagtctggatgtcaagggaattttgtgttgacatgacaaaaacattagctaacattcatgtctttgttttttcagggacaaagtatctatgaagagatatgaatatgtagctttacctgaatagctggggaagagggcctttaagatgcttaaatgttgcttaagttagttttagattttaaaattaattttgctcctattcttaaattctagtatatgactctcaacccttctactaagaggaagaatactggatccccagacaggaagccctcaaagaaatccaagacagacaactcttctcttagttcaccactaaatcctaagttatggtgtcacgtacacttgaagaagtcattgagtggctcgccactcaaagtgaagaactcaaagaattccaaatctcctgaagaacatctagaagaaatgatgaagatgatgtcgcccaataagctgcacactaactttcacattcctaaaaaaggcccacctgccaagaaaccagggaagcacagtgacaagcctttgaaggcaaagggcagaagcaaaggcatcctgaatggacagaaatccacagggaattccaaatctcccaaaaaaggactgaagactcctaaaaccaaaatgaagcagatgactttgttggatatggccaaaggcacgcagaagatgacacgagccccacggaattctgggggtacacctaggacctctagtaaacctcataaacatctgcctcctgcagccctacacctcattgcatactacaaagaaaacaaagacagggaggacaagaggagcgccctgtcctgtgttatctccaaaacagctcgtcttctctctagtgaagatagagctcgtctcccagaagaattgcgaagtcttgttcaaaaacgctatgaacttctagagcacaaaaagaggtgggcttctatgtctgaagaacaacggaaagaatatttgaaaaagaaacgggaggagctgaaaaagaagttgaaggaaaaagccaaagaacgaagagagaaagaaatgcttgagagattagaaaaacagaagcggtatgaggaccaagagttaactggcaaaaaccttccagcattcagattggtggatacccctgaagggctgcccaacacgctgtttggggatgtggccatggtggtggaattcttgagctgttattctgggctacttttaccagatgctcagtatcctattactgctgtgtcccttatggaagccttgagtgcagataagggtggctttttataccttaacagggtgttggtcatcctcttacagaccctcctacaagatgagatagcagaagactatggtgaattgggaatgaagctgtcggaaatccccttgactctgcattctgtttcagagctggtgcggctctgcttgcgcagatctgatgttcaggaggaaagcgagggctcagacacagatgacaataaagattcagctgcatttgaggataatgaggtacaagatgagttcctagaaaagctggagacctctgaattttttgagctgacgtcagaggagaagctacagatcttgacagcactgtgccaccggatcctcatgacatactcagtgcaagaccacatggagaccagacagcagatgtctgcagagttgtggaaggaacggcttgctgtgttgaaggaagaaaatgataagaagagagcagagaaacagaaacggaaagaaatggaagccaaaaataaagaaaatggaaaagttgagaatgggttaggcaaaactgataggaaaaaagaaattgtgaagtttgagccccaagtagatacagaagctgaagacatgattagtgctgtgaagagcagaaggttgcttgccattcaagctaagaaggaacgggaaatccaggaaagagaaatgaaaggtaaaatttcatgctgagagaaaaggggaagc

SEQ ID NO: 4740 - DNA, 1988 bp, Homo sapiens
  MAP TO AC002086.1; EXPRESSED IN PLACENTA, SIGNAL =   1; EXPRESSED IN HBL100, SIGNAL = 1.5; EXPRESSED IN HEART, SIGNAL = 1.5; EXPRESSED IN FETAL LIVER, SIGNAL = 1.4; EXPRESSED IN BONE MARROW, SIGNAL = 1.3; EXPRESSED IN HELA, SIGNAL = 1.8; EXPRESSED IN BT474, SIGNAL = 2.1; EXPRESSED IN ADULT LIVER, SIGNAL =   1; EXPRESSED IN BRAIN, SIGNAL =   2; EXPRESSED IN LUNG, SIGNAL = 1.6
tgaactttggttaaaacttgaataaactatttaatgatgctactgcttaaattctaaataagtacttttgttttttctctctaatcctctcccatcccctcctctctttctcttaaaggcatggagagtagaaaactgatttctgctacagacattcagtactctggcagtctgctgaactccttgaatgagcaacgtggccatggactcttctgtgatgttaccgttattgtggaagaccgaaaattccgggctcacaagaatattctttcagcttctagtacctacttccatcagctcttctctgttgctgggcaagttgttgaactgagctttataagagcagagatctttgcagaaattctcaattatatctatagttctaaaattgttcgtgttagatcagatttgcttgatgagttaattaaatcagggcagttattaggagtgaaatttatagcagagcttggtgtcccattgtcacaggttaaaagcatctcaggtacagcgcaggatggtaatactgagcctttacctcctgattctggtgacaagaaccttgtaatacagaaatcaaaagatgaagcccaagataatggggctactataatgcctattataacagagtctttttcattatctgccgaagattatgaaatgaaaaagatcattgttaccgattctgatgatgatgatgatgatgtcattttttgctccgagattctgcccacaaaggagactttgccgagtaataacacagtggcacaggtccaatctaacccaggccctgttgctatttcagatgttgcacctagtgctagcaataactcgccccctttaacaaatatcacacctactcagaaacttcctactcctgtgaatcaggcaactttgagccaaacacaaggaagtgaaaaattgttggtatcttcagctccaacacatctgactcccaatattattttgttaaatcagacaccactttctacaccaccaaatgtcagttcttcacttccaaatcatatgccctcttcaatcaatttacttgtgcagaatcagcagacaccaaacagtgctattttaacaggaaacaaggccaatgaagaggaggaggaggaaataatagatgatgatgatgacactattagctccagtcctgactcggccgtcagtaatacatctttggtcccacaggctgatacctcccaaaataccagttttgatggatcattaatacagaagatgcagattcctacacttcttcaagaaccactttccaattccttaaaaatttcagatataattactagaaatactaatgatccaggcgtaggatcaaaacatctaatggagggtcagaagatcattactttagatacagctactgaaattgaaggcttatcgactggttgcaaggtttatgcaaatatcggtgaagatacttatgatatagtgatccctgtcaaagatgaccctgatgaaggggaggccagacttgagaatgaaataccaaaaacgtctggcagcgagatggcaaacaaacgtatgaaagtaaaacatgatgatcactatgagttaatagtagatggaagggtctattatatctgtattgtatgcaaaaggtcatatgtctgtctgacaagcttgcggagacattttaacattcattcttgggagaagaagtatccgtgccgttactgtgagaaggtatttcctcttgcagaatatcgcacaaagcatgaaattcatcacacaggggagcgaaggtatcagtgtttggcctgtggcaaatctttcatcaactatcagtttatgtcttcacatataaagtcagttcatagtcaagatccttctggggactcaaagctttatcgtttacatccatgcaggtctttacaaatcagacaatatgcatatctttccgatagatcaagcactattcctgcaatgaaggatgatggtattgggtataaggttgacactggaaa

SEQ ID NO: 4741 - DNA, 1976 bp, Homo sapiens
  MAP TO AC002368.1; EXPRESSED IN LUNG, SIGNAL = 5.2; EXPRESSED IN PLACENTA, SIGNAL = 4.5; EXPRESSED IN BRAIN, SIGNAL =   3; EXPRESSED IN BONE MARROW, SIGNAL =   3; EXPRESSED IN HEART, SIGNAL = 3.5; EXPRESSED IN HELA, SIGNAL = 5.3; EXPRESSED IN HBL100, SIGNAL = 4.2; EXPRESSED IN ADULT LIVER, SIGNAL = 1.8; EXPRESSED IN FETAL LIVER, SIGNAL = 4.7; EXPRESSED IN BT474, SIGNAL = 4.5
tgattggtaagcagaagttgttaatcacaatgtagaatgtagcaattcagctcatctgtcacagaataagttatttttctaataaaattaataaatgatgtaatttaaaagtttttctcaatgaacatgtttaaggactggctagggagtataaaaatgttaatcatacccgctcattccagaagctttttcaatagtgttcttgattttttttcttacatagcacatgaaaagcatgaaattatatggcagcaagacatatttaaagaatcccgtatgatagtctacttagggcatctgtttgaaacattaacattaggaaacacaaacctattcattctctctcctcccacccccatctttttgttattttagacaaacaaaggtgatgcacttgccaaccgagtccagaacacgcttggaaactatgatgaaatgaagaatttgctaactaaccattctaatcagaatcacctagtgggaattccaaagaattctgtgccccagaatcccaacaacaaaaatgaaccaagcttttttccagaacaaaagaacagaataattccacctcaccaggataatacccatccttcagcaccaatgcctccaccttctgttgtgatactgaattcaactctaatacacagcaacagaaaatcaaaacctgagtggtcacgtgatagtcataaccctagcactgtactggcaagccaggccagtggtcagccaaacaagatgcagactttgacacaggaccagtctcaagccaaactggaagacttctttgtctacccagctgaacagccccagattggagaagttgaagagtcaaacccatctgcaaaggaagacagtaaccctaattctagtggagaagatgctttcaaagaaatctttcaatccaattcaccggaagaatctgaattcgccgtgcaagcgcctgggtctcccctagtggcttcctctttattagctcctagcagtggcctttcagttcaaaacttcccaccagggctttactgcaaaacaagcatggggcagcaaaagccaactgcatacgtcagacccatggatggccaggaccaggcaccggacatctcaccaacactgaaaccttcaattgaatttgagaacagctttgggaatctgtcatttggaacactcttggatggaaaacccagtgcagccagttcaaagactaaactgccaaagttcaccatcctccaaacaagtgaagtaagtaatttttaaagttttgtttggtttcacttttttttagttctctgctctaacctctataatccagtattcacaagcagctctcatttaccttaatgagctgtataggatactcttcaagttcagggtctgaattttgatcttctgtcacttgtgacataactgattaacacgctgcaaatagagttaaatctcaataatttggaatgacagaagacaaggtcggtctgactgaaagaatgacaagttggagttataaaatagtttcataaaatacagttgtggtaatactatgtataaattaataacatttgagattataattggtcataagtagtatgaggttcatgagaagattgcgagtcactatatgccttcactactcagtagcatattctaaacctaaaatacagaagttccttaaagtagaagaatgtagaactgtggtttgctggaacctgaagtagaaggcgttctttaagaattttagtttcttgagtgattacagagctattccttggcaagatcttaatgttttctcccgtatccatcaatcttcccttctgcatctccttcctccacaggtatctacatagcccttttattctactttcatcctttctgtcaaagcaaaaagcattacgagcaaccaaaagcccactggtttagaatgagtaaatatcctacccatctcaggaatcattgccttgtaaaagagaagtccagaggcaccaaag

SEQ ID NO: 4742 - DNA, 381 bp, Homo sapiens
  MAP TO AL121959.4; EXPRESSED IN BT474, SIGNAL = 1.8; EXPRESSED IN FETAL LIVER, SIGNAL = 2.2; EXPRESSED IN BRAIN, SIGNAL = 1.8; EXPRESSED IN BONE MARROW, SIGNAL = 1.8; EXPRESSED IN ADULT LIVER, SIGNAL = 2.8; EXPRESSED IN LUNG, SIGNAL = 2.4; EXPRESSED IN PLACENTA, SIGNAL = 2.2; EXPRESSED IN HEART, SIGNAL = 2.1; EXPRESSED IN HELA, SIGNAL = 1.7; EXPRESSED IN HBL100, SIGNAL = 1.9
gtgtcagtgcccaaagcacagagggggctgaggccacagggggctggcatgtcagtgctgccccagatgtgcacacacccagctgggttgtgatagtgcccaggcttggcctcaactttgctctgagatcagagcaggtcccgggagaagggagaagccagccaatgggagcaagcagttctgtgctgtggctgggcagccccagctgcacccagggagggcaagactcccaccctgccaactcagaaggggggcagggcttccacctctgcttagctctcaccagctccatgtagtgctcagccccagctgtgcctcctctgttgcagctggcatcatggaagttgctgctccagatgggcccctgctgctatcaaaact

SEQ ID NO: 4743 - DNA, 438 bp, Homo sapiens
  MAP TO AC012271.1; EXPRESSED IN HBL100, SIGNAL =  14; EXPRESSED IN HELA, SIGNAL =  17; EXPRESSED IN HEART, SIGNAL =  62; EXPRESSED IN BONE MARROW, SIGNAL =  13; EXPRESSED IN LUNG, SIGNAL =  28; EXPRESSED IN PLACENTA, SIGNAL = 9.9; EXPRESSED IN ADULT LIVER, SIGNAL = 3.1; EXPRESSED IN FETAL LIVER, SIGNAL =  12; EXPRESSED IN BT474, SIGNAL =  27; EXPRESSED IN BRAIN, SIGNAL =  14
atacatctttgggggagtggggagaaggtagaagattgatttttaaataattcttctaaattggggtaaaatcgtattgcttgttatttctggtatttaaatatgttccttgacttgggcagttagatataaatggacaagacactgattatattcctgacatggtgagagcatgattttctcattttttcttctcatagggagttatggtgggtatgggtcagaaggactcctacgtaggtgatgaagcccagagcaagagaggcatcctgaccctgaagtatcccatcgagcatggtatcatcaccaactgggacgacatggagaagatctggcaccacaccttctacaatgagctccgtgtggctcccgaggagcaccccaccctgctcacagaggccccgctgaaccccaaggccaaccgggagaagatgactc

SEQ ID NO: 4744 - DNA, 1956 bp, Homo sapiens
  MAP TO AC003002.1; EXPRESSED IN BT474, SIGNAL = 1.4; EXPRESSED IN FETAL LIVER, SIGNAL = 1.2; EXPRESSED IN BONE MARROW, SIGNAL = 1.4; EXPRESSED IN LUNG, SIGNAL = 1.5; EXPRESSED IN BRAIN, SIGNAL =   1; EXPRESSED IN HELA, SIGNAL =   1; EXPRESSED IN PLACENTA, SIGNAL =   1; EXPRESSED IN HEART, SIGNAL = 1.4
tgccattgtttttaggtctttacctcatagtcagggttcctccattctgtgaggccctatactgacaaccagcccttctttacactgatcctggccctcttgtcctgccaacaagccagtggactcgcactggtgttagacacacatttgtgatggggctgctgcctcccaccaaagtcagcatgcacttcaccagctcttttttgctttcaggtttttggtgtgaagcagaacatgaggcaccttctgagcagagcgtttctgtagaaggagtgtcacaggtcaggactgctgagtcaggtcttttccagaaagcacacccatgtgagatgtgtgacccactcttgaaagacattttgcacctggctgaacaccagggatcacaccttacacagaaactgtgcacacgtgggccgtgtaggagaagattctcgttcagtgcaaacttttaccagcaccagaagcaacataatggagagaattgcttcagaggggatgatggaggggcctcatttgtgaagagctgtacagtccacatgttagggagatcctttacgtgcagggaggaagggatggacttaccagatagctctggccttttccagcaccagaccacttacaatagggtgagtccatgcagaaggactgaatgcatggagtctttcccacacagctccagtctcaggcaacaccaaggagactatgatggacagatgcttttcagttgcggtgatgaagggaaagccttcctggacacctttactcttcttgacagccagatgactcatgctgaggtgagacccttcagatgcctaccatgtggaaatgtgttcaaggagaaatcagctcttattaatcacagaaaaatccacagtggagaaatatctcatgtgtgtaaggagtgtggaaaagccttcattcacttgcaccacctaaaaatgcaccagaaatttcacactggaaaaagacactatacatgcagtgaatgtgggaaggccttcagccgcaaggacacacttgttcagcatcagagagttcacactggagaaagatcttatgactgcagtgaatgtggaaaagcctacagcagaagctcccaccttgttcagcaccagagaattcacacaggagaaaggccttataagtgcaacgaatgtgggaaagcctttagccgtaaagacacacttgttcagcaccagagatttcatactggagaaaggccttatgagtgcagtgaatgtggaaaattctttagccaaagctcccaccttattgagcactggagaattcataccggggcaaggccctatgaatgcatagaatgtggaaaattctttagccataactctagcctcattaaacatcggagagtccacacaggagcaagatcctacgtgtgcagcaaatgtgggaaggcctttggctgcaaagacacacttgttcagcaccagataattcacactggagcaaggccttatgagtgcagtgaatgtgggaaggccttcagccgtaaagacacacttgtgcaacaccaaaaaatccacactggagaaaggccttatgagtgtggtgaatgtggtaaattcttcagccatagctccaaccttattgtacaccagagaattcacactggagcaaagccttatgagtgcaatgaatgtgggaaatgctttagccacaactccagcctcattttgcaccagagagttcacacaggagcaaggccttatgtgtgcagtgaatgtgggaaggcttacattagtagctcccaccttgttcaacacaagaaagttcacactggagcaagaccttatgagtgcagtgaatgtgggaaattctttagccgcaactctggcctcattctgcaccagagggttcacactggagaaaagccttacgtatgcagcgaatgtgggaaagcctatagcagaagctcccatcttgttcgtcaccaga

SEQ ID NO: 4745 - DNA, 1981 bp, Homo sapiens
  MAP TO AC005414.2; EXPRESSED IN PLACENTA, SIGNAL = 5.5; EXPRESSED IN HBL100, SIGNAL = 6.2; EXPRESSED IN HEART, SIGNAL = 7.1; EXPRESSED IN FETAL LIVER, SIGNAL = 6.1; EXPRESSED IN BONE MARROW, SIGNAL = 5.5; EXPRESSED IN HELA, SIGNAL = 8.2; EXPRESSED IN BT474, SIGNAL = 7.7; EXPRESSED IN ADULT LIVER, SIGNAL = 3.2; EXPRESSED IN BRAIN, SIGNAL = 7.9; EXPRESSED IN LUNG, SIGNAL =  11
gctgatggagtccagctttccctctaatcacaaacaatgggaaaaaaacattaaactcaacattctggctctaccacctactagcagtaaggctttgtggaagattatctaagccctctgatctgtttgctcatctctatattggagatagtttttacccatcatgcagagttactgttaggattagaacagaaatgtccaggctccgactgttgctaatggcagctatggtggaggtgatgatggtggagataggggaggtggaaatggtggtaatggtgatgatgggggaggtggtgttggtggtggcaatgatggtaatggtagaggtagtttggatggtggtaatggggatggtggtaatggtgatagtggagatggtagaggtggtgatggtggtggtggggatggtgatgatggtggtggtggtaatggtggtggtaatgatggtggtgatgatggtggtgatggtggtggtaatggtggtggcggtggtgatgatggtgatagtagaggtagtagagatggtagtggtggtggcagtggagtggtggtggtggtgatggttgggatggtggtgataatgatggtgatgatggtggtggtggtggtaatggtagcggtatgatggtagtggtggtgagggtggtggtggtaatgatggtggtgatgatggtagtgatggtggtaatggtggtggcagtggtgatgatagtgatagtagaggtagtagtagggatggtggtaatggtgatagtggggatggtagtggtggtggtggtggggatggtgggataatgacggcgatggtgatggtggtggtggtggtggttgtgatggtggggatggtgatgataatgatggtgatggtggtggtggtaatgatagtggtaatgatggtggtggtggtggtggtggttgtggtgatggtggggatggtgatgataatgatgatggtggtggtaatgatggtggtggtggtgatggtggtcatggtagtcatggtggtggtggtgatggcggaaggaggtgatgttggaggtggacatggcaggcagatggggattgagaagtccagagcagggtggccactgagctgcatcgtggaggagtaggagttcttggaagtggagaaagtggcagggatgggaagggcatgaagaagaaagctgccggaaacagcctgcctggtttgggtgtggtgagcctttggtgtggctggagcacagaatgtggctggggaacggggagggtcagactgtgacagaccttgaaccatgctaaggaggctagatcccatttaagggcagaagggagccattgaaggctttcgagcagtaaaactccctaggtgtcaatgagcctggttaggaagctcttttaatatccaaacaacccatgatgggggcctgagtggggagaggccatggggtgaggcagaaagacaggatcctgttccctgggccaggtgttggtctaactcctgaaagaaggtgggcagttagtagagagttttaaggccactgctgcactttttccccatttgggaaattacatgctagcccacaggtcactaagcaaatgcccattgtccccaggagtaattcagccctgattggtaatatctgtcaccctctccactccattgcccccaaagaagaggtaatcaccatgagcacagtgagctccttggagagtttggggctgtggccacgctctgacacacagctgcccaatgacagaacaagtagccttatgaggacctgacagccctgggatagaggaggtcagtggagaaggggcttctgccctgggcaggtggctggcctgggtggcatttgggcttcctctcaactccaagagggtgacacaggcagcattgtggcaaaggttgatcatgccctctgtactgttcaaacgctggacaccaggcaaatcaaatgccccatgcctgccctgtaggttgcagttggaaaaacgt

SEQ ID NO: 4746 - DNA, 1976 bp, Homo sapiens
  MAP TO AC005538.2; EXPRESSED IN BONE MARROW, SIGNAL = 1.7; EXPRESSED IN LUNG, SIGNAL = 1.1; EXPRESSED IN HBL100, SIGNAL = 2.3; EXPRESSED IN HELA, SIGNAL = 1.9; EXPRESSED IN HEART, SIGNAL = 0.97; EXPRESSED IN BT474, SIGNAL = 1.3; EXPRESSED IN FETAL LIVER, SIGNAL = 1.7; EXPRESSED IN ADULT LIVER, SIGNAL = 0.98
agttggaaggagcgcaaagtgacaccctcgaagtattcttccttgatttacttcgactccagtgcaacatataatcttgatgaggaaaatagatttaggacattaaaatggttaatttctcctgtaaaaatagtttccagaccaacaatacgacagggccatggagagaaccgtcagagggagattgaaatccgatttgatcagcttcatcgggaatattgcctgagtcccaggaaccagcctcgccggatgtgcctcccggactcctgggccatgaacatgtacagagggggtcctgcgagtcctggtggccttcagggcttagaaacccgcaggctgagtttaccttccagcaaagcaaaagcaaaaagtttaagtgaggcttttgaaaacctaggcaaaagatctctggaagcaggtaggtgcctgcccaagagcgattcatcttcatcacttccaaagaccaaccccacacacagcgcaactcgcccgcagcagacatctgaccttcacgttcagggaaatagttctggaatatttagaaagtcagtgtcacccagcaaaactctttcagtcccagataaagaagtgccaggccacggaaggaatcgttacgatgaaattaaagaagaatttgacaagcttcatcaaaagtattgcctcaaatctcctgggcagatgacagtgcctttatgtattggagtgtctacagataaagcaagtatggaagttcgatatcaaacagaaggcttcttaggaaaattaaatccagaccctcacttccagggtttccagaagttgccatcatcacccctggggtgcagaaaaagtctactgggctcaactgcaattgaggctccttcatctacatgtgttgctcgtgccatcacgagggatggcacgagggaccatcagttccctgcaaaaagacccaggctatcagaaccccagggctccggacgccagggcaattccctgggtgcctcagatggggtggacaacaccgtcagaccgggagaccagggcagctcttcacagcccaactcagaagagaggtaggtgtgtttctgttggttgaatgtggtttatgtgagtgactgctctttggacagaggctttttatggtaggaatctttgcgccacgtttagtgaatctcagccgaattcttacatacgtgatcattttctgagctttctcccaaatgcttttccttcctgtaaagtcagcgtctctatcaagaatgtgtccctgtgtaagatgcatcgaggtaaagcagaaagtgctcttgcagaagtttcacactttccattagaatgcattcagaggcttttttcctgcaaatcctcacttactacgctttattcgtctttgtcaaaccttcatttctaacctcttcatctgacactcagaaaatagctgttgtaaggcgaaagtgatctaaagcgaatgacttcctatttctggattcctggtagggaaagagcaagagtggcctgggagagccacgagcacagtattctcacaggtgcgaggggtgccctgcagatatctcagtgctcagtgttaaaacttctgcaccttgttctgcagcttaatttgtgcgaatcatgtcagctagagttttagtctgcgtgtgcccttttctctagagacagtggggtggggtgggtcagtgggagtgagtacctttgttggcattaaaggttggattccccagcacagcttctctgtgtgtccacagtcaggatctggaggatgcgactttcttaacccacaggtggacgggacttgactgtgggtttgatttggccggttcctttgggttttgtgtgtttgtggttccagcaggtgaggccgtgtctccagtatcctcttcccttgtgccctagcctggcgatgtgcctcttctctgaggtcatttgggtggaccctgcctgccataagtgtcccattttctgtttctcccacctggacc

SEQ ID NO: 4747 - DNA, 1974 bp, Homo sapiens
  MAP TO AC003958.1; EXPRESSED IN BT474, SIGNAL = 1.7; EXPRESSED IN FETAL LIVER, SIGNAL = 1.9; EXPRESSED IN ADULT LIVER, SIGNAL = 1.3; EXPRESSED IN BONE MARROW, SIGNAL =   2; EXPRESSED IN LUNG, SIGNAL = 1.5; EXPRESSED IN BRAIN, SIGNAL = 1.6; EXPRESSED IN PLACENTA, SIGNAL =   2; EXPRESSED IN HBL100, SIGNAL = 1.3; EXPRESSED IN HELA, SIGNAL = 1.5; EXPRESSED IN HEART, SIGNAL = 2.2
agccctcctgtcctgtgagtagctgtgcccaacccctgtgctgtgatcctgtcatttgtgagccttcttgctccgtgagcagcggctgccaacccgtgtgctgtgaggccaccacctgtgagccttcttgctctgtgagcaactgctaccaacctgtgtgcttcgaggccaccatctgtgagccttcttgctcagtgagcaactgctgccaacctgtgtgctttgaggccaccgtttgtgagccttcttgttccgtgagcagctgtgctcaacctgtgtgctgtgagcctgctatttgtgagccttcttgctccgtgagcagctgctgccagcctgtaggctctgaagccacttcctgccaaccagtcctctgtgtgcccacttcctgccagcctgtcctctgcaaatccagctgctgccagccagttgtctgtgagcccagctgctgttcagctgtctgcaccctgcctagttcctgccaacctgtggtctgtgagccttcctgctgtcagccggtgtgcccgacacctacctgctctgtgaccagtagctgccaggctgtctgctgtgaccccagcccttgtgagccaagttgctcagagtctagcatctgccagccagctacgtgtgtggctctggtctgtgagccagtttgcctccgccctgtctgctgtgttcagagctcgtgcgagccaccttctgtccccagcacttgccaagagccttcttgttgtgtctccagtatctgccaacccatctgctctgagcccagcccctgctcaccagctgtctgtgtgtccagtccatgccaacctacttgctatgtagtcaagcgctgtccttctgtctgccctgagccagtttcctgcccatctacctcctgccgacctctttcctgcagtccagggtcttctgcatctgccatctgccgaccaacttgtcctaggactttctacatacccagttccagcaaacggccttgcagtgctacgatttcctaccgcccggtctcccgtccgatctgccgcccaatctgctctggactcctcacctataggcagccatacatgacatccatctcctaccgtcctgcctgctatcgcccatgctactccatcctgcgccgcccagcctgtgtcacttcctactcttgccgcccagtctacttccgcccatcttgcactgagtctgactcttgcaaacgggattgcaaaaaatccacttccagccaactggattgtgttgacacaaccccctgcaaggtggatgtctcagaagaggctccctgccagcccactgaagccaaacccatcagcccaaccacccgtgaggccgcagcagctcagcctgctgccagcaagcctgccaactgctaaattggcttcagccccccaattcttgcaagtcaagccaccagctagagacaaaactgcactgtcctccccaaagctcattatgacttagctaggagctctttctttctgcattgttactcacaatcggcttacccctcaaagaactcatcagaaatgtcagtatcctgatcacttaaatgaaggccttctggacagtgagagggagacattccaggttcttgtcttctgctacgattaagctgagaagagctgctttgccacatcatctcgggtctctttcctgcatgtagttttttctgtcatcatgtatgtgctcccttgctatgcatgcttgtgttccttagggacttctccaatcaggtaaaatatgtaactgtccaataaaggtggctaagctgaagcaacttgctgttctccttgctcttccattaatgccatagtctcatcagtgacttgcttcttctttaacagcagctccattcaaccatccatccacccacccatccctctggcattattagacagcagctaggtgccagggactgtgtttagctctaagaataaacataagaagtctcagtctttgttctcaagaaac

SEQ ID NO: 4748 - DNA, 446 bp, Homo sapiens; identical to SEQ ID NO: 873
  MAP TO AL078475.2; EXPRESSED IN HEART, SIGNAL = 0.8

SEQ ID NO: 4749 - DNA, 489 bp, Homo sapiens
  MAP TO AP000134.1; EXPRESSED IN ADULT LIVER, SIGNAL = 0.7; EXPRESSED IN PLACENTA, SIGNAL = 0.62; EXPRESSED IN LUNG, SIGNAL = 0.65; EXPRESSED IN HEART, SIGNAL = 0.83
ttatcatttgcctggaatgcggccacccagcccaggtgatggccaaaagagggttgggttgatagagatcttgccccaggatctgaagaagccctggaaggtgaggcctggggctgcaatctttcccaacagacaatggaggcctccaacaaggctcagaggagaggttttgcaggtcagaccctcacccctacctcaaggcccctcaacaagcagacgtcactattgtcccgatcccaccttccctcctgagcaagcaatgggtagcaaatcctgttcaccccatttccatggtcctgacatctccccttcccctagcgaagaggattccaagacccactcctcatcgtgacctccccctgcccccagatgacgcggtggctttctggggctcattattacccctgcagagtgggcagaggaaaccaagagcaggaactaggattgatggattgacctatgtttacaaggttagcagctctcaggcaa

SEQ ID NO: 4750 - DNA, 363 bp, Homo sapiens
  MAP TO AL050324.5; EXPRESSED IN LUNG, SIGNAL = 0.65; EXPRESSED IN HEART, SIGNAL = 0.89
gtctgtgcttcttcaaccccatcctaaatcaagcagaacatatatttcagtctccagagaggagaaaagaggccatgggaaggaagatggtgcatcaagccatacttgaagcttgaagtgtcccattcccttatcctgctttcatgtgcatgaagcaaccttggtgttcttgtttatacatatgagacttattctctaagcatccccacttctgggtgccccaagaaactgacaatccacagtccagcctgtggtgaccctcctaaaatcatgccgcctggtgaagctctgcctgttttatgatctgacgtcccagatcttcatctttattttgtttctcttggagatatgcttgatatttca

SEQ ID NO: 4751 - DNA, 417 bp, Homo sapiens
  MAP TO AF001550.1; EXPRESSED IN HBL100, SIGNAL = 9.1; EXPRESSED IN HEART, SIGNAL = 7.6; EXPRESSED IN FETAL LIVER, SIGNAL =  11; EXPRESSED IN ADULT LIVER, SIGNAL =  11; EXPRESSED IN LUNG, SIGNAL =  10; EXPRESSED IN BRAIN, SIGNAL = 8.1; EXPRESSED IN PLACENTA, SIGNAL = 9.6; EXPRESSED IN HELA, SIGNAL = 9.5; EXPRESSED IN BT474, SIGNAL = 9.2; EXPRESSED IN BONE MARROW, SIGNAL = 9.2
gttagacctgagcaggctggctccaagtctgtgcaattaagcaggatattccagtgcttagagacaggcacagggtgccctggggacacaaaggagggccacgtaagcctgcaaggaaaggtgtcacttataattcacatgcatatttggcctagatttttttttctttcatttctctatgctgtcagggctacccccactgtgcacagcagaataggcttgcttacacgtggatgtggtcaagaaagggaatgaaaaaaaaagggagggacttcttactctgcaaaccacagttctttcagcctgagcatcatggggttcaccgtgtgcagatgctcctcgttccacttcttggcgctcctgtagacactgtgccagggcacaggggcccggatcactctttgaggaaacaagcgg

SEQ ID NO: 4752 - DNA, 1961 bp, Homo sapiens
  MAP TO AC000119.1; EXPRESSED IN BT474, SIGNAL = 8.8; EXPRESSED IN FETAL LIVER, SIGNAL = 5.1; EXPRESSED IN ADULT LIVER, SIGNAL = 1.8; EXPRESSED IN LUNG, SIGNAL = 3.5; EXPRESSED IN PLACENTA, SIGNAL = 3.4; EXPRESSED IN BRAIN, SIGNAL = 5.7; EXPRESSED IN BONE MARROW, SIGNAL = 4.6; EXPRESSED IN HEART, SIGNAL = 7.8; EXPRESSED IN HELA, SIGNAL = 5.8; EXPRESSED IN HBL100, SIGNAL = 7.7
tctttgaatgcacttgaggcatgttctgctaaatccaaaagagcaattagatcatcaactgaaatgttcccgtttcctccgttttcctctatccaccatcttattttacttttgtagacttgacccagtgtatctgagatataagaattgtcaggttctatgatttttgcttgttttgcccagtttagagcattgccaaagtccttctttttaatgtagaaatgtcttgccaacgcttggcaaatgaatgcatttgggttgaaccgatggatactttcaagcaatacagcttcaactgcttcatttccttcatctttatgtaatgcttcaataaatggggaaaaccaatttcctgtttcaccttcatgttcatcgcggtgtcttgtgagtaggagtgtgtgcatatcttgcaaaaatttactttttcccataccagtatcgaagaacaaattctcagttagcatatccaacataatttgacttttattcaggtgatagcttttcttcaattcttccagtgagaactctgcaatcaaagagtgaatgatgcgtactccacagtagttcccacattcgatgacctctgtttttatcagaattgtagagtaggtgcccatcttgtcttcaaatttttctgtcccccagaaagccttcttgtttccaattcctaagaatttttcacactgtgatagtgaaatggtggtatcaggcacatatgaattaagaagagccagaaaagaaaagagctttgcttccttggtgaaaatattctgccctttcaggatattccggaccacattttctatgtattctttattaaaattggttttcatgatcataaaggaataaaaatcctcaaagtttttatgctgttctttgatttctttcaatttaagctcaaaagctctctgttctttgggagagagttgctgtattacggcaatactgtctgggatccttgcacttttttcaggattttgtgatctcatacaatttaggataatcaccagaggtttttcatatcgaatgtactttttagctatagctgtttgaatagagtactgcagaagatagacattatcttgttcttcaaaatcatcaacaaggagtagtacaggtacgtattcctgacggttcattgccccataggtgattaaactggttacctgttctccaatttcagaaaaatccactgtcttgtttttcagcacagcacatctgaatttcttccttagttcccagagaatgtgcatagccaaggtagttcccccacagcctggatgatgatacagatgaataattttggtacttgttggtttagaagaatctgcacagttttgaatcattgcttcaagtctttcatatttatcccttttgacaaaaggtgaagaataactttcagaagagaagtagaagttccaccatgacactttgccacctcgatagaagtcttcctcttttgatgccttgaattcaaggaatttatttttgtccttctctaacagtgtaccctcacattcattttcacagataatttccagagcagtcatgatatcttcttcctttttcagaaggacagtcgataaaccaatagatggcaaaagcctttttgaagattgagtcacagattttagtttaagaatagtgccattgatctcttcaaggcttaaagcagaaatacattggcttgaaatttcatcttggtgttttattaatcttgcttcaagtagatctttccatccctgaaatatgtgtgggtgcacacaaatacacagtatattttccattcctttgagatcctggtagaaagcacagaaagtctcaatgaggggatctcttgggtcatccacagaggacagtaatagaaataccaccaaaaacttccctcttggcattatgtcttcatgtgtaagaaatgaaatcagtttcctgacatcagaagctctttctctttgccagga

SEQ ID NO: 4753 - DNA, 399 bp, Homo sapiens
  MAP TO AF001905.1; EXPRESSED IN BT474, SIGNAL = 2.6; EXPRESSED IN ADULT LIVER, SIGNAL = 2.7; EXPRESSED IN BRAIN, SIGNAL = 2.8; EXPRESSED IN BONE MARROW, SIGNAL = 2.3; EXPRESSED IN LUNG, SIGNAL =   3; EXPRESSED IN PLACENTA, SIGNAL = 2.7; EXPRESSED IN HBL100, SIGNAL = 2.8; EXPRESSED IN HELA, SIGNAL = 3.1; EXPRESSED IN HEART, SIGNAL = 2.7; EXPRESSED IN FETAL LIVER, SIGNAL = 3.1
ttcctaagtgactcctgggtgagccttaaaattaaggcagaaacaaaacaattctttgaaatttatgaaaatagaaacacaacgtaccaaaatttctaggatgcagcaaaagcagtgttaaaataactttcatcatcaaggtagaaaggtctgtgaagattaggatggtggataggaggcaggacaagctgcagctactgctcaaatggagaaagcagcatgtggagactcaaatgatgaacttttgctccaagaattactacaggaacataccaggaaagctgagagaatccacagagcctttgaactggactacccctgcaggctctctgagatgccgaaaaactgtgagtcagcttgctttctcaatgaggaggctcgtggtctcggacaagttct

SEQ ID NO: 4754 - DNA, 1959 bp, Homo sapiens
  MAP TO AL021808.1; EXPRESSED IN BT474, SIGNAL = 0.94; EXPRESSED IN ADULT LIVER, SIGNAL =   3; EXPRESSED IN BONE MARROW, SIGNAL = 1.2; EXPRESSED IN BRAIN, SIGNAL = 0.98; EXPRESSED IN HELA, SIGNAL = 0.96; EXPRESSED IN HEART, SIGNAL = 1.2; EXPRESSED IN FETAL LIVER, SIGNAL = 3.7
aaaagttgtcatcggccttcctctccagtcccactggtatcagattttgagtccctaggaggatctgaaagttctgggcagcaaaaccagaagattccacagctgccgtctagccctgagaacctggtgtcagagatcccacctccccagcttggttatgcagtctctgatgagaacttgactttggggaagaaagctgagctacaggtaagcaacaacgcaggagaagatacaactgaggtcaacacagaccctttccctgagacttggcttgctattcagccttccttgtctcttgctctgccttcttcagaaacagatctaacccagggagcaaatcctcagttggaaaacttaagaaaaatgcagaagtctctaggtccactggcctctccacagtccacgggagaggcaaccagtgtggcccattctcctttgaagacacccagcctaccgaccccacctgggtgctcacagtcagagctccttccaggcacctctccagactcaaagcccacagctactttcatcctgctgacccccacctctcccacattaccagttactgacaccacctggccgccttcaacctctcaggctgacaggtctcccatgcccccagacccacctgcaccacccaccatccaaagtactttgcttggaatggtgagtagcccaacatcccatctttctgcatctgcacctcctgatgcaacttctgctcacctcatgttaaaaccgattttggggcccctgcacaacagcgagattggaagctcctcatattccagaatttcagtcacagctgcagcatcttcaatctcttccctttccacaattcagggtaccttaactcctaccttcaagcctatctttggcagcatagatccacttaaaactacgcccatgatagctcctttctcctccaagcagacccctcctccatttactcatgcttctacccatcatttccatggcctggtcaaggccacctctgtggtcatgtccaccaccctagccagcacatctaaagactctgtttttaagccacctttggattttggtgtagtgaatgtcaccagtgccgtaggcaacacttattctgtcccttccacttgcgacactttcctgcttgggactgctcaggccttcagggccgacttcaccccagccacaggattcattttcccaccacaccaccatcctacaattcctactgtgcatacagtcaccatgtttacccaggtcctttccagtgttgtacagatatcccctagaagcagcactgctaatttcaggggtatgggcagccctctgcctgcctctgccctagtatccacaaactggcttgcatcaacccccagcatctccaacctgactccagcaatcacaagtcccttgggatcaagctcaaggccacctttcccactatcccaaggagctaatccccagcctgcatttggtgccacaaatggacagaaacaagggccttcccagccagcccttatgccaagtgtcagtagttcttttctttttgggagctcagcagtggcattgccaacccccatgccaactccagctcagccagccttcattagtaccacacagtcagccttggggtgtttgacaccctcagcctccacctctcaaacccctgccagcacctggtcaggcattggcggcattccagcaggttttcccattagtcaagctagtacaactgggtttagaattgtaattcagacccaccaaagtggggcttttggctcagtgtttggcagcagagctccacaacctttcacttttgggggattcgtgacccctatggactgtgatgagtctgggatcataatgactggtccagacatgagccccacctctggagctttcagcattggagcattgcctagtgggaccactaacaccatgatcccctttggaaaaggctggagccagaac

SEQ ID NO: 4755 - DNA, 414 bp, Homo sapiens
  MAP TO AC012277.1; EXPRESSED IN FETAL LIVER, SIGNAL = 1.7; EXPRESSED IN BT474, SIGNAL = 1.1; EXPRESSED IN ADULT LIVER, SIGNAL = 1.4; EXPRESSED IN BRAIN, SIGNAL = 1.2; EXPRESSED IN BONE MARROW, SIGNAL = 1.4; EXPRESSED IN LUNG, SIGNAL = 1.4; EXPRESSED IN PLACENTA, SIGNAL = 1.5; EXPRESSED IN HBL100, SIGNAL = 1.3; EXPRESSED IN HELA, SIGNAL = 1.5; EXPRESSED IN HEART, SIGNAL = 1.5
tccacacacaggctcacttctgcaggcagcctctttctatcatttgtctctacttcttctgctgtttatttcaccctttattttctctttttgttgtttgatggttcatctatatgtgctgggcttcctcattcaggtggccgcttctccctgcccgcactgtgagtcctgcactcagattcccaaataaatcctggggcctgatgtaggcactgaggatgcaggatgcagcaatgaacgaatgggccaggcatcatgaagtctacatccaagtggtgcatgcagaaaggaaacagtgactacgtaggatcatgccaggacgtgatgcatgtatcgaatgaagggtaagtagtgaatgtcagcttggtcttccatggtgtgctggagggcctttctgggtttgagaacagcaca

SEQ ID NO: 4756 - DNA, 1975 bp, Homo sapiens
  MAP TO AL022344.1; EXPRESSED IN BRAIN, SIGNAL = 0.97; EXPRESSED IN HELA, SIGNAL =   1; EXPRESSED IN HBL100, SIGNAL = 2.7; EXPRESSED IN HEART, SIGNAL = 0.95; EXPRESSED IN BT474, SIGNAL = 1.3
ttttaagggttattcctttattctctctataagttcttttgaagtgtggtgttagggaaccatgcccgagtttgcttcttaactcttccaatgtttatcaaatcatattttccctatgctatgtcatcttaaacaattccttgacattttctatttctttgtattttcattgactatattgccatttctagattagctgattaatgtacaaattgaattattttgtatttccttggtaatacaggctaatgatgccaaaggaggaaaaacaaatggacttgaacactggtcgaatgcgtcggaaagccattttcggagatgaagatgaatctggagatagtgatgatgaagaagatgatgaaatgtctgaagatgacgggttggaaaacggctctagtgatgaggaagcagaagaggaggaaaatgctgagatgactgatcagtatatggctgttaagggcatcaaacgacggaaacttgagttggaagaagacagtgaaatggatttgccagcatttgctgacagtgacgatgaccttgagaggagctcagcggaagaaggggaagcggaggaagctgatgaaagcagtgaagaagaggactgcactgcaggagagaagggcatttcaggatcaaaggctgctggagaaggtagtaaagcagggctgtcaccagctaattgccagagtgaccgtgtgaatctggagaagtctttgctgatgaagaaagcagctctccccactttcgattctgggcattgcacagctgaagaggtgtttgcatctgaagatgaatctgaagaaagctcctcactcagtgcagaggaagaagactcagaaaatgaagaggctattagaaaaaagctttcaaagccttctcaagtgagcagtggtcagaaactggggccacagaacttcattgatgagaccagtgatatagaaaatttactcaaagaggaagaagattacaaggaagaaaataatgattccaaagaaacgtcaggtaagcttaaatgtagttggttgctgctatgaacttggctctcgaaatggtaaccaaaggaatgtctacatttaggggtctgttgattctgtgattttgttaactgttgaaaagctgcattgtggatggatctcaagggaggggagacacatgaataagcctaactggaggttggcattggtcgtttcaggtgccctcaagtggaaggaagacctttccagaaaggcagctgaggcctttctgaggcagcagcaagcagctccaaacctccgaaagcttatttatgggacaggtaaagaattctggttcagaactagaaatgttttagtttctctgattatttagatgagggaattggttggaggattcggctggtattgttgacatccataattgctgtccatcacatttcatatttgacagatgtctctaatcatcagcttatgaggaccacacattggtcttataaagtagacttatgggtttgctgtaaaacttgatgcaaataccgtccattgcatcatgttatgtcccctatttaaaagtccttcatgagaatttttttgtagattagtgccagaaaaatattcctgcccataaaaatatttatttttttcctttctgagaatgagaaccctgtataacacattttgttctcccttttgcccttgtcctctgattttatgctttactaaacttaccaatatgttctttctggtagaattaatgcaaaaataaatatatagtggtgaactttacattgtgctccctggttactgcatggtgagatcaaggccacatggtgagacatttgggctcagcccactgaattgggaaggttgttgtatactgattttcattcaggttttgtctaggtactcttagtgatgagaggctcaacactctttagagctcttctttaataatctaaagctctgcctttaaattcccttccctcccttcaccgctaata

SEQ ID NO: 4757 - DNA, 461 bp, Homo sapiens
  MAP TO AE000662.1; EXPRESSED IN HEART, SIGNAL = 1.7; EXPRESSED IN FETAL LIVER, SIGNAL = 1.8; EXPRESSED IN BT474, SIGNAL = 1.6; EXPRESSED IN ADULT LIVER, SIGNAL = 1.7; EXPRESSED IN BRAIN, SIGNAL = 1.8; EXPRESSED IN BONE MARROW, SIGNAL = 1.7; EXPRESSED IN LUNG, SIGNAL = 1.9; EXPRESSED IN PLACENTA, SIGNAL = 1.3; EXPRESSED IN HBL100, SIGNAL = 1.9; EXPRESSED IN HELA, SIGNAL = 1.6
ttcaggtttccttgagtggcaggccaggcctggcgtgaacgttcactgaaatcatggcctcttggccaagattgatagcttgtgcctgtccctgagtcccagtccatcacgagcagctggtttctaagatgctatttcccgtataaagcatgagaccgtgacttgccagccccacagagccccgcccttgtccatcactggcatctggactccagcctgggttggggcaaagagggaaatgagatcatgtcctaaccctgatcctcttgtcccacagatatccagaaccctgaccctgccgtgtaccagctgagagactctaaatccagtgacaagtctgtctgcctattcaccgattttgattctcaaacaaatgtgtcacaaagtaaggattctgatgtgtatatcacagacaaaactgtgctagacatgaggtctatggacttcaagagcaacagtgc

SEQ ID NO: 4758 - DNA, 383 bp, Homo sapiens
  MAP TO AF001549.1; EXPRESSED IN BONE MARROW, SIGNAL = 3.6; EXPRESSED IN HBL100, SIGNAL = 5.6; EXPRESSED IN HELA, SIGNAL = 3.2; EXPRESSED IN HEART, SIGNAL = 2.5; EXPRESSED IN FETAL LIVER, SIGNAL = 3.3; EXPRESSED IN BT474, SIGNAL = 3.5; EXPRESSED IN LUNG, SIGNAL = 4.2; EXPRESSED IN BRAIN, SIGNAL =   8; EXPRESSED IN PLACENTA, SIGNAL = 1.6
tctcgaaatggacatgatggatccacggatgtacagcagagagcctggaggtccaaccgccgtagacaggaaggtatggctctgttggaatccgcatagtgtggaaatgagtttgccctggaaagggaaagaacagcttcttgccctcaggtttctcaccttctcctctcctcactctcaccaagggctgaggtccatttgtatgcacacaaagaaaagagtttcttcctttcgaggaaataaaattgtcctgaaagacgtcattactctacggagacatgtggaaacaaaagttagagctaaaatccgtaagaggaaggtgacaacgaaaatcaaccatcatgacaaaatcaatggaaagaggaagaccgccagaaaacagt

SEQ ID NO: 4759 - DNA, 497 bp, Homo sapiens
  MAP TO AF030876.1; EXPRESSED IN BONE MARROW, SIGNAL = 1.5; EXPRESSED IN HBL100, SIGNAL = 1.8; EXPRESSED IN HELA, SIGNAL = 1.7; EXPRESSED IN HEART, SIGNAL = 1.7; EXPRESSED IN FETAL LIVER, SIGNAL = 1.8; EXPRESSED IN ADULT LIVER, SIGNAL = 1.7; EXPRESSED IN BRAIN, SIGNAL = 1.4; EXPRESSED IN PLACENTA, SIGNAL = 1.3; EXPRESSED IN BT474, SIGNAL = 1.1; EXPRESSED IN LUNG, SIGNAL =   2
tgagaacttcccactcagggcagcgacctctgtacacggtcatttcaagcacacctggtctcagtgttcattgtttatgttccccccgaccccaccctgggcacatacattttcctgctccatgagggatccttgtccctgccctccctgccctgtagagataggagttgctcttacttacttgatcaaatacacatcatacttcccagcagagcggccagatttcctttgcttaagcttccgtgtccagccttcaggcagggtggggtcatcatacatgggtccccggtcacggatgatggagcgccgctgtttgggggaggcagaagcttccggcacagccggggcggagcctgacccttctgatgtctctgctttgcctgcctctgcgggctcagcagagtggtgggctgatggctgcacgggctcatgcttgccctctttctcttctttcttatctttcttcacctttttaaacttgaggggtttgtccttga

SEQ ID NO: 4760 - DNA, 442 bp, Homo sapiens
  MAP TO AF111167.2; EXPRESSED IN PLACENTA, SIGNAL = 1.3; EXPRESSED IN HELA, SIGNAL = 1.1; EXPRESSED IN ADULT LIVER, SIGNAL = 1.5; EXPRESSED IN LUNG, SIGNAL = 1.2; EXPRESSED IN BRAIN, SIGNAL =   1; EXPRESSED IN HEART, SIGNAL = 1.1; EXPRESSED IN BT474, SIGNAL = 1.4; EXPRESSED IN FETAL LIVER, SIGNAL = 1.2; EXPRESSED IN BONE MARROW, SIGNAL = 0.95; EXPRESSED IN HBL100, SIGNAL = 1.2
cgatgtctgtcaggaacacggaatatcaggtagttgcaagcatgccaaatatctgccatctccaacctagatgcctaaaacagcgttgccctggaatttctggcaggaatgttactattattattttcttgattttgcataataatggagagagattgcttggatgaagccagggtttcctagaggtaaacaaagagccctatagacttgtagtaagacttgccaccgttctgcctttgattgcctctctcctattttttaatttatcaggcaaataaagatgaacatgttcaactgattgatgagaagcacatccaggcccaggattctttctactactctgggactcaagcagatacatggcttctgttcttgaggaaattgagaatgtagaaggatgcaaacattctagacataaacacgaacccactcacccaaaaag

SEQ ID NO: 4761 - DNA, 383 bp, Homo sapiens
  MAP TO AF042484.1; EXPRESSED IN BONE MARROW, SIGNAL = 2.9; EXPRESSED IN HBL100, SIGNAL =   3; EXPRESSED IN PLACENTA, SIGNAL = 2.6; EXPRESSED IN HELA, SIGNAL =   4; EXPRESSED IN FETAL LIVER, SIGNAL = 3.5; EXPRESSED IN ADULT LIVER, SIGNAL = 3.1; EXPRESSED IN LUNG, SIGNAL = 3.1; EXPRESSED IN BRAIN, SIGNAL = 2.7; EXPRESSED IN HEART, SIGNAL = 3.1; EXPRESSED IN BT474, SIGNAL = 2.7
gaaagcaaagaaggggaagcactgaaccaaatttgcttttttgtacctgctcagctcaaatgcagagttctctacctggaaattgactgcttccatagtttgatagccacagagagatgggaacagaaggagaggtataatcccagacttgattcagctatagagaatgacaatagtgtcagaggccttccaaccagagcgactccatcttgaatacgggctgggtaaaacagggctgagacctactgggctgcattcccaggaggctaagcattctaagtcacaggatgagacaggaggtcagcacaagaccttgctgataaaacaggttgtaataaagaagccagccaaaacccaccaaaaccaagatggccatgagagtt

SEQ ID NO: 4762 - DNA, 466 bp, Homo sapiens
  MAP TO AC007336.2; EXPRESSED IN HEART, SIGNAL = 1.1; EXPRESSED IN PLACENTA, SIGNAL = 1.5; EXPRESSED IN LUNG, SIGNAL =   2
agcaccaacaagtggtagccatgctctctatagctgtatgtcctgtcgctcaactaatgggtgaccgtgctggtttgggaacccagtactccacccagtgctctgggacccctggcttatttcctgtctggactatggcactgggttggggggctgattgctacagcctgctttggtcagtactgtgccatcctaatgtggctaattgccttgggggtgtgcatttctttcagcaatacctgaacaccttctatggctgccccaaggagagctgcaacctgtttgtgctgaaggacacactaaagaagatgcagaagttctttggactgccccagacaggtgatcttgaccagaataccatcgagaccatgcggaagccacgctgcggcaacccagatgtggccaactacaacttcttccctcgcaagcccaagtgggacaagaaccagatcacatacaggtgccg

SEQ ID NO: 4763 - DNA, 469 bp, Homo sapiens
  MAP TO AF121897.1; EXPRESSED IN PLACENTA, SIGNAL = 2.5; EXPRESSED IN HELA, SIGNAL = 3.1; EXPRESSED IN HEART, SIGNAL = 3.2; EXPRESSED IN ADULT LIVER, SIGNAL = 2.3; EXPRESSED IN BT474, SIGNAL = 2.2; EXPRESSED IN FETAL LIVER, SIGNAL = 2.8; EXPRESSED IN LUNG, SIGNAL = 2.7; EXPRESSED IN BONE MARROW, SIGNAL = 2.4; EXPRESSED IN BRAIN, SIGNAL =   3; EXPRESSED IN HBL100, SIGNAL =   2
gggctttcagcataaaacacactctttatatggccaatatattagttcgttctcacactgttctaaagaactacctgagactgggtaatttataaagagaagaggtttaactgacttgcagttctgcaggctgtacaggaagcatgctgggaggcctctggaaacttacaatcatggtggaaggtgaaggggaagcgagcacggtcttcccatggtggagcaggagagagcaagatttggggaacgtgctacacacttgtaaacaaccagatctcatgagaactctgtcaggagatagtactaagcggatggtgctaaaccaccacaaaccaccccatgatccaatcacctccctccaggccccacctccaacactcaggatcacaattcaacatgagatttcggtggggacacagagccaaaccatatcagcagagaaggctctacccgttgagaccctgctttccaa

SEQ ID NO: 4764 - DNA, 479 bp, Homo sapiens
  MAP TO AC005095.2; EXPRESSED IN HEART, SIGNAL =   1
tttcaagttgtgataagtgcagtgaagaacacaaaacgtgctttttatatatatttttttgttttctgctttacaattagattgccctgcaaaatctatggcaaaacagagaaaaattggtaagggctgcagtcttcataatctacataaaaactatgattgactcaggtcctgtaggaggaaatttctggggataatcctgtgacactctcagtactctttgaaattctatagagcaaagagcttgtggagtctggcaggaagagcaacgaaggtgaaggtgaagacattgagctggaatccggacaactatgtccgcaaaaccaagttggacttacagattattccaagaaactgtgatcctaccttacatccttttgaggtcctgcaagaatgtgtaagagttttaaatgctaccaaactggaaggagtatttgcaaaaccatgcctggcttggctggatggtcacgagatggagt

SEQ ID NO: 4765 - DNA, 484 bp, Homo sapiens
  MAP TO AC008070.2; EXPRESSED IN FETAL LIVER, SIGNAL =   2; EXPRESSED IN HEART, SIGNAL = 0.96
tgtttaacttttcaggcaaattcttaatttcctagtacttcattcttctgcaatatctgttccagtttcattataagtaaaacaaagaggaacttatgtttgctatatgatgatactcctagcaattttttctacttattattgttaaaatattttgttcatctaatgcttattttctacacttttatctgacattagtatctttacattttgaatcaaatttaaatattcacgctttctttaacctttattttttattaatttgttcttaggcatcattattttgtcatatcagttttgaaattgtgtttctcatcaacatttttctgagtgttcataatgacaactatatgttatattccagacagctaactcaagaaaggaaaaataactggagtccaacttattttactaaaaaggtgaaataaagtgtacttggtatgctttcaccaaaaattattagtaaggcgagtagaagggaatt

SEQ ID NO: 4766 - DNA, 471 bp, Homo sapiens
  MAP TO AC009478.1; EXPRESSED IN HBL100, SIGNAL =   4; EXPRESSED IN HEART, SIGNAL = 1.3
tttaccctaatgaatggaagcagtgatatcaatgtaagtagataaaagcaatctaaaaatacttgtctttaatgttatatttaaaaatttgcatgattatttctgtatatatatactgcatagctacagtaaaagatgtttgattgcatattatattttgtctcaatctctctatatttgctactagccgaccacaaaaaaaattaaaaaataaaataaaaaaacatggattctgacacttaaatcttgaactggaaccaaatatgccaacttttaacatacttccttgccttattagaaagctggtcttggtcaaagcatttactttactgagtctcagtttcttgttcacagaaatgaagtgaagaatgtttctcttattgatcttgccatggagaacaaatggaataaggtatgttactctacttcgataaatgcacagattaaaactcaaggccacagacaaatgag

SEQ ID NO: 4767 - DNA, 473 bp, Homo sapiens
  MAP TO AC008125.9; EXPRESSED IN HEART, SIGNAL = 0.99
cttggggaatggtaatgtttgatgatttgtctattgggataagtaatatatattatcaattaatcataagtgttctagttactactgctatataataaaccactacaagacttaatggcataagacaaccattttatttatgctcattcattctgtgggtcaggaatttggatggggcacaatgggaacagcttgtctctgccccacaatgtctggggcctcagctggaagatttgacagctgggggtgatccaatggctaggggctggaatcatctggaggtgtcatcactcacgtgtcaggcacttgatgcaggctgttggctgtgacatcaactgggatgttgaccagaacatctacacgaggctgaagcttttccacgtgttctgttagtgtgtgccttttgggcttcctcacagtatggagactgggctccaagaatgagtcctctaagagaacaaggagggagtgca

SEQ ID NO: 4768 - DNA, 489 bp, Homo sapiens
  MAP TO AF045555.1; EXPRESSED IN BT474, SIGNAL = 2.9; EXPRESSED IN LUNG, SIGNAL = 2.6; EXPRESSED IN BONE MARROW, SIGNAL = 3.2; EXPRESSED IN PLACENTA, SIGNAL = 2.9; EXPRESSED IN HBL100, SIGNAL = 2.8; EXPRESSED IN HELA, SIGNAL = 2.1; EXPRESSED IN ADULT LIVER, SIGNAL = 2.7; EXPRESSED IN FETAL LIVER, SIGNAL = 2.6; EXPRESSED IN BRAIN, SIGNAL = 2.8; EXPRESSED IN HEART, SIGNAL = 3.2
aggacaaggaattcagcctctgaatcagttttctcatcagtaaagtgcacccaactcctagcataattttttttttccagttcctagacagattaacacatagcatgatattaataattttttttttttcctgagacagggtctcaccatcacccaggctggggtacagtggcgcaatcacagctcactgcagccttgacctccaaggctcaacaaatcctcctgcctcagtctcccaagtaagatttcaagaatgaatggagtgatgtgtataatgtccctggtaccagaagggctcccgctctcctctgcccaagaagtgagcggttcctctgccaggacggggggaaggaggccaaccttgtaggcttcgtcaatgttggcattcacacagtgctggatcatctcctttaccagcagtgggtggggctcgtcacagacctggccaaagggaaaggaaaggcggtcaggggctagaagggacaatgt

SEQ ID NO: 4769 - DNA, 470 bp, Homo sapiens
  MAP TO AB020864.1; EXPRESSED IN BT474, SIGNAL =   1; EXPRESSED IN HELA, SIGNAL = 1.2; EXPRESSED IN HEART, SIGNAL = 1.2; EXPRESSED IN LUNG, SIGNAL = 2.2
ccctgatgaaaagtaatcatgcatttctactcctttctcactattctagagcactgttttagaataatttaactcctgaagttttgctgtttctaccttatacctttgttctgcctgctgacttacacgtaatgatttttaactatagaacctaccaactgtcagaaaaacaatttcctcagtgcaaaaatgtattatatctcctttctcaacatatttgtaatcattgttgactataccataaacctaattgtcaaaatttaactttctacaagccaaggactttaagcgtcttgccctccctcttcaaaccacaatgaggactgtaccttttggaggagttttcatcaagtgaacatgagccctggataccaaaggcttcaaataaaaggatcctgaggaaccattctgaaatgctggttttggaggtttctcctcatatttgatgacagcggcattaccagctgtaa

SEQ ID NO: 4770 - DNA, 485 bp, Homo sapiens
  MAP TO AL121587.4; EXPRESSED IN HEART, SIGNAL = 0.88; EXPRESSED IN LUNG, SIGNAL = 1.6; EXPRESSED IN BRAIN, SIGNAL =   1; EXPRESSED IN BONE MARROW, SIGNAL = 0.94; EXPRESSED IN FETAL LIVER, SIGNAL = 0.96
gattacctcccattgggtccctcccacaacatgtgggaattacagaagccacaattcaagatgagatttgagtgtgaaaccatatcaatatgtgaccactggatgtaaaagtttgttgaaagcagcgagcaacactggttgtaaccaaataagtgaagatgatcagctccaggttttctcccaaaactccaagggagaagttaaagggctcaaaattatgactgaaaagataaaagatcgtgatgattcaatgtgtttaataggaaacttagcaaaaaggcaataatcaaataattgtagaaaatatcacttatctgaagaaagtggaaaatgttccaaaggacctagcaaatatcagcaaaattaaatctgttacccacattaaaaacatcatagtgcaatgtttttatttcaaagaaactttgagactcaaaaaagccattattattgttgtcattattatttgggggatcggattttattct

SEQ ID NO: 4771 - DNA, 392 bp, Homo sapiens
  MAP TO AC011092.1; EXPRESSED IN HEART, SIGNAL = 3.2; EXPRESSED IN FETAL LIVER, SIGNAL = 0.94
tgtagtcaccatgttgcatagtagatatcttgaacttatttctcctaattgaaattttgtatcttttgaccaaagggagatattattttagagttggcatgagaagaggcaaatgtagctggaaagaattactttgaaattgatatcaccactcattttaattcagatattagaagactctatttatatttatactaatctcctctaaggctttctaactttcactgattgaagttaaagcagaagtatatggatagggacactgatgaaaagggtggtaagatacagagcaaaactacaagcaaaattcaacaagagacaggagggaagcaagagggtagaatttctgtgcaagaaattaagaattccatgaagaggcagggtatggacct

SEQ ID NO: 4772 - DNA, 399 bp, Homo sapiens
  MAP TO AL031672.12; EXPRESSED IN BONE MARROW, SIGNAL = 2.9; EXPRESSED IN HELA, SIGNAL = 2.9; EXPRESSED IN HEART, SIGNAL = 2.6; EXPRESSED IN FETAL LIVER, SIGNAL = 3.2; EXPRESSED IN ADULT LIVER, SIGNAL = 3.8; EXPRESSED IN BRAIN, SIGNAL = 3.2; EXPRESSED IN LUNG, SIGNAL = 3.1; EXPRESSED IN PLACENTA, SIGNAL = 3.1; EXPRESSED IN HBL100, SIGNAL =   3; EXPRESSED IN BT474, SIGNAL = 3.1
actttgtccaggaagaggggttctgtctagcctgggcctacgcacccctgaggcagaggcaggaggaccaggccattgacagcccaccagagttgcgtgggatggaggaggagcacccctcaagacgcagagaccttggcagacaggaggggcaggtgctgcctgggacagccatgctgggctaggccctggatcagggagggagcaaagaggtgtctgcttggggaagtccctcagcctctcctgcttaccaggcttgctgcttccagagcctggacttcagcgtggacgagaaggtgaaccttctggagctgacctgggcccttgacaacgagctcatgacagtggacagtgccgtccagcaggcagccctggcctgctaccaccaggagctgagct

SEQ ID NO: 4773 - DNA, 498 bp, Homo sapiens
  MAP TO AL078459.8; EXPRESSED IN FETAL LIVER, SIGNAL =   1; EXPRESSED IN HEART, SIGNAL = 0.89
tatttggcacttacccgtcctcctaaaagcctgataaccccagttatcttgtgctataagtggcctagctttcactaacttagaaatgagggtttggagggggaagggagacagggaacattccgattagccaacagtttcctaatgcaagtatgtctgtggcacagccatgtcagctaccagggaaacctgtgaattcaccacggaagccgtcaggccagcttagaggcatccgtgatgaaaatcccgagttatttctggagtaggtgattgacgtttcaaatagaagatgacattttaatgggatctaagcttgctgtgatcggagttaataagtataatgatgatgataatgatatttacattatctctttcatccaaagaacccttcagttcttttatcgcatttgccttgaaaatgtcccttcggagttgggaggggaaggtgttattaatctgttcttcaggaaagaaaatataaagagacttaattgccag

SEQ ID NO: 4774 - DNA, 465 bp, Homo sapiens
  MAP TO AL034408.2; EXPRESSED IN BT474, SIGNAL = 1.5; EXPRESSED IN HELA, SIGNAL = 1.7; EXPRESSED IN HEART, SIGNAL = 1.7; EXPRESSED IN FETAL LIVER, SIGNAL = 1.8; EXPRESSED IN BRAIN, SIGNAL = 1.1; EXPRESSED IN LUNG, SIGNAL = 1.3; EXPRESSED IN BONE MARROW, SIGNAL = 1.2; EXPRESSED IN PLACENTA, SIGNAL =   2; EXPRESSED IN HBL100, SIGNAL = 2.4
cttcttcccctggatgagcaacctgaggctggccaattgggccgggggacacctggggcctaatggggagccaggaagggcagccaatgatggggagggcattgtaggggcaaccatgccagactcattcccctacccctcctccaggacatgaacaagctgagtggaggtggtgggtgcaggactcaggtggaagggggccagctggggggtgaggagtggacccgccatgggagctttgtcaataagcccatgtggggctagctgcatcccaatgacaaagtcacgagacctggggtttcctacttggtttggtacatgggctgtgtggaggtcctgcagtcaatgagtgccctggacttcaacacctggactcaggtcaccagggaggccatcagttttgtgtgtgaggctgtgccaggtgccaagggggtgacaaggaggagaaagccctgtaaccatcca

SEQ ID NO: 4775 - DNA, 405 bp, Homo sapiens
  MAP TO AL031407.3; EXPRESSED IN BONE MARROW, SIGNAL = 8.1; EXPRESSED IN HEART, SIGNAL = 6.7; EXPRESSED IN FETAL LIVER, SIGNAL = 6.6; EXPRESSED IN ADULT LIVER, SIGNAL = 8.3; EXPRESSED IN BT474, SIGNAL = 6.9; EXPRESSED IN LUNG, SIGNAL =   7; EXPRESSED IN PLACENTA, SIGNAL = 6.2; EXPRESSED IN HELA, SIGNAL = 7.3; EXPRESSED IN HBL100, SIGNAL = 6.6; EXPRESSED IN BRAIN, SIGNAL = 7.2
aaggagagacagcgatttcttgggggttgaggggtacaatttaagtgggtgggcagagaagcctcactgaggagacataaagaccctgggggagtgaggggcatccgactgtctgggtcataatggtcctttggttcaggaacagctatgtaattcaagccaggccaaccaacgcctctccctgggatttttcaaccaaagcggactagaacccaccattttttctctcccttcagggagctgcagggaggaagccgggggctgctaacagccatgcctctccttcaggagaaaatgatgatggaggagagaaagaacaggagacaggacatggacatggaggtcctgggggcctggagagccgggttcatgggggcccggagcccactctgcccctgtctcttc

SEQ ID NO: 4776 - DNA, 430 bp, Homo sapiens
  MAP TO AL033520.9; EXPRESSED IN BRAIN, SIGNAL = 1.2; EXPRESSED IN BONE MARROW, SIGNAL = 1.2; EXPRESSED IN HELA, SIGNAL = 1.2; EXPRESSED IN PLACENTA, SIGNAL = 1.1; EXPRESSED IN HBL100, SIGNAL = 1.3; EXPRESSED IN HEART, SIGNAL = 0.99; EXPRESSED IN FETAL LIVER, SIGNAL = 0.95; EXPRESSED IN BT474, SIGNAL = 1.3
acaaaactgcgctccttcacaagtgctggtttcctagcgaggaggatccatagtctgagctctttacgtccaattttcccgcttcccactgtcgccaaaccaaagttaaaatgagtcctctagtcctctacgcgcgcctcaaaatgacccctcaggagagcggtaggggtgatgtcatcgctgcgcgacgacaggaagtaagatcctggcctgtgcagctcgggtttccgagcttctgcctcaggcatctccgcgatctcctctcccctccaatcctatccgtgatggacgatgcccacgagtcgccctccgacaaaggtggagagacaggggagtcggatgagacggccgctgtgcccggggacccgggggctaccgacaccgatggaatcccagaggaaactgacggagacgcagatgtggacttgaa

SEQ ID NO: 4777 - DNA, 483 bp, Homo sapiens
  MAP TO AC006546.9; EXPRESSED IN ADULT LIVER, SIGNAL = 0.72; EXPRESSED IN HEART, SIGNAL = 0.81
atccgtgatgtggaaaatgcactgaaattgaaggacaaaataaagcccatcagctctggagccagggataagtcacagcctctggacaccaagggcctcatccatcagataaagaagttggagcttcaggggtctgtgagttcacatacagcatccaagaacatggagggacagcaataggcccagaaagagacccctcacgtgactaccacggtctcatcacaagtgattttgatcattgtcagacatcctgtgcctttccacagaataaagcacaggctgtgttgagaagaacagaggggaattgggcctttgatcctcttgtaatctgtgtgagaaagatcatggaacacctctgtgacattcaacaatactcatgccaggtaagcaaagatgaatgacgtgcatagttcacttggaggggagacagagaggtaaatgtatttaatttcactgtgataggggttatgaaggtgttacgca

SEQ ID NO: 4778 - DNA, 430 bp, Homo sapiens
  MAP TO AC012140.1; EXPRESSED IN FETAL LIVER, SIGNAL = 0.96; EXPRESSED IN BONE MARROW, SIGNAL = 1.1; EXPRESSED IN BRAIN, SIGNAL = 0.96; EXPRESSED IN HELA, SIGNAL = 1.1; EXPRESSED IN PLACENTA, SIGNAL = 0.99; EXPRESSED IN HEART, SIGNAL = 1.1; EXPRESSED IN ADULT LIVER, SIGNAL = 1.1
tggaccacttttccagaaggacaggttctttcatggcctctcctttggcaagcttaaccaaccacctacaagcactctcacttccaagacaaagttatgtgggatacatatcaattcatgtccatctctagtcaatcacattttgccaactctaacacatggtacatggtgatggttttggagtatcaaatgagggatctggggagaagggacaccggcattttcaccaaaaccctggtggccgagcacacctacacattatgctccagagtgcggagatcttccaggagctcctgggctgcggtttgcaggcgggggttgcggctcttggacattgccaggatgcgttgcaggggcagggagctccggaactcagaggccgacttggagaagacttcaggttccagaaccacagactggacaagcctca

SEQ ID NO: 4779 - DNA, 493 bp, Homo sapiens
  MAP TO AC006560.8; EXPRESSED IN HELA, SIGNAL = 0.89; EXPRESSED IN PLACENTA, SIGNAL = 0.6; EXPRESSED IN FETAL LIVER, SIGNAL = 0.59; EXPRESSED IN ADULT LIVER, SIGNAL = 0.72; EXPRESSED IN HEART, SIGNAL = 0.78
ggaggaggaagtattttaagagggagacctaaagagagaaagaagatgatgaagttggtgggggaacctctgctgctatagtaggtgctgtttgtgagaggccttgaaagctcacccagcagagagagagagcatcgagcagcttgggtctgaggggacagtgggaccaggtggtggaatgagttcacacaaggcagttgtgagattttgggataagaagagcagcccctgggtttgtgctgtagaaaacattgcccataattaactgggtttccttatcagttggggccacagggtccctggtggataaagcaatgatgatgatgatgctgctgttgctgatgatgattttaatgatgataatgatgttgatgatgatgatgatattgatgacaaggataatattgatgctgctgatgatttaatgatgatgttgatgatgatgatattgatgacaatgataatattgatgctgatgatgatttaatgatga

SEQ ID NO: 4780 - DNA, 450 bp, Homo sapiens
  MAP TO AF188031.1; EXPRESSED IN HEART, SIGNAL = 1.4; EXPRESSED IN BRAIN, SIGNAL =   1; EXPRESSED IN BONE MARROW, SIGNAL = 0.99; EXPRESSED IN BT474, SIGNAL = 1.2
ctcccctatttagggctgccagattcagtaaataaaaatacaggatgcccaattaactttgaattttagataaacgacaacttttttagtgtaagtatatcccatgcaatatttgggacgtacttacaccaaaaagttaacctgttgcttgtctgaaattcacatttgactgggcatccctgcattttatctggcaaccctaccctcatccctaaagagcacggttcccactgctgccctctgtaccccacaccccggtgtggcccctggggtaaggcctctcagctctcaggggtgggctgcggccgggaccactcaccaggattcttttgtaagggaaatcctgcagttccccattccttggggagtcaaagaccaccgggagggtcttgtgcggcgcctgaacgtagcccagctccatctcatcctgcaagtgaggagaggcgagag

SEQ ID NO: 4781 - DNA, 419 bp, Homo sapiens
  MAP TO AC007558.3; EXPRESSED IN BONE MARROW, SIGNAL = 1.4; EXPRESSED IN LUNG, SIGNAL =   2; EXPRESSED IN HEART, SIGNAL = 0.86
aacgtccataaattgtggggaaagtgaaccatgaaaataaaattcacttatgttcatttagaaggaggaaataaaagaaagtatgttggaatttgagcctagggaaaatttaaggatggggtagttctaatggagtaagagaaagaggagttaaggatggttgtgaaagcaagatggaaatgataggacattatttcttcttatataccagcttctctcattttagggtgccaaaaacagctattataattcacctattccttccacccacaagtttcttctccctgatatcatctgtgtgcacaacttttatttttcctccatatttttgaaagaagaggtaacatagtctatgaagtatttttcctgtttaaaaaaataattgatttttcaaagcattacaacataggaagctgaga

SEQ ID NO: 4782 - DNA, 451 bp, Homo sapiens
  MAP TO AC007270.2; EXPRESSED IN FETAL LIVER, SIGNAL = 0.63; EXPRESSED IN HEART, SIGNAL = 0.81; EXPRESSED IN HELA, SIGNAL = 0.77; EXPRESSED IN PLACENTA, SIGNAL = 0.6; EXPRESSED IN LUNG, SIGNAL = 0.7
ggctaaaaataagttttgaaacagcttttcaagttttatttttatgaaaattatagcttgaagaatatacatgaaaagacaatatctcttctggaagttttaaaattaattttaaatacttgagtttattttattttgtagccttctaggtattatatttaagaaaatataattcactaatgggatggttgtattattttctgttactttaacaaaatacctgaaactgggtaatttataagtaaaatgaatttactttttatagttacagaaactggaagtccaaagtcaagggaccacatttggagaggacctttttgctggtgaagtctctgtgcagagtcccaaggaggcacagggtatccatggtgagggggctgagcatgctaacgtacttgctcaggtctctcttcctcttcttataaagacaacacttccactcccataattc

SEQ ID NO: 4783 - DNA, 434 bp, Homo sapiens
  MAP TO AL121587.4; EXPRESSED IN LUNG, SIGNAL = 2.7; EXPRESSED IN BONE MARROW, SIGNAL = 0.97; EXPRESSED IN FETAL LIVER, SIGNAL =   1; EXPRESSED IN ADULT LIVER, SIGNAL = 0.97; EXPRESSED IN HEART, SIGNAL = 0.91
ccttggtcacacacttccttctgatttctttcttctgatgattcattaaaaaaaaattctccttttaaattcacatcagaaatgtctgagtacctcggctcaccctgccctaagctttaacccctgcccctgaaccagcaaaacccaacataaccccaggtggctaagaagacactggctgccaagaaaccagaagccagccaaggggaaacaacgggtttcaggctctgcgatggctgccagaggcccccatgggccctcctgtgacccaggagggttttcagcagctactcacatgcacagatccacagctctcagccagaactcgtgcagtttcagaatttgtttgaatttcagaaaagtaatgaagtgcaaattctgcaaattatgccatagcttcagtggagcctcaggcaacacctgcaatggaacac

SEQ ID NO: 4784 - DNA, 472 bp, Homo sapiens
  MAP TO AC007560.3; EXPRESSED IN LUNG, SIGNAL = 0.82; EXPRESSED IN HEART, SIGNAL = 0.85; EXPRESSED IN ADULT LIVER, SIGNAL = 0.77; EXPRESSED IN BRAIN, SIGNAL = 0.95; EXPRESSED IN PLACENTA, SIGNAL = 0.65; EXPRESSED IN HELA, SIGNAL = 0.85
acccattgaacagcaactccctatcttccctatgccctattatcccctgtcagctactgttctactttctacttatatgaacttgatcattttaggtacctcatagaagtggaatcatgcaatgtttgtctcctgtgactggtttctttcacttagcatgatatcctcaaggtttatgttgtagcatataacaagatgttcctatttctctaaggaagaataatatttcattgtatgtacataccacattttctttttccatttatctgtcaatggacacaggttgtttctgccctttggctattgcgagtaatgctgcaacgaacacagaagtgcagatgcctcttcagggtcctagttttcagttcctttgggtgaataccagaaatcacatggtaaatactgaatcatatggtagttctatttttaattgtttgaggaacctccatactgtttcacacagtggctgcac

SEQ ID NO: 4785 - DNA, 367 bp, Homo sapiens
  MAP TO AL121998.2; EXPRESSED IN PLACENTA, SIGNAL = 2.7; EXPRESSED IN HBL100, SIGNAL = 3.5; EXPRESSED IN HELA, SIGNAL = 2.9; EXPRESSED IN BT474, SIGNAL =   3; EXPRESSED IN LUNG, SIGNAL =   2; EXPRESSED IN BRAIN, SIGNAL = 2.9; EXPRESSED IN BONE MARROW, SIGNAL =   3; EXPRESSED IN HEART, SIGNAL = 2.9; EXPRESSED IN ADULT LIVER, SIGNAL = 3.7; EXPRESSED IN FETAL LIVER, SIGNAL = 2.5
gtctttttcttgtcctgccctcaatttgtatagcctatggctgggtgagtttccctttgccccatgcaccatgactgccctgtggacaaggaagtgtctggtccacccacatctctcagacaagttcagtgaatatggtgtacccaaattgttggttgggttgcagcaaattctagggggcaaagggatatcttctgtgacctgctagctctgtgtccattccagacagaaacaagagggacaccatggtggaggacttggtggtcctggtacgaggaggggcaagtgagcacatcaccaccctggcataccaggagctgccgacggcggacctgatgcaggagtggggagacgctgtgcagtacaa

SEQ ID NO: 4786 - DNA, 460 bp, Homo sapiens
  MAP TO AC007556.2; EXPRESSED IN HEART, SIGNAL = 0.82; EXPRESSED IN HELA, SIGNAL = 1.6; EXPRESSED IN BT474, SIGNAL = 0.6
cgccgtgttcttcttaaagtcacagtggacatgcctaggcatattgttgtagatcccaagaacagatacctcttctgggctgactatgggcagagaccaaagattgagcgttctttccttgactgtaccaatcgaacagtgcttgtgtcagagggcattgtcacaccacggggcttggcagtggaccgaagtgatggctacgtttattgggttgatgattctttagatataattgcaaggattcgtatcaatggagagaactctgaagtgattcgttatggcagtcgttacccaactccttatggcatcactgtttttgaaaattctatcatatgggtagataggaatttgaaaaagatcttccaagccagcaaggaaccagagaacacagagccacccacagtgataagagacaatatcaactggctaagagatgtgaccatctttgacaagcaagtcc

SEQ ID NO: 4787 - DNA, 473 bp, Homo sapiens
  MAP TO AL122020.1; EXPRESSED IN HBL100, SIGNAL = 2.3; EXPRESSED IN HELA, SIGNAL = 2.9; EXPRESSED IN FETAL LIVER, SIGNAL = 2.8; EXPRESSED IN BT474, SIGNAL = 2.5; EXPRESSED IN BRAIN, SIGNAL = 1.9; EXPRESSED IN PLACENTA, SIGNAL = 3.7; EXPRESSED IN HEART, SIGNAL = 1.7; EXPRESSED IN ADULT LIVER, SIGNAL = 3.1; EXPRESSED IN LUNG, SIGNAL = 3.9; EXPRESSED IN BONE MARROW, SIGNAL = 1.7
gtgccaaaaagcttggagacctctggtgtatagggttacatgttgtactcaccttataagaagtggcagaaagcaagtttagtgataaaactagctaaaaaacaaagcaagggtataacaaacacaaaaatcacaatgtagttaactctgggatagccaatagtttccctggtgttcatcttattattttattatgtaggtgccccttgattctgggtatttttgtatgtatcaaatattacataattaaaagccagccaaagccagctatcatgactgcactctcattactcacgccccgggcctgcaagctgtggtgtggtttccaggttccccgtgagcatcgccgcagcgaccgcccacagcaccagctgctgatggctcacacctcctggggctgcaaggcctgtccctggctctggcagcgagatgacagggctgttgccccggcagggtgaggccaaaggttagag

SEQ ID NO: 4788 - DNA, 460 bp, Homo sapiens; identical to SEQ ID NO: 2029
  MAP TO D84394.1; EXPRESSED IN BONE MARROW, SIGNAL = 1.6; EXPRESSED IN PLACENTA, SIGNAL = 1.2; EXPRESSED IN HBL100, SIGNAL = 3.9; EXPRESSED IN HELA, SIGNAL = 3.3; EXPRESSED IN BT474, SIGNAL = 1.3; EXPRESSED IN BRAIN, SIGNAL = 1.1; EXPRESSED IN LUNG, SIGNAL = 2.4; EXPRESSED IN HEART, SIGNAL = 1.4; EXPRESSED IN ADULT LIVER, SIGNAL = 0.99

SEQ ID NO: 4789 - DNA, 413 bp, Homo sapiens
  MAP TO D87675.1; EXPRESSED IN HBL100, SIGNAL = 2.4; EXPRESSED IN BT474, SIGNAL = 1.6; EXPRESSED IN LUNG, SIGNAL = 3.4; EXPRESSED IN BRAIN, SIGNAL = 3.4; EXPRESSED IN PLACENTA, SIGNAL = 2.7; EXPRESSED IN HELA, SIGNAL = 2.7; EXPRESSED IN HEART, SIGNAL = 1.4
gaaagcattgccttataggtggctaagaacatctgtagcatacataacacttaatctaaaggagtgttgaagaccgggctgattcctaattgagaatgagcaagaatagaactctttttgatagttatccctgttcttcctccaagcctctgccttggagctatggatactataactaactgaagcttcttctttcaggtacccactgatggtaatgctggcctgctggctgaaccccagattgccatgttctgtggcagactgaacatgcacatgaatgtccagaatgggaagtgggattcagatccatcagggaccaaaacctgcattgataccaaggaaggcatcctgcagtattgccaagaagtaagtcctgtccggtggctagcaattcacgttggatcacatgcatt

SEQ ID NO: 4790 - DNA, 469 bp, Homo sapiens
  MAP TO AP000125.1; EXPRESSED IN HEART, SIGNAL = 0.84; EXPRESSED IN BONE MARROW, SIGNAL = 0.7; EXPRESSED IN FETAL LIVER, SIGNAL = 0.57; EXPRESSED IN LUNG, SIGNAL = 0.65
ctgacagaacaaaaagacctagctaaacctcaaaaaaaaagaagtcactggaaagcacattgtccagatggttctggtggggaacacctttgcctgcttatagctctgtgagatcctgagcttggtgagatggactgggaagtcctaacttcatttatgtcttctctccaccctgaaacgatgccaaaatgaccccaaatctcaaataaaagttggtgtctgttgctgtaaatgtacaaataacccaaagtcaaaattagggatggaagttaccattccttttgccttctgtgttttgaggtggtcgtggggaggaggaaggctttcagggacaagcagacggcgacagggatcacactgtcacctgtgtgcgccttttcttctaatggccttaaactgccaagtggctgcaactgcagcgtgctgattttaaatgcttttatggaaagcaccatccccttttcgacta

SEQ ID NO: 4791 - DNA, 1959 bp, Homo sapiens
  MAP TO AC005261.1; EXPRESSED IN FETAL LIVER, SIGNAL = 1.8; EXPRESSED IN LUNG, SIGNAL = 4.7; EXPRESSED IN HBL100, SIGNAL = 1.7; EXPRESSED IN PLACENTA, SIGNAL = 1.3; EXPRESSED IN BT474, SIGNAL = 2.2; EXPRESSED IN BRAIN, SIGNAL = 1.9; EXPRESSED IN BONE MARROW, SIGNAL = 1.3; EXPRESSED IN HEART, SIGNAL =   2; EXPRESSED IN HELA, SIGNAL = 2.4
agatctggggttcaagatggcaaaatataacagacataaaggcaccatttataacttcattttttttactgaagtggtgagtttgtttcttctctttttacattactaacaagcccttctgtgtgttggatttctttcaggtgacaaaggaaaacccaagagcacagaacctaccacctgtgagctagccttgtctgaaggaatctctttttggggacaactaacacaaggagcttcaggggactcccagttggggcaacccaaggatcaggatgggttttcagaaatgcagggagaacgcttgagaccagggttagattcccaaaaggagaagcttcctggaaaaatgagccccaaacatgatggtttagggacagctgatagtgtgtgttcaaggattatacaggatcgagtctccttaggagatgatgtccatgactgtgactcacatggatcaggtaaaaatccagttattcaggaagaggaaaatatctttaaatgcaatgaatgtgaaaaagtgtttaacaagaaacgcctgcttgctcggcatgagaggattcactctggagtgaagccctatgaatgcacagagtgtggaaaaacctttagcaagagtacatacctcctgcagcaccacatggtccacactggggagaagccctataagtgcatggagtgtgggaaggcttttaatcggaagtcacaccttacccagcaccagcggattcacagtggagagaagccttataagtgcagtgaatgtggaaaggccttcacccaccgctccacttttgtcttgcataacaggagccacactggagaaaaaccctttgtgtgcaaagagtgtggcaaagcctttcgagataggccaggtttcattcgacactacatcatccacagtggtgagaatccctacgagtgcttcgaatgtggcaaggtcttcaaacacagatcatacctcatgtggcaccagcagactcataccggggagaagccctatgagtgcagtgaatgtgggaaggccttctgtgagagcgcagcgctgattcaccactatgtcatccacactggagagaagccctttgagtgcctcgagtgtgggaaggctttcaaccaccgatcctacctcaaaaggcaccagcggattcacactggggagaagccatatgtgtgtagtgaatgcggaaaggccttcacccactgctctactttcatcttgcataaaagggcccacactggagaaaaacctttcgagtgcaaagagtgtgggaaagcctttagcaatagggcagacctcattcgccacttcagcatccacactggagagaagccctatgagtgcatggagtgtggaaaggccttcaaccgcaggtcaggcctcacaaggcaccagcggattcatagtggagagaagccctatgaatgcatcgagtgtgggaaaacattttgctggagcacaaacctcattcgacactctatcatccacactggagagaagccgtatgagtgcagtgaatgtggaaaggccttcagtcgcagctcgtccctcactcagcatcaaaggatgcatactgggagaaatcctatcagtgtaacagatgtgggaagaccttttacaagtgggcagacctcagtcaacatccaagaacttttattggggaaaaactttttgaatgtcaccactgaggaaaatcttttgcaagaggaagcatcttacatggcatctgatcgtacataccaaagagaaaccccacaagtgtcttcactgtgagaaaaccttctgttgccaaatgtcatttgtcacctaaggagtcatattagaaaatcacgcagcttagagccttattctccatccgaattcatcctggaaaaacacccagtggttattacgcacttgggaaaacctttagctccatctttctcattagtttacagtgcaatgttatctcaggaattttt

SEQ ID NO: 4792 - DNA, 1968 bp, Homo sapiens
  MAP TO AC004414.1; EXPRESSED IN HEART, SIGNAL = 1.2; EXPRESSED IN BT474, SIGNAL =   2; EXPRESSED IN BRAIN, SIGNAL = 1.8; EXPRESSED IN PLACENTA, SIGNAL = 1.4; EXPRESSED IN HELA, SIGNAL = 1.9; EXPRESSED IN HBL100, SIGNAL = 0.92; EXPRESSED IN ADULT LIVER, SIGNAL = 1.8; EXPRESSED IN FETAL LIVER, SIGNAL = 1.3; EXPRESSED IN LUNG, SIGNAL =   2; EXPRESSED IN BONE MARROW, SIGNAL = 1.2
atattggcttggggtctgcttggagtctgctctctggattctgcgtctgcgtgggcacaggggtggaggggggtcccctggcagagctctctgagggtcggcccaggtgtttttccacagagttgcacctccagaactctctgactttcccaatgggctgagattctgcttcaggcacagacgaagacagggaaatgatcctgatgccggtggcgtgaggactcaccaagttccccagctcgtcaatcttaatggctccggtggagagggacacatctctgtcgtaacatcgcatctctgactttggaggaatgattttatacgttgtgaggccgtgcttaagtctgtagcttttccctgggttttggcctcgttggtgccatgatgttggtgccaaggcagcgtttttatcgttgctgtccttttcattcaccggttgggaattcactctctctgtggcttgagtcctctccccgtcagcacagccatacactttgtctttcacttttgcatttaggttgtctgtgtgaagattcgaagcaaaagaagtcaccctgggcgccgtttccattagattcccatctttagagatgttagataaggccacacggattccttttccgacgtcatgggaagcggggtgcagggcaggtacttcctcccttgccttttcatggggctggctgtgctcagcttgaagtggcgccagggagtctctcctgctggcaacaccctccgagtcgaaagacccagcattgttgtttctattggaaaacaaccccgaatccacaggatcatctgaaacttcccctatgaatgttactgggattgcatctgtgtcgccgtgagggatcatggcatcctgtgggcagtggttggatgcaccatggatggagctggtgagggagctggtgtctgtttcatagctgtcttccatttctgcaaagagggacaaacacaaatcacagatgtttcccacaccaattacttagtgtaactgcagccatgactttgatttccctgaggttacttttgaatacattatttatatacgttttaaaatgttatttgggtttgtaatctacataatatgcctggggccagaagctcaactttcattactcaacacagctgtttgcagatccatgatgtttcaaggcaaggtattcagttacaatgtgctgccaacatccttcacttaaaaaactgatttgtagatccaagcctctggaaaaactgtctcaacacagaaacatgaaaatgagttttgggttttgacctccatgtttctcatgtccactagaagcacaacaaaatccagaggaccacgggctgtagctttaacttcttaaggaagcagatgactaaatcttgagtatctcagaattaccatggctcttccaagcaccaaattatgcaatggtcatggggtcagaacctgcgggacacactatggctgattcaaatttttagctctgtcaactatacattctcaggacaggaaactgaaaagtgagtcagacaaaaactactcgtcagttttgcagtctgttatcttctctctaaggcatgataaatatctaatttttagtttattttcaacatgtgcattggagaaaataacatagctgctttgtttgaaagattccctagctgtttactgcaactatttgccatctgctttggccttccagtattatttccccaaaatatatcaatataatagcagtgccatgagatgctccattataaatggcttcattgtggtcaaaaggctgagtatttctcattgacagatatgccatatatcaacaaattaagagaagtcttaatgaggaaatctgtttattttttgcgccaccctttttattctttaacatgtgtggcatacttttttaatgcactgaattagtattattcagagcacactgtaagcagttgtctggatgtttccaggtactgcttggc

SEQ ID NO: 4793 - DNA, 436 bp, Homo sapiens
  MAP TO AL009182.13; EXPRESSED IN HEART, SIGNAL = 1.1
atccccacattgttttgtgccgattattacatgtacccaatgtaacatagataaccttcttccctcttctccattccccgggactgagggtctgcactcctgactctcagagttcctcttgagtgttggggctctgtctcctgttaagagaagctttcttccctaggtccctcctcctctccccctttcaccgggagatgccaatcaaagtgcaccctgccctggaggtgggctgcctcgagtgtggatttctttgtgcatccttccagagtgggtgtttgttggcctggtgctcctgggcgtcttcctcttcttcgtcctggtggggatctgctggtgccagtgctgccctcacagctgctgctgctatgtccgctgcccatgctgcccagattcctgctgctgccctcaagcctgtgagtacagtgaccgctgg

SEQ ID NO: 4794 - DNA, 1947 bp, Homo sapiens
  MAP TO AC003682.1; EXPRESSED IN FETAL LIVER, SIGNAL = 2.5; EXPRESSED IN HBL100, SIGNAL = 2.3; EXPRESSED IN HEART, SIGNAL = 2.3; EXPRESSED IN PLACENTA, SIGNAL = 2.7; EXPRESSED IN ADULT LIVER, SIGNAL = 2.4; EXPRESSED IN BT474, SIGNAL = 2.4; EXPRESSED IN BRAIN, SIGNAL = 2.2; EXPRESSED IN LUNG, SIGNAL = 2.6; EXPRESSED IN BONE MARROW, SIGNAL = 2.3; EXPRESSED IN HELA, SIGNAL = 2.5
ggctgttggtagaggaatggtttgaaggcaatgccattccctgtccttcatcccatccttgtgtcctttatttggtgaggcctccctcattctgtgatctttagagatccagtattgcaaagcaaccccttcctcaacttgcccccagctccattatcctcaaaacaaacctggtgaatcattcgtttggtatgtgtgtaatggggcttcttgctctcagcatagtcaatgtatatttcatcagcggttctctgctttcaggttgtggccatggaacagaggatgaagagacaccttctgaccagaatgtttctgtaggagtgtcacagtcaaaggcaggttcatccacacagaagactcaatcctgtgagatgtgtgtcccagtcctgaaagatattttgcatctagctgatctccctgggcagaaaccatacttggttggagaatgtacaaaccatcaccagcaccagaagcatcacagtgcaaagaaatccttgaagagggacatggacagagcctcatatgtgaagtgctgcctattctgtatgtcattgaagccctttcgcaaatgggaggttggaaaggaccttccagccatgttgcggcttctgaggtccctggtctttcctggaggcaagaaacccggcacaattactgaatgtggggaggacattcgcagtcaaaaaagtcattacaagtcaggtgaatgtgggaaggcttccaggcacaaacacactcctgtttaccatccaagagtctacactggaaaaaagctttatgagtgtagcaaatgtgggaaagccttccgtggcaagtactcacttgttcagcaccagagagtccatactggagaaaggccttgggagtgcaatgaatgtggaaaattctttagccaaacctcccacctgaatgatcatcggagaatccacaccggagaaaggccttatgagtgcagcgaatgtggaaaattatttagacaaaactccagccttgttgaccaccagaaaatacacactggagcaaggccttatgagtgtagccagtgtgggaaatcctttagccaaaaagccacccttgttaaacaccaaagagttcacactggagaaaggccttataagtgtggtgaatgtgggaattcctttagtcaaagtgccattcttaatcaacaccgaagaattcacactggagcaaagccttatgagtgtggccagtgtgggaaatcctttagtcaaaaagctaccctcattaaacaccagagagttcacactggagaaaggccttataagtgtggtgactgtgggaaatcctttagtcaaagctccatccttattcaacaccggagaattcatactggagcaaggccttatgagtgtggccagtgtggaaagtcctttagccaaaagtctggtctcattcaacaccaagtggttcacactggagaaaggccttatgagtgcaacaaatgtgggaattcctttagccaatgctccagcctcatacatcaccaaaaatgtcataacacatagaggcctcatgaatgcagcaaatgtggaagcgccttcaactcaagatctatcatcatttagctcctgaaagtccacacttaagtagagccttagacctacagggaaagtgctgtctctgtagtattgtagcagtagagagcctttgtgagggagccatctgcctgaagttgaacctcattcttccttgtttctctggtagaaaccatctaccctctaccaccttgcacagtgggcactggtcactcctatgtgctaagacaaggcagacatctgtgtgttctcttaagtctttggaggaaatcttgagcagtctaagcctttagagaaaattcattcttttttctgactgatcacagcatacgtgtgacccagtttgggtcaggagggcccagccttggttctgctggacacttatgtgcaa

SEQ ID NO: 4795 - DNA, 1986 bp, Homo sapiens
  MAP TO AC005587.1; EXPRESSED IN HBL100, SIGNAL =   1; EXPRESSED IN HEART, SIGNAL = 1.1; EXPRESSED IN PLACENTA, SIGNAL =   1; EXPRESSED IN HELA, SIGNAL = 1.9; EXPRESSED IN BT474, SIGNAL = 1.5; EXPRESSED IN ADULT LIVER, SIGNAL =   1; EXPRESSED IN FETAL LIVER, SIGNAL =   2; EXPRESSED IN LUNG, SIGNAL =   3; EXPRESSED IN BRAIN, SIGNAL = 0.95
ttgtggcagcactacctgagagtatgagaccagatgagaatccttatggttttccatcggaactggtggtatgtgcagctgttattggattttttgttgttctcctttttttgtggagaagttttagatcggttaggagtcggctttatgtgggaagagagcaaaaacttggtgcaacgctttctggactaattgaagaaaaatgtaaactacttgaaaagtttagccttattcaaaaagagtatgaaggctatgaagtagagtcatctttagaggatgccagctttgagaaggcggcagcagaagaagcacgaagtttggaggcaacctgtgaaaagctgagcaggtccaattctgaacttgaggatgaaatcctctgtctagaaaaagacttaaaagaagagaaatctaaacattctcaacaagatgaattgatggcggatatttcaaaaagtatacagtctctagaagatgagtcaaaatccctcaaatcacaaatagctgaagccaaaatcatctgcaagacatttaaaatgagtgaagaacgacgggctatagcaataaaagatgctttgaatgaaaattctcaacttcagacaagccataaacagctttttcagcaagaagctgaagtatggaaaggacaagtgagtgaacttaataaacagaaaataacatttgaagactccaaagtacacgcagaacaagttctgaatgataaagaaaatcacatcaagaccctgactggacacttgccaatgatgaaagatcaggctgctgtgcttgaagaagacacaacggatgatgataacctggaattaaaagtgaacagtcaatgggaaaatggtgctaacttagatgatcctccgaaaggagctttgaagaaactgattcatgctgctaagttaaatgtttctttaaaaagcttagaaggagaaagaaaccacattattattcagttatctgaagtggacaaaacaaaggaagagcttacagagcatattaaaaatcttcagactcaacaagcatctttgcaatcagaaaacatatattttgaaagtgagaatcagaagcttcaacagaaacttaaaataatgactgaattctatcaagaaaatgaaatgaaactctacaggaaattaacagtggaggaaaattaccgaatagaggaagaagagaagctttctagagtggaagaaaagatcagccatgccactgaagagctggagacctatagaaagctagccaaagatcttgaagaagaattggagagaactgttcatttttatcaaaagcaggttatttcctacgagaaaagaggacatgataattggttggcagctcggactgctgaaagaaacctcagtgatttaaggaaagaaaatgctcacaacaaacaaaaattaactgaaagagagttgaaatttgaacttttagaaaaagatcctaatgcactcgatgtttcaaatacagcatttggcagagagcattccccatgtagtccctcaccattgggtcggccttcatctgaaacgagagcttttccctctcctcaaactttgttggaggatccactcagactctcacctgtgcttccagggggaggaggaagaggcccaagcagcccagggaatcccctggaccatcagattaccaatgaaagaggagaaccaagctatgacaggttaatcgatcctcacagggctccttctgacactgggtccctgtcatctccggtggaacaggaccgtaggatgatgtttcctccaccagggcaatcatatcctgattcaactcttcctccacaaagggaagacagattttattctaattctgaaagactgtctggaccagcagaacccagaagttttaaaatgacttctttggataaaatggataggtcaatgccttcagaaatggaatccagtagaaatgatgccaaagatgatcttggtaatttaaatgtgcctgattcatctctccctg

SEQ ID NO: 4796 - DNA, 487 bp, Homo sapiens
  MAP TO AP000105.1; EXPRESSED IN HBL100, SIGNAL = 1.1; EXPRESSED IN FETAL LIVER, SIGNAL = 0.98; EXPRESSED IN ADULT LIVER, SIGNAL = 3.2; EXPRESSED IN HEART, SIGNAL = 0.89; EXPRESSED IN BT474, SIGNAL = 0.66; EXPRESSED IN BONE MARROW, SIGNAL = 0.76; EXPRESSED IN LUNG, SIGNAL = 0.7; EXPRESSED IN HELA, SIGNAL = 1.1
gtcgtgtgtgtcgtctgagcatttgcataatagtaaacctgtaagcaccagaaacacctatgttgggaggcagtttgtgttatcattttgaacctggatttaatctagtaaagtccttcctacaggggggtaaaagcaccgtcccagcaggtgggagtgggctgaccttgtccatgggcatcctccacagcaaggaggcgtggggagagggcttgtcacccaagcccagaagtcaagacactgtggctctaggctagtgggagagaggactggactgaggtggaattcccagtccttcacctgggagaaatgcaccttgcgctggcattttgcagcctctgcctctaagtcggtgggcacggctgagccccggacagtcagcaccaggaatttggaccatgttttgtgttttattaaagtggttatctcccacttatatgtttgctctggggtcagggtggccacagtgacaaccgccacattcaac

SEQ ID NO: 4797 - DNA, 1955 bp, Homo sapiens
  MAP TO AL031058.1; EXPRESSED IN BONE MARROW, SIGNAL = 1.5; EXPRESSED IN BRAIN, SIGNAL = 1.2; EXPRESSED IN PLACENTA, SIGNAL = 4.3; EXPRESSED IN BT474, SIGNAL =  10; EXPRESSED IN FETAL LIVER, SIGNAL = 2.8; EXPRESSED IN LUNG, SIGNAL = 2.9; EXPRESSED IN HEART, SIGNAL = 8.6; EXPRESSED IN HELA, SIGNAL = 6.4; EXPRESSED IN HBL100, SIGNAL = 1.4; EXPRESSED IN ADULT LIVER, SIGNAL = 1.9
atatgagcagctggtgcaagaattatgatgagaatccagatttcttgaatatttgcctagtcactctttgcatgtatgtccatgtgtgtaaagagaaataagaatgcacattggtctgggaggggaaaagtactgcttctttcttggaatgtgaggtgtttttcttttgacataatctctgatttcattccacagctgaaaaataccaagatcgaagttttggaagaggagctcagactggcccgagatgccaactcggaaaactgtaataagaacaaattcctggatcagaacctgcagaaataccaggcagagtgttcccagttcaaagcgaagcttgcgagcctggaggagctgaagagacaggctgagctggatgggaagtcggctaagcaaaatctagacaagtgctacggccaaataaaagaactcaatgagaagatcacccgactgacttatgagattgaagatgaaaagagaagaagaaaatctgtggaagacagatttgaccaacagaagaatgactatgaccaactgcagaaagcaaggcaatgtgaaaaggagaaccttggttggcagaaattagagtctgagaaagccatcaaggagaaggagtacgagattgaaaggttgagggttctactgcaggaagaaggcacccggaagagagaatatgaaaatgagctggcaaaggtaagaaaccactataatgaggagatgagtaatttaaggaacaagtatgaaacagagattaacattacgaagaccaccatcaaggagatatccatgcaaaaagaggatgattccaaaaatcttagaaaccagcttgatagactttcaagggaaaatcgagatctgaaggatgaaattgtcaggctcaatgacagcatcttgcaggccactgagcagcgaaggcgagctgaagaaaacgcccttcagcaaaaggcctgtggctctgagataatgcagaagaagcagcatctggagatagaactgaagcaggtcatgcagcagcgctctgaggacaatgcccggcacaagcagtccctggaggaggctgccaagaccattcaggacaaaaataaggagatcgagagactcaaagctgagtttcaggaggaggccaagcgccgctgggaatatgaaaatgaactgagtaaggtaagaaacaattatgatgaggagatcattagcttaaaaaatcagtttgagaccgagatcaacatcaccaagaccaccatccaccagctcaccatgcagaaggaagaggataccagtggctaccgggctcagatagacaatctcacccgagaaaacaggagcttatctgaagaaataaagaggctgaagaacactctaacccagaccacagagaatctcaggagggtggaagaagacatccaacagcaaaaggccactggctctgaggtgtctcagaggaaacagcagctggaggttgagctgagacaagtcactcagatgcgaacagaggagagcgtaagatataagcaatctcttgatgatgctgccaaaaccatccaggataaaaacaaggagatagaaaggttaaaacaactgatcgacaaagaaacaaatgaccggaaatgcctggaagatgaaaacgcgagattacaaagggtccagtatgacctgcagaaagcaaacagtagtgcgacggagacaataaacaaactgaaggttcaggagcaagaactgacacgcctgaggatcgactatgaaagggtttcccaggagaggactgtgaaggaccaggatatcacgcggttccagaactctctgaaagagctgcagctgcagaagcagaaggtggaagaggagctgaatcggctgaagaggaccgcgtcagaagactcctgcaagaggaagaagctggaggaagagctggaaggcatgaggaggtcgctgaaggagcaagccatcaaaatcaccaacct

SEQ ID NO: 4798 - DNA, 463 bp, Homo sapiens
  MAP TO AL049839.2; EXPRESSED IN LUNG, SIGNAL = 0.71; EXPRESSED IN HELA, SIGNAL = 0.71; EXPRESSED IN BRAIN, SIGNAL = 0.75; EXPRESSED IN HEART, SIGNAL = 0.85; EXPRESSED IN PLACENTA, SIGNAL = 0.7; EXPRESSED IN FETAL LIVER, SIGNAL = 0.69; EXPRESSED IN ADULT LIVER, SIGNAL = 0.83
aaggagatgagagaccatttgtgtttatgtgattgtaatcttgctacactattgtaatagtttctaatagtattgatcattttcaaatgaggagacagaagctcagggaggctccgggctcagcccccagggccacgcaggtactaagggacctctcaggagggagttagtgagtgggatttggcttcctgagtgtggactccaagattccagcatccagggtgctttccccactcccacaagctgctagaagggtaaccccaagcccgttctcggttctctgcgaggatgacgtccgtgttgctcttcccctcagctgagtggatgaagccctttgactcacgtgccaccagcccaaaggagttctttgtagatgagcacagcgctgtgtgggtgcccatgatgaaggagaaggccagccaccgcttcctgcacgaccgtgagctgcaatgctctgtgctgc

SEQ ID NO: 4799 - DNA, 1972 bp, Homo sapiens
  MAP TO AL031664.1; EXPRESSED IN BT474, SIGNAL = 1.3; EXPRESSED IN FETAL LIVER, SIGNAL = 0.98; EXPRESSED IN BONE MARROW, SIGNAL = 0.97; EXPRESSED IN LUNG, SIGNAL = 1.3; EXPRESSED IN HEART, SIGNAL = 1.2
atccaaacaggaaccctcacccttttatcatttgctctaaaatatcaaagcattacccctacagtggccccaaatacattttatcccatcaagcctgggcattttaagagctcttctctcctgatttcttcttgtctgactttgtctttccaatcatggtctccacgatcacagcggtttcttcatatgtctgaatgctctccgtggaaatcttctcgatagattccaccacttccactgtcttataggccaaagccttgggagggcctttttctggcaggcttctgctcctagtcccaagcacctcagctccatcctgatcagccgcaggctttggaggctcaggtatagatggttcctctgcaccgggtgtgaccatggcacagggtctcctggactcttcgtcccgctcctcaccctcacgtttctcttcagggccttccagctctgcaccatctggctcaatctccttgtctataggctgctggtcaattggttgtccatcttctttctcctgcagacccacctgcccattctctaaagggggcttgggtgactcaggagagggctccacctggccgtcataaagcacagagtcttccgcaacagaaacagccaccccacctttagctgtgatggaggagacatagaatctagggtccacgtaattggcatcccctgtgaccagcacgtgccgctctttggtgtagagctcagtgggggtctcaggctctttggggcttctcactttctccttgaccttcctgtatagtttcccaaagcctttgcttatctgccctccatctggcacatcctctggagccccttcttgtgtcaggggacttacttctttactttctgattcaaacttagattcactttcctctttaagtaccacctgtaccagctttgtgtcttccaaaccttttaatggtgcatcttccagagctccgttggttttgtcttttgttataatctcttttctccttggaacattcttggggagggctttttgtcttggttttgctgctgttatatcctgcagagctctggtaagatctggaaaaacacacaggcagaaattcaagtataattgtcactgagagagaaagaaaatacgctggttggaaaataggctaactctctcggaaacaaacgcctatagtactagggtggggcttccttcatctggagcagaagcaatggaagaaaggccctggctttgttgctccatggcccaggctgaggtccagctgggcgactctggacaagtcactggatgcctttgggcttccagagggaaggtgctccctgttctgacacccacagttcaccaccacaccaggcagaacctaccaaggtatgcaaggccattgtcctgacactcaatgggagccctagcccctgttcccactgcagccccactgagctcacagcagacacttggatccacagaagcccattcctcaaagttattctctcctctgacttcctcaaaggagagacgacagagctacctgggggcttctgacatgctcagatggccttgggcctggagatggaacccgttcacggtggatctacctcattccataattagctcaagctagataaatgccacccggctgtgatcagcctccccttcctcccaggccaagagaagaagcgatgctatgaaattcagaaatgacaggaatcccctgccccaagtccaccctcctgcttccagactagctgaaaggaaaaactaaaagttgaagaaaacacataaaattctcacctggtataatctatgaggcttcccggctccacccacatagtgaattttgaactttttcagcccaaaagtcatcccctgcatcccttcccactggtaaccacagggcaagaccgatcaagcaccggcatcaagcacggctgattcacaataaaaagagagccaggtgagccggcaacagcagacatgggtcac

SEQ ID NO: 4800 - DNA, 1991 bp, Homo sapiens
  MAP TO AL031277.1; EXPRESSED IN HEART, SIGNAL = 1.6; EXPRESSED IN BT474, SIGNAL = 1.4; EXPRESSED IN BONE MARROW, SIGNAL = 1.1; EXPRESSED IN LUNG, SIGNAL = 2.6; EXPRESSED IN BRAIN, SIGNAL = 1.8; EXPRESSED IN PLACENTA, SIGNAL = 0.98
ttttccacactttgtgcagcgaatggcggtagtgaaagtctgtggaatattgtgtgtagtgaaatttgtggctgtcacaccaatccccatggggttacggtgatggtactgaaatggaggtggtttaaagcttgggtaatgctgattgaggcccaatcgaacatctggatcttttgtctttattccagaagccattatttttatagtcgtgtaaagctcttcagaggaatcatttaactcctcttcttctttagaagtttctaaaggatcttctggcaagctctgcatatgctctacatgggccttgctgggatctgtaaagttctggggcctcagagtcccgctttcaaactcgtgatgtgtgcacaccttatctgggtggagatctcgctggtgctgctgcaaattgcacaaaaaagcaaattcttttttacaaacagaacacacaaagatattcccaactccatgaagcaaaaagcgatgttctgacaagtccgttttatccttaaaaagctgcacacaaaattcacatttgaagggccattcttcagcatgaatagataaatgtttggttagatctttaatggaaagaaaaggtgattcacagacgttgcaaacaaagtttttgttgaatgtttcctgaacaacaacatcctgttcagcagcagactggggctcttccctgggtttcagaccttcattctctaattcctcctgtttgaaagatatcatggggagagaagcctccagattatcaccagaggaaacaacagatgatattgcggagagaggaggtggagaaggagaagaggaggaagatgaagaagaaaacgaagaggaggaggaagatgaagaggaggaagaagaaagtgttggaggcccgggtgaggcggcagacatcaggggctccacgggaggaatgggagagggagagggggacactgttggggacagaattggaagtggggactgtgcggtggcatttgagagtggagaggggcatgggtgtggagatgcactggaagagggggctggaagaggtacggtaggaaggaggggagggggcggagtggcaacagttaataccgggggacagggtggaggggaagagggatctgtggggatcaagagaggaggcagctgaccggatgaaagggagggtgtctgcagggcaggtgatgaaggacaaacatcaggtgtggactcaacagtaggggcagggaaaccagagcccggaccgaggtcaggatctggctgagcttctagggatttacaaggacttgggctcctggtcccatctgcagggttttctacaggtaaatcgatgccattatattcattgagaagaaccttctgcagcatgcaggtggttggtttccttttctttacagcactacacgtaggctgcactgaatgactttctttgaattccttgccttcagagtcactacaatgctttttatgcacactgagatctaagacagattcccactggactggagtcttgcctgtaccctcagccttctgtttgacaccgctggataaatccagtggctgctggttgcacacactgctaaaagcagaactagctgtccactctttagacattttatattcatcaaagcatggagggctcacagtttctctctcatctctcccagacaaactccatgctggtgagtcgctgtgactttctaatttggattttttggaagtcagcccggcatcggtccatgctgctttcccatcacttggctttccaaagtctcgaagggcaggactgtgctgtggagaactgggaggagagctggtccgcctcttaaacctacttgaggtcacaggcaacattgatgcaggagcagacacacaaacaggacctaatttagctatttcagttgctgaaatccctgcaggagttagtttatcttgggtttgaagaagttgtttgagctttgatgacaaataaacacttttctctttgtggaaagaca

SEQ ID NO: 4801 - DNA, 426 bp, Homo sapiens
  MAP TO AF017732.1; EXPRESSED IN LUNG, SIGNAL =  16; EXPRESSED IN HEART, SIGNAL = 1.3; EXPRESSED IN BT474, SIGNAL = 3.3; EXPRESSED IN ADULT LIVER, SIGNAL =   3; EXPRESSED IN BONE MARROW, SIGNAL =  25
gggggaagctaggaagaaactcaaaacatcaagattttaaatacgcttcttggtctccttgctataattatctgggataagcatgctgttttctgtctgtcccttacatgccctgtgattatccgcaaacaacacacccaagggcagaactttgttacttaaacaccatcctgtttgcttctttcctcaggaactgtggctgcaccatctgtcttcatcttcccgccatctgatgagcagttgaaatctggaactgcctctgttgtgtgcctgctgaataacttctatcccagagaggccaaagtacagtggaaggtggataacgccctccaatcgggtaactcccaggagagtgtcacagagcaggacagcaaggacagcacctacagcctcagcagcaccctgacgctgagcaaagcagactac

SEQ ID NO: 4802 - DNA, 463 bp, Homo sapiens
  MAP TO AC007158.5; EXPRESSED IN BT474, SIGNAL = 1.1; EXPRESSED IN ADULT LIVER, SIGNAL =   1; EXPRESSED IN BONE MARROW, SIGNAL = 1.2; EXPRESSED IN BRAIN, SIGNAL = 1.2; EXPRESSED IN HEART, SIGNAL = 1.3
ttgacagaaaggctgctgtgatggtgaagtaggaggttctggaagttgaggtcttgtgaatgccaataaaactacatgggaatgtgagataggcccaggatgttaagaacatccaggacagaatggaagtttgcagtcacaacaattagtaccagttgacaaggtcttttagaaacatgtcagcagaagaggccacatatggtatctcttttacacctttctaaagttgggagaagagtgagaggaggaggagaaatgctgaggggcctgatcattaagctgcgggtctggaggagcagcggcagcgggatcagctgcctgctgagcttggtcaaagggctgtggctgaactggtgcagccagctggagcaggggcggcaggaatagaggcagcaggtatagcagattgtaaaataacaggaaactgccatgcctcgggatccccatattcccttgcctgaga

SEQ ID NO: 4803 - DNA, 461 bp, Homo sapiens
  MAP TO AL049538.8; EXPRESSED IN LUNG, SIGNAL = 0.64; EXPRESSED IN HEART, SIGNAL = 1.2
tgcattcaaaagattattcagagaaggagtccatggcacaagacaaagttaaagatcaaggttatctcaatattaagcacgaaagagcaaccaaacactaacacagctagagtaatagtgattcctaacctagggactagcttggtgcttaatctggtattccatcaactaaggaaccatagacatttcgtggtggctgtggtgggataggcgactccctatcccagctcacactcacagagtacgaagctgcagaggaagctgacggcggtgcatttcctgcagccgtcagacgtgcagagccaggggcccgggcggtgctcgccacttctttctccaggggttttgctgaaagcaactctgctacctactggtctgctttcctcttccctcctctcccctttggctgctgctctgtgccaggctgaattgtggccacagctatgcttttccttgatctt

SEQ ID NO: 4804 - DNA, 458 bp, Homo sapiens
  MAP TO AL035694.8; EXPRESSED IN ADULT LIVER, SIGNAL = 0.65; EXPRESSED IN HELA, SIGNAL = 0.59; EXPRESSED IN HEART, SIGNAL = 0.78; EXPRESSED IN PLACENTA, SIGNAL = 0.71; EXPRESSED IN HBL100, SIGNAL = 1.7; EXPRESSED IN LUNG, SIGNAL = 0.7; EXPRESSED IN BRAIN, SIGNAL = 1.2
tgcagatacttgagatgatgacagagttaagcttcctagggtcctagagtcaaagaaactctgctgacccccactgctaagcaggtgcactccttccacagggggcaacatctgccgatccgtcatggtcccactcggtgaggaccccaagaaacttccttgggaagaaacaattttctcaggactggcagccagtttgggggatgtggagaagttatatccatatagtgcacaggggctgtgtaatctaaaagtattataggaaccctgatgggtctggttagtggcgaaggcattgctggagggtgatggcatgatatactggagctggggggacattcccgaaatctgcatggataagctggtctgtgggcagctgaaggtgtccccatcagtgccacccatggacatgttcacggaggtgctgctgctcacgcccacataggagggagtcctgg

SEQ ID NO: 4805 - DNA, 438 bp, Homo sapiens
  MAP TO AF053356.1; EXPRESSED IN BT474, SIGNAL = 1.5; EXPRESSED IN HBL100, SIGNAL = 1.5; EXPRESSED IN HELA, SIGNAL = 1.4; EXPRESSED IN ADULT LIVER, SIGNAL = 1.1; EXPRESSED IN BRAIN, SIGNAL = 1.4; EXPRESSED IN LUNG, SIGNAL = 0.93; EXPRESSED IN BONE MARROW, SIGNAL = 1.4; EXPRESSED IN PLACENTA, SIGNAL =   1; EXPRESSED IN HEART, SIGNAL = 1.7; EXPRESSED IN FETAL LIVER, SIGNAL = 1.4
ctgcctattgcattcttccctctcacaccagccctgagccggctaagtcccaggggtgtgtgaggttgggcaaggccagcacagtctgctaagggagaaagcagagagcgtggtgtgcggcagaggagggaggtggggtggtgctagggaaatgggaccccctgggtccctgcaggagccccagctacagcctgtgggcttcctggttcatggctctcatcctccctgggtgcccactctcctgaccccgctctgaccttgacttggagcttgacgaaggaggcactccccttgggccagcctgggaggcggcccccagccccacagccgcagcccagcagctccttgctgaactctgagctctggctcagcaccagggagtggttgaggccgcaccacagggtgatgggccgctgcaggtaacaaacctggggacac

SEQ ID NO: 4806 - DNA, 412 bp, Homo sapiens
  MAP TO AF055066.1; EXPRESSED IN PLACENTA, SIGNAL =  11; EXPRESSED IN HBL100, SIGNAL =  38; EXPRESSED IN HELA, SIGNAL =  33; EXPRESSED IN HEART, SIGNAL =  25; EXPRESSED IN FETAL LIVER, SIGNAL =  16; EXPRESSED IN BT474, SIGNAL = 6.4; EXPRESSED IN ADULT LIVER, SIGNAL = 7.5; EXPRESSED IN LUNG, SIGNAL =  59; EXPRESSED IN BONE MARROW, SIGNAL =  25; EXPRESSED IN BRAIN, SIGNAL =  13
accagaccagcaacgatacccatgatggggatggtgggcagggaagactgctctgggaaaggaggtgaaggtgagggtctctgacccccaggcctcaccaccgaccctgttaaaggtcttcagagaggctcctgctttccctaacagacatgatgcctccatctccctccttactccatctcagcatgaggggctccggcagcccctcatgctgcacatggcacgtgtatctctgctcctctccagaaggcaccaccacagctgcccacttctggaaggttccatcccctgcaggcctggtctccacgagctccacgtcctgggtctggtcctccccatcccgctgccaggtcagtatgatctccgcagggtagaagcccagggcccagcacctcagggtggcctcatagtc

SEQ ID NO: 4807 - DNA, 425 bp, Homo sapiens
  MAP TO AF064860.1; EXPRESSED IN HELA, SIGNAL = 1.7; EXPRESSED IN HEART, SIGNAL = 1.5; EXPRESSED IN FETAL LIVER, SIGNAL = 1.8; EXPRESSED IN BT474, SIGNAL = 1.4; EXPRESSED IN LUNG, SIGNAL = 1.8; EXPRESSED IN BRAIN, SIGNAL = 1.7; EXPRESSED IN PLACENTA, SIGNAL = 1.4; EXPRESSED IN HBL100, SIGNAL = 1.8; EXPRESSED IN ADULT LIVER, SIGNAL = 1.6; EXPRESSED IN BONE MARROW, SIGNAL = 1.7
tgttcctgccttcactggtcagctgcaaaaggcgggcacaggctgctcctgaggctgtgtggccagggcaatacctcacggagcttcctgtggccacagcagcagcagcatctgtgagcttgaaaggggatgatgagtgagacttttgtccacagttcttggttgagctgccacaagcagatgggaaaggctgagaaagaaaccattcctccctgggtggggacgcttgaaattccctttcaaccaaggggacgccacaagcaccccgttcatacctgcgtgcagatgccagcgcctggctcgttggtgaccagcaagggtcccagctgagccggggtgctctcctgtggctctggtggaacgtccacaggatactggagagatgattcaaacatcatttagatgggggagccgttgaaatagac

SEQ ID NO: 4808 - DNA, 442 bp, Homo sapiens
  MAP TO AL009181.1; EXPRESSED IN BT474, SIGNAL = 2.1; EXPRESSED IN BRAIN, SIGNAL = 3.5; EXPRESSED IN HBL100, SIGNAL = 2.4; EXPRESSED IN HEART, SIGNAL = 2.4; EXPRESSED IN ADULT LIVER, SIGNAL = 2.2; EXPRESSED IN FETAL LIVER, SIGNAL = 2.9; EXPRESSED IN LUNG, SIGNAL = 2.7; EXPRESSED IN BONE MARROW, SIGNAL =   2; EXPRESSED IN PLACENTA, SIGNAL = 2.5; EXPRESSED IN HELA, SIGNAL = 3.2
cccattggttgaccttcttctacactcccactggccagccaccacaccatcattgatcttgatcagaatccaacctctgctgatgagccacctacactcaccctggtaagtgccctgcaagcccacaaaggcccatgtactgcctcctgtggtcagtggcctgtgccatggtgcactcactcactcaccccggggacgggtcacagccatgaccatgatgggcacgccaacgcctgaggccaggacccagatacagatgttgatcagcttggccttggcaggcgtgcggaagtccagggccttgacagggtggcagacagcgatgtagcggtcaacactcatcatggtgagcgtgaagatgctggtgaacatattgtagtagtcgatggagagcacagccttgcagagcagctcgccgaagggccacgtctccatcaggtac

SEQ ID NO: 4809 - DNA, 459 bp, Homo sapiens
  MAP TO AJ010770.1; EXPRESSED IN PLACENTA, SIGNAL = 2.8; EXPRESSED IN HELA, SIGNAL =   3; EXPRESSED IN HEART, SIGNAL = 2.5; EXPRESSED IN FETAL LIVER, SIGNAL = 3.3; EXPRESSED IN BT474, SIGNAL = 2.4; EXPRESSED IN BRAIN, SIGNAL = 2.4; EXPRESSED IN HBL100, SIGNAL = 2.6; EXPRESSED IN ADULT LIVER, SIGNAL = 3.5; EXPRESSED IN LUNG, SIGNAL = 3.5; EXPRESSED IN BONE MARROW, SIGNAL =   2
aattacattcctcccacaccctttaaattctacatttaatatgggaagattttaactgaatgccctactgttctattcattacgttttaggtaaaagaaacaaatatgacatctcttcagaaagacttaagccaagttagggatcacctcgcagaggcaaaagagaaattgtccattttagaaaaagaagatgagactgaggtacaagaaagcaaaaaggcctgcatgtttgagccacttcctataaaactgagtaagagcattgcatcccagacagatgggactctgaagatcagtagcagcaatcagactccacaaattcttgttaaaaatgcaggaatacaaattaatttacagagtgaatgttcctcagaagaagttactgaaataatcagtcagtttactgaaaaaattgagaagatgcaagaactacatgctgctgaaattttggacatggaa

SEQ ID NO: 4810 - DNA, 390 bp, Homo sapiens
  MAP TO AL020990.1; EXPRESSED IN HELA, SIGNAL = 1.7; EXPRESSED IN HEART, SIGNAL = 1.2; EXPRESSED IN FETAL LIVER, SIGNAL = 1.6; EXPRESSED IN BT474, SIGNAL = 1.6; EXPRESSED IN LUNG, SIGNAL =   2; EXPRESSED IN BRAIN, SIGNAL = 1.4; EXPRESSED IN PLACENTA, SIGNAL = 1.7; EXPRESSED IN HBL100, SIGNAL = 1.3; EXPRESSED IN ADULT LIVER, SIGNAL = 1.1; EXPRESSED IN BONE MARROW, SIGNAL = 0.93
gtgagctgcagtctttgtggcaggcgtgaaaaatcatctttatcacttctaaacaacattgagcagtaaaaacatacaaaatgagaaaatgaggcaactgtgaggcaacaaaacagatcaaggtaggtcaaccaaggctggtaatttggaagactgaggcggaaacatgtcagcattaattatgctactgcttgaattatatctggttagaaactgcaaaagacacaaggcctatttactatatgctccttttgactaaactgagttacctcataatgttcatggttcagcgtctctatgatgatgttgtcacttgactggtcaacgtgagtgacaggatggttcagcttcacttggtctccgaggaggtccattatccgttcgctcact

SEQ ID NO: 4811 - DNA, 432 bp, Homo sapiens
  MAP TO AL021154.1; EXPRESSED IN PLACENTA, SIGNAL = 3.9; EXPRESSED IN HELA, SIGNAL =   4; EXPRESSED IN HEART, SIGNAL = 3.7; EXPRESSED IN FETAL LIVER, SIGNAL = 4.7; EXPRESSED IN BT474, SIGNAL = 2.4; EXPRESSED IN BRAIN, SIGNAL = 2.3; EXPRESSED IN HBL100, SIGNAL = 3.6; EXPRESSED IN ADULT LIVER, SIGNAL = 3.9; EXPRESSED IN LUNG, SIGNAL = 4.2; EXPRESSED IN BONE MARROW, SIGNAL = 3.3
catggcagattggatgtgagagacccactagacctatccctctgtcttaccaaagtcccacagtgtccccaggccatactctttgcctggacaatagcaggcacccagtactggtttctggccaaacaatgaagtaatgaatgaatggcggcaacgctggctgcatggacttccccaaggtcacacagtgcactgggagtagtgagttgggtctccctccagactcgcaatccagtgctcattccactccactagaatggatgagattatttcatccaaagtctgaaaatgaaggggtcttctactcagatattgggggcactgggtcctggaaactgaaagctcatcttccctcttcccaaaactctacctgctccactcaaactggatctcaggcacccctccctcctttcccacacctggaaaagcata

SEQ ID NO: 4812 - DNA, 1987 bp, Homo sapiens
  MAP TO AC010680.3; EXPRESSED IN HEART, SIGNAL = 5.5
tgttttccgtataatggctgtcaacaaatatggtgttggagagcctttggaatctgcaccagtactaatgaaaaatccatttgtgcttcctggaccaccaaaaagcttggaagtcacaaatattgccaaagactccatgaccgtctgttggaaccgtccagatagtgatggtggaagtgagattattggttacattgtagagaaaagagacagaagtggcattcgatggataaaatgtaataaacgccgcattacagatttgcgtctaagagtgacaggattaacagaagatcatgagtatgaattcagggtctctgcagaaaatgctgctggagttggggaaccaagtccagctacagtttattataaagcctgtgatcctgtgttcaaacctggcccacctaccaatgcacacattgtagacaccactaaaaattcaatcacacttgcctggggtaaacccatctatgatggcggcagtgagatcttgggatatgtagtagaaatctgtaaagcagatgaagaagaatggcaaatagttactccacagactggcctgagagtcactcgatttgaaatttcaaaactcactgaacaccaagagtataaaatacgagtctgtgccctcaacaaagttggtttaggtgaggctacatcagttcctggtactgtgaaaccagaagataaacttgaagcacctgaacttgaccttgactccgaattaagaaaaggaattgttgtaagagctggtggatctgccagaattcacattccattcaaaggtcgtccaacgcctgagatcacttggtctcgagaggaaggtgaattcacagataaggtccaaattgaaaagggagtaaactatacccaactatcaatagataactgtgatagaaatgatgctggaaaatacattcttaagttggaaaacagcagtggatcaaagtctgcttttgtaactgtgaaagttcttgacactccaggaccaccacagaatttggcagtcaaagaagtgagaaaagattctgccttcctggtatgggagccacccatcattgatggaggggcaaaggtcaagaactatgtgattgacaaacgtgagtcaaccagaaaagcgtatgctaatgtgagtagtaaatgcagcaaaacaagttttaaagtggaaaaccttacagaaggagccatttattacttcagagtcatggctgaaaatgaatttggagttggtgttccagtggaaactgttgatgccgtgaaagctgctgaacctccttccccaccaggaaaggttacactcactgatgtgtcccagaccagtgcatcacttatgtgggagaaacctgaacatgatggcggtagcagagtcctggggtacgttgttgaaatgcagcccaaaggaactgaaaaatggagcattgtggctgaatccaaagtctgtaatgcagttgttactggtttgagttctggacaagaatatcagttccgtgtcaaggcttataatgagaaaggaaaaagcgatccaagagtgttgggtgttcctgtcatagccaaggacttgactatacagcctagtttaaagttaccatttaacacatatagtatccaagctggagaagatcttaaaatagaaattccagttataggccgaccaagacctaacatttcttgggtcaaagatggtgagcctcttaaacagacaacaagagtaaacgttgaagaaacagctacctcaactgttttgcacattaaagaaggtaacaaagatgactttggaaaatacaccgtaacggcaacaaatagtgcaggcacagcaacagaaaatctcagtgttatcgttttagaaaagcctggacctccagttggcccagttcggtttgatgaagttagtgcagactttgtagtcatatcttgggaacctccagcctatactggtggctgccaaataagcaactacattgtagagaagcgagatacaaccaccaccact

SEQ ID NO: 4813 - DNA, 419 bp, Homo sapiens
  MAP TO AJ229041.1; EXPRESSED IN BONE MARROW, SIGNAL = 2.6; EXPRESSED IN HELA, SIGNAL = 3.9; EXPRESSED IN HEART, SIGNAL =   3; EXPRESSED IN FETAL LIVER, SIGNAL = 3.8; EXPRESSED IN BT474, SIGNAL = 2.9; EXPRESSED IN LUNG, SIGNAL =   4; EXPRESSED IN BRAIN, SIGNAL = 3.5; EXPRESSED IN PLACENTA, SIGNAL =   3; EXPRESSED IN HBL100, SIGNAL = 2.9; EXPRESSED IN ADULT LIVER, SIGNAL =   3
aatgagagtggccaggtgaggctgtggctggcagggcagttcacaagagccttgccatccttgctaaggattctgctttatcccaaaggcactgggaagctattgaaggatactgtgctgttttgatactatgaatattagtaaaccaacatattagttttctatggttgtcctaattatcatatactttgtggcttaaaacagcatagttctagagagtctaagtccaaactgggtctcactgggctaggatcaaggtgttggcagtgctgtgttctttcaggaagctctacaggaggatactttttcttgtcttttccagcttttgctggctgcttgcatgttttagcttgtgcccccgttccatgaggacgtggacatctttgggggctgtcttctgcaagccgcagatactaagc

SEQ ID NO: 4814 - DNA, 476 bp, Homo sapiens
  MAP TO AC010680.2; EXPRESSED IN BT474, SIGNAL = 1.2; EXPRESSED IN HEART, SIGNAL = 0.86; EXPRESSED IN LUNG, SIGNAL = 4.6
ccaaagaaagtcccagaaaagaaagtccttgtgcctaaaaaggaagctgttcccccagctaaaggtatttttggaaagatcctggattttcgtgtattgttgcatgcaatcctttattcagttttaaaaatatatattttgaatgtacatctttatttcttcagtgtttaaaaaaataagtcttaaaatagatgctctttcagggagaactgtccttgaagaaaaagtatcagttgccttccgccaagaagtagtagtaaaagaaagactagaattagaagtagtagaagcagaagtggaagaaattccggaagaagaagagttccatgaagttgaagaatattttgaagaaggcgagtttcatgaagtagaagaattcatcaaattagaacaacatagagttgaagaagaacacagagttgaaaaagttcatagggtaatagaagtttttgaggctgaagaagtggaagtatttg

SEQ ID NO: 4815 - DNA, 490 bp, Homo sapiens
  MAP TO AC009786.1; EXPRESSED IN HBL100, SIGNAL = 1.3; EXPRESSED IN HEART, SIGNAL = 0.88
  unsure 33
  unsure 325
cctttcctttttacattctttttccttctcatntagaaaagtctaggtcatgggaacattagaatgaaattttgtttggcctgggaagccattacttcactatgttctttaggagttcctagaggacacagccttctctgaggaaatgagaaacacactagtgatggtggtgccagcatctagatgctcagtagaatctgtcctttggaggatggcagtgatgcagggctgctgccatcaaatatcagaggctaatggtaaagcagagtgggagagactagatggaaatgcattaactataaaccagaagatcagtgtaattccnaatgtaattccatccatgggagataagattaatgtgacaattagagcatgtcaacctgcaagtgtgtatagcaatgggtcaagttgtgctgaggggtgagatagatggagagtcacatagtgtgttactgcatttacacagtcagaagaaatcacgaccaagcag

SEQ ID NO: 4816 - DNA, 349 bp, Homo sapiens
  MAP TO AL021332.1; EXPRESSED IN PLACENTA, SIGNAL = 4.9; EXPRESSED IN HELA, SIGNAL = 7.8; EXPRESSED IN BT474, SIGNAL = 5.5; EXPRESSED IN BRAIN, SIGNAL = 6.1; EXPRESSED IN HBL100, SIGNAL = 5.5; EXPRESSED IN HEART, SIGNAL = 7.6; EXPRESSED IN ADULT LIVER, SIGNAL = 5.1; EXPRESSED IN FETAL LIVER, SIGNAL = 6.8; EXPRESSED IN LUNG, SIGNAL = 5.9; EXPRESSED IN BONE MARROW, SIGNAL = 5.3
tgattgctgattatacgtggcatgtttgcctttgttaacatgtctaccacaatagattaaagaacacatatacacacacattcacaaaatgggattagggctgtgggagggcagggagaaagtaagtgttcattttccctgctttaaagagcacactcagacaagtatatattctgaaaaagggtttcaagcatgaagaagaagaggaggagaaggaggaagaagaaaagaagaaaaggaagaagaaagaagaagaagaggaggaggaggaggagaaagagaagaagaagaaggaggaggaggaggaagaggaggaggaggaggaagaggaggaggaggaggaggagaa

SEQ ID NO: 4817 - DNA, 462 bp, Homo sapiens
  MAP TO AC010703.1; EXPRESSED IN HEART, SIGNAL = 0.88; EXPRESSED IN LUNG, SIGNAL =   7; EXPRESSED IN BT474, SIGNAL = 9.1
aatggataacaataagcatcctagagtcaagttacctgggttcaagtgccagctctgccacttaggtgctgtgtgaccttgagaaaatcccttaacctttccctgctcagtttcctcctctataaaatgtggataatagcagctacctgagggagttgttataattaaatacattaacatataaagcatttaaaacagtgcctgacacatagcaaaatctaaataagtggtacttattattacaaatgaccaaaaattaagtgacagtaattggtacatctaatctcacctaaatgtcttttcatttaattgatgactgttctcctcactaaggacttctttaattcttccaacaggtgataaattgttactaggtttaagagccaaaggatacatattaaattttttgcaagactcaataaatatggttttatagcactaaacacttctaacaagagtagg

SEQ ID NO: 4818 - DNA, 381 bp, Homo sapiens
  MAP TO AL008627.1; EXPRESSED IN PLACENTA, SIGNAL = 2.3; EXPRESSED IN HELA, SIGNAL =  12; EXPRESSED IN HEART, SIGNAL =   5; EXPRESSED IN FETAL LIVER, SIGNAL = 6.9; EXPRESSED IN BT474, SIGNAL = 3.6; EXPRESSED IN BRAIN, SIGNAL = 3.8; EXPRESSED IN HBL100, SIGNAL = 7.6; EXPRESSED IN LUNG, SIGNAL = 8.1; EXPRESSED IN BONE MARROW, SIGNAL = 3.1
caaaaatctgatcaagtcattctcctttaaaatcattgatagttacagcataaatacgaagttatttaatatagtatacacagccctctgtgatctgcccactgtttatcttttcctttctgtcccttctcacaacttgtgttaaagttatattcaacttctggttctaggtgcttcaggagctgtggcttaaggtgcagacatggccaagtccaagaaccacaccacacacaaccagtcccgaaaatggcacagaaatgtcatcaagaaacccctatcacaaagatacaaatctcttaagggggtggaccccaagttcctggggaacatgtgctttaccaagaagcacaagaagaagggcctaaagaagatgcaggccga

SEQ ID NO: 4819 - DNA, 490 bp, Homo sapiens
  MAP TO AC009857.1; EXPRESSED IN HEART, SIGNAL = 1.3
  unsure 207
  unsure 469
tgcatagtcaacattccaaaggaaaggtagagaaaggacttcccaaaacctctttaaaatacctgctaaagatacctttgaacaagaaaaccttaagtttcgtatctcaagagaaactttcagaaaggaaccctttgcttcttggaaaactgaaggagattttggattcccttatgctacagcagactgacagggcagcccccagangggatggaactggtgattcctggagaagaatctcagtatgaactcctgggctggtgggatcgaagagttacaggacgggaaaatgggacctcagttcaaaccattccagctcctctcacactggcagcagttccagcaaagtaaaatgtttaatgttaccattaaacattctgggcagagcttgaagagcagagagatactaaatagaaacaatgacaaagagaatccgtataggaatttgcttattcctctgaacaagaanggttgctcttccctaatctgt

SEQ ID NO: 4820 - DNA, 371 bp, Homo sapiens
  MAP TO AJ009617.1; EXPRESSED IN PLACENTA, SIGNAL =  10; EXPRESSED IN HELA, SIGNAL = 9.8; EXPRESSED IN HEART, SIGNAL = 8.3; EXPRESSED IN BT474, SIGNAL =   7; EXPRESSED IN FETAL LIVER, SIGNAL =  11; EXPRESSED IN ADULT LIVER, SIGNAL =  11; EXPRESSED IN BRAIN, SIGNAL = 7.3; EXPRESSED IN BONE MARROW, SIGNAL = 9.2; EXPRESSED IN LUNG, SIGNAL =  11; EXPRESSED IN HBL100, SIGNAL = 8.4
gacttgcatgaggtcacacagtgagaaagtggcctggttcagagcccacacccttaaattaaccccatattccactgccagatgggactccccagaccccatgtggagctgggtcagtggggcctctcccacttgcaccttatctgactccaggtcccaccgtgagacaggctggttccaggtggtagtgagacgggagcccctgggaccatgccaggctgggacggccaccacctgaggtggccccgggtcctttcccctagctatggagaccaggtgcagcacttcaaggtgctgcgtgaggcctcggggaagtacttcctgtgggaggagaagttcaactccctcaacgagctggtcgacttctaccg

SEQ ID NO: 4821 - DNA, 425 bp, Homo sapiens
  MAP TO AC009892.1; EXPRESSED IN HEART, SIGNAL = 0.92
cgcttctcagcttgtgtgagccctgggcttcctgaggtggttgttttggagcatttcgtccagcttctcccttgttcctggggaatggtttgccccatgccccagctctgtcgttccggaagtttctacttcacacagttaaaaaaaaattctctaaatatataaacaccatgacccaatttttctggcaaaaacaaacaagcaaacacacccacaaacatctttccagacacgtaagcaaaatctgcaattacacgctcttcacgtgtttaggcactataaccttcttcatttccggcaggtccttggtcctgtgtttctctagggggtgtctttccagcagcctctccttatgatgtcctgggattcctgtatccacttctctttcaataaccttgtaactcagcttgggaatcagagtggtc

SEQ ID NO: 4822 - DNA, 357 bp, Homo sapiens
  MAP TO AJ011929.1; EXPRESSED IN LUNG, SIGNAL = 1.3; EXPRESSED IN BONE MARROW, SIGNAL = 0.93; EXPRESSED IN HBL100, SIGNAL = 0.97; EXPRESSED IN HELA, SIGNAL =   1; EXPRESSED IN HEART, SIGNAL = 1.3; EXPRESSED IN FETAL LIVER, SIGNAL = 1.2; EXPRESSED IN BRAIN, SIGNAL = 0.97; EXPRESSED IN PLACENTA, SIGNAL = 1.2; EXPRESSED IN BT474, SIGNAL = 0.99; EXPRESSED IN ADULT LIVER, SIGNAL = 1.3
taggtcttagaacctgcccggcatctggttgctagagcaagcactaaattgatatgtgcccccacaaggatgcccttaataaaatttttagagagacatttaaaagttgagcacacaggagtactaaaattgccatccacaatccaagcacatgacacgttttctaaagctagtgcttcttctagcactaattttgtctgtgtgacttaaccaagaaaaactccacactctcccttctttctctcctattttcagttacgccagaaaagatcaacttgcagcatgccagaaggtcttccctagcttttccaagcagcagtttgaatcttatatagaacattccataaccacggaaca

SEQ ID NO: 4823 - DNA, 396 bp, Homo sapiens
  MAP TO AL021069.1; EXPRESSED IN HBL100, SIGNAL = 2.7; EXPRESSED IN PLACENTA, SIGNAL = 3.6; EXPRESSED IN HELA, SIGNAL = 3.4; EXPRESSED IN ADULT LIVER, SIGNAL = 3.2; EXPRESSED IN LUNG, SIGNAL = 2.2; EXPRESSED IN BRAIN, SIGNAL = 2.7; EXPRESSED IN HEART, SIGNAL = 4.3; EXPRESSED IN BT474, SIGNAL = 2.2; EXPRESSED IN FETAL LIVER, SIGNAL = 3.8; EXPRESSED IN BONE MARROW, SIGNAL = 2.1
aggcacttgccttgtctcagatgagactttggactgtggacttttgggttaatgatgaaataagttaagactttgcgggactgttgggaaggcatgattggtactgaaatgtgaggacatgaaatttggaagggccaggggcagaaagatatggtttggctgtctccccattcaaatctcaacttgaattgtatctcccagaattcccacgttattgtgggagggacccaggtggaggtgattgaatcatgggggatggtctttcccgtgctattcttgtatagtgaataagtctcacaagatctgctgggtttatcaggggtttctgcttttgcttctttctcattttctcttgctgctgccatataagaagtgcctttcgtctcccaccatgat

SEQ ID NO: 4824 - DNA, 1986 bp, Homo sapiens
  MAP TO AC010680.3; EXPRESSED IN ADULT LIVER, SIGNAL = 0.98; EXPRESSED IN HEART, SIGNAL =  12
aagaagaaggcacccaggactggattaaatttaagactgtgacaaacttagagtgtgtggttactggactacaacaaggaaagacctatagattccgtgtaaaagctgaaaacattgtgggtcttggtctccctgacacaactatcccgatagaatgtcaagaaaaactaggtaatttttggactagcagtattaccttatttctttttaaaattattcatataggtgaaaatcaaaatctaattttttcatgtttacttttcagtgcctccatccgtggagctagatgtgaaattaattgaaggtcttgtggtaaaggctggaaccacagtcagattccctgctattataagaggtgtgcctgttcctactgcaaagtggacaaccgatgggagtgagattaaaaccgatgagcactacacagttgaaacagacaacttctcatcagtacttaccattaagaactgcttaaggagagacactggggaatatcaaatcacagtttccaatgcagccggtagcaaaacagtagccgtacatcttactgttcttgatgttcctgggccaccaacaggtcctattaatattctggatgttactcctgaacacatgactatctcatggcagccacctaaggatgatggaggaagccctgtgataaattatattgttgagaaacaagatacaaggaaagacacgtggggtgttgtctcttccggaagcagtaagacaaagctgaaaatcccacatctgcagaagggctgtgaatatgttttccgagttagagcagagaataagataggtgttggtcctccccttgactccacacctactgttgctaagcataaatttagtcctccgtctcctcctggtaaaccagtggttactgacattactgaaaatgcagcaacagtgtcttggaccctgccaaaatctgatggtggcagtccaataactggctactatatggaacgtcgagaagtaactggcaaatgggtgagggtcaacaaaacacctatcgctgacctgaagttcagagtgactggactctatgaaggaaatacatatgagtttagagtttttgctgaaaatcttgcaggactaagcaaaccatccccaagttctgatccaataaaagcttgccggcccatcaaaccacctggaccacctattaatcctaaactgaaagacaagagcagagaaacagctgatttggtgtggacaaagcctctcagtgatggtggtagccccattctaggatatgtagtggaatgtcagaaacctggcacagcacaatggaacaggattaataaagatgaactcattaggcaatgtgcctttagggtacctggactaattgaaggaaatgagtacagattccgtataaaggcagctaatattgtaggagagggtgagccaagagaactagcagaatctgtgattgcaaaagatatccttcatcctccagaagtagaacttgatgttacttgtcgtgatgttattaccgtgagagtaggccaaactatccgcattctagctcgagtcaaaggcagacctgaaccagacataacttggactaaggaaggcaaagtattggtccgagaaaagagggtggaccttattcaggatctacctcgtgttgagttacaaattaaagaagctgttagagctgatcatggcaagtatatcatctcagctaagaacagcagtggacatgcccaaggttcagccatcgttaacgtccttgacagacctgggccttgccagaatttgaaggttaccaatgtaaccaaagagaactgtacaatttcttgggaaaacccactagataatggtggctcagaaataacaaacttcatagtagaatatcgcaaaccaaaccagaaaggctggtcaattgttgcatcagatgtcactaaacgattaatcaaggccaaccttttagccaacaatgaatactatttccgagtttgtgcagagaataaa

SEQ ID NO: 4825 - DNA, 449 bp, Homo sapiens
  MAP TO AJ229042.1; EXPRESSED IN LUNG, SIGNAL = 1.1; EXPRESSED IN BONE MARROW, SIGNAL =   1; EXPRESSED IN HBL100, SIGNAL = 1.1; EXPRESSED IN BT474, SIGNAL = 0.91; EXPRESSED IN ADULT LIVER, SIGNAL = 1.5; EXPRESSED IN FETAL LIVER, SIGNAL =   1; EXPRESSED IN BRAIN, SIGNAL = 1.1; EXPRESSED IN PLACENTA, SIGNAL = 1.2; EXPRESSED IN HEART, SIGNAL =   1; EXPRESSED IN HELA, SIGNAL = 1.2
gagatggtttaactctgcttcagtataaattacttatcattttaggacttataatagctcaaattttaaaagtagtataatttgtacctataccttgtgtaattcttttaactactttcagatctttttattctttaactcaggttccaataatcaatttgatttgataaccaatatcaataaatgttttataaaagggacaaccttctgccctccctacccactctcttttaccctgccttcctgaaattagcaaaagctccaagaattctccatttctggacatacctgttgtgttgaatgcttctggtgtggctaaagcccagtgttcctgccactgtgatgacggagtgggctgtgcttttgacagaaccacccagaacaaccagtcgccaatgggagccactttcaaccacctccacaaccctggcctggacacaaaacatcct

SEQ ID NO: 4826 - DNA, 466 bp, Homo sapiens
  MAP TO AL049548.6; EXPRESSED IN PLACENTA, SIGNAL = 3.2; EXPRESSED IN FETAL LIVER, SIGNAL = 0.6; EXPRESSED IN LUNG, SIGNAL = 1.2; EXPRESSED IN HEART, SIGNAL = 1.2; EXPRESSED IN HBL100, SIGNAL = 0.66; EXPRESSED IN BT474, SIGNAL = 0.6; EXPRESSED IN BONE MARROW, SIGNAL = 1.6; EXPRESSED IN ADULT LIVER, SIGNAL = 0.72; EXPRESSED IN BRAIN, SIGNAL = 1.3
gatcgagagaccaagctgatgccccaggaaggcagtgaaaagataattaaagagcacagggtacgtctcccacaccacaatgtggatagccgtgtcaagtcacattgttccataaaggatattactaatattttggtttgagtctgaaaaataatagcttaattactctaccttggtagtctgcgtgggaatcttcctttggtttttctgtgaaaatgtagaagtactgtgtggcttctcacagggattataaaaacatttattacacattaggttttcttcagtgacaaaggtcctcatcatctctgtgagaaaaggttacagctcatcgaggaactctgtgtgaaactcccagtgcgggacccagtaagggacacacctggaacctgtcacgtgactctcaaagagctcagagctgccattgacagcacctacaggaagctcatggaagacccagacaagtgga

SEQ ID NO: 4827 - DNA, 462 bp, Homo sapiens
  MAP TO AL031177.1; EXPRESSED IN HBL100, SIGNAL =   1; EXPRESSED IN ADULT LIVER, SIGNAL = 1.2; EXPRESSED IN HEART, SIGNAL = 0.95; EXPRESSED IN BT474, SIGNAL = 0.95; EXPRESSED IN BRAIN, SIGNAL = 1.1; EXPRESSED IN BONE MARROW, SIGNAL = 0.99
aaagccttttgggaggagacagcagaggccagagggatctgggagggtggagagaagaggggacagtgccatggctggactgattagtgaaactgtgtcctggccccaagtggtgacagcctctccctcactgtcctcccagatcttagtgtgttttgctcttcccttgggtgtggcataactgaagcgggcatggagacggcggggcattgacctatgactcacagatattctagcccctgaaccactgggtgcaaactgctgtctttccgctacacccataactacctgccattcatgcagaactgggttctccattctttagccaagcccagtccaagcatttctcttcttttcaaactctatgctttctacctggtgtcccttgagcctgggaaccagtccaaggggccctttgcctccaactgggggaggagacagtgcaggaccttaccatgagga

SEQ ID NO: 4828 - DNA, 415 bp, Homo sapiens
  MAP TO AC010734.1; EXPRESSED IN LUNG, SIGNAL =   1; EXPRESSED IN HEART, SIGNAL = 0.93
atattggcaccatgtaggcgtcacttcaaaattctctttaactatctcttattatggactcatgctctctcataggtagccacaagtcacatgtggcgatgtgtgtttaaatttaaattaattaatcaaatttaaataaaattaatcaaaaataaaaaattcagtttcttagttttgctagctgcattttgatagcttaacaggtgtatgtggctagcaactaccacacaggacagctcagatctagaccatttctgttttcatagaaagtgttgacagtgttgttcaagagctttctgcgcagccatttcaatgtgttgtaaattttggccggcttcatgcagatacaatcagacagcacttgcttctggcccctattactcaccctttctgcaggacattgtgtggaatgcag

SEQ ID NO: 4829 - DNA, 477 bp, Homo sapiens
  MAP TO AL049594.4; EXPRESSED IN PLACENTA, SIGNAL = 0.91; EXPRESSED IN BT474, SIGNAL = 0.61; EXPRESSED IN LUNG, SIGNAL = 0.63; EXPRESSED IN HEART, SIGNAL = 0.84
ttggtagtgtcctttgatttgcataagctcttaattttgattgtcttatacatttattctgggtttcctgtgcttttttaacattttattttttatttaaaaagtttttgaggaacaggtggtatttggttacataccaaatggtggtatttggataagttctttagtgatgatttccaagattttggcgcacccatcacccaagaagtgtacactgtatgcaatgtgtagtcttttatccctcaccccactcttaccctttctcctgattccccaaagtccattgtattattcttaaaattccaggaatttatccatctcctctatgttttctagtttgtgcacgtgaaggtgttcatagtagccttgaatgatcttttgtatttctgtggtatcagttgtagtagctcccatttcattgctaattgagcttattaagatcttctttcctgttgtcttggttaatctcactaatgg

SEQ ID NO: 4830 - DNA, 456 bp, Homo sapiens
  MAP TO AL022149.2; EXPRESSED IN BT474, SIGNAL =   2; EXPRESSED IN BONE MARROW, SIGNAL = 1.7; EXPRESSED IN HBL100, SIGNAL = 3.7; EXPRESSED IN PLACENTA, SIGNAL =   2; EXPRESSED IN HELA, SIGNAL = 2.7; EXPRESSED IN FETAL LIVER, SIGNAL = 2.7; EXPRESSED IN ADULT LIVER, SIGNAL = 2.3; EXPRESSED IN BRAIN, SIGNAL =   2; EXPRESSED IN LUNG, SIGNAL = 2.4; EXPRESSED IN HEART, SIGNAL =   2
gaggacagccattcacaagcctaagaagagaggcctcagaagaaactagctcagaaaacacctagttctggatttctaggctccaggactatgaaaaaaaaaaattctgttatataagtcaccctatctgtggaatttttatggctgctctatcaaactaatacaaattttgatattggaaagtggggtgctactgtaactaatacataaaaatatggatttggctttggaactacataatgagtagaggctggaagagtttgtaagtgcatgttagaaaaaacttagattgctttgaagctgttagaagagtatggatgttaaaggtgattctggtgaaaactcagaaagaaaagaggagaggtatagagaaaacttttattgtgttagagaatacatatatcatcatgaaaataatggttatatgaacattaaaggtgcttctggtgaggtctc

SEQ ID NO: 4831 - DNA, 426 bp, Homo sapiens
  MAP TO AL022163.1; EXPRESSED IN BONE MARROW, SIGNAL = 1.6; EXPRESSED IN HBL100, SIGNAL =   2; EXPRESSED IN PLACENTA, SIGNAL = 1.5; EXPRESSED IN HELA, SIGNAL = 3.8; EXPRESSED IN HEART, SIGNAL = 1.5; EXPRESSED IN ADULT LIVER, SIGNAL = 1.8; EXPRESSED IN BRAIN, SIGNAL = 1.7; EXPRESSED IN LUNG, SIGNAL = 2.1; EXPRESSED IN BT474, SIGNAL = 1.6; EXPRESSED IN FETAL LIVER, SIGNAL = 2.3
tgttggcttttcaagcttcctttttatgagttaccaattcatattctgctggcttctttttccctcattgatttgtaggagcttcttaaaaatactctttttaagttttatgtgttgtaaatagcatctcctagtccacagatttatttttcactttattttttggtgcattttatagtccagaagtatgtaactttagtacagttgaatttattgaccttttcctttagagtttgtgccttttatattttaagaaatcctgaccgagcaggaacccacatccaggaacagagccctttgctcctccctcagaatgaatggagaccagaaatcagatgtttatgcccaagaaaagcaggatttcgttcagcacttcccccagatcattagggtgctgagtgaggatgagatggggcactcagagac

SEQ ID NO: 4832 - DNA, 464 bp, Homo sapiens
  MAP TO AC009948.2; EXPRESSED IN HEART, SIGNAL = 1.1; EXPRESSED IN BT474, SIGNAL = 1.3; EXPRESSED IN FETAL LIVER, SIGNAL = 0.9; EXPRESSED IN HELA, SIGNAL = 1.4
cctcctacatcctgaaaggggaaaaaatgcccactgggacccagaggtctgtttcatggtgctacaattcttgtttacagaataaagcagtaggaaacacagtcataccattcctgcaagttaagtttgcaaaacagcctcacatttattataccaaaatcaatgtattggggagatcaaaatatcttctcataggggaaaaatagcaaatacaacttggagaaaagtgactttgttttatacataaagtacagtaaatagctaaaaaaaaaaagtagaaatacaaatatgctatagttcatcgtgttggtatacattgtattccttgggagaaatgaagccatcaccatcatggtcattcttcttaaaaatatcttctaaaactgcatcctgatatgacttgtcacgtggcttctcatctttttcaaattccctttgcaagtagaggtttatctggaaggcca

SEQ ID NO: 4833 - DNA, 367 bp, Homo sapiens
  MAP TO AL096817.12; EXPRESSED IN HEART, SIGNAL = 0.85; EXPRESSED IN LUNG, SIGNAL = 2.8
aatcttcccaaatctggtgcccataccttctatggcaggggcttttagcaccattctttaacgttagacacataaccacagcctaatcacttgaaccatttaatccttaccagcctctagcattatcctaaaaccctgaacctcttccagctttcttaaactttcagcttttcttgaaacgactttttctgattctaagattattttaactgtaagtaggagaagacatctgaaatttaactatgatcagaaattcagattacaaaaactttgtttgctgtgctgtttgtaataaaataattccaccagccccttttggaaaaaccttcaaacggatccatgaatacaagccacttaagacacgctt

SEQ ID NO: 4834 - DNA, 469 bp, Homo sapiens
  MAP TO AC009229.1; EXPRESSED IN PLACENTA, SIGNAL = 0.82; EXPRESSED IN LUNG, SIGNAL = 0.62; EXPRESSED IN BT474, SIGNAL = 0.65; EXPRESSED IN HEART, SIGNAL = 0.87
gaggaagatgctaaaggggctgctaaggcagcaagaaaatcaagtaacacagaaacagagtcagttggttctttgcacttaggattctcagaagaattttttgcttctgccttcaaaattaaactggaatattaaaactgatcttttggtccctggaagatgaagtacaaaccatcatcaaaaagtatctactgttgggactggtgactcactttgtccttccctcctgtaagccatgagaaggaatcagaatgattctgtcatcaagagcatcacaaatcctggatcttcacctgattaatgcttcacgtctagcacaagcactttcattttcaagggattccatactgtattgtctagcccctggctgggttgggatatagttatcttggtggcataggatcagcatgtgtaagagcgggatattattgggcgctgtattgaaaagagtaaccctgggaaggtgagg

SEQ ID NO: 4835 - DNA, 453 bp, Homo sapiens
  MAP TO AC009696.2; EXPRESSED IN BT474, SIGNAL = 1.1; EXPRESSED IN HEART, SIGNAL = 0.94; EXPRESSED IN BRAIN, SIGNAL = 0.95
aataggtggttggttggcgtgaaaataatttggaataggagataggtattcaaatcacaaaaaaatgtgtagagaaacgaaggaaaatggcagctttatcatttgcatacagtacgtatacctggtttttgtaggttttgggttattccacatcagattgtaggagttcggttttatggagtattacttgacttgaagatgatatatttctgtcaccaggcatggctgtgtcataacctgttgtttatttccatttgcaatctcttcttctgtactctctcaggtggtgaccatgtggataataggatcatagacaaatggtggttccatctacagcatcaccgaaatgctgttgttactgcttctttctgggatcttcttgcatctttgcttctaaaggggcacaccttttatagaagtacgtccaggaatagaagtgacctgctttttcgc

SEQ ID NO: 4836 - DNA, 370 bp, Homo sapiens
  MAP TO AC009297.2; EXPRESSED IN FETAL LIVER, SIGNAL = 0.92; EXPRESSED IN HEART, SIGNAL = 0.91; EXPRESSED IN BRAIN, SIGNAL = 0.98
tcaactatctatgtccagcatgaatacagcagtcttatttatcaagcaagtgggaaaacgtgcttttaagaaaagctataaaataaaccttctaaaaatagcaacttggaagagaaattctgatggacatctggaactgtcctaagaggttcagtcataacccaggcagacagaacacataaattcttacctgtcttcctttattcttgccagcaaaggctccagccatcctaacgtgcattcacagtgtgcatcaagaaaagttatgacctgcccttttgaagcagctgctcctcgaagacgggcacgtattaacccagagcgttcttccatcctaataatttttactggcacttctaaatttttcacg

SEQ ID NO: 4837 - DNA, 452 bp, Homo sapiens
  MAP TO AC007671.5; EXPRESSED IN BRAIN, SIGNAL =   1; EXPRESSED IN BT474, SIGNAL = 0.97; EXPRESSED IN HEART, SIGNAL = 1.1
gcattttagtttagagggagccccattaacaaatgttaactgcgttttaagaagttggggtcagggaaaaagtcaggctatttgatgagagataattgataagttcaaggaggattttaaatacaaataaagtgtttttcatgtgtttcattgagatgatttgaggtatcagggccaccagaagacaacagagtgggttttggtgagtttctttttctctaggtttaattgaacagttttttttttcttcaataggtttcagaaccttctgtggtccagaaagacatttgtggacaacatgaaaatttataaccacagttacatctacatgcctgccttttctatgaagacaggaacagagccatctttgagggtttattatacactgtcagatgttggtgccaatcaaacagtgctgtttgccaaccccaactttctgcgtagcattggaa

SEQ ID NO: 4838 - DNA, 448 bp, Homo sapiens
  MAP TO AE000662.1; EXPRESSED IN HBL100, SIGNAL =   2; EXPRESSED IN PLACENTA, SIGNAL = 2.2; EXPRESSED IN HEART, SIGNAL = 2.1; EXPRESSED IN FETAL LIVER, SIGNAL = 2.1; EXPRESSED IN ADULT LIVER, SIGNAL = 2.6; EXPRESSED IN HELA, SIGNAL = 2.2; EXPRESSED IN BT474, SIGNAL = 2.3; EXPRESSED IN BRAIN, SIGNAL = 2.3; EXPRESSED IN LUNG, SIGNAL = 2.3; EXPRESSED IN BONE MARROW, SIGNAL = 2.3
gcctcaagaaagtactgctcccattaaatacacacacacacacacacacacacacacacacacacacacagagtttctgtcttcaaggagttaacagtccagtgagtagtgggtatgaaagagatgtgttaatggctgcaattgcaagacagaggcttttgttactatattctcctcaggcaggagtcctcaggcaggaggcaggagaaccagttgtttgtccctaagcgtcactgcccctcactagccttctctcctggggcctttaatttttctgagtccccatgtgttattattcacatagagataaaaatacctgcccacctattctcagtgttgttgaagggattgaaagcagtaatgggtgtggaatgcttagtaaactgaaatcccagtgcaaatatgaagtgggaatgcatcagaatgcccaggaagacgaaccatgacc

SEQ ID NO: 4839 - DNA, 446 bp, Homo sapiens
  MAP TO AL022143.1; EXPRESSED IN BONE MARROW, SIGNAL = 0.94; EXPRESSED IN LUNG, SIGNAL = 1.1; EXPRESSED IN HEART, SIGNAL =   1; EXPRESSED IN FETAL LIVER, SIGNAL = 1.1; EXPRESSED IN BT474, SIGNAL = 0.99; EXPRESSED IN ADULT LIVER, SIGNAL = 0.99; EXPRESSED IN BRAIN, SIGNAL = 1.3
gctctaggcactgtggaagcagtagcaaaaaagacaaacaaggtctgtgcccttaattatgtttatctttgtttattaagtccttaaaacacacctatgtaaatggacataataccaatgtcctagaaaaaaatgaaaccacttgagcctcagggtggtgatataacctgcttgaggtcacagacacaattaagtggtcatgtcaggatccccatgaggatcctcaactctcaagttttgttctccccatgttcttgctctgtacctcacagccacctctcattgacagggaggaattctggctgctcacctgactcttcaaactgccggttgtgagtggcccaggagtcctggatctgcagcaggctgtcctccatggcctggatgtcagcatcagggcagttgcattcagggaaggtggggctgcacttgcaccagcagtcatt

SEQ ID NO: 4840 - DNA, 467 bp, Homo sapiens
  MAP TO AL096763.9; EXPRESSED IN HEART, SIGNAL =   1; EXPRESSED IN FETAL LIVER, SIGNAL = 2.1
tttttagatcaggtgaaactatccttcaggaataaaagaaaaataaagacattctcagacaaagaaaaactttaaaaaacggtgactggctgacttacccttaaagaacaactaaaggagatcttcaaactgaaaggatatgatgaaggaaggaatcttgcaccgtcacgaaggaagaaagaacaacagaaagagcagaaatatgggcgtggagaaactaggtcactcacatgttgctggtcggggtagaaaatggtacagacactctggaaaacaacttggcagtattttataaaactaaacataccattaccataggacccagcaacagcactcttgggcagtatctcagagaaatgaaagcttgtgttcacacaaagcctatatggtatatgagtgttcatagcagctttacttctaatagccaaaaccaggaaacaacctagatgtctttcaatgcctgaaaa

SEQ ID NO: 4841 - DNA, 471 bp, Homo sapiens
  MAP TO AL049874.2; EXPRESSED IN LUNG, SIGNAL = 1.1; EXPRESSED IN FETAL LIVER, SIGNAL = 0.74; EXPRESSED IN ADULT LIVER, SIGNAL = 0.82; EXPRESSED IN BRAIN, SIGNAL = 0.92; EXPRESSED IN HEART, SIGNAL = 0.82; EXPRESSED IN BT474, SIGNAL = 0.65
agtcagggaggtctgatagccctttccaggggatgttgttatttccttattcttacataagagccggaattccatttggaaagagcaattatattgagcttgatcaataacctcaaagaacaaagagaaaaaaattacctgttatcagactttaatatgtacttgatgtccatgatttgtgttattgtgttaattgtagggtcactagcaattagatttagctattgttaacatctaaaattgatttaaatgctaaaagaatcaatacttgagctaaatgtttaaatatcaggacactaagaagctactgagtcttcttaattgaattattctctgctttctgcattttagaagactgggcctatttcagagagatgaaagtaatagatgtctatattgtaaatgacaatgtaaatacttgctatggttatagaaatgaaggcggttgcacaggtgggagtcatggtaagt

SEQ ID NO: 4842 - DNA, 465 bp, Homo sapiens
  MAP TO AC005193.2; EXPRESSED IN ADULT LIVER, SIGNAL = 0.88; EXPRESSED IN BRAIN, SIGNAL = 0.71; EXPRESSED IN PLACENTA, SIGNAL = 0.68; EXPRESSED IN HEART, SIGNAL = 0.84; EXPRESSED IN HELA, SIGNAL = 0.85; EXPRESSED IN LUNG, SIGNAL = 0.77; EXPRESSED IN HBL100, SIGNAL = 0.66; EXPRESSED IN BONE MARROW, SIGNAL = 0.69
ctgagggctcgatgtttagcttccaattggattctgtgggtacccatgtccttctggtaaattcctttttaaaaacagttatccccagtcagtttttgttgctttcaattaaactatcctagcttacatgtatttgggttctcataaagggcagggctcacctctgcacccaatatcacatctggcacagagttggtattccataatgtactgaatggatggaagagtggaaagagtgaccaaataagcaaggcagcctagtaagtgccctgagacctggagtctttgtcttcctccaccccttgcagtgagggggcagtgctggtggtagcagtgatggcagcagcaggggcttcctctccctctccttctccctcgcctgccatcttcgactgcagtgattcccttgctctggcccttcctggctcccagcctatctgattacatcactgtcacctgcccaca

SEQ ID NO: 4843 - DNA, 365 bp, Homo sapiens
  MAP TO AC007282.2; EXPRESSED IN HBL100, SIGNAL = 2.3; EXPRESSED IN LUNG, SIGNAL = 0.9; EXPRESSED IN HELA, SIGNAL = 5.5; EXPRESSED IN HEART, SIGNAL = 1.4; EXPRESSED IN FETAL LIVER, SIGNAL = 0.57; EXPRESSED IN ADULT LIVER, SIGNAL = 0.83; EXPRESSED IN BRAIN, SIGNAL = 0.79
tgccaacaacctctgacaactggcaactctattggatgagaaggggtgagaattatatcatttttacttatcaaatgatgatacagcagaggggatgcaagtatagcatccctccaagctattttatatattgcattggagatatcagatttctattatcaatagcacaatttttactattctaagacacatgggagtttcatcaaattttcatgctcaaccccaaccctatatctttccattaattgggctccttctggaaacaactggctaatctgtccaatttggccttcatttatgattaccatcaacaatagaaggcccagcacctgtctcagacctactccattccagcacagaagttg

SEQ ID NO: 4844 - DNA, 467 bp, Homo sapiens
  MAP TO AB020862.1; EXPRESSED IN HEART, SIGNAL = 1.1; EXPRESSED IN BRAIN, SIGNAL = 0.97; EXPRESSED IN BONE MARROW, SIGNAL = 1.2
tgagaaggtagccaagagtgcaaatcagagttgctacagggtgaacaccgacggtgactgtttggccactgtggtttcaataacactaaatatgtaagatgtaatatttcagatatcctgtgtgggagagttcagtgtgagaatgtgacagaaattcccattccgagagatcattctatgatgcactgggctcacttcaacggcatcaactgctggagtactgactaccattttggaatgaccgtacctgatattggtgaaattaaagatggcacagagtgtggttcaaaacatgtgtgtacacataggaagtgtgtccctctgccatttgaggaaagtacttgctcacctgagacctgtaatatgagaggcatctgcaacaataaacatcgtcattgcaattataagtgggccccaccctactgcctgttaaaaggcacaggaggaagtgttgacagtggcccatc

SEQ ID NO: 4845 - DNA, 1979 bp, Homo sapiens
  MAP TO AC005877.2; EXPRESSED IN LUNG, SIGNAL = 2.6; EXPRESSED IN PLACENTA, SIGNAL = 1.1; EXPRESSED IN HEART, SIGNAL = 1.3
agtagaatagcatttcaaactttaagctggtaacaataccctggattagcaaacaaccaactgaagacatcatgccagaaaagttaaagcaaacattgatccttttaaaaatgacagtttgtaataatctagttggctctacgggactgatatttattagacaaagttaattgaaattagtcaaatagcatattactagccaggttcaggatggaggttattttttacctgatttccatttggctggatcactttcaagggtggttcttggactgcagggctgaccgtagttgagtaggtgtatgccacctggggaatcagaatcgtttgcttattggcagctagcgctcttaagcatggaacactgttctggtcagcaatggccacgattgtgggtaactgggcagtgactgtaggtatagcgatatttatggggttggcacttggtgggattacatttacaactggttctgagtctgtaacacaactgtccttttgtggctccttttttgcgcaagacaagttcaagggttcttcctggacagaataaacactgttctggtaaacactagtgatagttgacctttctaataattctccctgttgctttggtagtgaaagatcaagaggttctacttgtggctcttcttgtgcaccctcagctgtgtacaagtaaccctgtgtatttctggatgaggaaaggtttagaggtgatggggatggtgtactacttctggaaccattggtggttgatcccactggtaaaactggggagttagtcatcttcaaaggactttgtagatttactgtgctgtcctggggttcatttgcatttgcagattgaggctgatcattgttcttggcagggatatttactttgcctggttcaggagaagatggttcagaagactgcactgaaatctgtccagcttgcatcttttcaaaccacttttttactacatccagtggtaggtttactgaatcagcaatttttgagagctcttctgcacttggttgtgcattcaaagcataatatgcttttaggagagacaagaggttctttaaaggtggctgactaggagacaaattgccatctccagtagctgatgaaacagaggactcaggcttctcagcttctgctgcagggagtggaggaggctgagtaggctgctttaggtcatagtgctttaattctggaagtgcattaatatctcctggacaatcatcacacagaagacaagtgctatcattcacccccccttcaaagcttttgtccttctcagacttaacagtaagatcttctggtaacttttcacttttacaactgtttgtagcgactggattttctttttttaaattttgaggaacaacttgaagttggctaggctgctcaagactgtagttgatgataattttggttgttccatcttgatcaaccaaaggaagactgatggctgaaataacagaatggccaccttgttgtatgggtgaagcattgattgtttcttgttctttggatgcaagattggcttgattattctccaacacttgccttattacattaccatctaccgccactttaagtacattctgaatatcacttaaattgatacttatgggagacaccaaaccaactgttggcagaacaacagcttgcaccatgccctgaggagaactggttgcctgtaatgggccaccaccagtgaaaaccccattttgtaaaggggttgaacagttgattcctgaagcaaccactatgggtttgaattcataatccacaggttcagttttaatttggttaacagaaagttgttcttgaaggggtttattctctatcttttgccgtatctgtggtcgtgtgggactgcctggtgatgctgaaagagacggtgaagaacactgagatgtcttgagtcctgttcttggtcgcccattcacaggtatcaagctgatacatttcttactgcttatgtgtgagc

SEQ ID NO: 4846 - DNA, 442 bp, Homo sapiens
  MAP TO AL022323.7; EXPRESSED IN BT474, SIGNAL = 7.3; EXPRESSED IN BRAIN, SIGNAL = 7.2; EXPRESSED IN HBL100, SIGNAL = 7.8; EXPRESSED IN HEART, SIGNAL = 7.1; EXPRESSED IN ADULT LIVER, SIGNAL = 9.4; EXPRESSED IN FETAL LIVER, SIGNAL = 9.6; EXPRESSED IN LUNG, SIGNAL = 9.6; EXPRESSED IN BONE MARROW, SIGNAL = 8.4; EXPRESSED IN PLACENTA, SIGNAL =   8; EXPRESSED IN HELA, SIGNAL = 8.2
gcctgctgagtgcttttctcatatcatctgacctctgcctcactgccatcctgtgagggaggaaattatcatgattgttgttgttattctcagcctcattttatgtctgaagaaaccgaggcacagagaagagaagcaggttgtcctggatgacagtgtgaggcagggctgtagttgggatttgaaccccaggcctacctgagtgcagatccctgctcccagcagcttcgctcccagctcctggtagggcttaatcatgttcactgactgagtggggagggagcgctccagccaggttgtaggcgctgctggccctgcgcatgcccaggcaagaccttctagcttgcttctccctcttttctcatcccttggcacggtttgctccttctccacttccttcttttcctcctcccttttctcttcctccctcttctcttcctcc

SEQ ID NO: 4847 - DNA, 388 bp, Homo sapiens
  MAP TO AL022162.1; EXPRESSED IN BT474, SIGNAL =   4; EXPRESSED IN HEART, SIGNAL = 5.1; EXPRESSED IN FETAL LIVER, SIGNAL = 6.2; EXPRESSED IN ADULT LIVER, SIGNAL = 7.1; EXPRESSED IN BRAIN, SIGNAL = 3.3; EXPRESSED IN LUNG, SIGNAL = 6.4; EXPRESSED IN BONE MARROW, SIGNAL =   4; EXPRESSED IN PLACENTA, SIGNAL = 7.3; EXPRESSED IN HELA, SIGNAL = 6.2; EXPRESSED IN HBL100, SIGNAL = 5.7
aaccaggacttggtcacaggatgaatactctgaaccaaggttgggttaccctcttaggatcctaggaatgatcagagtagcctggagaagtagcaagagccacctaactccttctctgctggtgtgagtataataatacatgcaagtggatgttgtgaagttggttcagttggtgaatgtctatggcatttgcacacctgcttaacaattaccttactcctcatatcctctatggaataatccaactgacttacttcccctactagtgatgcatgtttgtgtctgtctgttattccccagtttgtgtttgaaaatgtgaagtttcggcaactacaaaaggagaagttccagatcagcaacaatggacaggttccctgccatttttctt

SEQ ID NO: 4848 - DNA, 414 bp, Homo sapiens
  MAP TO AF001549.1; EXPRESSED IN LUNG, SIGNAL = 3.1; EXPRESSED IN BONE MARROW, SIGNAL = 3.9; EXPRESSED IN BRAIN, SIGNAL =   3; EXPRESSED IN HBL100, SIGNAL = 2.4; EXPRESSED IN HELA, SIGNAL = 2.1; EXPRESSED IN HEART, SIGNAL = 2.6; EXPRESSED IN BT474, SIGNAL = 3.2; EXPRESSED IN FETAL LIVER, SIGNAL = 2.4; EXPRESSED IN ADULT LIVER, SIGNAL =   3; EXPRESSED IN PLACENTA, SIGNAL =   3
tgaggtgagagaggtaggcgggggccagattaatgtaggattttaaagaccacactgagagatttggattgttactgtaagtgcagtgggaagacagttattggttgctgagcaaaggagggattgttggttaagagtggaagcagggagaccagtaaagaggccttaacaatagtcccactgaattatgttggttcaataaaggttggctattataatttttattattttcatgaacttaatagcttgttaatcttggttccacaggatttcaaatatgcgtgcattagagaatgattttttcaattctcccccaagaaaaactgttcggtttggtggaactgtgacagaagtcttgctgaagtacaaaaaggtaagaggagataatgtgtgaggtttgcttttggtcaggtc

SEQ ID NO: 4849 - DNA, 397 bp, Homo sapiens
  MAP TO AF001552.1; EXPRESSED IN HELA, SIGNAL = 4.6; EXPRESSED IN PLACENTA, SIGNAL = 4.3; EXPRESSED IN ADULT LIVER, SIGNAL = 4.9; EXPRESSED IN HEART, SIGNAL = 3.8; EXPRESSED IN BT474, SIGNAL = 5.5; EXPRESSED IN FETAL LIVER, SIGNAL = 4.3; EXPRESSED IN LUNG, SIGNAL = 5.2; EXPRESSED IN BONE MARROW, SIGNAL = 6.5; EXPRESSED IN BRAIN, SIGNAL = 4.6; EXPRESSED IN HBL100, SIGNAL = 5.2
tgacctggagaagggaacagcctgaatgcgaacagaaattggccccaacagagcgttcaagagtctgagagaaggctcctggggcttgagcacagacatttagtttactgggatatggagagaggagaagcaattggaaaatgagtaaatatatcatgcttttaaggaggcatgctgtacaagtaaatgtcaggtacagtgactcaggttattgatttgaaagattagtcagtggagacatgtgctggacttactcagtccctctgttgtcaaggaagtccaacgccaccagcactagatccttcaacaatgcagagtcctcccgcaaatgaatctgactttgcctgtaaaccgcggagagtttcaaaaactggaaagcattacaggtggccagttt

SEQ ID NO: 4850 - DNA, 431 bp, Homo sapiens
  MAP TO AC012668.1; EXPRESSED IN LUNG, SIGNAL = 1.3; EXPRESSED IN BRAIN, SIGNAL = 1.1; EXPRESSED IN HBL100, SIGNAL = 1.4; EXPRESSED IN PLACENTA, SIGNAL =  15; EXPRESSED IN HEART, SIGNAL = 1.1; EXPRESSED IN ADULT LIVER, SIGNAL = 1.2; EXPRESSED IN FETAL LIVER, SIGNAL = 1.3
gcatttgattccttatccccccaatccaccctatctgaatctttggccaattgctgacttcccccatgaaacatccatatttaaccggagtaactggtggcagcatgcaacaccatctatgtctcaaacgcagaagttttcaaaattcacccgtttgttgtgtcagtgtagtaggggcactctcgccgccattaatgagagtgataacgctgatatcatagtcaatgcccggctccagccctgtgactgtgtagtatcctactgaggagtccacaaaatcttcaaaaatagggataccttctcctgccgcaactactgtgatgcggtacccaataatggtggaagagtttagcggggtccacctcaggccgatgcttgaatcggttatatcaacaaagcttaggtcagtgagttggggcacctctattgag

SEQ ID NO: 4851 - DNA, 386 bp, Homo sapiens
  MAP TO AC012275.1; EXPRESSED IN HBL100, SIGNAL = 1.8; EXPRESSED IN HELA, SIGNAL = 1.4; EXPRESSED IN PLACENTA, SIGNAL = 1.8; EXPRESSED IN ADULT LIVER, SIGNAL = 1.4; EXPRESSED IN HEART, SIGNAL = 5.5; EXPRESSED IN BT474, SIGNAL = 2.2; EXPRESSED IN FETAL LIVER, SIGNAL = 1.4; EXPRESSED IN LUNG, SIGNAL = 2.4; EXPRESSED IN BONE MARROW, SIGNAL = 2.4; EXPRESSED IN BRAIN, SIGNAL = 1.8
gtgacttttgctcccattcccaacaagttcctcatttccatctgagacctcttcagcctggacttcactgttcatattctcaccagcattttagtcacaatcatttaatcaatctctaagaagttacaagctttcctttatcttcctgcctttttttgagccctttggactcttccaacctcttcccattacccagttccaaagctgcttccacattttcaggtatctttatagcaatgcccgactccttggcaccaattccctgtataaggctgttcttgcatattacgcctattcccaataagatcctcatttccatctgagacttcttcagcctggactttactgtttctatcagtaccatcattttggcaataaccatttga

SEQ ID NO: 4852 - DNA, 482 bp, Homo sapiens
  MAP TO AL050325.20; EXPRESSED IN HEART, SIGNAL = 1.1
agggcagttggtcatgctaccttagttactaattgattctcatagtagacattgtaattactcactgattgtatattacgcttctccttcctccccctttcccaggctggcagagcccatctcttaggacagaggctgaaaacggaagatagtttcccagcctctcttgtggtgaggggttgccatgtgaccgagttttggccaatgagacaaaagggaaagtctgctgggaacttctgggaaggggttttttctctctatctaccttcaccccctctttcttcctgctttcggtcgtgagaatgtgatgattagagctgtgacagccatcttgtgaccacaaggaaacatccttaccacactctgaggggtaaaacgaaggacagtaaaagctcgacactttgatgacattgttgatcctctgaacgaccctaggacttgaacaacattaaaatgttacatgttgtttatcaaaagacatc

SEQ ID NO: 4853 - DNA, 412 bp, Homo sapiens
  MAP TO AC012330.5; EXPRESSED IN BONE MARROW, SIGNAL = 3.6; EXPRESSED IN BRAIN, SIGNAL =   3; EXPRESSED IN HBL100, SIGNAL = 2.7; EXPRESSED IN PLACENTA, SIGNAL = 3.6; EXPRESSED IN FETAL LIVER, SIGNAL = 2.2; EXPRESSED IN LUNG, SIGNAL = 2.9; EXPRESSED IN HEART, SIGNAL =   2; EXPRESSED IN HELA, SIGNAL = 2.3; EXPRESSED IN ADULT LIVER, SIGNAL = 2.5; EXPRESSED IN BT474, SIGNAL = 2.6
caggaaggaggacagcagactttaggaccccacagcacggcagtgctgaccatttcacccacttggcctccttgagaaatatggatggggacccctctggggatgggcaaggccttccaggataggctcagttttggtcccctgctttttgaggttgggttaaaattccgaccatggcagaggaagcacagctcaggttcccacacctcacttttcacagcctctgagggcagcagtgcacgtggaggagacgtctcccatgaggccaaggcctccagtgctcaccgatgccctctgcgaagttggggtagaactcgtcagtgaagaggggctcgggcagctcacggaaatacagcttcagcgtgcctgcgatggcgttcacgtccatctcgctcatcatcaccgacacgtc

SEQ ID NO: 4854 - DNA, 486 bp, Homo sapiens
  MAP TO AB026898.1; EXPRESSED IN HEART, SIGNAL = 0.86; EXPRESSED IN LUNG, SIGNAL =   1; EXPRESSED IN BRAIN, SIGNAL = 0.95; EXPRESSED IN BT474, SIGNAL = 1.2; EXPRESSED IN FETAL LIVER, SIGNAL = 0.92
caaggttggaatccatattgcttcaagccagaggccagttcctagtcggtggctccatgctggtctctgatgtttaggaagtggtgtcagcagagactgagctgcaccctttctttggacagatggcaggagaggagaacttcaaggaagagctcagatcccaggatgcttccaggaacttgaaccagcatgaggtagcaggacatccacattcctggtctctggagatgctgttacgcagattgagggctgtccacaccaagcaggatgacaagtttgccaacctcctggatgcggtgggggagtttggcacattccagcagaggctagtagccctcacctttatccccagcatcatgtcggccttcttcatgtttgctgaccacttcgtgttcacagcccagaagccctattgcaataccagctggatcctggcagtgggcccccacctgtccaaagctgagcagctgaatctgaccatacccc

SEQ ID NO: 4855 - DNA, 478 bp, Homo sapiens
  MAP TO AF130248.1; EXPRESSED IN BONE MARROW, SIGNAL =   4; EXPRESSED IN HELA, SIGNAL = 5.2; EXPRESSED IN HBL100, SIGNAL = 4.4; EXPRESSED IN FETAL LIVER, SIGNAL = 4.9; EXPRESSED IN LUNG, SIGNAL = 6.6; EXPRESSED IN PLACENTA, SIGNAL = 5.3; EXPRESSED IN HEART, SIGNAL = 3.7; EXPRESSED IN BT474, SIGNAL = 4.6; EXPRESSED IN ADULT LIVER, SIGNAL = 6.2; EXPRESSED IN BRAIN, SIGNAL = 4.2
gcacatggaaccatgattttcatccttttgggaaggaaaagatatctcagaatgtgatgtgaactatgaaacttcttccagaaaaatgcacaaacagaatcttatatacattaatatggaagaatttctcaaaacagtgaaaaaagaaagtgatccaggtggctactagcataaagcaagtctttcaaactcaagactaatggtagagatcttccaaaatatttgaaatcctggtatgttctaactcttacagtatactaatgagaaacattttaggagctcgcttccagattacatgcaccagctactttggaggaagttcataagaattgcaattagtgagaagcgaagcactgatgggaaccaagcaagaaaacagaagagtaatgaaatgaagagagctttaatgaacaagaaaaacaggcaggagcaggcaagtcaggccctgaaaatgaatggtgggagaggcactgttttc

SEQ ID NO: 4856 - DNA, 384 bp, Homo sapiens
  MAP TO AF001548.1; EXPRESSED IN BT474, SIGNAL = 3.3; EXPRESSED IN LUNG, SIGNAL =   5; EXPRESSED IN BONE MARROW, SIGNAL =   4; EXPRESSED IN BRAIN, SIGNAL = 3.6; EXPRESSED IN HBL100, SIGNAL = 3.8; EXPRESSED IN FETAL LIVER, SIGNAL = 3.3; EXPRESSED IN PLACENTA, SIGNAL = 5.2; EXPRESSED IN HEART, SIGNAL = 3.4; EXPRESSED IN HELA, SIGNAL = 3.1; EXPRESSED IN ADULT LIVER, SIGNAL = 4.1
agaccttggcactcacatcctatgttaatctcatatagtctggcatgtcaagaagcagacctggggacatggatagaaggtgtttgatgtctctgcaacataactgtctggtcccagaaaagtttttggccacattgtaagagaggaaaccaagggacctgggggttcattctgctgggtctctccctggaaggcttgacgatgaaatcgctcagaagaacaatgccctgaagaagatccgggagctggagggccacatctcagacctccaggaggacctggactcagagcgggccgccaggaacaaggctgaaaagcagaagcgagacctcggcgaggagctggaggccctaaagacagagctggaagacacactggacagca

SEQ ID NO: 4857 - DNA, 442 bp, Homo sapiens
  MAP TO AF134471.1; EXPRESSED IN HBL100, SIGNAL =   2; EXPRESSED IN FETAL LIVER, SIGNAL = 3.7; EXPRESSED IN BT474, SIGNAL = 2.2; EXPRESSED IN LUNG, SIGNAL = 2.5; EXPRESSED IN PLACENTA, SIGNAL = 2.3; EXPRESSED IN HEART, SIGNAL = 2.1; EXPRESSED IN HELA, SIGNAL = 2.1; EXPRESSED IN ADULT LIVER, SIGNAL = 2.8; EXPRESSED IN BRAIN, SIGNAL = 2.3; EXPRESSED IN BONE MARROW, SIGNAL = 2.2
tgctgtgtctctgtgtgctggcccactgcagggcaattcagaaatattcagtgagtacttatggatttaacaagtatctatggagtacctactgtgtcccacggcctgtactcagtgctggggctgtaggttgaacaagctggggctgcaggtcgaagcttgtagaaacctagactcagaatctgagtgatagatgttaattactagtcacacagttttaccattaaaaatgtaatcatctgaagacaagtgtggggtgctgtggtgtgtatgacagaagagcctaactgggtggagctggtgctcctggatggaaagcatctcatatgggtggagctggtgctcctggatggaaagcatctcacacggacagggccaggggtgggagcggggaggccttgagaggagaggtagttcttggcggagtatgcagctgtgcaaa

SEQ ID NO: 4858 - DNA, 416 bp, Homo sapiens
  MAP TO AF002223.1; EXPRESSED IN BT474, SIGNAL = 1.6; EXPRESSED IN BONE MARROW, SIGNAL = 2.5; EXPRESSED IN BRAIN, SIGNAL = 2.1; EXPRESSED IN HBL100, SIGNAL = 1.7; EXPRESSED IN PLACENTA, SIGNAL = 4.4; EXPRESSED IN FETAL LIVER, SIGNAL = 1.7; EXPRESSED IN LUNG, SIGNAL = 1.8; EXPRESSED IN HEART, SIGNAL = 1.7; EXPRESSED IN HELA, SIGNAL = 1.8; EXPRESSED IN ADULT LIVER, SIGNAL = 1.7
tacccatccccacttctctgtagacttcatcacatttgcctcatcctttctagtcacgttgccctaccctcatcctcggtgtctgtctcctaggccctggcagtctccttcagctaggcctccctgacttctgcatctctcccttctattctatctgctccctaagacatacctgcaatcttctcattcccttactcagaaactctcctttcctaccttatcgcacattccctagccaggtgttcacggtcctcaccactctgctgccatcttatcttcccagcattgctctttctcccctcccttgtgtatacaccccgtgctttggctcccataagcaacttggtcttcctaaacaagccctctgcctcctcacctgtggacttctcgtgcagccattttgtccccctagagca

SEQ ID NO: 4859 - DNA, 484 bp, Homo sapiens
  MAP TO AL021395.8; EXPRESSED IN HEART, SIGNAL = 1.1
catatgtgagatatttgtgcctttgatcaaaatataatctaggcattgagcaatgatacttaaagcatgattcattgattggtaattttagcatctcctgggacaaatacagaatctcaggccccagctcagacctcctgagtcagcatttatgggggcgagcccggacatctgtattttgacaagccttccagatgattctgatgcaaagcctagactccaagactttgcttccttccagagtgccctgtggattcctgctctgcctgccatcctgggaatggcttctctctcttcccttcccactctcagtgacatacttcatgtctgtttgcaaagcccacaccccgtgtcctggggaccacgcgaaccctctggaacattatctttatgacctcgcagtagctgagctgtgtctggtaagtagtcctcaccccagtgctcccagtagattctgccctgtgcaatgcaggcttctttaggc

SEQ ID NO: 4860 - DNA, 484 bp, Homo sapiens
  MAP TO AL109853.3; EXPRESSED IN HEART, SIGNAL = 1.2
aaagctgagatgtgcaaacagatacctaatacatttccagcacctgaagatggtcttttgtccttgtgccagatccacccaaatgtctaggtattctaagtcttttccttttattgcttctatctgacatctttaatgagcccatgtcaagacatatcaaatatctatatgtcatggggatggctggttacaaatgaaaaaacatatggaaaaatatttcaacagaggggaaaagcagtatgaaaaaaagcaagttggaaacagaaactcaggccctacatactgaggtagaaccacctttttggatggtatcacgtttttatcaaggaggtacctggcagccagaaataaatagcccattttataagcctgaatgacttccaggatgtggagaactgtagaaaagagttttgcaaagacaactatataagctggtgctggtaaaatttttactagttcatgttgaaatgaaaagaaatgaagg

SEQ ID NO: 4861 - DNA, 450 bp, Homo sapiens
  MAP TO AF088219.1; EXPRESSED IN FETAL LIVER, SIGNAL = 1.1; EXPRESSED IN ADULT LIVER, SIGNAL = 1.1; EXPRESSED IN LUNG, SIGNAL =   1; EXPRESSED IN HELA, SIGNAL =   1; EXPRESSED IN PLACENTA, SIGNAL = 1.3; EXPRESSED IN HBL100, SIGNAL = 1.1; EXPRESSED IN HEART, SIGNAL =   1
atcccgtgcaacagctagacctccatgaagagaaacagagccaatattccttttacccaaaggaaaaagagaggtggcagaatcttggaaaagaggcagatccgacagttctaaatctgtactcatccttgtgctgtatcccagacgagcccccagatgaaatgggagagttccctgaccccctcacgggacttgcgacaggggtgtggctcatttgctccactgtcacacactttaccccttataggagggggaacacacagatgggaaggtgcaggagctggggcaagcacttttgggctctggccccatggtagcatccaaaggtgtgttacaattaatactcttttagcagttgctatctgcagacggctacttcgtctcagtggagagtcagggtgacagccttttataccctgccctcttggtacccaggtccttgtctgacat

SEQ ID NO: 4862 - DNA, 415 bp, Homo sapiens
  MAP TO AF093117.1; EXPRESSED IN BONE MARROW, SIGNAL = 1.1; EXPRESSED IN HBL100, SIGNAL = 1.5; EXPRESSED IN FETAL LIVER, SIGNAL = 1.2; EXPRESSED IN BT474, SIGNAL = 1.2; EXPRESSED IN LUNG, SIGNAL =   1; EXPRESSED IN PLACENTA, SIGNAL = 1.2; EXPRESSED IN HEART, SIGNAL = 0.94; EXPRESSED IN HELA, SIGNAL = 1.2; EXPRESSED IN ADULT LIVER, SIGNAL = 1.3; EXPRESSED IN BRAIN, SIGNAL = 1.1
cgagggagaaacagaacctggctttcagaagtgtttctaaagcatgactccagggaaaacaaattgatagtgacttccacaaagtcttagaaaactcatttctgccctttggatacaatgcagtaagttcaggtcagctcagatctgcaataagaaatgttattaccacattgataagatgcctcaaatttcagaaataaaaatgacaataaaaattcacatccattgacctaaattgaaaaatgatcatcagctctttccagtttctgatggacttgctccagggaatcaaggctgagtacaggaagctgtctctgtggtcctccacagacctccggagtgtttccacgtcttccctgcttaggagcttcgactctaagtcaacaagttgagaggccaatgcccataaaaatca

SEQ ID NO: 4863 - DNA, 437 bp, Homo sapiens
  MAP TO AF042091.1; EXPRESSED IN BT474, SIGNAL = 1.8; EXPRESSED IN BRAIN, SIGNAL = 1.4; EXPRESSED IN HBL100, SIGNAL = 1.5; EXPRESSED IN LUNG, SIGNAL = 1.8; EXPRESSED IN BONE MARROW, SIGNAL = 1.7; EXPRESSED IN PLACENTA, SIGNAL = 1.3; EXPRESSED IN HEART, SIGNAL = 1.6; EXPRESSED IN HELA, SIGNAL = 1.3; EXPRESSED IN ADULT LIVER, SIGNAL = 1.6; EXPRESSED IN FETAL LIVER, SIGNAL = 1.6
aggagaagaggtctccctgcaatactcctgttacattttgcaatttagaattaaagcagatgtacaatcataaagaaaaaggaaaaaaataataaagtgatttttttaaaaataaaatttcagtctttgtgggaggggatggattgagcatttccttgattggattgttttgctttggtaaaaaagcacagactgtcttcttaaatgcatttctttttctttttcaatagtgaaaggtagtgaaaaaaggaaagaaatgagcacttttaacaagaatattttcacacatattacctgtacaggagacataatcagtgcaaaatggaaatgtgaagcttctcattcaaaaactaagatttgcaagatgatgacagcagtaaataaataaaagcatcggttttttctgagtgtggggccctgtgtgactgcaccgtttg

SEQ ID NO: 4864 - DNA, 480 bp, Homo sapiens
  MAP TO AC007279.3; EXPRESSED IN HEART, SIGNAL = 8.7
tggatgcatgattcatttcctagaatataggcacaagtctgtgattaaccgtttgtattgctaccatttgctacttttcatactaaaaatcctgtcttatagatagggaaattcttttaattatatctggcttatttcattgtatttctactttcacagcacctaaaaaatgtgcattctgaaagaggtactttctagtgaaattttttatttaatgtacatattaccaattccaaaatgattaactaaatttttttttcctctgcctctagtgatttcctaaataaaaaccaagagctgttgcaagatttgtcagaagtgaatgacgaaaacactcagttgatggaaatactgaatactttgtttttcttgccaatcagacgacttcataattacgcaaaagttttgctaaagcttgctacttgttttgaagtggtaagctcccatgtatacctctttggacatttggaaagccaagga

SEQ ID NO: 4865 - DNA, 419 bp, Homo sapiens
  MAP TO AH005549.1; EXPRESSED IN BRAIN, SIGNAL = 1.4; EXPRESSED IN BONE MARROW, SIGNAL = 4.4; EXPRESSED IN HELA, SIGNAL = 1.4; EXPRESSED IN HBL100, SIGNAL = 1.5; EXPRESSED IN FETAL LIVER, SIGNAL = 1.5; EXPRESSED IN LUNG, SIGNAL = 1.3; EXPRESSED IN PLACENTA, SIGNAL = 1.4; EXPRESSED IN HEART, SIGNAL = 1.1; EXPRESSED IN BT474, SIGNAL = 1.2; EXPRESSED IN ADULT LIVER, SIGNAL = 1.7
ttttcccatagaccagacagcttctcatatgataaggtaccatttgaacctaaatttccacctaaaacaaaactctatcaggtgcaactgcattctattctgttgatcgttggtcttcttaccagtggtttgggtgctttaattggtttagaaccagaggcccaaaccctccagtagttgattgtttcaagtaaacatgaaaaatgctgaggcccacatctacttgagtgggtacccacttgtaaaggatacccagtcccatatcctagatgacattgtcttggcccaaaatctcacctatggagatgacatagcttcagaggatattgccccaactcaaaactttactgctgggtatgacattgcctcagacaatatcacccaacccaagacgttggtgttgggaatgactctgcctc

SEQ ID NO: 4866 - DNA, 423 bp, Homo sapiens
  MAP TO AF053356.1; EXPRESSED IN BT474, SIGNAL = 3.8; EXPRESSED IN HBL100, SIGNAL = 4.6; EXPRESSED IN HELA, SIGNAL = 4.5; EXPRESSED IN HEART, SIGNAL = 4.3; EXPRESSED IN FETAL LIVER, SIGNAL = 4.4; EXPRESSED IN BRAIN, SIGNAL =   5; EXPRESSED IN LUNG, SIGNAL = 4.9; EXPRESSED IN BONE MARROW, SIGNAL = 4.8; EXPRESSED IN PLACENTA, SIGNAL = 5.2; EXPRESSED IN ADULT LIVER, SIGNAL = 5.5
tggtgtagatgctgctggacttgacactgaccccagggatctgggagatggcggggagggtgacctgtttgctgttgatctaaacaggaggacagtgaaggtgagtaggagcagggacaagagtcccctccccagcactccctcccagccccggtcaccacacccagctcactagcacacggtggcccttctgcagggtgacctgggcatcgtacatgtcaatgtagacctcatgaaggcggaaagcctcagttccaccttcctccttctcatgcttggcactgatcttgaacaagggcaaggccatggcggggtggcacactttcaccaggacaagagtgcaggcgtccgggatagaatggttactaccatcaaagctcacgtagtgggactcccctgggagctgacacactcccacacctg

SEQ ID NO: 4867 - DNA, 367 bp, Homo sapiens
  MAP TO AF053356.1; EXPRESSED IN HEART, SIGNAL = 6.3; EXPRESSED IN FETAL LIVER, SIGNAL = 7.3; EXPRESSED IN ADULT LIVER, SIGNAL =   8; EXPRESSED IN BT474, SIGNAL = 5.9; EXPRESSED IN LUNG, SIGNAL = 7.2; EXPRESSED IN PLACENTA, SIGNAL =  11; EXPRESSED IN HELA, SIGNAL = 6.4; EXPRESSED IN HBL100, SIGNAL = 6.3; EXPRESSED IN BRAIN, SIGNAL = 6.2; EXPRESSED IN BONE MARROW, SIGNAL = 7.6
ctagcccagtgacgctaaggcctttgccttccctgtgccattctggtcacgcctggaatgtgctcccgttggcagaaggctttgttatctctcctgggaggccacattgatggccttgaatctttaggtgtggaggtgagggagtgggcagccggctctggggggactgaaggtcctgtccgggctgggcctttccgcaactctccccgacacctccttttccccagacctgtcccggaaccggtttcccgaggtgcccgaggcggcgtgccagctggtgtccctggagggcctgagcctctaccacaattgcctgagatgcctgaacccagccttggggaatctcacagccctcacctacctcaac

SEQ ID NO: 4868 - DNA, 370 bp, Homo sapiens
  MAP TO AF109907.1; EXPRESSED IN BT474, SIGNAL = 2.7; EXPRESSED IN BRAIN, SIGNAL = 2.8; EXPRESSED IN HELA, SIGNAL = 2.2; EXPRESSED IN HEART, SIGNAL = 2.2; EXPRESSED IN FETAL LIVER, SIGNAL = 2.2; EXPRESSED IN LUNG, SIGNAL = 2.7; EXPRESSED IN BONE MARROW, SIGNAL = 2.6; EXPRESSED IN PLACENTA, SIGNAL = 3.2; EXPRESSED IN HBL100, SIGNAL = 2.9; EXPRESSED IN ADULT LIVER, SIGNAL = 2.2
atggagccagtgtctgcttcacatgttaagtccttctttccatatgttagacattttctttgaagcaattttagagtgtagctgtttttctcaggttaaaaattcttagctagattggtgagttggggaaaagtgacttataagatacgaattgaattaagaaaaagaaaattctgtgttggaggtggtaatgtggttggtgatctccattaacactgacctagggcttttgtgtttgttttattgtagaatctataccccattcacagaagataccgagactgtgggccagagagccctgcactcaattctgaatgctgccatcatgatcagtgtcattgttgtcatgactatcctcctggtggttctg

SEQ ID NO: 4869 - DNA, 413 bp, Homo sapiens
  MAP TO AF042089.1; EXPRESSED IN ADULT LIVER, SIGNAL =   2; EXPRESSED IN BT474, SIGNAL = 1.8; EXPRESSED IN HBL100, SIGNAL = 1.7; EXPRESSED IN HELA, SIGNAL = 1.6; EXPRESSED IN HEART, SIGNAL = 1.8; EXPRESSED IN FETAL LIVER, SIGNAL = 1.6; EXPRESSED IN BRAIN, SIGNAL = 1.8; EXPRESSED IN LUNG, SIGNAL = 1.5; EXPRESSED IN BONE MARROW, SIGNAL = 2.2; EXPRESSED IN PLACENTA, SIGNAL = 1.5
tgatgagcatgtatggggtgttttctgtgtaccagatgctgttctaatctgctgtcctaatgggctgctaagggaggtttggttgactcatttcatcctcccaacaaacccacgaggtagatcctgtttgaattcctgttttacggatggggaagtggaagcatagagagttgttggagtgtttcatccaatatcactgtattaagtgcagagttgctgcatggcgggaaggacctccctaaccagtcccccttcccctcctcctggttcagggaatccaccccctgaagtcatctggctgcacaatgggaatgagatccaagagtcagaggacttccactttgaacagagaggcactcagcacagtctttgtatccaggaagtgttcccggaggacacgggcatgtatacct

SEQ ID NO: 4870 - DNA, 367 bp, Homo sapiens
  MAP TO AL021920.1; EXPRESSED IN BT474, SIGNAL = 4.7; EXPRESSED IN LUNG, SIGNAL = 4.8; EXPRESSED IN BRAIN, SIGNAL = 3.2; EXPRESSED IN BONE MARROW, SIGNAL = 4.7; EXPRESSED IN HEART, SIGNAL = 3.6; EXPRESSED IN FETAL LIVER, SIGNAL = 4.2; EXPRESSED IN ADULT LIVER, SIGNAL = 6.1; EXPRESSED IN PLACENTA, SIGNAL = 4.3; EXPRESSED IN HELA, SIGNAL = 4.4; EXPRESSED IN HBL100, SIGNAL = 4.5
agacatcttgcaccagacccaagtgagggatggaaggggccctgatggtcatcttgggacagcttcttagggtcacccaggagcccaggagccaggtatgccactccgtggtgggacagaaacccctgtaaagagcaagcagacactcagtcacccaggaccctccccaacactcccattccctgcaatctatcagcgcatcctatcaatcccgtctggagtagatatctgatcatgccttctctcccttgtgactgccatcacccaagtccaggttcctgctacatccttcctaaaaggccttcccctgcaagcttgcctacctcacatcgactttccccacatagctgcaaaagtggacgtctga

SEQ ID NO: 4871 - DNA, 416 bp, Homo sapiens
  MAP TO AF043945.1; EXPRESSED IN BONE MARROW, SIGNAL = 1.9; EXPRESSED IN BRAIN, SIGNAL = 1.4; EXPRESSED IN HEART, SIGNAL = 1.3; EXPRESSED IN FETAL LIVER, SIGNAL = 1.4; EXPRESSED IN ADULT LIVER, SIGNAL = 1.7; EXPRESSED IN BT474, SIGNAL = 1.5; EXPRESSED IN LUNG, SIGNAL = 1.5; EXPRESSED IN PLACENTA, SIGNAL = 1.3; EXPRESSED IN HELA, SIGNAL = 1.3; EXPRESSED IN HBL100, SIGNAL = 1.2
attctctgcccaggagacaggaaagacttggagagaaagttgagatgaggaggaaaatgtcaggagactccatttcaaaaagtgggaagacaaagggtgagtcctcctgttgccagatttctcccagttcactttcctcagctccaatcccaccaaacatattgtgcctagtcacccggggaatccaggaattgctgacacttttctgggcatcccaggcagccacatgcacaaagccatccctacccaaaggaaagcctgtgcgatacaggccagcaatgggtgcccacctgcacacagggtcagcctgggtttggccagtgtgcccactccctggacaggcaagctcactctgttcctgttcattccttagcctttcaggagtaccccctgtttgtttcagagcttcgtgcatg

SEQ ID NO: 4872 - DNA, 416 bp, Homo sapiens
  MAP TO AF051934.1; EXPRESSED IN BT474, SIGNAL = 1.3; EXPRESSED IN BRAIN, SIGNAL = 1.3; EXPRESSED IN HELA, SIGNAL = 1.2; EXPRESSED IN HEART, SIGNAL = 1.7; EXPRESSED IN FETAL LIVER, SIGNAL = 1.3; EXPRESSED IN LUNG, SIGNAL = 1.3; EXPRESSED IN BONE MARROW, SIGNAL = 1.5; EXPRESSED IN PLACENTA, SIGNAL = 1.2; EXPRESSED IN HBL100, SIGNAL = 1.2; EXPRESSED IN ADULT LIVER, SIGNAL = 1.4
ggctaacacatgatggtgggcaacccacttcaccttctcagattcatttttctcgtctattaaacaggcattcatagtactagcatgtctacctcacaggattgtcctggtctttaagtgaaataatatacatagaagctcattgtaaatggcaaggtactatgcaaaatgtaagatactactactgtttatagaacacagctttgtttttcttctgcttctgatgcatatctgaagttaagatcatggtcctgacggggacagtgaacttggtgtctgggttaaagatgagagtggcagctggctcccaggtggtccagggtgtcagtgaggtgatggaacattccacaccccttttaaccccagcatcagtgtagggagttatcttcagggaagctgctctctcctggatttgc

SEQ ID NO: 4873 - DNA, 482 bp, Homo sapiens
  MAP TO AL022101.1; EXPRESSED IN PLACENTA, SIGNAL =   2; EXPRESSED IN HBL100, SIGNAL = 0.95; EXPRESSED IN FETAL LIVER, SIGNAL = 1.1; EXPRESSED IN ADULT LIVER, SIGNAL = 1.7; EXPRESSED IN LUNG, SIGNAL = 1.1; EXPRESSED IN BONE MARROW, SIGNAL = 0.98; EXPRESSED IN HELA, SIGNAL = 1.2; EXPRESSED IN HEART, SIGNAL =   1
cttgtgacattcccattcccattgttttagaaccttgagtaattagtagtttcccccaatggtaggaggggttcactttcaggttcctccacactcactagtcactggatggagcactggatagaaaggaagggctcgtggtggccctgcttcctcactgcttcggagacgctcatgctgatgcagcagaggcagaatgctggcttaatggccactgagtacagagtagaattggagtaaactgaggactctttcaccattgccagagcagtgagtttggccataggagaggatgagattgcatgggcttggcccgagagagatgccttttctctgggtttgtcctctggaagttttccctgcagattcatgaagatgagcatctggactccacccagactcctggagcttgcagggcggagcctgctaagggaccaagctttggccatgtccaccctggaggagctgcccacagaactttt

SEQ ID NO: 4874 - DNA, 381 bp, Homo sapiens
  MAP TO AL021706.1; EXPRESSED IN BT474, SIGNAL = 1.2; EXPRESSED IN LUNG, SIGNAL = 1.4; EXPRESSED IN BRAIN, SIGNAL = 1.2; EXPRESSED IN BONE MARROW, SIGNAL = 1.3; EXPRESSED IN HEART, SIGNAL = 1.1; EXPRESSED IN ADULT LIVER, SIGNAL = 1.8; EXPRESSED IN FETAL LIVER, SIGNAL = 1.3; EXPRESSED IN PLACENTA, SIGNAL = 2.6; EXPRESSED IN HELA, SIGNAL = 1.8; EXPRESSED IN HBL100, SIGNAL = 1.7
tcgcttggtgacttgatgaccaatagtcacatgttcagtttccaccaaagctcagtaacaggccaagagctgtctctaaaaaggaggtcagttatctggagaagatggcacagccttgctccaaaatcttagaggcttatgctgtgattcacctacctgccaaaggatccaaacaacatccctatctgccactgacaccttaagcaccagtgaatctgccgggtcatatgccccaaatgtcagagcagcttgcacagcagcctggacctggtgcagagccttctcctgttctggacaccactcaaaactggcagccttttgggtcactcgataattggaccagagtaacacacccaaatgagcagtgtgttgcctctgaaa

SEQ ID NO: 4875 - DNA, 427 bp, Homo sapiens
  MAP TO AL031407.3; EXPRESSED IN LUNG, SIGNAL = 1.1; EXPRESSED IN PLACENTA, SIGNAL =   1; EXPRESSED IN HEART, SIGNAL = 1.1; EXPRESSED IN BT474, SIGNAL = 1.1; EXPRESSED IN BRAIN, SIGNAL = 1.2
atcaaaccctgttccttccctgctcagaacccttgaaatgccctttgaatgaactcaaaactcttcatcccagccaccaatacactaagccacacatgacctggtctctgcctgtctctgatcttctccccacatctcccaccatctctcacttgctctatcatatgtcacagctaggcttagctttctgcctattactgttaggttggtacaaaagtaattgtgaattttgccattaaaagtaatggcaaaacctgcgatttctttttcaccaacctaatagaacatgctaagctcactcctgttctagtctctcatgacctgaagctctctgggcctagtccttccaccatccggatccttcttgtcatccaggtctccgctggaagaccgcccaccctgagcggccaaactgaaggggactctg

SEQ ID NO: 4876 - DNA, 457 bp, Homo sapiens
  MAP TO AL008725.1; EXPRESSED IN PLACENTA, SIGNAL = 3.5; EXPRESSED IN HBL100, SIGNAL = 3.4; EXPRESSED IN LUNG, SIGNAL = 3.5; EXPRESSED IN BRAIN, SIGNAL = 2.4; EXPRESSED IN BONE MARROW, SIGNAL =   3; EXPRESSED IN HEART, SIGNAL = 2.9; EXPRESSED IN HELA, SIGNAL = 2.9; EXPRESSED IN BT474, SIGNAL = 2.7; EXPRESSED IN ADULT LIVER, SIGNAL = 4.8; EXPRESSED IN FETAL LIVER, SIGNAL = 3.8
aggagaaattccctgttcccattaatacctgctgaaattttttatttccagcctcctcgtcagcttggaatgaatattagctaatatttgttgaatatttacatgtcagcactgttctaagcactttatttgcatcttatctcttaatccttttaacaacactaaggtagatattattgtagctgcactagaggaatgtggtttaacttttatgtaacaaagttgggaattgtttttctgttaccatggatttccaggttgaaggtcacataacctgagcatgcccagatgaaccaaacatgcaaccacagggggaccataagccctgggaccaaggaacagtgactgaattaagaagctcgggagttcttgaccagcctgggcaacagaataagacttcatctctaccaaaaaatattttgaagaagaagaaggaagaggaagaggaggaggagga

SEQ ID NO: 4877 - DNA, 368 bp, Homo sapiens
  MAP TO AL021918.1; EXPRESSED IN BT474, SIGNAL = 8.7; EXPRESSED IN BRAIN, SIGNAL = 5.4; EXPRESSED IN BONE MARROW, SIGNAL = 8.6; EXPRESSED IN HEART, SIGNAL = 4.6; EXPRESSED IN PLACENTA, SIGNAL =  11; EXPRESSED IN ADULT LIVER, SIGNAL = 2.7; EXPRESSED IN FETAL LIVER, SIGNAL = 9.2; EXPRESSED IN LUNG, SIGNAL = 6.2; EXPRESSED IN HELA, SIGNAL =  24; EXPRESSED IN HBL100, SIGNAL =  18
atccaaacaccaagcactccaggggctttgggtttgtcacatatgccggtatggaaaaggtggatacagccatgaatgcaaggccgcacaaggtggatggaagatttgtggaaccaaagacagctgtttcaagagaagattctcaaagaccaggtgcccacttaactgtgataaagatgttaaagaagaactgaagaacataaactaagagattatattgaacagtatggaaaaattgaagtgattgagatcatgactgaccgaggcagtggcaagaacaggggctttgccttgtaacttttgatgaccatgactccatggaaaggattgtcattcagaaataccacactgtgaatggccacaactgt

SEQ ID NO: 4878 - DNA, 393 bp, Homo sapiens
  MAP TO AJ010598.1; EXPRESSED IN HEART, SIGNAL = 0.85; EXPRESSED IN PLACENTA, SIGNAL = 0.62; EXPRESSED IN HELA, SIGNAL = 0.79; EXPRESSED IN BRAIN, SIGNAL = 0.75
tggcattcatgctgaaattgtgagcctatcctaggtcttctgcctttttgtgctggacttctttgagtctcttagatggcaccaacactctactttcttcaattatgatagagtgctaattcatccctaaactatattggctagtttaatttttggttactgttaaaatgaatatttattagtaaaaattttcttaatcttcagttaaggtgtttttgtttttgtttttttccttcaataggaacatcggaatttgccttttatgcgtgagctgaggtatctatttgcacttcttgttggtaccaaaaggaagtatgttgatccatcaagagcagttgaaattcttaaggatgctttcaaatcaaatgactcacagcaggtagttctgttgca

SEQ ID NO: 4879 - DNA, 454 bp, Homo sapiens
  MAP TO AL031577.1; EXPRESSED IN HELA, SIGNAL = 1.2; EXPRESSED IN HEART, SIGNAL = 1.5; EXPRESSED IN LUNG, SIGNAL = 1.6; EXPRESSED IN BRAIN, SIGNAL =   1
atttccaaagatgacggtgcattggcatcaactggtaagctttttataaatagagtttcatggatctcaccacagacctctgctgaatttatactagaatttgaatttgacattaccaaaaatgtagctatgcatgcaatgcaaatgtaccaggcagctttgttagcaagcttttaaaactagcatatagaagaatgtttcattctgtggtttggataatgtttggggtttttggtggtggctatcttgggcctttaagggtaagcctggcattgaaatgagttacctttttgtttcagatgtcatctgggtgattctcagtgtggaggtgggtggacttttaggagtaacgcagcagctgtcatcttttgaaacggagttcaacacacagccgcatcgtaaggtagaaggaaacttcaacccttttgcctctccccaaaagaaccgacaatca

SEQ ID NO: 4880 - DNA, 500 bp, Homo sapiens
  MAP TO AP000275.1; EXPRESSED IN PLACENTA, SIGNAL = 0.8; EXPRESSED IN LUNG, SIGNAL = 0.71; EXPRESSED IN ADULT LIVER, SIGNAL = 0.73; EXPRESSED IN BONE MARROW, SIGNAL = 0.68; EXPRESSED IN BRAIN, SIGNAL = 1.5; EXPRESSED IN HEART, SIGNAL = 0.8; EXPRESSED IN BT474, SIGNAL = 1.4
gcataggcaacgaaagaaaattagattccttggattacatctaaatgacagacacttttgtgcatcaaaaaacactgtgaactgagtgaaaagataacccatggattcggaaaaatatttgcaaatcatatatctgaaaagaggctgatatccatcatgtataaagaacagctagaactaagcaacaagaaacccaaagcatcccattgacaatggtcagaagactcgagtagacgtgtccctaaagaagatacagcaatggccaataagcatctaagatgatgttcaaaatcactcatcatagggaagcgcaaatcaaaccaataatgtgataccacacattaggatggatatgataaacaagcattggtgagactagagggaagtaggaatgctcgaatatgattgcagggaatgtaaaaccgtgaagcaacagtgaaaatagtatggcgtgtactggaaaaattagaaacagaattatcagatgttcctgcagttgc

SEQ ID NO: 4881 - DNA, 384 bp, Homo sapiens
  MAP TO AC007678.1; EXPRESSED IN HELA, SIGNAL =   1; EXPRESSED IN HEART, SIGNAL = 0.85; EXPRESSED IN BONE MARROW, SIGNAL = 0.97; EXPRESSED IN ADULT LIVER, SIGNAL = 1.1; EXPRESSED IN BT474, SIGNAL =   1; EXPRESSED IN FETAL LIVER, SIGNAL = 0.96
ttttaataagtcatgtgttgctgaatcttattataaattatattacaagaaaaagcagcagtacaacctggccaaccagattaccttacataactgttcctttctagcatctttcagttaggagaatttaatttcttgagatacaaaaatattctggaaaaactttatcttttataaaagagtataaaccactggtaaataaaactcatgaccatcaatcaagtgggaggtctgagattttctcaggaaggtttcattcagtcatctgcagatatgaaggaaaaattggggttcaaagggctgatgttggtatcaaagaactcagttcctgtaatgttccagatgatcttgggatgtgtactctgaggtccctgcatgattgtt

SEQ ID NO: 4882 - DNA, 475 bp, Homo sapiens
  MAP TO AC008164.2; EXPRESSED IN LUNG, SIGNAL = 0.59; EXPRESSED IN HEART, SIGNAL = 4.5; EXPRESSED IN HELA, SIGNAL = 0.67; EXPRESSED IN ADULT LIVER, SIGNAL = 0.7; EXPRESSED IN PLACENTA, SIGNAL = 0.86
ccacttagcccttttcctgtataatacttagcaggtgtttttaaaattcttccatagtctcctgatctgcagaaatgcatctcctctgcaagctgagcatttttcacactgcattgccttttgaatcatgtgagccagccagcaccagccaagaagagtttaacattttcctgaccgtgggttatctgaccataaatttgtttggctttcagtctcacaacaatgctgtccccttttcaattatttttaaattagttgtcgtctcatgaatccatccatttagccacttccccgtcttttccatagcttcatcatgcactatggactacatgctacttcaacaccttctggagcagcctcgcatgtggatctgcaaatttcctcttcctttttctggatgtatcttgttgttgattcattcgtatgggactcagtcaacagcactgtaactcatgcctgcacgaagcttagttaa

SEQ ID NO: 4883 - DNA, 428 bp, Homo sapiens
  MAP TO AL049739.1; EXPRESSED IN ADULT LIVER, SIGNAL =   1; EXPRESSED IN HEART, SIGNAL = 0.94; EXPRESSED IN HBL100, SIGNAL =   1; EXPRESSED IN HELA, SIGNAL =   1; EXPRESSED IN PLACENTA, SIGNAL = 0.91
gccatctaaaagccaaaaatgtaaaacttgtgaggttgaatcatgcaaaacaacaatactctccctccagatattcttggcttggtaagaaaattctgagctggaaggattctgattgtgattagtgttccatacattattttgtcttttgtctgaagcaatgctgaatacaacctcagtcactgaatttctccttttgggagtgacagacattcaagaactgcagccttttctcttcgttgttttccttaccatctacttcatcagtgtggctgggaatggagccattctgatgattgtcatctctgatcctagactccattcccctatgtatttcttcctgggaaacctgtcctgcctggacatctgctactccagcgtaacactgccaaaaatgctgcagaacttcctctctgcacacaaagcaa

SEQ ID NO: 4884 - DNA, 376 bp, Homo sapiens
  MAP TO AL109956.13; EXPRESSED IN LUNG, SIGNAL = 1.1; EXPRESSED IN PLACENTA, SIGNAL = 1.6; EXPRESSED IN HEART, SIGNAL = 1.1
aaacaaagcatccatgtgggaaaaatacataacaatattggattcaagctaatttcctttttctatggattatatcagcaacaagaaatcatacattctaacttccaggcaaatagagttttttgagcatgaaacgacttcagagcagagtttttaaaactgccattcaaattattgtttatttcagaaatacggctgtgctatatagccttcttcaaggggaaatacatgtaaaccaaatatccatggcttaccttggtcttcaaaaactgtgacgttaaatctctttgctgttctacttcagtgcgcacgtgattgcagaaagccacagagtactgacgactgtagtagggactgaagtttttgatggcagcct

SEQ ID NO: 4885 - DNA, 1962 bp, Homo sapiens
  MAP TO AL031665.18; EXPRESSED IN PLACENTA, SIGNAL = 1.2; EXPRESSED IN BT474, SIGNAL = 1.5; EXPRESSED IN LUNG, SIGNAL = 1.8; EXPRESSED IN BRAIN, SIGNAL = 1.6; EXPRESSED IN HEART, SIGNAL = 1.2
aatcctactccagctttgcgaactagagggtagtagtagtattattttataggtggggaaactgaagccagacaggattagtgaattgcccacagccataccccacccggtggtagagtgggatctgggcttggatcacactgttctgtcatcgtcttattccctgtcttcccctctgtctggcagacacccccaagtgggaattgtgcctgactcaccttcatgtgcttagggactggtatgatgtcctccacaacagggagaggttgctacattcaactgactttcttttttctcttccagctgccaaggggccaagggatgagctggggccctccttcccaatggcatctccccctggtctggaactgaagacactgagcaatggtccccaagccccaaggagatcagctcccctgggcccagtggccccaaccagggagggtgtggagaatgcctgcttctcctcagaggagcatgagacccatttccagaaccctgggaacacgagactgggcagctcacccagtccccctgggggtgtctcctcactgccccgatcccagcgggatgatctgtcccttcattcagaggaggggccagccctggagcccgtgagccgcccggtggattatggctttgtttccgccctcgttttcctggtgagtgggattcttctggtggtgacagcatacgccatcccccgtgaggctcgagtcaatccggacacagtgacagcgcgggagatggaacgactggagatgtactacgcccgcctaggctcccacctggacaggtgcatcatcgcaggcctcgggctgctcacggtgggcggcatgctcttgtcggtgctgctcatggtctccctgtgcaagggcgagctgtaccgccggaggaccttcgtccccggcaagggctccaggaagacctacggctccattaacctgcgcatgagacagctcaatggggatgggggccaggccctggtggagaatgaagttgtccaggtctcagagactagccacaccctccagaggtcttaagaactagcccaccttatctggctgctttagctccagtgctacaaggtccaccccctgctcccgcccacctgacccctgccaaggccctggggttttaaactgagctcacatagggccttgtggaagaagtactgggtgctggagggagagctcggggcccagcccatgccccacacgggcaagcagcccactgatctgttttgtagctgaggttttgcatacggttttgtttggaggatggcttctgctgctaaaaatacaaaagtttggaaaccgctgctcttggaggatgaggtttcttggcatttctcaagattgggagctgtttgaaaggttgcccatcctcttccctcatgccttggggagtgagggacctctgctgtccttattggctgagtgagggtgttgattggccgtggaggggtccctttcagccctgatcatctaaggtgggggaggtggcttcatgatgaggggagaagtcagcaccagagtgacccccagtacccccactgactaaactgtgatcctaccctcaccaggcctcagttgccctgccttcaagtgagggggttggactggatgacccctcaggtccctctagttcttccctgggaatgggaacccagtctctatctccagtcacccctccagggcaggaaggcatccaccaggcactaaccattctccctgccattttctggcctgacctcagggaccaccacagccagcagctctcatggtctcagggaagagctccctggtggggttgggttcagttcaaagtttgctacagcctggttttggtcttggggtctaatttcctgcagtgacacatttttacaaagccaagtgcacaatattacccagttctctgggcaagaaggatcttttacacaggaaagggtgagggctttat

SEQ ID NO: 4886 - DNA, 397 bp, Homo sapiens
  MAP TO AC010680.3; EXPRESSED IN HEART, SIGNAL =   8; EXPRESSED IN BT474, SIGNAL = 0.93
accgtgagagtaggccaaactatccgcattctagctcgagtcaaaggcagacctgaaccagacataacttggactaaggaaggcaaagtattggtccgagaaaagagggtggaccttattcaggatctacctcgtgttgagttacaaattaaagaagctgttagagctgatcatggcaagtatatcatctcagctaagaacagcagtggacatgcccaaggttcagccatcgttaacgtccttgacagacctgggccttgccagaatttgaaggttaccaatgtaaccaaagagaactgtacaatttcttgggaaaacccactagataatggtggctcagaaataacaaacttcatagtagaatatcgcaaaccaaaccagaaaggctggtcaattg

SEQ ID NO: 4887 - DNA, 487 bp, Homo sapiens
  MAP TO AL096864.6; EXPRESSED IN HEART, SIGNAL = 1.1
tgaatttggagatagcaagaacctttatctctgtatttttaatggaagaagaattattcaaaactccaaccaaagtcctcagtatgttgaagatactcttaaatacccatataacaactattcatgcacacataaagaatttcatacatccattgccctgttatttaacacttaaacttgttctttgaaatatttgtgtgcagaagctgagcagtatcagagacaaattaaattttcatttcataacaaacatctatctcaatatactttatcattccaacttttcttctaaaataatggattttcaaggcctttaaaactcactgactttcttcaaaggctttttgacttccgtaggagacatatttacgtaaaactatgaggggaattgagagtgataatgaaaaatccatctattaatagcaagcacaagcaggagatgcttgttattagaataaaaacacatagacaattgcagaacactctg

SEQ ID NO: 4888 - DNA, 413 bp, Homo sapiens
  MAP TO AC010680.3; EXPRESSED IN HEART, SIGNAL = 2.8; EXPRESSED IN ADULT LIVER, SIGNAL = 1.3
gcaagctaaatcattacaatccagtgaatgttagcatttgatctattttatccttaaaatccaacctctttttactacagtgagtttggctgaagttgctgtttttccgctgtcattcaaggcctcacagacatactctccttgatggtcttcggtatttactttgtcgatgactagcgtatatgtattttgatcttgtaaacacttgaacttttcatctgaaggcaccagtttattctcaaaataccaattcacctctttagcatttgttatggatgttgtgaggtgtacaatatcaccttcctcagaaacagtgtccactaaaggtgtatgtatcatggggccatcctctttgattaagccaccctcagcttcctgtatctttactgtagcaacctcctcagtaccacttt

SEQ ID NO: 4889 - DNA, 465 bp, Homo sapiens
  MAP TO AL009178.4; EXPRESSED IN HBL100, SIGNAL = 1.2; EXPRESSED IN HELA, SIGNAL = 1.3; EXPRESSED IN PLACENTA, SIGNAL = 1.8; EXPRESSED IN ADULT LIVER, SIGNAL = 1.4; EXPRESSED IN HEART, SIGNAL = 1.9; EXPRESSED IN BT474, SIGNAL = 1.5; EXPRESSED IN FETAL LIVER, SIGNAL = 1.3; EXPRESSED IN LUNG, SIGNAL =   1; EXPRESSED IN BONE MARROW, SIGNAL = 1.9; EXPRESSED IN BRAIN, SIGNAL = 1.5
atgttcaaggcccagagatgcaggtgatacatgaacgccagcgaggtctcaggacttgggaattagagtgaggagtggggcctgtctggatggagggaagtggggcccggaggctgacctaaccctaaccctaaccctgagcaacgctggagccgggggaggaagcactcccaggctgggggtggctgctctgaagctgcaactcaaattatgaggttggagaggcagaaaagagctaatgcttggaaagctttgagcaccagctcgggactttgggccgtggggtgggagacatgggaattcatgctgggagtcatcaggcctgggtgtgtcgagctgggcaggaacaggaggtgctgtgggcacaggaaagaggcagtgaggcctgaggctccccagaggcgcaggaacggggcagcatgaggagacgcccctggtgctgcaaggaatagacaccaaggccaa

SEQ ID NO: 4890 - DNA, 478 bp, Homo sapiens
  MAP TO AC008119.6; EXPRESSED IN LUNG, SIGNAL = 1.8; EXPRESSED IN ADULT LIVER, SIGNAL = 0.91; EXPRESSED IN FETAL LIVER, SIGNAL = 1.1; EXPRESSED IN HEART, SIGNAL = 0.88
gctgaaaaacacaatgcctgctggtggcctctccgctccatagaggggcagaatctttctctcctgcattgaggtccagggtgctccactgtcttaagtgattaagattatagctatgcagctgtatcactacttttcttttctccaaatgggcttctttgataccatcacctcttccaccaagtttctctcatttccttgaactactgcagaatgagatgtaatcttaggtttttccccttccgctcaccctaaaacaagcataaaagtcttcttaatgcctttgtgcttgctaataccccaggaggaactgtagtggacactgtgatcttggtcttcccaataggctctttccttggaaatgccctccttattctatgtgcttctagtggagctgtcaatcacagcttctataacaacaagtgtggtctattagagaaccctaccctccaggccaggctggttcagaggtaggcat

SEQ ID NO: 4891 - DNA, 441 bp, Homo sapiens
  MAP TO AC010183.6; EXPRESSED IN HEART, SIGNAL = 1.2; EXPRESSED IN ADULT LIVER, SIGNAL = 1.1; EXPRESSED IN LUNG, SIGNAL =   1
aggtatcaagccccagaaccttctggacagcaagacagtagcagacaagagggtagacagcatcagggcctccctttgagagggtttgagaaagtaagagaccaagtggaatcttgtatctggagtaccagaaccaagggtatttttaccactctgggagagacttcaatccctggaagcacccatcaactacctcgggatatcttagaaagtcaactgcagtgcatctgggggtgtgtctggatcattcagaccagatcaggatgtacacacagctgtagcagagggacaacccaaacagcttctaagtttgaaacagccccatggatctacctgccattttccttcttcagttggctagtctacttccagaagcttgcatcctgctatctcaaagacagctacttaaactgctcagcagcctgctgagataccggagaa

SEQ ID NO: 4892 - DNA, 475 bp, Homo sapiens
  MAP TO AC011457.1; EXPRESSED IN HEART, SIGNAL = 0.88
tgcttggattttctggtttgttctaaatatcactttttcttaaacaactagtcattttattctaggactaaatttaccatacaagattctttctcatataaaattatttctctttaagctgtcttacaaaaaaaaaacctctttcttttttttgggggatgcccttaaataaatattttattttgtttatatcattgtagatactagtacccttagtttagtaaaagaaaactaccacatgatctttatttttaaattcttgggttaagctctggagaattttcataggcaaattctgtgtgggctggaacagtaagcactccaataaaatctatctccaggaagaatggaccacccactttatcagccaaggtgaatgctatagaagagatcttgtcaagcagaagctgactctgaacatcctgcactcttccttgattagggaaaaaaatttggaaaaagggatcttgacctc

SEQ ID NO: 4893 - DNA, 435 bp, Homo sapiens
  MAP TO AC007251.1; EXPRESSED IN FETAL LIVER, SIGNAL = 0.95; EXPRESSED IN ADULT LIVER, SIGNAL = 2.4; EXPRESSED IN LUNG, SIGNAL = 1.1; EXPRESSED IN HEART, SIGNAL = 1.2
caacacctccagaagaacccttcatggtgaaaagtgacgttctctatctgcacagaacaaaatgaagtaacttgccatcaatacaagaaatataatcaaaatcattacagccagtaaatttttaaggacatgtattttatcccaaataatgaagctcagtagctttctacatatctcttccatgaagaaatagacactccactactattctctgatttcaagagcatacataagggtatcttcataactaccatgtgcatcactattttgaagaagagactcacattcttttcacctgaacatctccccacttcagttgcaagaagccaataatccgatccaaaagccaccaaaaagagtaacacccccaaagcaccaaagagagctccaaagaagatagcgatatttagtctcattttcaattcactggtttcc

SEQ ID NO: 4894 - DNA, 430 bp, Homo sapiens
  MAP TO AC010680.3; EXPRESSED IN HEART, SIGNAL = 2.9
cagtcatccctcccaaaataagttgaatttttaaatgagtgaaaaccaacataagtatattctcttcaataaatttctgtttttctaatttctagatctggaaacttatccccaatggtcagtatgagttccgagtcagggcagtgaataaatatggaatcagtgatgagtgcaaatcagataaagtagtcattcaagatccttatcgccttcctggacctccaggaaaaccaaaagttttggcacgcaccaaaggatcaatgctagtgagctggactcctcctttggacaatggtggctctccaattactggctactggctggagaaaagagaagagggaagtccttattggtcacgtgttagccgagcaccaataaccaaagtgggattgaaaggcgtggaatttaatgttcctcgtttgcttgaagg

SEQ ID NO: 4895 - DNA, 389 bp, Homo sapiens
  MAP TO AL022144.1; EXPRESSED IN HELA, SIGNAL = 5.9; EXPRESSED IN HBL100, SIGNAL = 5.7; EXPRESSED IN FETAL LIVER, SIGNAL = 6.6; EXPRESSED IN ADULT LIVER, SIGNAL =   9; EXPRESSED IN BRAIN, SIGNAL = 4.7; EXPRESSED IN LUNG, SIGNAL = 5.6; EXPRESSED IN BONE MARROW, SIGNAL = 5.2; EXPRESSED IN PLACENTA, SIGNAL = 7.1; EXPRESSED IN HEART, SIGNAL = 4.9; EXPRESSED IN BT474, SIGNAL =   5
tcaccccaaagtctcacctctgcctatacccagaagtagaaccgttctggtctatctgtagtcagattaattgaacaggactctttgaaatcccaagtagtttacgcagcctgtctgtctttcagggctcttgcaagctcttctctttattgagaaagggaaaaaagacatcagttgggatggcagctccttgattcctttatcaggtcagctttttcctgaagggtctccttgcccctcaaggcatctcctcatctgaaactcacttcacactgtgatggctggatgcagggatgctcttgttctgttgccttggtaacaacttctgtttgttgataacgaagtttactgtgtatttgtcattgttttccctctgcctcatggtaaaa

SEQ ID NO: 4896 - DNA, 378 bp, Homo sapiens
  MAP TO AL021307.1; EXPRESSED IN PLACENTA, SIGNAL = 3.6; EXPRESSED IN HEART, SIGNAL = 3.6; EXPRESSED IN ADULT LIVER, SIGNAL =   5; EXPRESSED IN BT474, SIGNAL = 3.8; EXPRESSED IN FETAL LIVER, SIGNAL = 3.6; EXPRESSED IN LUNG, SIGNAL = 3.8; EXPRESSED IN BONE MARROW, SIGNAL = 4.4; EXPRESSED IN BRAIN, SIGNAL = 3.6; EXPRESSED IN HBL100, SIGNAL = 3.7; EXPRESSED IN HELA, SIGNAL =   4
attcttcggttgattttgcctacagtaattcatactgtaatattctaatggtgattttctaattcctcactccttcttatatttattaattggaattatttataagaaacagttgtttttacacctccatttattttattatctgtttataaaaacagactaatagatatttattatattctttgggtattagtcatattttacctttattttgtttgtcgctcaaattgttccaactttggccattagaatctctttcagattggtccttgtgacctttcaacattcctgacccatccttttgttgttgttgttgttgttgagcatttctttttacattcatcaccacaagatgcatcaggtgcccattttctgttt

SEQ ID NO: 4897 - DNA, 438 bp, Homo sapiens
  MAP TO AL024509.1; EXPRESSED IN PLACENTA, SIGNAL = 7.7; EXPRESSED IN HBL100, SIGNAL = 6.7; EXPRESSED IN FETAL LIVER, SIGNAL = 7.3; EXPRESSED IN ADULT LIVER, SIGNAL =   6; EXPRESSED IN BT474, SIGNAL =   5; EXPRESSED IN BRAIN, SIGNAL = 4.7; EXPRESSED IN BONE MARROW, SIGNAL =   6; EXPRESSED IN LUNG, SIGNAL = 6.9; EXPRESSED IN HELA, SIGNAL =  11; EXPRESSED IN HEART, SIGNAL = 4.3
cagccttggcaatatagcagatccagttttttataaaacaaacaaacaaacaaatcatttgaaagaatcagtaagcctgctagaaaaaaactcaaaataatattgttatgtttaaaggaagattacaaagtctagacactaaatgatacaaccttcaccatgtccatcatctaatccaagattctaacgcagagaagcaagaaaatgtgacccaaaaacaaaaccagccttttggccagaaccgtcatcttccagtaatttgccaaaatgatgaatacaaaggcaaaaaggaaaggcactggatatatgttctctaggcctttacaaaaacatggagttgttcctttggccacatatatgctaatctataagaaaggtgatattgcagacatcaagggaaggggtactgttcaaaaaggaatgccccacaggtgttac

SEQ ID NO: 4898 - DNA, 445 bp, Homo sapiens
  MAP TO AL021330.1; EXPRESSED IN LUNG, SIGNAL =   2; EXPRESSED IN BONE MARROW, SIGNAL = 1.9; EXPRESSED IN BRAIN, SIGNAL = 2.7; EXPRESSED IN HBL100, SIGNAL = 2.3; EXPRESSED IN HELA, SIGNAL = 1.5; EXPRESSED IN PLACENTA, SIGNAL = 2.3; EXPRESSED IN ADULT LIVER, SIGNAL = 2.3; EXPRESSED IN HEART, SIGNAL = 2.3; EXPRESSED IN BT474, SIGNAL = 2.3; EXPRESSED IN FETAL LIVER, SIGNAL = 1.8
tcttgtcaccagcctcagtggtggctgtctgcacaggactcagtcccttgcttgtcctcagatggttcccctggcctgggggtccagcacagggtgatgggtgctactccctcttaggccagcctttagagtataatctgtccatctgccctcccttgctgcatgaccagtcaacttacacagtacaccagggacagagtggactgaagcatgaaaaccagggcaagagacaagcactcaaatctgccttctctgacatggggacagcagatgttgttttggggcaggggccggaggtaacagatctccctaagggcatcacctgtaccgaggcagacaaactctttaagcagcttgccatgtccagtgccaagacccagctcaggggctgcctggtgggggtggaggggacaatggtgggactgctgagaatggcaactgcttg

SEQ ID NO: 4899 - DNA, 380 bp, Homo sapiens
  MAP TO AL022344.1; EXPRESSED IN HBL100, SIGNAL = 1.3; EXPRESSED IN FETAL LIVER, SIGNAL = 1.2; EXPRESSED IN BT474, SIGNAL = 1.1; EXPRESSED IN LUNG, SIGNAL =   1; EXPRESSED IN PLACENTA, SIGNAL = 1.3; EXPRESSED IN HEART, SIGNAL = 1.1; EXPRESSED IN HELA, SIGNAL = 1.4; EXPRESSED IN ADULT LIVER, SIGNAL = 1.7; EXPRESSED IN BRAIN, SIGNAL = 1.2; EXPRESSED IN BONE MARROW, SIGNAL = 1.1
cttttgtgcatttttgctctgtttccctcctcgttgtccctccgaaacaaactatgccaagcacttagctaatgatatacgaagaagcatttcagcagccactcagaagtgagtgactgcttatgaaaaacttgtgaaaaataagtaagactgataggtgaattcgatggtccttttggagttatatgtttcttagctttgaataaaaacaaaatgtgctgctgccatcccttgctaggagttccattcccagattcacactcagcatttatgtttccatggtggtaccaccaaacatagcagaactgaagaatttggaagtgctcaactttttaaataaccagatcgagaagctgccaacacagatcagcaggcttcaa

SEQ ID NO: 4900 - DNA, 402 bp, Homo sapiens
  MAP TO AL021368.1; EXPRESSED IN ADULT LIVER, SIGNAL = 2.7; EXPRESSED IN BT474, SIGNAL =  20; EXPRESSED IN LUNG, SIGNAL = 4.9; EXPRESSED IN BONE MARROW, SIGNAL = 7.6; EXPRESSED IN BRAIN, SIGNAL = 9.5; EXPRESSED IN HBL100, SIGNAL =  16; EXPRESSED IN FETAL LIVER, SIGNAL = 8.6; EXPRESSED IN PLACENTA, SIGNAL = 7.1; EXPRESSED IN HEART, SIGNAL =  17; EXPRESSED IN HELA, SIGNAL =  14
tctcagcatgtcagggacagaatgtggcagcgacttgctagcccctgaggacctcttttcctgttgttttctcactggggctgatggtctaggacagtgtggcagggacttgctgcagctgagggcctctgttttcttgttgtgttctcactggggctgatggtctagggggctcttactccttggaggccatgtgtaccataaagtctatcaccctgttgctgtagccaaattccttgtcatatcagaatatgagcttgacagagtgatcactgaggacaatgccagccccaacgtcgaaagtggaagggtcgatgtcactgttaaagttggaggagacaacttggtgctcagtgtagccccacgatgttcttgaggggcccttccgtgcctccttcatta

SEQ ID NO: 4901 - DNA, 404 bp, Homo sapiens
  MAP TO AL031005.1; EXPRESSED IN FETAL LIVER, SIGNAL = 3.5; EXPRESSED IN ADULT LIVER, SIGNAL = 4.3; EXPRESSED IN BT474, SIGNAL = 2.7; EXPRESSED IN BRAIN, SIGNAL = 3.2; EXPRESSED IN BONE MARROW, SIGNAL = 3.4; EXPRESSED IN LUNG, SIGNAL = 3.4; EXPRESSED IN HELA, SIGNAL = 3.4; EXPRESSED IN PLACENTA, SIGNAL = 3.4; EXPRESSED IN HBL100, SIGNAL = 3.4; EXPRESSED IN HEART, SIGNAL = 2.6
agaacaggcaggctcttcaggcggatgaagcccgagccccttcctgtgtctttgtcaggccagactcagagcacaaagccttctggtgccaagccctgtggtgggggagcctccacggtcggcatcgcgattggtcctcgccacccccaatttcgcagaagaggaaacggaagctcgcacggctgctgcgcctgccctggttgtccgtgatgatcctctacggacaggcatctggaaggagccagcactgggaccgtgcgcgtgtggggagcggggctctcacccgataggccgccttgagacccccgttgtcggcgatgttctcccccagggtgtgccgcccgttcaccggctccccgttcacgctgtagttgctgtactgctctaccatgcactcggtctga

SEQ ID NO: 4902 - DNA, 452 bp, Homo sapiens
  MAP TO AL031055.1; EXPRESSED IN BONE MARROW, SIGNAL = 3.3; EXPRESSED IN HBL100, SIGNAL = 3.2; EXPRESSED IN FETAL LIVER, SIGNAL = 3.5; EXPRESSED IN BT474, SIGNAL = 4.2; EXPRESSED IN LUNG, SIGNAL = 3.4; EXPRESSED IN PLACENTA, SIGNAL = 3.4; EXPRESSED IN HEART, SIGNAL = 2.7; EXPRESSED IN HELA, SIGNAL =   4; EXPRESSED IN ADULT LIVER, SIGNAL = 4.5; EXPRESSED IN BRAIN, SIGNAL = 2.1
cttcaggtcccttaaagcccggatagctcacaactggaaggaatttaatgaatagcgtgaaaaccaatcatcccagttcgtccaagactgttcccatctcggcattgaaagtctcatgtctcagaaaacctctcagtcttcagcaaactgagactctactgtaattcttatagcagaatgggagtgggagtttagtatcaggagcctgacactagaaaatcccattgttgagaggctgcatgtttgacctgatggtgccaggccccaggtcccaccacagcccaggagccctcctgctctcccaccctagtgacctggcttgtcctcagcgagatctaccctgtggagatacgaggaagagccttcgccttctgcaacagcttcaactgggcggccaacctcttcatcagcctctccttcctcgatctcattggtgagtccttcccagacaa

SEQ ID NO: 4903 - DNA, 474 bp, Homo sapiens
  MAP TO AC009508.2; EXPRESSED IN BONE MARROW, SIGNAL = 0.91; EXPRESSED IN ADULT LIVER, SIGNAL =   1; EXPRESSED IN HEART, SIGNAL = 0.86
ttaactttgctatgagaaccagaagaaaattttagaagatatttgcttgatgatttttattaatatacaaaaggaaatcgcctctatgaacaggaagaaactttaggaagggagttactgaaatgaaaaccatagtaggcaaattcaaatccatattgaagtcagaaaagaacaaattattccgcagagaaaatggaataaaaaatatatgacagcagttttgaaatgttttaaaaagctatggatcctcttctttaaagaaagaacacatagacccttaccatgtaaaagtgatgaatgagattgtggttgaagtgcagatggggtcccagtgccccattgactacactttcttccttcacccaaacagtgggtcccaaaggggttctctggagcttccactgaagtttctttagaacactgagaaccactgaggtagaggctaaaattgagagggcactcccagaataaaca

SEQ ID NO: 4904 - DNA, 462 bp, Homo sapiens
  MAP TO AL022575.1; EXPRESSED IN BRAIN, SIGNAL =   7; EXPRESSED IN BONE MARROW, SIGNAL = 9.2; EXPRESSED IN HELA, SIGNAL =  12; EXPRESSED IN HBL100, SIGNAL =  10; EXPRESSED IN FETAL LIVER, SIGNAL =  11; EXPRESSED IN LUNG, SIGNAL =  12; EXPRESSED IN PLACENTA, SIGNAL =  12; EXPRESSED IN HEART, SIGNAL = 8.4; EXPRESSED IN BT474, SIGNAL = 9.8; EXPRESSED IN ADULT LIVER, SIGNAL =  13
ttttctctagctccctgggcagctttctgtccagcaatgatcccctcctgtgttcactatccatatctgggtctgtcctctcccaagatgaggagctccccaagggaagagtctgttgctgattcctcttccttgttggggatatacatgcctttcaccctggcagggtctttttggtggctggtgctccctggcccctctcagcctcagctgcacttacctatcaggccacgggctgaggggctgaggcctgagccattggccacgtagaaccccaggtggggtagttgcagggtactgggatgcctgtagcggtgtcggaggactaggaactcaaggtagggcccaaggcggagggtaaggcgggctgcagcagccacatagagctccagctggggcctcttcagcagggcaggttggtcccaggacaggcgcaaggtaccctcgcctcgcaaagatata

SEQ ID NO: 4905 - DNA, 416 bp, Homo sapiens
  MAP TO AJ011929.1; EXPRESSED IN BONE MARROW, SIGNAL = 1.3; EXPRESSED IN LUNG, SIGNAL = 1.2; EXPRESSED IN PLACENTA, SIGNAL = 1.5; EXPRESSED IN HBL100, SIGNAL = 1.2; EXPRESSED IN HELA, SIGNAL = 3.3; EXPRESSED IN ADULT LIVER, SIGNAL = 1.3; EXPRESSED IN HEART, SIGNAL = 1.2; EXPRESSED IN BT474, SIGNAL = 1.1; EXPRESSED IN FETAL LIVER, SIGNAL = 1.2
gttccagtttgcagggactggacccccaaaggcacgctgagccgtgaccccactcagtgcttcctgagctgtctaagccactgggacctcagtggactttaactgtggtttaataaaccaaggggttctgtctgtgtccaatgtgagaggtggaccgctcatttcacagctgtggattttccctttctgtctccccagaaattgcaggtgctgcagtgtctgaaatttccgggcctttctcaacagaggatgtagccagcaactgtgtccccgctcagtctttgagcgagcccattttgtggattgtgtcctatgcgctcatgagcgtctgtggagccatcctccttgtcttaatcgtcctgctgctgctgccgttccggtgtcagcgtcgcccccgtgaccctgaggtcgtcaat

SEQ ID NO: 4906 - DNA, 470 bp, Homo sapiens
  MAP TO AL031114.1; EXPRESSED IN HELA, SIGNAL = 6.4; EXPRESSED IN HEART, SIGNAL = 4.4; EXPRESSED IN PLACENTA, SIGNAL = 6.2; EXPRESSED IN HBL100, SIGNAL =   5; EXPRESSED IN FETAL LIVER, SIGNAL = 5.4; EXPRESSED IN ADULT LIVER, SIGNAL = 9.4; EXPRESSED IN BT474, SIGNAL =   5; EXPRESSED IN BRAIN, SIGNAL = 3.1; EXPRESSED IN BONE MARROW, SIGNAL = 5.4; EXPRESSED IN LUNG, SIGNAL = 5.2
agagacagcaagcatgagggctttgagacagcaaagttggcaacgcacccctcccactaggagctctctctcaaggagtcacagagctgctactggcttgatagccccagccaagggtggctgtagacccaagctgggaagacctactcagtgaggagatatgggatcagggtcctgtgtaacaagcagtctggccacttttccatagggctgctgcagtatgctgggggtttgctccaacccctgatcaacttgacttttccagcacctcaaggtatcaacagtgatggctgcgaaacagcaaagatggcagcctgaccctgcctctgggagctccatcccagggaagtacagacctgttgacagcctgaacacaccagcaaaggtggttgtggacctaggcctggagattctgcccagtgggggactacttctgtccctagtcaccttggacttgaaccagcttttcg

SEQ ID NO: 4907 - DNA, 363 bp, Homo sapiens
  MAP TO AL109823.6; EXPRESSED IN HEART, SIGNAL = 1.2
tcagagatcttcaaaagtctgggttataggctcagaaatatataaaccagctttctctaaggaagacagcataacacattgctactttggcataacacattgctactttgacatgactataaaaggcaatcatatagctttatgggatggccatgaaatcacagttgtgtgacaatatgtcaattacagaaagaattgtttagagatttagagccttaggaatcctacattctattcctataaaatgcaaccctgattacttagagtggtgctgcaccaaagtttgatatttataaccaacagcaacaggggcattctggtccagaaagttatactgggatgaggcattcagaacaaacggat

SEQ ID NO: 4908 - DNA, 473 bp, Homo sapiens
  MAP TO AL035250.17; EXPRESSED IN HEART, SIGNAL = 0.92; EXPRESSED IN FETAL LIVER, SIGNAL = 2.5
ctgtctgcagcatagattcccatttagcaaagccactgagtaatggaaaacgcaatcgagttgcataatgagtctgggtaattggatggactgggcagaatggtccagctaagtatattcagtccggcacattaattaaaaacttgacacttcaagcgccacccaaagtgccccattaattattctgtgaatccaaaggtcagatgtagtggatgagttacaagacgatgataaaattgcttggctccggggccatcacaagagcatgcattgcaccgaggcctggactcacctgtagcttcagtgggagttgaacaggcagccctcttcgcactggtgccctgccagtgccggatccaagaggaaggactgaggctgcccaaggtgctgacaccagcgcggccctgcttgtgagtgagctcgcccatctccgctttcatctcagagatctgcaggcacagacaggtaaagga

SEQ ID NO: 4909 - DNA, 415 bp, Homo sapiens
  MAP TO AL031177.1; EXPRESSED IN HELA, SIGNAL = 2.4; EXPRESSED IN PLACENTA, SIGNAL = 2.7; EXPRESSED IN HBL100, SIGNAL = 2.5; EXPRESSED IN HEART, SIGNAL = 2.1; EXPRESSED IN FETAL LIVER, SIGNAL = 2.3; EXPRESSED IN ADULT LIVER, SIGNAL = 2.7; EXPRESSED IN BT474, SIGNAL = 2.3; EXPRESSED IN BRAIN, SIGNAL = 2.3; EXPRESSED IN BONE MARROW, SIGNAL = 2.1; EXPRESSED IN LUNG, SIGNAL = 2.3
ctgggaggtgatagaggctgaaggatccccaaggtagagaaactgcctctctggggtaccttgatccagctgttttagacatccagactttcttggcgtggtgagcaatgatgcctgaaggaaccttaccaccaggcccctccctcgagctctggatcagcccagcacatgctctcaacttacctcttggccctgccttccccttcattccgggaaatcctgggtctccaggtggcccaaccttgcctggagtccccatgaagccaggctcacctctcatgcctgacaaagcccaaaggaagcaagtcaggtcccggcatggtaggggtggtaggggtggaggataggcaggggtgaggtagggaagaacatcagccaccggcctctcttcacaggactgcaggaaggagtcctg

SEQ ID NO: 4910 - DNA, 426 bp, Homo sapiens
  MAP TO AL022334.1; EXPRESSED IN BONE MARROW, SIGNAL = 2.8; EXPRESSED IN LUNG, SIGNAL = 3.2; EXPRESSED IN HELA, SIGNAL =   3; EXPRESSED IN HEART, SIGNAL = 2.6; EXPRESSED IN PLACENTA, SIGNAL =   3; EXPRESSED IN HBL100, SIGNAL =   3; EXPRESSED IN FETAL LIVER, SIGNAL = 2.9; EXPRESSED IN ADULT LIVER, SIGNAL = 3.9; EXPRESSED IN BT474, SIGNAL = 2.7; EXPRESSED IN BRAIN, SIGNAL =   3
atgaattgggctcattttgcagatgagaaaagtgacttctagagaggttaagctactagcccaagatcagtagctagaggcaaggcaaggattcaaatcccaggagtccggtgcttgcataaatgaaaggatgaatgaacggatattgagtgagtgagtggatgaaggaaggagtaaaggagagggcatgaatgaatgagagggtagaactccaagaccccttagaacctcgtctgatgttcccattttacagacagaaaactgagtcctagacagaggcctagaggaggccaagaggtggtggggccaggtcgggggggccctgatgcctgcttctctcgctttgttgcagccccgagccatgatgaagactttgtccagcgggaactgcacgctcagtgtgcccgccaaaaactcataccgcat

SEQ ID NO: 4911 - DNA, 372 bp, Homo sapiens
  MAP TO AL030996.1; EXPRESSED IN BRAIN, SIGNAL =  29; EXPRESSED IN BONE MARROW, SIGNAL = 9.8; EXPRESSED IN HBL100, SIGNAL =  31; EXPRESSED IN FETAL LIVER, SIGNAL =  12; EXPRESSED IN BT474, SIGNAL =  15; EXPRESSED IN LUNG, SIGNAL = 5.4; EXPRESSED IN PLACENTA, SIGNAL = 8.6; EXPRESSED IN HEART, SIGNAL = 5.1; EXPRESSED IN HELA, SIGNAL =  26; EXPRESSED IN ADULT LIVER, SIGNAL = 2.2
acacagcagatgttcgatgccaagaacatgatggccatgtgcaacccgcgacatggccgctacctgaccatggccaccgtgttccgggccgcatgtccatgaaggaggtggacaagcagatgctgagcctgcagagcaagaacagcagctacttcgtgcagtggatccccaacaacatgaagacggccgtgtgcgacatctcgccccacggcctgaagatagccgcaactttcatcagcaacaacacagacttccaggagctgttcaagtgcatctctgcgcagttcacggccatgttgtggtgcaaggcgttcctgcactggtacacaggcgagggcatggacgagatggagttcaccgagactgacagca

SEQ ID NO: 4912 - DNA, 402 bp, Homo sapiens
  MAP TO AB020876.1; EXPRESSED IN HEART, SIGNAL = 0.86; EXPRESSED IN LUNG, SIGNAL = 3.4
  unsure 277
cattctttggcatgtattttcaacttctttatggtgtcctttgaaatactagatttactttattttgatgaagccccatttatctacattttttctcttgtcatgggtgcttttggtgtcacagctatgaagactttgcctaacccaagacaatgaagttgtactcctatatttcattctaagggttttatagctttagagctatcatttaggtctacaattcattctgagttaatttttgtgtatggtgtgaggaagggagtctaacatcattctnacccatgtagatatccagttttcctagcatcattgttgaaaatgttattcttttctccaccaaattgccttacacctctgtcaaaattcatatgaccataaatacaagggttttctttgggactt

SEQ ID NO: 4913 - DNA, 351 bp, Homo sapiens
  MAP TO AL031003.1; EXPRESSED IN PLACENTA, SIGNAL = 4.6; EXPRESSED IN HEART, SIGNAL =   5; EXPRESSED IN HBL100, SIGNAL = 6.1; EXPRESSED IN BT474, SIGNAL = 5.8; EXPRESSED IN FETAL LIVER, SIGNAL = 6.5; EXPRESSED IN ADULT LIVER, SIGNAL =   7; EXPRESSED IN BRAIN, SIGNAL = 5.6; EXPRESSED IN BONE MARROW, SIGNAL =   6; EXPRESSED IN LUNG, SIGNAL = 7.8; EXPRESSED IN HELA, SIGNAL =   6
cacgagttacaccaaaccccagttcatccagcaaaatcagagaacagaggttgaaaagtaatacccagtgtaaccctggtcctgaggagtcttgtctgaaaacaagacaagtctttgatgacttgcttatttttccattataaaggatatttctttaataagctaaaactcaataataagcccggggactctttcacaatatgcataattacaaggaaaactgcttttacctttctcgtttttgccttgaatgtagctgttcagtttcgtaaagcccgtctggatggctgaatcccagtccatagactccacggacgtgctgacccacttggctggtccatagtgtcggat

SEQ ID NO: 4914 - DNA, 445 bp, Homo sapiens
  MAP TO AL035457.13; EXPRESSED IN BT474, SIGNAL = 1.1; EXPRESSED IN BRAIN, SIGNAL =   1; EXPRESSED IN LUNG, SIGNAL =   1; EXPRESSED IN HELA, SIGNAL = 1.1; EXPRESSED IN HBL100, SIGNAL =   1; EXPRESSED IN HEART, SIGNAL = 1.2
agtgtgggaaaagatggtggtggggctggtagactctgtcctcagcagagttggaaagttggggaaaggtacccctctccctacagagggcactctccaccccttctcccccactggctgcctctttgcaggttccattaatcagctactgactgatgcttgctctacaagtcagagggcacaagagggaacttgttggcttgggtctttgaacatctcagaggtagtgggtacttcaggtaaagctggatccagaccattagagatctgtctctctctgtctctgggttctgctgtcatctgtgctggcttcattctcaggcaggctgtccccatgctgtgaggagatggctgtcacctcctggcttatatctacctcacttggtgttgctaacagaaagacagcatctctgctaattaacttgccacaaaagtcctgggattc

SEQ ID NO: 4915 - DNA, 476 bp, Homo sapiens
  MAP TO AL031058.1; EXPRESSED IN ADULT LIVER, SIGNAL = 4.6; EXPRESSED IN LUNG, SIGNAL = 3.1; EXPRESSED IN BRAIN, SIGNAL = 3.2; EXPRESSED IN BONE MARROW, SIGNAL = 3.2; EXPRESSED IN HELA, SIGNAL = 5.9; EXPRESSED IN BT474, SIGNAL = 6.2; EXPRESSED IN FETAL LIVER, SIGNAL = 3.8; EXPRESSED IN PLACENTA, SIGNAL = 4.8; EXPRESSED IN HEART, SIGNAL = 5.4; EXPRESSED IN HBL100, SIGNAL = 3.5
ctgccaagaccattcaggacaaaaataaggagatcgagagactcaaagctgagtttcaggaggaggccaagcgccgctgggaatatgaaaatgaactgagtaaggtaagaaacaattatgatgaggagatcattagcttaaaaaatcagtttgagaccgagatcaacatcaccaagaccaccatccaccagctcaccatgcagaaggaagaggataccagtggctaccgggctcagatagacaatctcacccgagaaaacaggagcttatctgaagaaataaagaggctgaagaacactctaacccagaccacagagaatctcaggagggtggaagaagacatccaacagcaaaaggccactggctctgaggtgtctcagaggaaacagcagctggaggttgagctgagacaagtcactcagatgcgaacagaggagagcgtaagatataagcaatctcttgatgatgctgccaaa

SEQ ID NO: 4916 - DNA, 409 bp, Homo sapiens
  MAP TO AL031076.1; EXPRESSED IN BONE MARROW, SIGNAL = 1.8; EXPRESSED IN PLACENTA, SIGNAL = 6.5; EXPRESSED IN HEART, SIGNAL = 1.8; EXPRESSED IN ADULT LIVER, SIGNAL =   2; EXPRESSED IN LUNG, SIGNAL = 1.8; EXPRESSED IN HELA, SIGNAL = 2.5; EXPRESSED IN HBL100, SIGNAL = 2.7; EXPRESSED IN BT474, SIGNAL = 2.2; EXPRESSED IN FETAL LIVER, SIGNAL = 2.1; EXPRESSED IN BRAIN, SIGNAL = 2.2
gtgccccaggaaacaagagaaggatccccaaataaaatatagaaccctggaatttcagataaacaacccatcgttgtcggcgtaagtatgtcccaggcattgcaattattggctgggctatacttgtctagaaacctgtcccttgttcatctgaagcccacattcacctggggaccctctgttcatatttgttaaccctgatgaccgtagcccaggaggcaaaggcagtggctgcctgagtgcagcaggtcccagggcccccatgcctaatgctggccgccacctcgtggggcgtggcctgagcacctggcgtgtcatgctgggccccaaaagcgacgccaggggcgtgtttctggtgtttccgaactgggggctttattgaggtaactgcagattcacacgcacctag

SEQ ID NO: 4917 - DNA, 445 bp, Homo sapiens
  MAP TO AL078602.10; EXPRESSED IN HEART, SIGNAL = 1.1
tgtgaatatttatgcgggggctgcagagcggccacttcctccatctggcaggactgttttctgggagcttagagaagctgaatcatacagtgagacaatttggtggaggctggaacaaggcttaactagaggccatctgctacaaaggactagaaagcaaggaatggctcttagaggaatctgtttaagctgatagacaggatttggggagaaattcttgaaataaatactgagaggaaaccaaacaaggattgcatctcaagttggtgctcaggtatccgtggagagcgcacaggagagtctcacctgcagggccagtaaagaggactcagaaacttcatgggtcaggttgcggcccgactggcctgacagtcaacgaggtggaaaccgtgacaaattcagacgccagggctttatccagttgggtaagaaatgaccaagttcc

SEQ ID NO: 4918 - DNA, 401 bp, Homo sapiens
  MAP TO AL031133.1; EXPRESSED IN PLACENTA, SIGNAL = 1.4; EXPRESSED IN HBL100, SIGNAL = 1.5; EXPRESSED IN ADULT LIVER, SIGNAL = 1.5; EXPRESSED IN LUNG, SIGNAL = 1.2; EXPRESSED IN BRAIN, SIGNAL = 1.5; EXPRESSED IN HEART, SIGNAL = 1.2; EXPRESSED IN HELA, SIGNAL = 1.3; EXPRESSED IN BT474, SIGNAL = 1.3; EXPRESSED IN FETAL LIVER, SIGNAL = 1.3; EXPRESSED IN BONE MARROW, SIGNAL = 1.4
aaacctgtgtttggcctgtcccgagtgctaggtgcacgctcagcccctgcagccctggtgtgcggtcgggtgtgtgccctgccgggcagtgtggggtgaaggcctcagtgagctcactgtgaaagcagcgtgattgcttctgcagctccacagccacattgagcaactgaaagtccccagtgggactgggctccacctgatttcctgacagctaggccgggagggagccagcgcaggcacaccttgcccttgccccagtctgcccaggaaacacctgatggatgcattttttttctctttagctcatgtctgcagggctctgagaggaggaagcctggggcaggacctgcgccagtggccgctgggcacagcatggagcaccccagcaagatggaattctt

SEQ ID NO: 4919 - DNA, 386 bp, Homo sapiens
  MAP TO AC012458.2; EXPRESSED IN PLACENTA, SIGNAL = 1.5; EXPRESSED IN HELA, SIGNAL = 2.1; EXPRESSED IN HEART, SIGNAL = 1.5; EXPRESSED IN BT474, SIGNAL = 1.7; EXPRESSED IN FETAL LIVER, SIGNAL = 1.9; EXPRESSED IN ADULT LIVER, SIGNAL = 1.6; EXPRESSED IN BONE MARROW, SIGNAL = 1.7; EXPRESSED IN LUNG, SIGNAL = 1.9; EXPRESSED IN BRAIN, SIGNAL = 1.7
catgtctcactcaaaccctgcattttttagtttgtatacaattctaaccagtttagaaaactgatgtaccagctcagtaaatgaaaaacagcaatttcagaggggagaacaggtagagaaggactagataataaccagtaagccaagaagaagacttaggagtagaaatgtaacacttattgagcatttattatgtgacaggtactattagagatgcttaacacacacgccctcacttagttctgcagtggatgtatgctctgcacagcctctgaactcgttcttttgggatatttccgtggtgtaggttttggagacgttggattctgcttccacaagaactctaaaaggagccattttcctttccctttccgtattctttgcca

SEQ ID NO: 4920 - DNA, 498 bp, Homo sapiens
  MAP TO AC007922.1; EXPRESSED IN HEART, SIGNAL = 0.86
  unsure 108
  unsure 394
tccacgaggctaggatgttcaaagccttggtaagacatatctgatccagtgggtgggaggtaaaacttaggaagaattcaggagcttttccatgtcagtaaatttttnagaagttcactggtctgggcaatgacaagacacttcctcagaagaataaattactgcatcttgcacttcccataacagaagggagcacagtgcctggttggcttcaacaggttttggggcagcttattccacacctaaagataatgctctgattcgtatgctagaaggcaccaaaggctgcctgaacattggggtccttgcatccaaggaccagcaggcaagaatagtcaccatcttagcagaagtaattgaacttgatcagcagaaaaaagtagggctgtacacnattggggatgtacgtggaagaacaggtttagcatacgatgagaaactcaggtgtgtcctggtattctcttgtccaatttttatggtaaatggacaagggcagca

SEQ ID NO: 4921 - DNA, 418 bp, Homo sapiens
  MAP TO AL033504.3; EXPRESSED IN PLACENTA, SIGNAL = 3.5; EXPRESSED IN HBL100, SIGNAL = 4.3; EXPRESSED IN LUNG, SIGNAL = 3.2; EXPRESSED IN BRAIN, SIGNAL = 3.4; EXPRESSED IN BONE MARROW, SIGNAL = 3.2; EXPRESSED IN HEART, SIGNAL = 2.9; EXPRESSED IN HELA, SIGNAL = 3.6; EXPRESSED IN BT474, SIGNAL = 3.5; EXPRESSED IN ADULT LIVER, SIGNAL =   5; EXPRESSED IN FETAL LIVER, SIGNAL = 3.5
gaactaagaatatcctgccccccccccgtagttattgtttatatattatcaataagcaataactgttagccctcaactttttgttccttgatgcaatttttctgagttagttcagtcaatcttactctgaaggagtgagaccaccttggccatagatttgtgctaatatctgagttgacacatcccagggacagatgacagataaatgagatttatctagagtcagtgttgaagaagaaaccttattaaattagaacttgtgaggcatactcacttgttgggggtaagggaagcaaggcagcagccctccacatatcatcggtaagggccgtgtcacactaaaggtaaagcacaggccaatgcggctacaggaggcctgaagcatgtgcaacaagtcagggcaacaactgagcatttt

SEQ ID NO: 4922 - DNA, 392 bp, Homo sapiens
  MAP TO AL031447.4; EXPRESSED IN BONE MARROW, SIGNAL = 2.4; EXPRESSED IN PLACENTA, SIGNAL = 4.1; EXPRESSED IN HBL100, SIGNAL = 2.8; EXPRESSED IN ADULT LIVER, SIGNAL = 5.3; EXPRESSED IN LUNG, SIGNAL = 3.7; EXPRESSED IN BRAIN, SIGNAL = 2.5; EXPRESSED IN HEART, SIGNAL = 2.5; EXPRESSED IN HELA, SIGNAL = 3.7; EXPRESSED IN BT474, SIGNAL = 2.3; EXPRESSED IN FETAL LIVER, SIGNAL = 4.9
attgggtcaacaaatcccacccacgcattaatgatccctagaaagggagctcccaccggtggccaccggagggtcatgccgtttcaggtgcttctcaccttctgacccagagctgcctgccctaggtctaggagtttcagagtgagccactcgggtagcagagctgtcagggtgcccactcccttcctttccaggccctgagcaagtatgttgacgtggacaagactgcctgcctgtggccctctcaccagaggtggaacaggcctggcagggccctgactgtgtcatccttgttctctggcaggtccggctgatgcaggaatctgtccgaaggataattgaggcagaagagtccagaatgggtgagaacatgtgtcctctcttggtccagg

SEQ ID NO: 4923 - DNA, 455 bp, Homo sapiens
  MAP TO AL035452.6; EXPRESSED IN HEART, SIGNAL = 1.1; EXPRESSED IN BT474, SIGNAL = 1.6; EXPRESSED IN BRAIN, SIGNAL = 1.4; EXPRESSED IN LUNG, SIGNAL = 1.5; EXPRESSED IN HELA, SIGNAL = 1.2; EXPRESSED IN PLACENTA, SIGNAL = 0.92
aataccgggtagtggcaccagtcaattgcccttaatttccaatgaactactaggaaacagccactgaaagactgaaaaagaaagaaaaaaagaaacacaaaacttgaaaaagaccctggtcccttaagcgaatggggtggtggcagtcaggcttctccacacggaaaccttttagtttcactggccgtggcgagaaacctgaagtttcttccatatttaggcactgcccacgaagggtcccaagttggaaaaggggagagagagggagagggagggggagggggagggggcttctatggagcagaaaggaaagggagaaaaatgaatcttaaactttgggcttacctctttctcctggctagctcaccaaaatatgttagcagtgtaggatgtccaggttcttggcatcttgaacaaagaattggacaaaatgcacaagcaaacacagcaaggaa

SEQ ID NO: 4924 - DNA, 461 bp, Homo sapiens
  MAP TO AL009050.9; EXPRESSED IN HEART, SIGNAL = 0.93; EXPRESSED IN FETAL LIVER, SIGNAL = 2.1
tcaggattcaatttggtatttgctaggtaagaaatctgggcaagtttccttttgttttgtaataattccttttgatataatttttaacttgaccagattcaccctctttacttttcatttttgtttttgtaaccttttaagaaagagaaagccataccctgctttaggtatttgtttgagtttctaatgagtttgtagagatgaaaatactattcctattttaaagtcctgtgccaattccgggatgaaagatggagtcacagaaagggtatcttaagggaaatagtataataaaggcagtgaaaactacaagcaagagtgatatcatctcatgggtaaggctttgttacccatggaaggtgaaggacagcaagtgctgtactatgtgtcagcaccttagcatcatgggaaatgatcactttccaccgaggaagcagaaatggtggagtgtaagtgtgggg

SEQ ID NO: 4925 - DNA, 423 bp, Homo sapiens
  MAP TO AL033538.1; EXPRESSED IN PLACENTA, SIGNAL = 1.4; EXPRESSED IN HBL100, SIGNAL = 2.2; EXPRESSED IN HELA, SIGNAL = 2.1; EXPRESSED IN BT474, SIGNAL = 1.1; EXPRESSED IN LUNG, SIGNAL = 0.97; EXPRESSED IN BRAIN, SIGNAL =   1; EXPRESSED IN BONE MARROW, SIGNAL = 1.2; EXPRESSED IN HEART, SIGNAL = 0.99; EXPRESSED IN ADULT LIVER, SIGNAL = 1.3; EXPRESSED IN FETAL LIVER, SIGNAL = 1.2
tggacatctctgaggtggtggggctgctatatccggaactcaccttgggcagggaggagctcctggctgggggctttggtttaacagtgactggtgatggctgactcttctgatgggagagaacaggcctgctgaacgcactggtttctgacgctctgaagacagcagtgctgctgggcgcctgaacgccgtcttcagggttattactcttgctcacctggccgccgctcctctgaagacgctccaccgcaatgagatgactctgtgtctcctccagaattttctgggctaactcttgtggatccagttttgggttgctttcttcttgggatttcacggtactgtccgtttctgtgctagactggtctgattctcctgtatctgagcttgctagttttcccaccttttggaagggtgagttgg

SEQ ID NO: 4926 - DNA, 442 bp, Homo sapiens
  MAP TO AL031622.1; EXPRESSED IN PLACENTA, SIGNAL = 2.7; EXPRESSED IN HBL100, SIGNAL = 3.2; EXPRESSED IN LUNG, SIGNAL = 2.8; EXPRESSED IN BRAIN, SIGNAL = 2.3; EXPRESSED IN BONE MARROW, SIGNAL = 2.8; EXPRESSED IN HEART, SIGNAL = 2.3; EXPRESSED IN HELA, SIGNAL = 3.4; EXPRESSED IN BT474, SIGNAL = 3.3; EXPRESSED IN ADULT LIVER, SIGNAL =   5; EXPRESSED IN FETAL LIVER, SIGNAL =   3
agtgtccacaagttggctcctgagtcctttaacaagactctagtctttaaaagctttcttattacctagtatgacacaatgtttctggttcattttatacattccttgcctcaaatttagaatcaggcattctacatatgtcacttgtttctattaattcataatggtatctcaataccacagtcttggtggaaaagatacttattgttacttctttgataattgttttttttcccactagccttttattctatcatctatctatctatctatctatctatctatctatctatctatctatctacctacctgtctataagacagtgttctccaacatttttggcaccagggacaggttttgtggaagacaatttttccacatactcaggggatgaggtggatgattccaggatgaaactgttccacctcagatcatcatgca

SEQ ID NO: 4927 - DNA, 385 bp, Homo sapiens
  MAP TO AL031661.17; EXPRESSED IN BT474, SIGNAL = 1.1; EXPRESSED IN FETAL LIVER, SIGNAL = 1.1; EXPRESSED IN BONE MARROW, SIGNAL = 1.1; EXPRESSED IN PLACENTA, SIGNAL =   1; EXPRESSED IN ADULT LIVER, SIGNAL = 1.6; EXPRESSED IN LUNG, SIGNAL = 0.97; EXPRESSED IN HEART, SIGNAL =   1; EXPRESSED IN HELA, SIGNAL = 1.3; EXPRESSED IN HBL100, SIGNAL = 1.1
agtgacagggtgcacaaatgtgggcaggcatggggaacagaggccatcagcgtctgcactgacaatgttgggtaccacagctgtcactgctggggctggcccgcccccgactacccacgctgccattagaaactgcagctactcgcccactgcttttatttccacacaatgtgtcaattgttacttggcaggtctttgctgagagacaggggcggggcacacctgctcactggggcagaagagtatgcaggcatccccctctctcctttccaggatctggagtttctccatctgcttcccaggaggctcagccctgtgtgccatgagcttagaaccacaagaagaaagttccttgacctcagctcccacttcctggtttgcctac

SEQ ID NO: 4928 - DNA, 407 bp, Homo sapiens
  MAP TO AL034369.1; EXPRESSED IN BT474, SIGNAL = 1.3; EXPRESSED IN BONE MARROW, SIGNAL = 1.3; EXPRESSED IN HEART, SIGNAL = 0.98; EXPRESSED IN PLACENTA, SIGNAL = 2.4; EXPRESSED IN ADULT LIVER, SIGNAL = 1.2; EXPRESSED IN FETAL LIVER, SIGNAL =   1; EXPRESSED IN LUNG, SIGNAL =   1; EXPRESSED IN HELA, SIGNAL = 1.8; EXPRESSED IN HBL100, SIGNAL = 1.4
catgctggggaagagaagacagggtggcaggagtgaagaccatggtcatttgacccacttcctcacgtaacttacttgtaccttcaggacctgctcgagcccaatcacgtatataccacttccatttgatgatggattgctgctgtgcatgaccactttatggctagatgggtcagaaaagcacccagtttatgacaggcagtttaagttgcacagtggcttgatgacccatagtcaaatgttcagtttccgccaaagcccagtaacaggccaagagctgtctctcaaaaggagagtagttttttgcagaggatggcagggtcttggtccaaaatcctagaggcctctgccgttactcacctatgggggcctgccaaagggtccaaacagcatccctatctgccact

SEQ ID NO: 4929 - DNA, 362 bp, Homo sapiens
  MAP TO AL034399.6; EXPRESSED IN BONE MARROW, SIGNAL = 1.2; EXPRESSED IN PLACENTA, SIGNAL = 1.5; EXPRESSED IN HELA, SIGNAL = 1.3; EXPRESSED IN HEART, SIGNAL = 1.3; EXPRESSED IN HBL100, SIGNAL = 1.7; EXPRESSED IN BT474, SIGNAL = 1.2; EXPRESSED IN FETAL LIVER, SIGNAL = 1.6; EXPRESSED IN ADULT LIVER, SIGNAL = 2.4; EXPRESSED IN LUNG, SIGNAL = 1.7
ctgtacttcctctggccctggctgaagaggtgaggcctggtgggagatgtcctagggtaggacaagccggtcagagggtcattaggagggtcttgtcagaggtgggagggcggagaagacagatgaggggaggggctaaggaggaggaaagaaacctattggctgctccatccacacagggctagtgaaaccgttaagcccctaggcgatcatggccttgagacctgaggaccccagtagtgggttccggcacggaaacgtggtggccttcatcatcgagaaaatggccaggcacacgaaaggccccgagttctacttcgagaatatatccttatcctgggaggaggtggaagacaagctca

SEQ ID NO: 4930 - DNA, 420 bp, Homo sapiens
  MAP TO AL034408.2; EXPRESSED IN ADULT LIVER, SIGNAL =   2; EXPRESSED IN BT474, SIGNAL = 2.8; EXPRESSED IN FETAL LIVER, SIGNAL = 2.3; EXPRESSED IN BONE MARROW, SIGNAL = 1.3; EXPRESSED IN LUNG, SIGNAL = 2.4; EXPRESSED IN PLACENTA, SIGNAL = 3.3; EXPRESSED IN HBL100, SIGNAL = 2.2; EXPRESSED IN HELA, SIGNAL = 2.4; EXPRESSED IN HEART, SIGNAL = 1.3
tccaggacatgaacaagctgagtggaggtggtgggtgcaggactcaggtggaagggggccagctggggggtgaggagtggacccgccatgggagctttgtcaataagcccatgtggggctagctgcatcccaatgacaaagtcacgagacctggggtttcctacttggtttggtacatgggctgtgtggaggtcctgcagtcaatgagtgccctggacttcaacacctggactcaggtcaccagggaggccatcagttttgtgtgtgaggctgtgccaggtgccaagggggtgacaaggaggagaaagccctgtaaccatccactcagctctatcttgggaaggagtaacctgaaatttgctgcaatgacaatcactctcaccatctccaccagcagcctcaacgtcatggttgcagact

SEQ ID NO: 4931 - DNA, 465 bp, Homo sapiens
  MAP TO AF152364.1; EXPRESSED IN FETAL LIVER, SIGNAL = 1.1; EXPRESSED IN HEART, SIGNAL = 0.99; EXPRESSED IN LUNG, SIGNAL =   4
gggtttacacctttccaagcactttcacacatctacggtgtcctaagagatgggtgactaagatgcaggagcaaaataatataaatttaccatataaaaactttcttctgtctagcacacttttctcctcgctctttactcgctcaagttttgctggtccttcagtttgcaacttagaagtcacctcttccaggtggcattccaggctggtatagggatcccccctacatgcttttattgctccctattgcgtccattccctcacaaggtgtggaccatgctgctttgcaatgaccaacttggtggccatatccaagtcacagggctcaggatcacctggagtgccctgggtccaaactcaccctcaagaactgacttaccaggtaggtgagtatctgacagtcatatttacagaagctctccaggtgttctgaagcagttaatcccaagatatgatgatggagg

SEQ ID NO: 4932 - DNA, 468 bp, Homo sapiens
  MAP TO AL031679.1; EXPRESSED IN PLACENTA, SIGNAL = 0.95; EXPRESSED IN HBL100, SIGNAL = 1.2; EXPRESSED IN HELA, SIGNAL = 0.99; EXPRESSED IN FETAL LIVER, SIGNAL =   1; EXPRESSED IN BT474, SIGNAL = 1.3; EXPRESSED IN BRAIN, SIGNAL = 0.99; EXPRESSED IN HEART, SIGNAL = 0.94; EXPRESSED IN ADULT LIVER, SIGNAL = 1.5; EXPRESSED IN LUNG, SIGNAL = 1.2; EXPRESSED IN BONE MARROW, SIGNAL = 1.2
ttccaagttgccttagctgccccttcccacagtcactccttgaactttgtctggaccttgaactgctcaactttcatgaattcttagtcatacactaagcacaatgttgtctccttcccaattttctgcccaacttgaaccatgacccactgtcattattctctctctcaatagacccctatccattctttctttcaattcactcattttttcctttatttctctccatttaaatcttatactcccaaatttgttattgcaataatattattgccagtaacccagctggcactggctcttttgtccatatttacattggaatatcttaattttgtccccatttaattgccatctttgtgtttacatctgaacagatccacatggcagatatgctatactatttcatgaattacacattcctggtcaccagtctcaatagttccattttcctggccattttgttacgat

SEQ ID NO: 4933 - DNA, 492 bp, Homo sapiens
  MAP TO AF165176.1; EXPRESSED IN FETAL LIVER, SIGNAL = 2.9; EXPRESSED IN HEART, SIGNAL = 0.87; EXPRESSED IN LUNG, SIGNAL = 2.5
gaaaaagcacatttcaggggagaagggaggcagagtgagagcagagctgtgagcaaggccagccatgcaaaaggcacgcggctgaaagcccttggttctcaggcttcccgcccatctgagagatgcgtactctgtgccctgctgtttgtaaatgtcaaacatttaatgataaccacaataaatgtgcttggtcagcagtcctaaatatggaaaaagaaatcaacataaaacatctttggtagtttcttttccttaaaatcttgtgtcagaggaaagtacacagttaccactggaaacaaagtggttagggaactctacaaaacagaccactgcaggggaaaaaacaatgattttgagagtatgaattttcctgtgaggaacaaaaatgaaaacaatggtacgtttgtcccttccaagttcttcacggatgccagtaactaatcttcagagtaaatttggagaaattgttctgactatgcacacaaagaagct

SEQ ID NO: 4934 - DNA, 451 bp, Homo sapiens
  MAP TO AP000498.1; EXPRESSED IN BONE MARROW, SIGNAL =   1; EXPRESSED IN BRAIN, SIGNAL = 1.1; EXPRESSED IN FETAL LIVER, SIGNAL = 1.1; EXPRESSED IN ADULT LIVER, SIGNAL = 0.97; EXPRESSED IN BT474, SIGNAL =   1; EXPRESSED IN HELA, SIGNAL =   1; EXPRESSED IN HEART, SIGNAL = 1.2
ttcagtgagacacaatgactcctttggtagctcgactgtgattgaatgtaaaaggttttaaattctggagagtgatgggaggagagccatcatgctccaaagtggctccagaatttatatttgtgtatgaaggtttatgtatgaagcctgtagagaaaaccagatactgaagacatcatgtgagcccctgcttcaagacttactgccagaattttcagatatgtgagccagcaaattctctgtttgtttaaaatagtttgagttgtgtgctagatattatctgtcttctcctccacatcttcccttgttctccaccagcctctgtgccccaagataatgaccttcaaggattacatcaacaggctccccttgcccactggtttcctgttgggcttggccagtaggaggcaccagtgggagatcagagagcagaaagagaatgaagtgagga

SEQ ID NO: 4935 - DNA, 412 bp, Homo sapiens
  MAP TO AC011493.2; EXPRESSED IN HEART, SIGNAL = 0.96; EXPRESSED IN BT474, SIGNAL =   1
catgttcgtgatatgccctcaattttacacttttgtcattcagacaagtatcacatatacactgaggttgtggatattatgccactctcttatctcatagttagagaataccttagaaaacgtttgtgtgttgacaattattttattggatagtttcaatcattcttttaagtcagaaccagttctattcactttctgattttaccttgtgtcaaataaaaaattctattcatagccactttgtaaatatgtgtgtttgtgtgtgttttccagggactgttgacatttagggatgtggccatagaattctctctggaggagtggcagtacctggacactgcacagaagaatttatataggaagatgatgttagagaactacataaacctggccttcctgggtgaggataact

SEQ ID NO: 4936 - DNA, 390 bp, Homo sapiens
  MAP TO AC012134.1; EXPRESSED IN BONE MARROW, SIGNAL = 1.5; EXPRESSED IN HEART, SIGNAL =   1; EXPRESSED IN BT474, SIGNAL = 1.6
gaaaatgtcacggaaatcgctttgctggaaataacagagaagttcaaaacaaaattgttgagtgtcactcctgggcccgactctcccttgcactgggcccctcctcagcctgggaggctcctcgctgcctctgccaccactcacccttcaggatgccactgctgcagcctccaggaactgaaaaacagttcttggaaagccttccactaaagggagtaatcgagaataaacaaaggacaaagacatgagtgggaaagagctctttccctgccagctggccacttccagctccaggacagtgtccatgaagcccacagaagggagactcatcatcattttcaatgtcgtcattaccaaaagcctttcttatgcgattcattgtgcaaggct

SEQ ID NO: 4937 - DNA, 364 bp, Homo sapiens
  MAP TO AL031595.4; EXPRESSED IN BONE MARROW, SIGNAL = 3.7; EXPRESSED IN HBL100, SIGNAL = 2.8; EXPRESSED IN FETAL LIVER, SIGNAL =   3; EXPRESSED IN BT474, SIGNAL = 2.7; EXPRESSED IN LUNG, SIGNAL = 2.8; EXPRESSED IN PLACENTA, SIGNAL = 2.5; EXPRESSED IN HEART, SIGNAL =   2; EXPRESSED IN HELA, SIGNAL = 2.5; EXPRESSED IN ADULT LIVER, SIGNAL = 3.3; EXPRESSED IN BRAIN, SIGNAL = 2.4
gtgaggtgggctctctcaaccagctcagggggctgaggcttgctcacatcatgtggcctgcatggcccaccaatcctgttctgtgtagatgagggtctcctggaagctggagggcatacccgattgaggctgtgagtgtggcccacggtccaacaccaagaatgggctctccagacccatgttccctgaagcaccaggcaggctcagcctcctggagggtccctgaggtgctctctggtctgtccccggccaggggtcctcaccaccctctcctgcctccagagaggctggcggcgctcaagctggaagcagaggacatcgccctgacagccacaagccagaagcacaagctcacagtggtgct

SEQ ID NO: 4938 - DNA, 412 bp, Homo sapiens
  MAP TO AL034349.3; EXPRESSED IN PLACENTA, SIGNAL = 4.1; EXPRESSED IN HBL100, SIGNAL =   4; EXPRESSED IN HEART, SIGNAL = 2.5; EXPRESSED IN FETAL LIVER, SIGNAL = 3.1; EXPRESSED IN ADULT LIVER, SIGNAL = 3.5; EXPRESSED IN BT474, SIGNAL = 3.4; EXPRESSED IN BRAIN, SIGNAL = 3.2; EXPRESSED IN BONE MARROW, SIGNAL = 2.8; EXPRESSED IN LUNG, SIGNAL = 3.3; EXPRESSED IN HELA, SIGNAL = 2.8
gtgacatcacgggacatgagagctgtcatcaaatagatgaagggttctcatatgaaagaaacatcagaaactgacttaagacattcacaaaagtttgaactgtgtcctagaaaacactacattcttcaatggaaaaaaaaaatgatcttcctaactcacctgatcctaggagaaaaaccaatgacctcagaaaataaaataaatgcttagaacaagaacaagctgtggactgaataaatggcaaggagttggcaacatatggctatataagtatctgtatactccttttctcaaatcaaacttaacttcaagaaacaaggttttcaatggctctgtccatcaaaatataaaagttttcagaacttctgcaacaactgaaaactcacaagtgcctcaggcagaagcaagaagg

SEQ ID NO: 4939 - DNA, 416 bp, Homo sapiens; identical to SEQ ID NO: 2716
  MAP TO AL034380.22; EXPRESSED IN BONE MARROW, SIGNAL =   2; EXPRESSED IN HBL100, SIGNAL = 2.5; EXPRESSED IN FETAL LIVER, SIGNAL = 1.9; EXPRESSED IN BT474, SIGNAL =   2; EXPRESSED IN LUNG, SIGNAL = 1.9; EXPRESSED IN PLACENTA, SIGNAL = 2.3; EXPRESSED IN HEART, SIGNAL = 1.7; EXPRESSED IN HELA, SIGNAL = 2.3; EXPRESSED IN ADULT LIVER, SIGNAL =   2; EXPRESSED IN BRAIN, SIGNAL = 2.3

SEQ ID NO: 4940 - DNA, 383 bp, Homo sapiens
  MAP TO AC007103.4; EXPRESSED IN PLACENTA, SIGNAL = 0.74; EXPRESSED IN BT474, SIGNAL = 0.63; EXPRESSED IN HEART, SIGNAL = 0.78
tccaaggagactgtaaggggataaaaatggttgtacatgagcaaatgctattattcccaaaaataaaactaaaacagattctatagtcatttagattgtaatttcaaaattagacatagggttttgtttgatatgcaactctatttgaaagctactcatatatcgtacatctttgcatcaagatgtctttaagtaatataaaagtaatataaatataactaaattgactagagcgatacaggattgatgggctcactttaaaatctgggcatagagtgggcttgaggtaatgatcagtagggttctggtttagctttctgtattttcttctctgccctcttccatatgttgacttcattcttaggctgtcttttctcagggtc

SEQ ID NO: 4941 - DNA, 398 bp, Homo sapiens
  MAP TO AL034400.2; EXPRESSED IN BT474, SIGNAL = 2.4; EXPRESSED IN BRAIN, SIGNAL = 2.4; EXPRESSED IN HELA, SIGNAL = 2.6; EXPRESSED IN HBL100, SIGNAL = 2.8; EXPRESSED IN ADULT LIVER, SIGNAL = 3.8; EXPRESSED IN FETAL LIVER, SIGNAL = 2.3; EXPRESSED IN LUNG, SIGNAL = 2.7; EXPRESSED IN BONE MARROW, SIGNAL = 2.6; EXPRESSED IN PLACENTA, SIGNAL = 3.2; EXPRESSED IN HEART, SIGNAL =   2
tgataaaccataatctctggaggtcttatgacagtatgacaactctcagtgccaggtacaaagtcctgagagcagagttgatcagggcaaggagaaaagaggggctgaagaagaagagaagatgctgtccagctcaccccaattatttcacttccaagttctaaagtggcttcagtacacaggttcttgcttccccagtgtgcaactttttccaggtttctggccactggaggtggctgtatttattattgtcatcatggtgttggtagctactcatcaggagaaccctgactcagagactaagagatatgaactcatacacaagaaagaagcagttaccactaaagacaggaagagtttgattctttagtctaaagacccaagacaacaccatggac

SEQ ID NO: 4942 - DNA, 365 bp, Homo sapiens
  MAP TO AL034412.1; EXPRESSED IN BONE MARROW, SIGNAL = 0.93; EXPRESSED IN LUNG, SIGNAL = 1.5; EXPRESSED IN HELA, SIGNAL =   5; EXPRESSED IN HEART, SIGNAL = 1.9; EXPRESSED IN HBL100, SIGNAL =   4; EXPRESSED IN FETAL LIVER, SIGNAL = 3.9; EXPRESSED IN ADULT LIVER, SIGNAL = 4.8; EXPRESSED IN BRAIN, SIGNAL = 1.1
atgtatttccagctgtattgaggtataattgacaaataaattgtatatattcacagtgtgcaatatgatgttttggtatatgtatacattgtgaaaggattaccacaatcaagctaattagcgtatgtatcacctcacatagttatcttttgtggtgagaacgttttaagatttttctctcttagcaaatttcaggtatatgatgtagaattattaactataaagtattttcataaacctcatcctgtgaaatcctttcaatggtcctattacaggtaggatcagtattatcctcgtttgctttggcagcaaactgagacccagagaagccaagctacttggccaggaatacagagcccccatct

SEQ ID NO: 4943 - DNA, 351 bp, Homo sapiens
  MAP TO AL031683.1; EXPRESSED IN BRAIN, SIGNAL = 1.1; EXPRESSED IN BONE MARROW, SIGNAL = 1.2; EXPRESSED IN HBL100, SIGNAL = 1.1; EXPRESSED IN FETAL LIVER, SIGNAL = 1.1; EXPRESSED IN BT474, SIGNAL = 0.98; EXPRESSED IN LUNG, SIGNAL = 0.94; EXPRESSED IN PLACENTA, SIGNAL = 1.1; EXPRESSED IN HEART, SIGNAL =   1; EXPRESSED IN HELA, SIGNAL = 1.1; EXPRESSED IN ADULT LIVER, SIGNAL = 1.2
tggactgtgtcactcttgggacacaacccctaaggatactattcacactgtagagtaataggcagttagtggaaatgatagaaaccagtgaagtagatttaatgcaatagggcaaagtgaggtcatgtccagagcaggagagagacagcctgtaaatggggcagtggctgctgttcatttttagcctatttccacccaggttttgagaaaaatggaaaaatgaaagttttgagtgaactctcccagtttccaatcactgaaaagacaaacagagcacatcttcagactgcatttggcccagaagttgccaatctgtaccctctgccaggaggagcagagtttgcctggaat

SEQ ID NO: 4944 - DNA, 403 bp, Homo sapiens; identical to SEQ ID NO: 2458
  MAP TO AL034422.18; EXPRESSED IN BT474, SIGNAL = 2.7; EXPRESSED IN ADULT LIVER, SIGNAL = 2.4; EXPRESSED IN BRAIN, SIGNAL = 4.1; EXPRESSED IN BONE MARROW, SIGNAL = 2.7; EXPRESSED IN HELA, SIGNAL = 5.5; EXPRESSED IN HBL100, SIGNAL = 3.1; EXPRESSED IN FETAL LIVER, SIGNAL = 2.7; EXPRESSED IN LUNG, SIGNAL = 2.2; EXPRESSED IN PLACENTA, SIGNAL = 4.2; EXPRESSED IN HEART, SIGNAL = 1.9

SEQ ID NO: 4945 - DNA, 445 bp, Homo sapiens
  MAP TO AC007652.1; EXPRESSED IN ADULT LIVER, SIGNAL = 0.83; EXPRESSED IN PLACENTA, SIGNAL =  13; EXPRESSED IN BT474, SIGNAL = 0.6; EXPRESSED IN HEART, SIGNAL = 0.82
catctgcattcacaggaacgtggaagttatcaccattaccacagcaaggcacctacctcaagtcacacagcaagaactgaaataaagagcactgaatgtggaattaggaagccttggttcagataccagccctgccacttcctactgtgcaaacttaagccaggcttgcaaactccctgggtttcaatttccttatctgttacatggggataatgatatttaccaaacaagactgttgtaagaataaaatcacaaacccacacaaattttcctagccccaaatctgtcatacaccaagtgattacaaaatgtagaatccaaatccaagtactcatgccacacataattaatgtcatgcactgtggaggatgcataatggaatcaacaatcagcaaagtaagtccttactgagatcttaccatgagaacttgcccttagtttccca

SEQ ID NO: 4946 - DNA, 385 bp, Homo sapiens
  MAP TO AL079303.2; EXPRESSED IN HEART, SIGNAL = 1.3; EXPRESSED IN FETAL LIVER, SIGNAL = 2.2
aaagggaaagcactcaggtgtaaaaatagcttcttcaagaagataaattttggtgtcagacttgggttcagtcctcaactttactgtctactatgtgagctgggcaatttccttgatctttctaagactccacttctggatttgaagcagggataacagcactcaatgcagatgtaaggatcaaattagataatagatgtaggtgtccagcacagtgaccaggacaggataaacattctacaaacggagctatcatcactgataggatttttcctccaggattttaatttattaaatagttaccttattgacaggaatcatgtttttgacattgtagtagaagccaaaataaaccatgttgaaaactccatgtcgtcccaaagtt

SEQ ID NO: 4947 - DNA, 399 bp, Homo sapiens
  MAP TO AC011390.1; EXPRESSED IN HELA, SIGNAL = 0.96; EXPRESSED IN HEART, SIGNAL =   2
cccacagtcctctccatctcccaatatctggaggagctccacacacaccagaaggtcttttctatttctggcactgttccaacactatcccgatgcctgtgcattgaggagcctctgcccagccctctgggcctcagtatccaggcaactgtaatctatttgattacaacttgaggtgacccaggcatagctctacatctgggctctaaccactgtgtctcagatttgtccccttacccttgatcacctgcctacatggaagtggagctctaagtccgtgtttttttttttgaattgtggttcaaggattcccctccatccccccatccctgccatgctgaatcaaactcacctgaggaagcctttttaaaatgcagatcccaaggatctcctgaatca

SEQ ID NO: 4948 - DNA, 495 bp, Homo sapiens
  MAP TO AL078462.9; EXPRESSED IN ADULT LIVER, SIGNAL = 0.92; EXPRESSED IN HEART, SIGNAL =   1
tcctttgtccactttttcctgtgttatcttctctgatttgaaagtactcttcatctcatagggattgtattgatttctccttttatgtaagctttaattattttttcctcaagccatagacttattaatgatactttagatgtgcaacaaagttgtattatatatgcacttgttcctattccttttgctttcctatatgttatcaataacctgttagaaagcataatggaatattggctactttctcccttatttgttcatatattcattccagaagtagatggcaagctttctgcgagtcaaggaaaatatgagatactgggaatataatgatgagcaaaaccgactatatcctcaccttgtggagcttaaaatccatccacagagcaaccaccaccaccacaataataataacttaaacaacagaaaatcatgagaaagaaataaaaatgaaatgtgcaagatctttataaagcaaatcctaacattcagctg

SEQ ID NO: 4949 - DNA, 480 bp, Homo sapiens
  MAP TO AL031681.13; EXPRESSED IN FETAL LIVER, SIGNAL = 0.87; EXPRESSED IN HEART, SIGNAL = 1.3; EXPRESSED IN LUNG, SIGNAL = 1.1; EXPRESSED IN BRAIN, SIGNAL =   1
tgctcagtccacttagctgctcaagtcaaaaatctagggttcccttgccccccaccctttccctcccctctccctgctataccatttctggactttcagttccacctctaagcatctctcaaatttgtctttttttttttttttttttttattctccattgctacaacccctctgtaaggacctcattcatggcctcctttgggcagacaggaagagcttcttggattctccctgcaagctgtggtgtgtccactcacatcagtggctccagcagacatgatagtggctctttgtctggccctctgatttccacctctaagttatcccacatctgcgtgagttcttgttccaatatgaaatctgattcccacagtgcttgtagaggctctgtttttgtgactgcccctgatggatcctccaaggctacgaccatctctctgctatcttggctgctccttggtcacccagaggcacagtct

SEQ ID NO: 4950 - DNA, 475 bp, Homo sapiens
  MAP TO AL096710.8; EXPRESSED IN ADULT LIVER, SIGNAL = 0.91; EXPRESSED IN HBL100, SIGNAL = 1.8; EXPRESSED IN HEART, SIGNAL = 1.3
gatgtttaaagcaaatgtatgggattattctcacatggttcatgcagctttttctgtataaaatgtataggtcaacttacttgttcggttgagctatctccagaagccatctctttagaccctgaagtacattccaaatggcttgggaaatcattacacagatccttgagcttctcatctcttggcaatgttgatgcccacacagtagagctttctagtccaatttcttttacagtttctaaattaggagaatagtagtttccttctttgcttttaatatcaccaagaatatgtggcttttcttccatcatctcagatgtagaacatgctttttgattaaagtctccaacatgttctattttctctgaatatccatcagcaagcagtttgtagaaaatattttcaagctgcagtggaagtactttagacgtaatgcctcttttctctaggtcatactccatatgagttaattctc

SEQ ID NO: 4951 - DNA, 480 bp, Homo sapiens
  MAP TO AC007458.13; EXPRESSED IN FETAL LIVER, SIGNAL =  17; EXPRESSED IN HBL100, SIGNAL = 0.93; EXPRESSED IN HEART, SIGNAL = 0.88; EXPRESSED IN BONE MARROW, SIGNAL = 0.9; EXPRESSED IN BRAIN, SIGNAL = 0.93
agatctgtatccagtcttggtccttaggtaaaattagcctatcaaatttcttccagctgggtcagccaggaggttagagtcacagaacaagtgaaatgtgtgatgggaggaataaggagggtgcattctgggctcaaggcttttggacagagaaagccaggcctaagtgaaccatcacactgaggggtccagggtagacaaagagctttgaggtccagaataggtaggaatatgagaagggagaatcacaagaggaagggagtgggcacaggatatgaacttccaactttgcaaatttatgcaagactctttctcacctagttttgaccttcctccgaggttctctgtggccagacctatgaagcccagcttgagactcatgatcatttttcctcttagaattacgctgatcactttcctactgctgtggttgctgcaacatctggccaggatgctttctctcatcacttcaggggcact

SEQ ID NO: 4952 - DNA, 478 bp, Homo sapiens
  MAP TO AC005002.2; EXPRESSED IN HBL100, SIGNAL = 1.4; EXPRESSED IN HELA, SIGNAL =   1; EXPRESSED IN HEART, SIGNAL = 1.1; EXPRESSED IN BRAIN, SIGNAL =   1; EXPRESSED IN BONE MARROW, SIGNAL = 1.3; EXPRESSED IN ADULT LIVER, SIGNAL = 0.92; EXPRESSED IN BT474, SIGNAL =   1
ttgtactatgttttgaaaagtggttgtagttattatttttgactggttcatcatttgttctttctatttagaataagagtagtttgcacatcacagttacagggttataacattctgtgtttttctgtgtacttactagtaccagtgagtttggtaccttcaggtgattatttatcattcattaatgtcactttctttctgattgaagtgctccctgtagcatttcttgtggataggtctgatgtcgatgaaatccatcagcttttgtctggggaagtctttatttctccttcctgcttgaagtgtaattttgtcagaaatactattctagggttaaaggtttttccatttagcactttaaatatatcatgccactctctcctggcttttaagatttccactgaaaagttggctgccagacctagtggagctctattgtatgttacttttttcttttcttttgctgcttttaggatcc

SEQ ID NO: 4953 - DNA, 1956 bp, Homo sapiens
  MAP TO AF002994.1; EXPRESSED IN PLACENTA, SIGNAL = 2.1; EXPRESSED IN HELA, SIGNAL = 3.3; EXPRESSED IN HEART, SIGNAL = 1.1
gctgacaagtaggacccgaggcactggaggagcattgaaggagaagatctgtaagtaagcctttgtcagagcctccaaggttcagttcagttctcacctaaggcctcacacacgctccttctctccccaggcctgtgggtcttcattgcccagctcctgcccgcactcctgcctgctgccctgaccagagtcatcatgcctcttgagcagaggagtcagcactgcaagcctgaagaaggccttgaggcccgaggagaggccctgggcctggtgggtgcgcaggctcctgctactgaggagcagcagaccgcttcttcctcttctactctagtggaagttaccctgggggaggtgcctgctgccgactcaccgagtcctccccacagtcctcagggagcctccagcttctcgactaccatcaactacactctttggagacaatccgatgagggctccagcaaccaagaagaggaggggccaagaatgtttcccgacctggagtccgagttccaagcagcaatcagtaggaagatggttgagttggttcattttctgctcctcaagtatcgagccagggagccggtcacaaaggcagaaatgctggagagtgtcctcagaaattgccaggacttctttcccgtgatcttcagcaaagcctccgagtacttgcagctggtctttggcatcgaggtggtggaagtggtccccatcagccacttgtacatccttgtcacctgcctgggcctctcctacgatggcctgctgggcgacaatcaggtcatgcccaagacaggcctcctgataatcgtcctggccataatcgcaatagagggcgactgtgcccctgaggagaaaatctgggaggagctgagtatgttggaggtgtttgaggggagggaggacagtgtcttcgcacatcccaggaagctgctcatgcaagatctggtgcaggaaaactacctggagtaccggcaggtgcccggcagtgatcctgcatgctacgagttcctgtggggtccaagggccctcattgaaaccagctatgtgaaagtcctgcaccatacactaaagatcggtggagaacctcacatttcctacccacccctgcatgaacgggctttgagagagggagaagagtgagtctcagcacatgttgcagccagggccagtgggagggggtctgggccagtgcaccttccagggccccatccattagcttccactgcctcgtgtgatatgaggcccattcctgcctctttgaagagagcagtcagcattcttagcagtgagtttctgttctgttggatgactttgagatttatctttgtttcctgttggaattgttcaaatgttccttttaacaaatggttggatgaacttcagcatccaagtttatgaatgacagtagtcacacatagtgctgtttatatagtttaggggtaagagtcctgttttttattcagattgggaaatccattccattttgtgagttgtcacataataacagcagtggaatatgtatttgcctatattgtgaacgaattagcagtaaaatacatgatacaaggaactcaaaagatagttaattcttgccttatacctcagtctattatgtaaaattaaaaatatgtgtatgtttttgcttctttgagaatgcaaaagaaattaaatctgaataaataattcttcctgttcactggctcatttctttaccattcactcagcatctgctctgtggaaggccctggtagtagtggggattctaaggtaagccagactcacgtctacccatagggtcatagagtctaggagctgcagtcatgtaattaaggtggcgagaagtcctctaggatgtagtggaaatgtaagacaggggtgagggtgtggggttccaggtgagagtggtgagtataaatgccctgagctggggcaatttgggatctgggaacctgcagt

SEQ ID NO: 4954 - DNA, 473 bp, Homo sapiens
  MAP TO AC007392.3; EXPRESSED IN ADULT LIVER, SIGNAL = 0.81; EXPRESSED IN FETAL LIVER, SIGNAL = 0.66; EXPRESSED IN LUNG, SIGNAL = 1.1; EXPRESSED IN HELA, SIGNAL = 0.64; EXPRESSED IN HEART, SIGNAL = 0.98; EXPRESSED IN PLACENTA, SIGNAL = 0.71; EXPRESSED IN BONE MARROW, SIGNAL = 0.69; EXPRESSED IN BRAIN, SIGNAL = 0.92
ggaaggcaggaaagaaaaggtgtaaattttagatgtgttttaaattaatgtatttaatgacatattagactcattacaattttattgactttccctttacatttgaatgtaattttttactagccgatgcaagctgcaaaatggcgagtcttctaaggtgcctttccttccctgggatcctcatcttagaatgagcagaggcacatcgataagaactggaccttgatttcacaacctcatacaaagccaggcaattcttgagccaaacaaagggggtgtaagctatttcatttattttgataatcctcctcttgcacgggagcattttgctgtctttgtcaaagtgaatgacaacaatttggccaactctctctgagctgcactcaacagtgacaggcaaattatcagaggccctgcacttcttattatcagaggagaagccatcagggggacgcatggaggatacctctccc

SEQ ID NO: 4955 - DNA, 456 bp, Homo sapiens
  MAP TO AC005072.2; EXPRESSED IN LUNG, SIGNAL = 0.73; EXPRESSED IN HELA, SIGNAL = 4.6; EXPRESSED IN ADULT LIVER, SIGNAL = 0.72; EXPRESSED IN PLACENTA, SIGNAL = 0.67; EXPRESSED IN FETAL LIVER, SIGNAL = 0.72; EXPRESSED IN HEART, SIGNAL = 0.88; EXPRESSED IN BONE MARROW, SIGNAL = 0.67
gatagcacatgtgtggagcctcagctcagtgcctggcctgtgtcccaaggggacactgggtcaccgtttgtttggggtctcagtcttgaggagccaccactgccctgacactggttgctcctctggccacaccgcaggattgattactaaccgtggaggtgacgtcgggttgttgcatgtgtagaaacgaggcttgcttagagctttcgcccgttgggtaggacagcctggcttaccgggaggagggtatcctcttccctatggatgcagcccacgatccccatggcaacataccttccagggcacagcgtggcagagccagggctggtggtgttcctgctggtgtgacaccaagggtgttgatcttgatggaaacgcccacgtctctctttgttctgggaaagaaggaaaggtttcctggtgtctgatgaatgtctaatgtgttccacagggagg

SEQ ID NO: 4956 - DNA, 467 bp, Homo sapiens
  MAP TO AC007102.4; EXPRESSED IN LUNG, SIGNAL = 0.61; EXPRESSED IN FETAL LIVER, SIGNAL = 0.62; EXPRESSED IN HEART, SIGNAL = 0.82
tgaaactttggtctgaggggtataatcgctagaggtacctatgcagagaaatggcaggatttgctatgtttcaggaaggctcctctggcagtgtgtgcaggatctcccatggatttgggataaaatcccaaattcttgacatggtctataagcccctgcaacttttctcatctcctttctctccatagcattgtctctctgcaggcacacgtgggttctctcagactggcggggcactaggatgcttcctgctctcccatgtcccacccccacagccagttaatatctttttcttcctttacaacttagctaaatgtcacatcctcagggaaactgtcccttaccaccaagcatgttgctcctttttctctgaatcttatcacttatcccaatggtggaattggtgattaccgtgtccctctgcctactacaggtaagaaaattgaggctcaaagaggtgtctccca

SEQ ID NO: 4957 - DNA, 1970 bp, Homo sapiens
  MAP TO AC010680.3; EXPRESSED IN HEART, SIGNAL = 5.8
aggtatggaaaaagtgccccactggattctaaggcagttattgtacaatatccatttaaagaacctggaccacctggaactccttttgtgacatcaatctcaaaagatcagatgcttgtgcaatggcatgagccagtgaatgatggaggcaccaaaattattggctaccatcttgaacagaaagaaaagaacagtattttatgggtcaagttaaataagacccccattcaggacaccaaattcaaaacaactgggcttgatgagggccttgagtatgagttcaaagtttctgctgaaaatattgttggcattggcaagcctagcaaagtgtcagaatgctttgttgctcgtgatccatgtgacccacctggtcgccctgaagccattgttattacaagaaacaatgtcacactgaaatggaagaaacctgcctatgatggtggtagcaaaataacaggttatattgtagaaaagaaagatctacctgatggccgctggatgaaagccagctttaccaacgtattagaaactgaatttacagtgagtggacttgtagaagaccaaagatatgaatttagagtaattgcaagaaatgcagctggaaactttagtgaaccatctgatagtagtggtgccattactgcaagagatgaaattgatgcaccaaatgcctctctggatccaaaatataaagatgtcatcgttgttcatgcaggagagacttttgttcttgaagccgacatccgtggcaaacctatacctgatgttgtttggtcaaaagatggaaaagaacttgaagaaacagctgctagaatggaaattaaatctactattcagaaaacaactcttgttgtcaaagactgtatacggactgatggaggacaatatattctgaaactcagcaatgttggtggtacaaagtctatacccatcactgtaaaggtacttgacaggccagggcctcctgaagggcctctgaaagttactggagttactgcggaaaaatgttacctggcatggaacccacctttgcaagatggtggtgctaatatttcacattacatcattgaaaagagggagacaagccgactctcttggacccaggtttcaactgaggtacaggcccttaactacaaagttactaaacttcttcctggtaatgagtacattttccgtgtcatggctgtgaataaatatggaattggagagcccttggaatctgggcctgttacggcctgtaatccttataagccaccaggtcctccctcaacacctgaagtctcagcaatcaccaaagattctatggtagtaacatgggcacgcccagtagacgacggaggtaccgaaattgagggctacattcttgaaaaacgagataaggaaggcgttagatggaccaagtgcaacaagaaaacattaacggatctgcggctcagggtaactggtcttaccgaaggccattcctatgaattcagagttgctgctgaaaatgcagctggtgtgggagaacctagtgagccatctgttttctaccgtgcgtgtgatgccttgtatccaccaggtcccccaagcaatccaaaagtgacggacacttccagatcttctgtctccctggcatggagtaagccaatttatgatggtggcgcacctgttaaaggctatgttgtagaggtcaaagaagctgctgcggatgaatggacaacctgcactccaccaacaggattacaaggaaagcagttcacagtgaccaagcttaaagaaaacactgaatataacttccgtatttgtgccatcaattctgaaggtgtaggtgaacctgcaactctacctggctcagtggttgctcaggagaggatagagccaccagaaatagaactcgatgctgatctcagaaaggtggtcgttctgcgtgcaagtgctactttacgcttatttgtcactatcaaaggtcgaccagaacccgaagttaa

SEQ ID NO: 4958 - DNA, 493 bp, Homo sapiens
  MAP TO AC010799.1; EXPRESSED IN BONE MARROW, SIGNAL = 1.2; EXPRESSED IN ADULT LIVER, SIGNAL = 0.95; EXPRESSED IN HEART, SIGNAL = 1.1
  unsure 233
  unsure 277
ggccatattcaaagccgtcttgggccgcatccagcccacgggctgcgggttggacaagcttgctttacacaatattctgtgtttccttttttcctcttataaccatatttgatagtttatgggaagccttcatcagtggaaatttttgtgtttaacttttaattctaaactacttttagagaaaagattaaaaaatagttgagaactcctgtatagcttttgcccagctgctncttaatgttcacatcttataggtctatagtatagttagcaaaancctgggaattaacattggtatagtgttagtcaggcgggataatccttacctgtgcctccttttggagggcagcagaatgtggtagttggagttgcatgatacttgattcatatctctgtgtaatgatggcatgcaataccctgactgctcctttcgaattcttcctgaaaagggaaaaataaaacatgagaatagtgctgctaactaccaaatgca

SEQ ID NO: 4959 - DNA, 432 bp, Homo sapiens
  MAP TO AC010680.3; EXPRESSED IN HEART, SIGNAL = 3.5; EXPRESSED IN LUNG, SIGNAL = 0.99
ttctgcatcaaagcttgcactttctttctcataaatggtaacgtcctctattggtttaagcagttcaacttcacgctctgtattggtcagggatgaagtaacataatgctttagacaacccaacgatgctttgcttttatgtgttttggtgtgttatttggctttacacatacgcaaaacttataatttgaataaaaggtaagattttatacctccaagtgtcagctttgcagggtatctttttccttcaatttccactgcatactcagcaatatcttctggcatagcattcttaattttgaggtacagatgatttccatctctcagtatttcagtcttatcatttggttccgcagggatttcatcatatcctttgaaccacttaatgtttggagtatcttttgctatatcacaggcaaaaatagctgtccc

SEQ ID NO: 4960 - DNA, 1986 bp, Homo sapiens
  MAP TO AC010680.3; EXPRESSED IN HEART, SIGNAL = 7.8
tgaacctaaatatgacggtggtcataagttaactggatatatagtggagaagcgagatctaccttcgaagtcttggatgaaagccaaccatgttaatgtcccagaatgtgcctttactgtaactgaccttgttgagggtggaaaatatgaattcagaattagagcaaagaatacagcaggtgctatcagtgctccatcagaaagtacagaaaccattatttgcaaggatgaatacggtaggtccattttactttttatgtacttttttttttaaagcaaattaagcctccttccttttctgattaaaatgtatttttttctttgcagaggcaccaacaattgtccttgatcccacaataaaagatgggctaacaattaaagcaggggataccattgttttgaatgccattagcattcttggcaaaccccttccaaaatcaagttggtccaaggcaggaaaagacattagaccatcagatatcactcagataacttcaaccccaacatcttccatgcttactatcaagtatgccactagaaaagatgcgggtgaatataccatcactgctaccaatccttttggcacgaaggtggaacatgtgaaggtaacagtccttgatgtacctggtcccccaggtcctgttgaaatcagtaatgtttctgctgaaaaagcaacacttacatggacacctcccttggaagatggcggctcaccaattaagtcctatatacttgaaaagagagaaaccagccgacttttgtggacagtggtttctgaagatattcagtcttgcaggcatgtggcaaccaaacttatccaaggaaatgagtacatcttccgggtctcagctgtaaaccactatggcaaaggagaacctgtacagtctgaacctgtcaaaatggtagacagatttggtatgtagagcatgtgagggaattgacatggaaacatttatagcagagtttaggaaatcatggatttctaataaatttgcttccttttcaggtccccctggccctcctgaaaaaccagaggtatcaaatgtcactaagaacactgccactgtcagctggaaaaggccagtggatgatggtggcagcgaaattacaggatatcatgtagaaaggagagaaaagaaaagcctgcgatgggtgagagcaataaaaacaccagtttccgatctcaggtgcaaagtaacaggactgcaagaaggaagcacctacgaattccgtgtcagtgcagaaaacagagcaggaattggtccacccagtgaggcttcagattctgttctgatgaaagatgcagcatgttagtatttgtctttttcaacaccgttcattccagagtgccaatattttatctaaattacccaaaagccaaactctgaatatatacttttgtgtctttgtttctttctcagatcctccaggaccaccttcaaatccgcatgtcactgatactaccaagaaatctgcttctttggcatggggcaagcctcattatgatggtggacttgaaatcactggctatgtcgtggagcatcaaaaagtaggagacgaggcctggataaaagataccacaggaaccgccctcagaatcactcagttcgttgttcctgatcttcagactaaagaaaaatacaacttcagaatcagtgccatcaacgatgcaggtgttggggagccagcggtgattccagatgttgaaatcgtagaacgggagatggctcctgattttgaactagatgccgagcttcgaagaacacttgttgttagagcaggactcagtattaggatatttgtgccaattaaaggtcgtcctgctcctgaagtgacatggaccaaagataacatcaacctgaaaaaccgagccaacattgaaaatacggaatcatttactcttctgattatcccagaatgtaacagatatgataccggtaaatttgtcatgaccattgaaaacccggctgggaagaaaagtggctt

SEQ ID NO: 4961 - DNA, 485 bp, Homo sapiens
  MAP TO AC006581.16; EXPRESSED IN BT474, SIGNAL = 0.62; EXPRESSED IN ADULT LIVER, SIGNAL = 2.4; EXPRESSED IN PLACENTA, SIGNAL = 0.82; EXPRESSED IN LUNG, SIGNAL = 1.1; EXPRESSED IN HEART, SIGNAL = 1.3
ccagaagagtcattactttcaccctgttctctttaacagaagcgagtcactcaatccagctcacactcaatggatgtaaatatcaggatgcagggatctctgagggcccttagaggttacctaccacactggactagcctctctggcatcacctgggagcttgttagaaatgcagaatatgggccccaccccaggtctatggcagcagagtttgcactgttgcaagatccccattaaagtttcagaaatgctgatccaaatgggaatggacctcactggtacctctggcaatagggctaatggcttcccttcttctttctctcaggtcacattaactttactattagtacaaagattctggacagcaatgaaccatgtgggggccagaaggggtttgttccccaaaagggccgaagtgacacgctcatcaagccagttctcgtcaaagtgagttttcttcagaggtagagacagcaaccaaccga

SEQ ID NO: 4962 - DNA, 439 bp, Homo sapiens
  MAP TO AC012119.1; EXPRESSED IN HEART, SIGNAL = 1.1; EXPRESSED IN LUNG, SIGNAL = 0.94
tcactggccctttattgcagcccaggctggagctgaggacgtgaagggcggccgtattttcacagtgagcaaggctccgagaattcttacctttatgtaatccttactttttccttttgaacaagtgaaatttctttagacgacctttagaagctgaggttttctttcagccttgctccaactccttcccccactcactcctgaaaatgttgccttttgccatccagagctcctttcagaagccgtgaatgcgaagccaccagctgtgaaataggtgctgtgaatggcttgtcacagggaggggtagatttactgagaatgagctgtgctttgctgcagaattctgtgactattgccaaaaagggtttgctacatgacaaagaatccaaattgtactgtctgtggaccctgagggctgtggaaggtggggagggagaat

SEQ ID NO: 4963 - DNA, 472 bp, Homo sapiens
  MAP TO AL022143.1; EXPRESSED IN BRAIN, SIGNAL = 0.99; EXPRESSED IN BONE MARROW, SIGNAL = 1.2; EXPRESSED IN PLACENTA, SIGNAL = 1.4; EXPRESSED IN HEART, SIGNAL = 1.5; EXPRESSED IN BT474, SIGNAL =   1
ttttccatcctccaccagagtgcaacctctgtgagcatggggaccttgactgccattcacagacgtgcctctgctgtagcctgcctcagagtgggtgctctgtgagtgtctgcagtggaatgaatgaccccatcgtgtctgaaggctggctgtgtcttcatcagaaagcttcttttcctcttccatcagtcggcccagctgacctagagatggttgaggctctggcctccccctggttcctcagtgcttcccccatccccttccctgtacctctcaggtcattaccttgatggcccccgtggctatctggatatggtgcagccgtcgcagcgtgctctctctgtcgatgaagtaggaggcggccagctggtgcagggtctccagggacacagctgtgctgttcccactgcccccgattatagaggcacctcctgttgtctctgtctttcttcccagtttctgcttgtccaca

SEQ ID NO: 4964 - DNA, 364 bp, Homo sapiens
  MAP TO AP000359.1; EXPRESSED IN HEART, SIGNAL = 0.98; EXPRESSED IN LUNG, SIGNAL = 1.5; EXPRESSED IN FETAL LIVER, SIGNAL = 0.92
aagcctgtgggtgacaaaacatagttgaacaaaaatagcacatctgataaatgtttatctgaaggtccttcaaaagactaagaataaatacttaaaactgactcctaagtaccaatttttagacccagagcttaggcttggaaacccttggctttatgtgaagagatcggactaatactctcatgtaatttattctagtaccagtttggaaatctggcttggttatgttacttctgttcttcaatacgaaaacagcattaccctctgtgccgatgtgagccacaaactgctccgaatagaaactgcttatgatttcataaagagaacatctgcccaggcccagacaggaaacatccgagaggaa

SEQ ID NO: 4965 - DNA, 344 bp, Homo sapiens
  MAP TO AL021917.1; EXPRESSED IN LUNG, SIGNAL = 1.5; EXPRESSED IN BONE MARROW, SIGNAL = 1.5; EXPRESSED IN HBL100, SIGNAL = 1.6; EXPRESSED IN HELA, SIGNAL = 1.2; EXPRESSED IN HEART, SIGNAL = 1.7; EXPRESSED IN BT474, SIGNAL = 1.6; EXPRESSED IN FETAL LIVER, SIGNAL = 1.4; EXPRESSED IN ADULT LIVER, SIGNAL = 1.2; EXPRESSED IN BRAIN, SIGNAL = 1.2; EXPRESSED IN PLACENTA, SIGNAL = 1.1
taggttcgccctcagagaagaggctcctactcccgagttttgggactctttgattctccttttgtgaaaaggggttagagaagcttcatatcagctgcagcctccaggtcctcagggcccagaaccattcattccacccacactgctgcccccatccccgctctgggctccatctgtgtgctgaggatcccccatgcactcaatgagtctcagagagcagagaactaacctggaataaaaatgacactttctttcttctggccgagcagggtgtcattgatagagcaggacacgttcctcacagacttgtctctgatgatcacagctgtggtgaccatgaagag

SEQ ID NO: 4966 - DNA, 479 bp, Homo sapiens
  MAP TO AC006364.3; EXPRESSED IN FETAL LIVER, SIGNAL = 0.91; EXPRESSED IN HEART, SIGNAL = 0.93; EXPRESSED IN LUNG, SIGNAL =  17
caacaaacttggtggtggtgttccattagtcatgacacttttttgttgtcagcaactaataggtaatttttttgcatataaaactaggcagatggttcaagcagtcctttggatagctagataatctgagaattctttgatcaggaaaattctttatcttgatgaattgtttgtataatttttatgtatctcatgtaaaattaagatctaatagatacaaagtagaaatgtattgatcttaaaaaatttataaacatttttcatagaaatgcaaaataaaagttctgtgggcttacaaagttatgctgaaatacttctgccttttaggtgctgcaaagttggtggtagctgtggcagtgtttttactgacattttatgttatttctcaagtatttgaaataaaaatggatgcaagtttaggaaatctatttggtaagttttatttttttcctttcttaaatcttatttttgatgtggcc

SEQ ID NO: 4967 - DNA, 403 bp, Homo sapiens
  MAP TO AC006972.2; EXPRESSED IN HEART, SIGNAL = 5.5
ctgatggccaatccagtttagcattttgtccttgattgctttacctttcaacaaagtattattatcaatgttatgattattgttatcattaatgaaaataagccagatggacttttacaacctctacttcatactcccaatctttgttataatcatgtctaagtagcacgagacaaattcagggaatgcagttctcaccttaaatgggagttaatcttaaagaagaccagcagtaataacctatctcttcccatttcagactcaacgtaaccaatacctgcctttcaaggaaaactcatatggggctcactgacgaaacaaagcgagtttgcaaaaaaagatttgacatagtcaattctttgtactcttcagtgatggcagctgccttagtggaaaatgtggg

SEQ ID NO: 4968 - DNA, 384 bp, Homo sapiens
  MAP TO AL021154.1; EXPRESSED IN PLACENTA, SIGNAL = 1.1; EXPRESSED IN BT474, SIGNAL = 0.94; EXPRESSED IN FETAL LIVER, SIGNAL = 1.7; EXPRESSED IN BONE MARROW, SIGNAL = 1.3; EXPRESSED IN HBL100, SIGNAL = 0.92; EXPRESSED IN HELA, SIGNAL = 1.1; EXPRESSED IN HEART, SIGNAL = 1.2; EXPRESSED IN ADULT LIVER, SIGNAL =   1
tcgagggtcctaattacccctcaaaaggaggtagcagggcctttccctggacttggccacctcacctgcagccttcttgtgagaggtcagaagtcagaagactggatgggcctccctaggcccagcttccattaggaaggtgaggaccaccccttatccactcctcacccgtaccattcatatctccccacacagcttctgccggctggggcaggaaaggcgaggagaccccatgccctgagggcagcacctagtgtccaatgtccctgtgcaggcagaggggctgtcagcctgtctgtgaggaggtagagtcgggggcaggctgctgggggcaggcagggccactcaattaatcaacaggtccccaaggtcgtaggagtcgaa

SEQ ID NO: 4969 - DNA, 397 bp, Homo sapiens
  MAP TO AL022146.1; EXPRESSED IN PLACENTA, SIGNAL = 0.91; EXPRESSED IN HEART, SIGNAL = 1.2; EXPRESSED IN BT474, SIGNAL = 1.1; EXPRESSED IN FETAL LIVER, SIGNAL = 1.1; EXPRESSED IN LUNG, SIGNAL = 0.94; EXPRESSED IN BRAIN, SIGNAL = 0.99; EXPRESSED IN BONE MARROW, SIGNAL = 0.97; EXPRESSED IN HBL100, SIGNAL = 0.98; EXPRESSED IN HELA, SIGNAL =   1
ttgagtgattcgggtgacaggggagtatattttcttaaggcctctcgtagccgctcaaggaaggaagagggatttttctttctttccctgagttatggtggacatcattgaataattcatcagtttttttctaattctccttagtccttctagaacataggtcaacaaatgtttatgactccagtccccatgatcggagtcaaggtcccagtggggatccatactggggatggcttgctgaccagtagggaatttgtccctttctttggttgtcattctatcatttacttgactaagataccaggtatctccaaactctcgggctgcagctaaagctgcattcttttcattaaaggacagggtttgatctaacagtagcatgacatctctccaagca

SEQ ID NO: 4970 - DNA, 486 bp, Homo sapiens
  MAP TO AC007358.2; EXPRESSED IN HEART, SIGNAL = 1.2
aagaagattttgtgacgctcgagcattatatgaatttaaatttcagtgtccataaatgaagttttgttggaacacagccatgtttatctgtttgcatggtgcctgcagcagcttttgcgctgcaagggcagaattgaatagctaccaccatgaagaccgtaaagccacaaagcccaagtgaaatatttactatctggaatagcggggactttccagaaaaagtttgctaacccctgatctagacattttctactcacccttcaggttgctcttggaacctgggaagtcttcgttggtgtgtcaagttgagggtagggatccctctcagacgtgccccaacttttctatgtatgtactcatctgtctgcctcagggacagtttcctcttgttctttgctgaatctccattgtctaccccaatgtctagaactatttgttgcaggggtgaatgacatttatgtctcctcccgcctagttggagagata

SEQ ID NO: 4971 - DNA, 475 bp, Homo sapiens
  MAP TO AL022344.1; EXPRESSED IN BT474, SIGNAL = 2.8; EXPRESSED IN BONE MARROW, SIGNAL = 2.9; EXPRESSED IN HBL100, SIGNAL = 2.7; EXPRESSED IN PLACENTA, SIGNAL = 3.5; EXPRESSED IN FETAL LIVER, SIGNAL = 3.2; EXPRESSED IN BRAIN, SIGNAL = 2.7; EXPRESSED IN LUNG, SIGNAL =   3; EXPRESSED IN HEART, SIGNAL = 2.6; EXPRESSED IN HELA, SIGNAL = 3.4; EXPRESSED IN ADULT LIVER, SIGNAL = 3.1
ttagaacagggtctgggagcatctgggtgagggacacgtctgttatttttattctagtttgtgttcccagccagcttaaggattagcagctaattgtaatgcagatgtaaccatttcctgtagcagtaccatgttattcagagacaaaggttgtgttgtgttttcttttgttttattgataatgataacagatttttgctaagattcttgtttaaatagaactttaaaaaagctaatgtttaaagaaaagaccttcataaacatacacaaaattttttcttctggaaatttaagaatgaagatatagagaaagaagttaaggaagaaattgaccccgacgaagaagaaagtgccaagaaaaagcatttggataagaagagaaaattgaaggagatgtttgatgcagaatatgatgaaggagaaagcacatattttgatgatcttaaaggagaaatgcagaaacaagcacaggtga

SEQ ID NO: 4972 - DNA, 433 bp, Homo sapiens
  MAP TO AL031010.1; EXPRESSED IN BONE MARROW, SIGNAL = 7.1; EXPRESSED IN BRAIN, SIGNAL = 5.3; EXPRESSED IN HBL100, SIGNAL = 7.3; EXPRESSED IN HELA, SIGNAL = 5.7; EXPRESSED IN PLACENTA, SIGNAL = 6.4; EXPRESSED IN ADULT LIVER, SIGNAL = 8.1; EXPRESSED IN HEART, SIGNAL = 6.1; EXPRESSED IN BT474, SIGNAL = 5.6; EXPRESSED IN FETAL LIVER, SIGNAL = 7.1; EXPRESSED IN LUNG, SIGNAL = 7.5
gaaaaaccccaccacatccagctatggtaatgatgtatctttgaaacccttccatcagtgattgagaacaaataggatgttctcaccacaattctaaatatgaaagattaatttttaaagcttttagaagagaatataagagaatgtcttcacgaccttggagtggagaaggatttcttaaataagacacaaaaagattaaacatgagaaaagaactgttacatttaattacataaaatttctcattatgtctgcctgcttctgccacttcttctgttttccccattaccctcctgttcagaaagttctgcaagctcattatcagtagttgaagatcttagagaagatgaagatgcaacagaagggtcaatcactggagctaaaaatgccaaaactgaggagaaagaaaatgagcccacagatatggcagaag

SEQ ID NO: 4973 - DNA, 420 bp, Homo sapiens
  MAP TO AL022476.2; EXPRESSED IN BONE MARROW, SIGNAL = 4.1; EXPRESSED IN HBL100, SIGNAL = 4.3; EXPRESSED IN PLACENTA, SIGNAL = 4.5; EXPRESSED IN HEART, SIGNAL = 3.5; EXPRESSED IN BRAIN, SIGNAL = 2.8; EXPRESSED IN LUNG, SIGNAL = 3.5; EXPRESSED IN HELA, SIGNAL =   3; EXPRESSED IN ADULT LIVER, SIGNAL = 4.3; EXPRESSED IN BT474, SIGNAL = 3.3; EXPRESSED IN FETAL LIVER, SIGNAL = 3.8
catttagacttggccttgccatgcaggtgtcctgtgacctcagacaaaataaactctgggtgtcaacaggctcattggtgccgctggcccagtgcccaactaccagcaagtgctgtccctggcctgggcagcccatcacagaacagcagcaggccatcactgctggctgagcctgacctgcgacggtgcaccccaaattctgctttcttttcctccactgaaagtggaatttgatttttcccagtatcgggaatggctgagcacgcaggccgaagacaatgttgtagatgtcatacaccaaagggcatgaaagagctgaaaacaaaaatgacagattcgacggcctgcagcagccagccaaaataaactgcccggctggctccctgcagtgctcctggtgggtggatgggtaaaagggat

SEQ ID NO: 4974 - DNA, 355 bp, Homo sapiens
  MAP TO AL031056.1; EXPRESSED IN BT474, SIGNAL = 1.3; EXPRESSED IN BONE MARROW, SIGNAL = 1.5; EXPRESSED IN HBL100, SIGNAL = 1.5; EXPRESSED IN PLACENTA, SIGNAL =   2; EXPRESSED IN FETAL LIVER, SIGNAL = 1.6; EXPRESSED IN BRAIN, SIGNAL = 1.1; EXPRESSED IN LUNG, SIGNAL = 1.3; EXPRESSED IN HEART, SIGNAL = 1.7; EXPRESSED IN HELA, SIGNAL = 1.3; EXPRESSED IN ADULT LIVER, SIGNAL = 1.6
tgataacatgtcaacactcagggaaactctaaggtggttattaattttggaggctatgatgtgcgcaggagagtagtagaagagatacaggagaagctggtgagagccagctcatgagaagcctcgtaaggagatgatgggggaactactgaaaagatttgaatgaagaatgatgtgaccacattgagtgttttaaaaatcattgtgaatgcaatatgcaggaaagattggagggacgtgaggctggagtcagagtgaacaaggaagatttattgccattggtccaggtgatggatgacaaaagctggaactcagctgatgaccacacagaggaagcagagtgagcagatgcaaa

SEQ ID NO: 4975 - DNA, 409 bp, Homo sapiens
  MAP TO AL022578.1; EXPRESSED IN HELA, SIGNAL = 1.2; EXPRESSED IN HEART, SIGNAL = 1.2; EXPRESSED IN ADULT LIVER, SIGNAL = 1.2; EXPRESSED IN BT474, SIGNAL = 1.4; EXPRESSED IN LUNG, SIGNAL = 1.9; EXPRESSED IN BONE MARROW, SIGNAL = 1.3; EXPRESSED IN PLACENTA, SIGNAL = 1.6; EXPRESSED IN HBL100, SIGNAL = 1.2; EXPRESSED IN FETAL LIVER, SIGNAL = 1.3; EXPRESSED IN BRAIN, SIGNAL = 1.1
tccactgatgctctgttgttgactgtgtcaacattgtctgtgttttccctgatcatattatagattcacatgtattcatgttactattctgattattataaacctcctaaatccaatggtaaatggaagcaataactaaacaaagaaacaaatgatgacttagcagagaccaggtcttttctggttcttttgtagagaagaaaagggatctatgaagtcagagttggggaagtgaggatgtacaagtgaggggataccttgcagagtctagaatcagcagggagctgcctcccttctcctctaggccatggggctgaaccctccacatcccccctctcctccatcaactacattatacagtccactgaaacacgcaggtctctggataagctgctgaaaggggacatag

SEQ ID NO: 4976 - DNA, 489 bp, Homo sapiens
  MAP TO AL031076.1; EXPRESSED IN HEART, SIGNAL = 5.1; EXPRESSED IN ADULT LIVER, SIGNAL = 5.5; EXPRESSED IN LUNG, SIGNAL = 5.8; EXPRESSED IN BONE MARROW, SIGNAL =   6; EXPRESSED IN PLACENTA, SIGNAL = 5.1; EXPRESSED IN HELA, SIGNAL = 5.2; EXPRESSED IN HBL100, SIGNAL = 4.1; EXPRESSED IN BT474, SIGNAL = 5.9; EXPRESSED IN FETAL LIVER, SIGNAL = 5.9; EXPRESSED IN BRAIN, SIGNAL = 5.4
tgaacctcagaagagctgccgaggggaagagggcccagtctgtgccttgtgttcttatgtgggagaatgtgtccacctggggcatgctacgggaagggattcgatgtggtgtaagaaggacttgatgaagattgagctgtctatggctattaaaggctggctcagtactattactgctatactatcattaccatcatcatcaccatcatcatcgtcattaccaccaccgtcattaccatcaccgtgattactaacaccaccatcaccatgctcaccatcaccatcaccattatcatcaccatccctaccataatcaccaccatcatcaccatgattaccattatcatcgccatcattaccatcaccattatcaccatatcattaccatcaccatcatcaccattgccatcattaccatcaccattatcaccatcaacaccaccatcaacaccgtgatcaccattatcatcaccaccatcatcaccgtta

SEQ ID NO: 4977 - DNA, 418 bp, Homo sapiens
  MAP TO AL023281.1; EXPRESSED IN BONE MARROW, SIGNAL =   2; EXPRESSED IN BRAIN, SIGNAL =   2; EXPRESSED IN HELA, SIGNAL = 2.4; EXPRESSED IN HEART, SIGNAL = 1.8; EXPRESSED IN FETAL LIVER, SIGNAL = 2.2; EXPRESSED IN ADULT LIVER, SIGNAL = 1.8; EXPRESSED IN LUNG, SIGNAL = 2.1; EXPRESSED IN PLACENTA, SIGNAL = 1.8; EXPRESSED IN HBL100, SIGNAL = 2.8; EXPRESSED IN BT474, SIGNAL = 1.8
ctagctgcattccttggctcatgaccacttcctcccatcacttcaaacttatgcttcagtcttcaacattttctactgccctctcttataaggacctatctgattacattgggcccacacacataggcccccaacttgagattccgaatcacattgacaaagtcctttatcatgtaaggtaacatttcttacaggtttcagggattagggcatggacatttttggggtgccattattcagcctaccacgctgggcaatctcaggctagtcacttaacttttgcaagcctagaataaatatttaactcttcaatgcacagacactgatgaagatctacaagcatcaagaccatccaggaaagtatgacctcaccaaattaactaaacaaagcactaagggaccaagcctggagagacag

SEQ ID NO: 4978 - DNA, 1954 bp, Homo sapiens
  MAP TO AC004600.2; EXPRESSED IN BRAIN, SIGNAL = 1.6; EXPRESSED IN HELA, SIGNAL = 1.2; EXPRESSED IN HBL100, SIGNAL = 1.3; EXPRESSED IN HEART, SIGNAL = 1.4; EXPRESSED IN BT474, SIGNAL = 1.4; EXPRESSED IN FETAL LIVER, SIGNAL = 0.94; EXPRESSED IN LUNG, SIGNAL = 1.7
tttcaagatttagaaaacccattctttttcaaagatagcatgaccattatataatacaaccgatactttgtagaacacatctataaacttgcacaggaacaacaaaagtataatacttatataagatcagaaatgtccatgtgttcctatgctatatggtatcatttttttcagtcacttttaaaatgaattcactgaactgtatcatgatatccccattattaggtttttaatctagcagcccaacttacccggacaagtgcatcatctatgatatggtcacgtctaactttgagtctcaaatatggattcaactgctgtccttgaactaagctgtagagaacagtgattcttcgttcactgtacatgcgaattctattgtcataatataatcccaaattctttgtgacagcattcaatataaagggacatgtcataaaagagaatttgttctctgtttctactttgaaaaaagtataatctttatccatttctagaacctcattcagtggttcattaataaactcttcaaaagggataagtggttttcgacaatccagggttttaacaccaagttcagtttccagggggtccactcgaggacctttcttgtttcttctttcttctcccaaaagttcctgaagtgtcagctcgctggactcagggatgggctcttcatcatcttcttcattgtgatttgtgtccacttcccctcccactacatttgcatagtaaaccattttcaagcacttcgaagcagcaacaatggcatcatcatcattcactagatttcgactgttaaattcattgcttatgactttataagtaataagttgctgaaatgtctccatcattctccgaatctggtctgcattgtatttagaccacagtctgatcagttttccttgggctgcaaggggtagcttgctcatcgctttgcaaaataatggcaaagccatttccagatattcaggactgtggagatttctattctccattacgataatgaacaaattcagataattaggatctcgagagtatacattgtgatacgtcaagtcacattccacgttaggtgacaaatatacaagtgcattgagaaaggcagtttcaattttttcattagagagcaatctggtgtagacccttctaatggcatcaatatccacagacacatcatcagggcctaatttttgcaaattgttgtctccctgtgagctatcacctatccttgaggaagatgcttctgagtcttcttccatagcagcagcagaacatgcagctttttccttttcatcttcatctttgtcttcatcttttgcttgaagagatttcagttcttccttggtgtgttgtttaactttccggaagctctgtaccaatgcctcagcactagaaaaaactcttccaataacacggattaaaggggaataatcctctctttctctacataattcaagaatttcatataccttctcttctgttaagtaagtcacatctagaaaatcagaggaaaaaagagaacatttattttcataatatgtatgtttactctgttgcaaaaagttctaaaagtaaaacagccaaacattctaggctcaatatcatttatgatatacaactcttaaagtatctaatacttagattcagcaaacaaaatttaatgcttacctatttttttcaatgaactacctacctataccaatgacctcacccatgcttttacattctttcaacaatgtataactcttaataagatcatgagtttaaactttctttataatcaagatatctattaatgtatagctttaattataaatatgaaccaatatgtcatgtactgattaatcataatacagctcttaaaacctcactgtagaacacacagaaatactactaatctgtgagttttcttgtttcagtactctgttctccaaagactaagaaggcaagg

SEQ ID NO: 4979 - DNA, 388 bp, Homo sapiens
  MAP TO AC007156.2; EXPRESSED IN ADULT LIVER, SIGNAL = 1.1; EXPRESSED IN FETAL LIVER, SIGNAL = 1.1; EXPRESSED IN PLACENTA, SIGNAL = 0.89; EXPRESSED IN HELA, SIGNAL = 1.1; EXPRESSED IN HEART, SIGNAL = 1.1
gctgacatggacccctaaaccatggactctctatggggggcagggaggcaatgttgcctccaagggcagcaaaaattgattcttgagggagaaaacaatttggatgttataatggtttgtggctctctaaaacgcgatgttattcaacaaaattatgtttctccgtatttcacttctctcattagggagaatttaaatttcatttgatttttcttcttagggaggtgatcatgaagaaatggttgagaaacattgcaaggggggatctacccagaattgaaaggcccctgagaatgcccccagtcctacctccacacacatttctccctgaacctgctcagtgtgagctgctaactggcggtgggcaccttcccatcagtcctgaggt

SEQ ID NO: 4980 - DNA, 472 bp, Homo sapiens
  MAP TO AC008163.1; EXPRESSED IN ADULT LIVER, SIGNAL = 0.71; EXPRESSED IN HEART, SIGNAL = 0.89; EXPRESSED IN HELA, SIGNAL = 0.7
ctgagggtgtccaggttgagggatctagagttctggaacataaaattaataaggaagaatttatcaatatgaatattgattaataccctagcacaaaccacaagaaacagtgttaacatattcctggaatcttggaaaaatgaaaaggccacaccaaatgaagaattatagaattctcatagcaaatggtcaagaagggatcaaacagctcacaaaaatgagattctagagtaaatacaccatataagggtagaatactcacctccaagctgtgttccacaggaggacccacagaaactgcacttactaaatcaataagaaattcattggtgagagtggcatcaccattgagaacctcagtggtagctgttttctgtaggccagggctgatagtaggaggggtcattatagaaactgggcacaatgattgcaatggtgatattaagatgctagaatgagagaagccgtgcac

SEQ ID NO: 4981 - DNA, 500 bp, Homo sapiens
  MAP TO AC010904.1; EXPRESSED IN BONE MARROW, SIGNAL = 0.95; EXPRESSED IN HEART, SIGNAL =  50; EXPRESSED IN BRAIN, SIGNAL = 0.96
gtctggggctggagtagaggggagcagaaggaagtggaaaacaaggactcactgccttttcctgattcagctgcggttcctttgccgtttcctgtagccggtaagagggctcctaaagggtccctgggaacagctgtgtggccagcgcctgcataatccatcctcttcacctgtgctctgttcaaggctcctggaaaccctgcagaaaatgcacttccttacttgttaacctctatcaccacctaattcaggggactaaaagatttgcaaggaaatcaacatattacctgtagttgaggcttcttggagaggaacccaccttccccctgcgcacatacacccagttggcccagcgcgtttggggcacagcaggtgtctgcgatggcatcaggctcatgtgtccaatggcccatcctacatcacctgtatctggggaggatccccaatcaaaatgcatgtgaaggtgaatatgaagattagccaagcacaaatgataatga

SEQ ID NO: 4982 - DNA, 474 bp, Homo sapiens
  MAP TO NM_006902.1; EXPRESSED IN ADULT LIVER, SIGNAL =   1; EXPRESSED IN HEART, SIGNAL =   1; EXPRESSED IN BONE MARROW, SIGNAL =   1
cgtgggtaagtcacagatcccatatctggagacctgattactggagaatttcatggtcttgttgtaatagtcttgacctttaagaatggccctcattgagggaaggcggatggcatgtttctattgttctacggagaattccatagccatcttatatcttctttgggaaggcattatatagtaaaatcaagcagaatttcattcatgtaaccccttcttctttgtttttcctctctttccttatgccttcttgcctcctaacaatcctccaggtgtggtttcagaaccgaagagccaagttccgcaggaatgagagagccatgctagccaataaaaacgcttccctcctcaaatcctactcaggagacgtgactgctgtggagcagcccatcgtacctcgtcctgctccgagacccaccgattatctctcctgggggacagcgtctccgtacaggtgaatgactggcccactct

SEQ ID NO: 4983 - DNA, 419 bp, Homo sapiens
  MAP TO AL022344.1; EXPRESSED IN HEART, SIGNAL =   6; EXPRESSED IN FETAL LIVER, SIGNAL = 7.5; EXPRESSED IN ADULT LIVER, SIGNAL = 8.9; EXPRESSED IN BT474, SIGNAL = 6.6; EXPRESSED IN LUNG, SIGNAL = 8.8; EXPRESSED IN BRAIN, SIGNAL = 5.8; EXPRESSED IN PLACENTA, SIGNAL = 8.2; EXPRESSED IN HELA, SIGNAL = 7.5; EXPRESSED IN HBL100, SIGNAL = 7.1; EXPRESSED IN BONE MARROW, SIGNAL = 7.4
ccagagagagaaagcatgggagctaatttctccctggctcccaatgaggaatgaggacaggaaaagtcatgcagcatccaggctccttggcgcaactgggtcccaattcccatcctcctgccatcagcctcggtctgtccccaccttgccactgcccccgaattaaatgcttccgagcattttctggaactgtttttctcacatcgcccacacattcttattcccttagtcgaggctctgtccaccttcagcccaccggacagtcaattttcccagccgctggtgagtttctggtttgccaagacccagaggctgggggaagccagacagcaggtggcagctcttccggccgaggagaggagagggacagggctggctcctctagatgaagaggtgagagagctgtgctaggatcaggc

SEQ ID NO: 4984 - DNA, 472 bp, Homo sapiens
  MAP TO AL031431.8; EXPRESSED IN BRAIN, SIGNAL = 1.4; EXPRESSED IN PLACENTA, SIGNAL = 0.72; EXPRESSED IN BT474, SIGNAL = 0.63; EXPRESSED IN LUNG, SIGNAL = 0.6; EXPRESSED IN HELA, SIGNAL = 0.72; EXPRESSED IN HEART, SIGNAL = 0.86
attcagcagtgaagcattggcatctaccacgttcaaagcacagtgctagttccattccacctggggcccacaccgacattcccacctcactttaggccaactgagggttcctcctgacagcagctggtctgtgtgcatatttcctgaagattcatcccttgttgcttagcaaccgtaatagttccagtgtatatttgtgggtgttctcttttaaatctaaagcattcaggaaattgacaatgcacatgattagctgctgagcactataattagtctgtggcgggatagagggagatgcggcctccttggcccccttaccgcgtaatgatttggagaaaatggatttcatttcaggtatgcagaacatgcacgataaagggatgactgtccagcctgaacttaaagcttctttttcctatggggctctggaaaacaatgacaacatttctgagatctacgctcctgccaccct

SEQ ID NO: 4985 - DNA, 352 bp, Homo sapiens
  MAP TO AL023279.1; EXPRESSED IN BONE MARROW, SIGNAL = 1.4; EXPRESSED IN HEART, SIGNAL = 1.1; EXPRESSED IN FETAL LIVER, SIGNAL = 1.5; EXPRESSED IN ADULT LIVER, SIGNAL = 1.1; EXPRESSED IN BT474, SIGNAL = 1.4; EXPRESSED IN BRAIN, SIGNAL = 1.4; EXPRESSED IN LUNG, SIGNAL = 1.1; EXPRESSED IN PLACENTA, SIGNAL = 1.3; EXPRESSED IN HELA, SIGNAL = 1.2; EXPRESSED IN HBL100, SIGNAL = 1.5
gaaggagagaacacctccaaactcaatctacaaggctagtattaacatgataggaaaaacagaaaaagacacatcgaaaaaagaaaagtataggcaaatataactgatgaatattgatccaaaaatcctcaacaaaatactagaaaaccaaattcaacaacacaataaaaagatcattcatcacgaccaagtgggatttatcccagggattcaaggatggttctacatatgtaaatcaatcaatgtgatacatcaaatcacagaatgaaggaaaaaaaacatatgatcatttcaattgatgctgaaaaaacatttcataaaattcaacatcacttgttggtgaaaaccctcg

SEQ ID NO: 4986 - DNA, 450 bp, Homo sapiens
  MAP TO AC004852.2; EXPRESSED IN FETAL LIVER, SIGNAL = 0.88; EXPRESSED IN HEART, SIGNAL = 1.2; EXPRESSED IN LUNG, SIGNAL = 6.2
ctcatgacaataacaaagcatatgtactttagatgaaaaatattaacacatcaaaattgtaattgtggacaaaaatgtcttgaaaaaattgctatatgctgaaattctcagaatagaaagtgtataatatactctccctgatgttaatatttttctgaaataacaattttattcatcaggcaggtaaacatccatctccttttttacatctaaacaatatagttcaggatttcctaaggttctgaagttaataaatgatggaaccaggactggaaccccaggtcttacgtcacttgtcttgctttgagttcttcgtatcaagccaatgggcatcacattgatcgccatgttagcagcaatgataataaagatatttccatttcattaaatgttcaaatttgtaccaggtacagagtaaaaagtatcaagctacattgtatcctttttctg

SEQ ID NO: 4987 - DNA, 434 bp, Homo sapiens
  MAP TO AL031229.1; EXPRESSED IN PLACENTA, SIGNAL = 1.7; EXPRESSED IN ADULT LIVER, SIGNAL = 1.6; EXPRESSED IN BT474, SIGNAL = 1.2; EXPRESSED IN BRAIN, SIGNAL = 1.3; EXPRESSED IN HELA, SIGNAL = 1.5; EXPRESSED IN HBL100, SIGNAL = 1.1; EXPRESSED IN HEART, SIGNAL = 1.3; EXPRESSED IN FETAL LIVER, SIGNAL = 1.3; EXPRESSED IN LUNG, SIGNAL = 1.6; EXPRESSED IN BONE MARROW, SIGNAL = 1.3
ccttttgaatgaaggtcccctcgaggaaggaccccactacattactgacaaattatgcagtgaatctttctcccatccttcctcaagaagacccctcgccttttaccagggcaactgtgcattggggaaaggaaaatgatcagacattttgggggctactggacattggctctgagctgatgttgattccaggggacccaaatcgtcattgtggtcctccagttaaagtaggggcatacggaggccaggtaattaatggagttttagctcagatccgacttacagtgggtccctggactcatcttatggtcatttccccagtgccagaatgcataattggcatagacacacttagcagctggcagaaccctcacattggctccatgactggtagggtgagggctgctatggtgggaaagaccaaatggaagcca

SEQ ID NO: 4988 - DNA, 438 bp, Homo sapiens
  MAP TO AL031407.3; EXPRESSED IN BONE MARROW, SIGNAL = 1.4; EXPRESSED IN LUNG, SIGNAL = 1.1; EXPRESSED IN PLACENTA, SIGNAL = 1.2; EXPRESSED IN HEART, SIGNAL = 2.1; EXPRESSED IN FETAL LIVER, SIGNAL = 1.3; EXPRESSED IN ADULT LIVER, SIGNAL = 1.1; EXPRESSED IN BT474, SIGNAL = 1.5; EXPRESSED IN BRAIN, SIGNAL = 1.3; EXPRESSED IN HBL100, SIGNAL = 1.3
tggagatttcatgtatcctggtgagactgagaagtacagaaagagaggggctaaaaaggccttttagctgttctatcattatatgggtaaaaccaatcaagatgtggtacagacgatgctgtgtggtcactaaatctcatttccttttctttctcctaggcacaaaggaatatatgcttctcagcttcttcttcttcttttcttcttcttctcctcttcttcttcttgttcttgttcttcttcttcctcttcctcttccctttccccttccccttctgcttctccttcttcttattcctcttcttcctcctcttcctcctcttcttctccttcttctccttcttcctcttcttcttcttcttcttcttcttcttcttcttcttcttcttcttcttcttcttcttcctcttcttcttcttcttgttcttctccttctcc

SEQ ID NO: 4989 - DNA, 470 bp, Homo sapiens
  MAP TO AL033520.9; EXPRESSED IN BONE MARROW, SIGNAL = 2.1; EXPRESSED IN HEART, SIGNAL =   2; EXPRESSED IN FETAL LIVER, SIGNAL =   2; EXPRESSED IN ADULT LIVER, SIGNAL = 2.5; EXPRESSED IN BT474, SIGNAL = 1.5; EXPRESSED IN BRAIN, SIGNAL = 1.8; EXPRESSED IN LUNG, SIGNAL = 1.8; EXPRESSED IN PLACENTA, SIGNAL = 2.3; EXPRESSED IN HELA, SIGNAL = 2.1; EXPRESSED IN HBL100, SIGNAL = 1.8
agtctaccatgatgggctccccaggacttaaatcattcatggaaacttctagaagtttgagcaagtataatagtattgagaggcctagcatgtcaaaaaagctaacctgctttcacatgatgctgaagcgcagcaagccttgccctatgcacctcggcggcacctatgttttgggatggcatctaaagcactgtggagggcatggaagaatatgactggtgaggccctgtggcttttgaatcccccctcaaaggcctctctccattcctttaaaaactgattgcatgtgtagacatgccgggcactgtgctggatttggaggttttgatgaatagaaacagcccactctatttggtgaaggagccaaatgaggtcctgtttatggagctactcacgcatgtactcagcagacacgtgaagtgcgccttctaggggctggagatgcagatggaaaaagacaaagtctgccc

SEQ ID NO: 4990 - DNA, 421 bp, Homo sapiens
  MAP TO AL031665.18; EXPRESSED IN BONE MARROW, SIGNAL =  25; EXPRESSED IN HBL100, SIGNAL =  27; EXPRESSED IN PLACENTA, SIGNAL =  19; EXPRESSED IN FETAL LIVER, SIGNAL =  30; EXPRESSED IN BRAIN, SIGNAL =  26; EXPRESSED IN LUNG, SIGNAL =  45; EXPRESSED IN HEART, SIGNAL =  38; EXPRESSED IN HELA, SIGNAL =  33; EXPRESSED IN ADULT LIVER, SIGNAL =  11; EXPRESSED IN BT474, SIGNAL =  44
tccagttttgtgaggctggcatgaggtgtatacatttgtcaggggcaaatttatacgtgtgaattatcctatgcagcaaatgctacacatctgcttgtagtccatttagaagcatttgtggtggacatggaggggcccgacttgtcatactcctgcttgctaatccacatctgctggaaggtggacaatgaggccaggatggagctgctgatccacacggagtacttgcgctctgggagcacgatgatcttgatcttccttgtgctggcaccagggcagtgatctctttctgcatcctgttggagatgcttgggtacatggtggtgccactggccagcaccgtgttggcatacaggtccttgtggatgcccacatcacaccttatgatagagctgaaggtggtctcatggatgctgcaaaa

SEQ ID NO: 4991 - DNA, 444 bp, Homo sapiens
  MAP TO AL034412.1; EXPRESSED IN HBL100, SIGNAL = 1.9; EXPRESSED IN HELA, SIGNAL = 1.3; EXPRESSED IN PLACENTA, SIGNAL = 1.5; EXPRESSED IN ADULT LIVER, SIGNAL = 1.8; EXPRESSED IN HEART, SIGNAL = 1.7; EXPRESSED IN BT474, SIGNAL = 1.7; EXPRESSED IN FETAL LIVER, SIGNAL = 1.4; EXPRESSED IN LUNG, SIGNAL = 1.5; EXPRESSED IN BONE MARROW, SIGNAL = 1.8; EXPRESSED IN BRAIN, SIGNAL = 1.1
ttggtacaagattagaaacgaaagctcattattaaaattatattcttcaaatgagggtagtgccttccttatcctgtttctctttcctatttctattatttgttatctttcacttgcacttttggacaccctgtactgtcttctatcccttgaagccagacttctagggtatggtctgcattgtgaggggccctgatacccctatctcctcggtccaaatactcaccttttgttttctgcttctgctgactctttcactacatcacctctcagccaagaccaccacctccacctccacctccacctctatctccaccattgtccttcacctctacctcatttccatcattgtccttgcccaaatgcctggccttcaagttgtctttgctgctgttttttattcttttctgttatcgctagatgagaaccacgtcatgtcagcat

SEQ ID NO: 4992 - DNA, 393 bp, Homo sapiens
  MAP TO AL031683.1; EXPRESSED IN BONE MARROW, SIGNAL = 2.5; EXPRESSED IN HBL100, SIGNAL = 2.8; EXPRESSED IN PLACENTA, SIGNAL = 1.9; EXPRESSED IN HEART, SIGNAL = 3.4; EXPRESSED IN BRAIN, SIGNAL = 3.6; EXPRESSED IN LUNG, SIGNAL = 2.6; EXPRESSED IN HELA, SIGNAL = 2.4; EXPRESSED IN ADULT LIVER, SIGNAL =   3; EXPRESSED IN BT474, SIGNAL = 2.2; EXPRESSED IN FETAL LIVER, SIGNAL = 2.6
tggtaagttgaggggagtggattgaaacagactccttgagagttaacttgatcccactggattgtaagataataggaccacgggaaaacagtgtagtgagaagcagaaatggaaaaaaaaatgtttccaaagtgggaataatagtctgagtgcaagagagaaaatccagattaaaaaggaagccaaatttgccaatagagaaacaaaatggagaaagaggaagaagacaatatggaagaatgagatttatgtcaggaagagagagcacaatgatggagaaattaataccagaggaaggcagaaaggatgaggaaatgatcatgggtgtggctgggaactttagcagaaaaaaaagatgggaatgtagagaaagggaggatgaaggacaaacga

SEQ ID NO: 4993 - DNA, 391 bp, Homo sapiens
  MAP TO AL031584.1; EXPRESSED IN BONE MARROW, SIGNAL = 4.7; EXPRESSED IN BRAIN, SIGNAL = 3.6; EXPRESSED IN HBL100, SIGNAL =   5; EXPRESSED IN HELA, SIGNAL = 4.4; EXPRESSED IN PLACENTA, SIGNAL = 5.2; EXPRESSED IN ADULT LIVER, SIGNAL = 5.7; EXPRESSED IN HEART, SIGNAL =   4; EXPRESSED IN BT474, SIGNAL = 4.3; EXPRESSED IN FETAL LIVER, SIGNAL = 5.8; EXPRESSED IN LUNG, SIGNAL = 4.5
ggacagagacctgcttggagatttctcatactcatccttagatctgctttgagaacaagaacaggagcccagatcagatttgggcatagatttgctccttgagctagatttcctgccttttgaacgagaacgtgatcgacctttgctccgcaacctgatcaggagtgactttttgagatacttcgagatctactgtggctgctcctgcgactcctacttcgtgaccatcttctagatctatacctggatctgcttccagaatcagatcgcctatggcttgtgcctggcttaccttcaataagcctaatatttctgcaccatccagtttgtccaaagcaagcttcatgtcaaaataggagtgaaactcaacgccctcacttgtgcattcctt

SEQ ID NO: 4994 - DNA, 483 bp, Homo sapiens
  MAP TO AL033533.5; EXPRESSED IN BONE MARROW, SIGNAL = 3.7; EXPRESSED IN HBL100, SIGNAL = 2.3; EXPRESSED IN PLACENTA, SIGNAL = 2.9; EXPRESSED IN HEART, SIGNAL = 2.3; EXPRESSED IN BRAIN, SIGNAL = 2.6; EXPRESSED IN LUNG, SIGNAL = 2.5; EXPRESSED IN HELA, SIGNAL = 1.8; EXPRESSED IN ADULT LIVER, SIGNAL = 2.9; EXPRESSED IN BT474, SIGNAL = 2.6; EXPRESSED IN FETAL LIVER, SIGNAL = 2.4
ctgcacctactctgccttccaaatctcttgctaatacatctatttcatagaatttaattcacataaaactcgagaagcaagtgaatcttggaaatgttgtcactttcagcctctgaaatagatgaagaaatacctagaagagtatagtaatagatgctgactgcaaattatccacaacaagcaaagtatgaaaaagctttagataagatatgagaatcatcagcaataagatggtaattgaagccagtggagagcatgtgatcaaggggaagatggcagtggaagaaaaaagtgtggaggatagaaataattcaaatttaaggaatgatcagagaaagaaaagctcctcctgctgcagactgaaatgggaaggccagagggagctcagaaccgaggtttgagaaaacaaaaaaaaagaagaaaaaaaaaatgccagagacagagaacaagaacaagaagaagaggaagaggcggaagagaaag

SEQ ID NO: 4995 - DNA, 476 bp, Homo sapiens
  MAP TO AL031687.14; EXPRESSED IN FETAL LIVER, SIGNAL =   1; EXPRESSED IN HEART, SIGNAL = 0.85
ggagttccagactgtttcatccactgtctgtgacacatctcaacatgcacgtctcaggaacatctcaaacataacacatccaaaaaggaactcttgctgcctccccaactcttcctccccaaatttgctccatcgtagtaagtatcacaccaccatccagtgttaaaccaaaaacctaagagtcatcttaaacttctggacggaattagaatggagatggaaatgatgtgaagtggtcaatttagagagttatttagaaggtaaagtggaccagacttaatagattgcccattgggggtgcagggatgagagatgccaagcatgacttccagccttctggcctggaacacttgacagatgagggtgtcattcacgaagatggaaaaccccagagaagagtcagttttagggaagaggaatatgttgagtttgaagttttttggaggcatctaagtggaggcatgagagagcagctc

SEQ ID NO: 4996 - DNA, 462 bp, Homo sapiens
  MAP TO AL031664.1; EXPRESSED IN BT474, SIGNAL = 1.3; EXPRESSED IN FETAL LIVER, SIGNAL = 1.8; EXPRESSED IN BONE MARROW, SIGNAL =   2; EXPRESSED IN HBL100, SIGNAL = 1.6; EXPRESSED IN PLACENTA, SIGNAL = 1.4; EXPRESSED IN HEART, SIGNAL = 1.5; EXPRESSED IN BRAIN, SIGNAL = 1.3; EXPRESSED IN LUNG, SIGNAL = 1.5; EXPRESSED IN HELA, SIGNAL = 1.4; EXPRESSED IN ADULT LIVER, SIGNAL = 1.7
gcaagcttcaaactcccaacaaggtagtcagcctagttcataccagattcagtggctgtagcccaggagagaacgaggtatggggcacgtatgtctcagagcagagagatctgcctagaaagacaaagactgagtgagaagctatagtgtgggctatcagagggcagcctgggagcccaagaggcctcggacattggtcagggattggcaaactctttccgataaaaggccactttgtaaatactttaggctttgtggggttttgtcacaacgacttatctctgctgttagagtgcaaaagcagcgactggcaattcataaacaaatggatgtggctgtgttccgatacaactttacttacaaaaacaggccatgggctgatttagctggtgggccatattttgtgacctttgctgtcggtgatcaaagaaagaggacacaacaggagaagtcaggtgaggc

SEQ ID NO: 4997 - DNA, 375 bp, Homo sapiens
  MAP TO AC009396.3; EXPRESSED IN FETAL LIVER, SIGNAL = 0.89; EXPRESSED IN HEART, SIGNAL = 0.94; EXPRESSED IN LUNG, SIGNAL = 6.6
tagcagtgggaagggagaaggggtatcaggttgtataagcaaagtgatttctctggcttatgcttctataaatttgtttataaccacaaacctctggtaacagggcatttgcagaaggaaaatatttatagaagtctaccttgccaattacattgcaaaaaataaattgcctttagagtccttaaaaaaattcaaatatgttttccctctccactgccacccccacatcaataatttgcagctcgaggtctatgtctaaaggataagagtttccacaagttgattgtggatatctgaaatcaaatttaattacatgtgatggatcaacttcttgaactcccatatttctttcattgtcttcttcggattccatgc

SEQ ID NO: 4998 - DNA, 438 bp, Homo sapiens
  MAP TO AL034423.16; EXPRESSED IN HELA, SIGNAL = 1.6; EXPRESSED IN HEART, SIGNAL = 1.7; EXPRESSED IN FETAL LIVER, SIGNAL = 1.6; EXPRESSED IN ADULT LIVER, SIGNAL = 1.3; EXPRESSED IN BT474, SIGNAL = 1.7; EXPRESSED IN LUNG, SIGNAL = 1.4; EXPRESSED IN PLACENTA, SIGNAL = 1.2; EXPRESSED IN HBL100, SIGNAL = 1.7; EXPRESSED IN BRAIN, SIGNAL = 1.6; EXPRESSED IN BONE MARROW, SIGNAL = 1.8
tcgggaaggttcacttgttctttccttctcaccgcctctccgtgtcctcccaccccacccactcggggttttctgcttctgagccctgggccttggctacaaacaagaatcagaaaggggaaggccttgctgggcctgatcatggtgatccccaggctggggcggctgctggggcagtgggggtgctgcgtggctcaagagaaacagccctcgcctgagaattggggaaccaggagatctaggcccctgtgacctctgctatgtgacctctgttgaggtccttctccttcctgggcttcacggtcttcttctgcacaaaaggagccaagggcatgtaaccctggtgtgttccgttccccttctgagccttggtcttttcaaggggcaggggagggcagctgtcctggttctgggtcagggtaggtcaggagcagcttg

SEQ ID NO: 4999 - DNA, 460 bp, Homo sapiens
  MAP TO AL049833.3; EXPRESSED IN ADULT LIVER, SIGNAL =   1; EXPRESSED IN FETAL LIVER, SIGNAL = 0.96; EXPRESSED IN BONE MARROW, SIGNAL =   1; EXPRESSED IN HBL100, SIGNAL = 1.1; EXPRESSED IN HEART, SIGNAL = 1.2; EXPRESSED IN HELA, SIGNAL = 1.1; EXPRESSED IN PLACENTA, SIGNAL = 2.1
aaccacccatctgagtgaggtgcgaggactctcagagcttcccttgagtcttacagagaagatatgtgtggcaccagggattccccaaggaaaatgaacaaactttgttataaggctggaaggtggttccaatgtgccaaggcactttgcaaagctgcagtgcttgcatggatgagggggccactgtttcttcccctcctccacccagcagagctaatctctctctcctggtttgagctttgtgaggtcctgtacagagagcaatgtaattattagtttgactcaagcgagggcagggatacagcacgattcacttctgcctccagcatctctcaccacgatggtcacatggaggttcttggagggctgctgaccaaccacagcatagagtcgcttctgaaccagtacccaagaattccaggttccatgtttaagaacagccaaggtcagggactcagtc

SEQ ID NO: 5000 - DNA, 397 bp, Homo sapiens
  MAP TO AC010680.3; EXPRESSED IN HEART, SIGNAL = 2.3
ggtcagagagggacgaaaaggaatttgaggaacttgtatcatttattcagcaaagactgtcacagacagaggtaaaaagaattatgttgataataaaatgaacaagttattattgagtattattataagggaaggagtaacaaatgtgttttaattctttattctcctagcctgtcactctgatcaaggacattgaaaatcagacagttttgaaagataatgatgctgtctttgaaattgacattaaaattaattatccagaaatcaagctttcgtggtacaaaggaactgaaaaactggaacccagtgataaatttgaaataagcattgatggtgaccgacatacactcagagtcaaaaactgtcaacttaaagaccagggcaattatcgattggt

SEQ ID NO: 5001 - DNA, 361 bp, Homo sapiens
  MAP TO AC010680.3; EXPRESSED IN HEART, SIGNAL =   3
tccagcaccattgatagcactaactcggaatttgtattcttcacctgcttgtagatcagtgactgtatatcttgttttcacacatgcctctgcattcaccttgtgccagtctcctaagtcggccttacacatttcaataatatacccaattatttccctgccaccatcaaacactggtttggaccattctaagctcacagttgtctttgatgtgtctgttactttgaccactgtgggaggacctggtgggttgacgggctctctacatttaatgagtcttgagatgccacttgcaggtccaactcctgcagcattttcagccatgacatggaattcatactcattgccttctgtcagacca

SEQ ID NO: 5002 - DNA, 446 bp, Homo sapiens
  MAP TO AL050342.36; EXPRESSED IN BT474, SIGNAL = 0.91; EXPRESSED IN HEART, SIGNAL = 0.95
taccactgcgaaagcacaacagctggcaggggaggggcaaggcaggtgagcgggtgcttccaggcacctccctgcagagcagaggcggtgtgggtggatgacgcccgcagccactgggatccttcatgaacccgctccactcagaacggcccccatctcagattccggcaatgacctggaccccgggccccccacccctcgccactgcaccaagcacaggagctcccatggccgctttcaagtttgggggtggggctagattcagctcagcagctgccacataaaagggcccattgcagcccatataagcacagacgcagcgtttatctctcctgtcactgatggcggctccatttgggggctttttgttgttgcttttttttttcccttggctgctgttactactcagttcaatatttaattttcccataaaccaaagagttgca

SEQ ID NO: 5003 - DNA, 403 bp, Homo sapiens
  MAP TO AC010680.3; EXPRESSED IN PLACENTA, SIGNAL = 0.92; EXPRESSED IN HEART, SIGNAL = 4.2
tatgaattccgggtttctgcagaaaatgaaattggtattggagatccaagcccaccatccaaaccagtctttgctaaagatccaattggtatagtattaatggatttattcagttttcatgttatctaactttgttttcagctatatgctaattcgttttttacttttattttttagctaaaccaagtccacctgttaatcctgaagcaatagatacaacatgcaattcagtcgatctaacttggcagccaccacgtcatgatggtgggagcaagattctgggttatattgttgagtaccagaaagttggagatgaagagtggagaagagccaatcacacccctgagtcatgtcctgaaactaaatataaagtcaccggtcttcgggacggtcaaacctataa

SEQ ID NO: 5004 - DNA, 399 bp, Homo sapiens
  MAP TO AL078591.17; EXPRESSED IN PLACENTA, SIGNAL =   1; EXPRESSED IN BT474, SIGNAL = 1.4; EXPRESSED IN LUNG, SIGNAL = 1.6; EXPRESSED IN HBL100, SIGNAL = 1.5; EXPRESSED IN HELA, SIGNAL = 2.3; EXPRESSED IN HEART, SIGNAL = 2.3; EXPRESSED IN ADULT LIVER, SIGNAL = 1.5; EXPRESSED IN FETAL LIVER, SIGNAL = 1.7
tttaagaggaaaatgggcaatctaataataacaaataacagtcataagtgcctaaaggttttttaattgattagctacttacgaataatctccatctgtgaagtgtagatccaaggataatagaaaattcatttcctcaagggtttcttcaatctgaaaagaaattacactatgagatactttttgaaattttatagaaagttagaaataacatcttgaggcattacaaaaaatatttacataaataaatatgaagagatgtttacctttctttcatccaatagcatttttactttgaagatcataacatcatttaaaacaacctcttcatttttgtacaaaatttgaaatgttttactgcaaattagagaatcatgaactgaggctggaaaggctaaa

SEQ ID NO: 5005 - DNA, 402 bp, Homo sapiens
  MAP TO AC010680.3; EXPRESSED IN ADULT LIVER, SIGNAL = 1.3; EXPRESSED IN BRAIN, SIGNAL = 0.95; EXPRESSED IN HEART, SIGNAL = 2.9
cccgagagtgatggaggtagtgaaatatctggatatataattgaaaggcgagagaaaaatagcctaagatgggtgcgtgtaaacaaaaaaccagtttatgatctaagagtgaaatcaacaggacttcgggaaggatgtgaatatgaatatcgtgtttatgcagaaaatgctgctggcctaagtcttccaagtgaaacctctcccttaattagggcagaagatccagtgttcctaccatctcctccatccaaacccaaaattgtggactcaggcaagacaactataactattgcctgggttaagccgctgtttgatggtggggccccgataactggatatactgtagaatacaaaaaatctgatgacactgactggaaaacttccattcagagcttacgaggg

SEQ ID NO: 5006 - DNA, 429 bp, Homo sapiens
  MAP TO AC010896.2; EXPRESSED IN PLACENTA, SIGNAL = 1.1; EXPRESSED IN HBL100, SIGNAL =   1; EXPRESSED IN HEART, SIGNAL = 3.8; EXPRESSED IN BT474, SIGNAL = 1.2; EXPRESSED IN BRAIN, SIGNAL = 0.96
ggcagtgtggactctgctatgctgtaataggtgtagattctgtagttacaggaaagggttaattacttgctcaagatggaaaaaaaagatagtggttagaaaactttaatttgtgagccctctttagagatcctctttagagatcctctgcttgtcttggacttgattgattaatggtagacaaatagattttaacttttccaaataacacagaacaatcctaggtgttagcataacaccggttaacagtgtacctgctccttggatatctcctttcccagctccctgcggtttctgagttctccaccagtgagaccatgggccactctgcagaccgactggccgctgcctttgctgtttctcggctggaacaggatgaatatgcactgcgctctcacagtctagccaagaaggcacaggatgaaggac

SEQ ID NO: 5007 - DNA, 441 bp, Homo sapiens
  MAP TO AL035458.32; EXPRESSED IN ADULT LIVER, SIGNAL = 3.4; EXPRESSED IN BT474, SIGNAL =   3; EXPRESSED IN BRAIN, SIGNAL = 2.7; EXPRESSED IN HBL100, SIGNAL = 3.3; EXPRESSED IN HELA, SIGNAL = 2.9; EXPRESSED IN HEART, SIGNAL = 2.8; EXPRESSED IN FETAL LIVER, SIGNAL = 2.7; EXPRESSED IN LUNG, SIGNAL = 2.7; EXPRESSED IN BONE MARROW, SIGNAL = 3.4; EXPRESSED IN PLACENTA, SIGNAL = 3.4
tggagtaaacggaaatttcataggtagaacataaaatgtactaaccataaaagtaaaaataaaatattggacttcaagaaaatttatttttttgcttatcataagacgccattttgaaaggaataaataagaaatagacaggagacggccccagcccgcgggctgccgcccgcactctccatgagactgctggcgccagcgcccgcccgcgcggcacctactcggagagggcgcttcgcgctgactcagcggcgacggcggcggcggcgttagctggccctcgcgctctttcccttcttggggcgctgaccccgcccgcttgcttgcttgcttgcctgccactcaagagaaggtgccaggggacgcggagcgacgagaggcgtgcagtcccggccaactccgtctctggcgttggcgctgcggtcgtggcagaggactacg

SEQ ID NO: 5008 - DNA, 408 bp, Homo sapiens
  MAP TO AL078591.17; EXPRESSED IN PLACENTA, SIGNAL = 2.4; EXPRESSED IN HEART, SIGNAL = 2.6; EXPRESSED IN FETAL LIVER, SIGNAL = 2.4; EXPRESSED IN ADULT LIVER, SIGNAL = 3.1; EXPRESSED IN BT474, SIGNAL = 2.5; EXPRESSED IN BRAIN, SIGNAL =   2; EXPRESSED IN HELA, SIGNAL = 2.5; EXPRESSED IN HBL100, SIGNAL = 3.2; EXPRESSED IN LUNG, SIGNAL = 2.6; EXPRESSED IN BONE MARROW, SIGNAL = 2.6
cctggcaaaactgagagagcatgaatatacgagcataggcatattgaatactaagtgcagagatcagaattgttctctactgggctcctagaaggctgtcagctagattcttactctctaggaaggagacagacaagagtcttctatgtcatttcaagaactgtaaaatcttagattttaccaaacttgcaacctaacaagctagtctgccacagtttcatatatgttggcagaagacacaagactcttgggtcaaagacaaaaggtttgattatgcacagcatagcaagcagcatgagcttcctgttcatgttagtttcccttgtattcactcttccaagtcccatgggagtgacatggaggcaggccaggtggataccatgtatgtggtgggtttttggtcacaat

SEQ ID NO: 5009 - DNA, 380 bp, Homo sapiens
  MAP TO AL035467.21; EXPRESSED IN BONE MARROW, SIGNAL = 9.5; EXPRESSED IN HEART, SIGNAL =  17; EXPRESSED IN FETAL LIVER, SIGNAL =  11; EXPRESSED IN ADULT LIVER, SIGNAL =  22; EXPRESSED IN BT474, SIGNAL =  11; EXPRESSED IN LUNG, SIGNAL =  11; EXPRESSED IN BRAIN, SIGNAL = 7.2; EXPRESSED IN PLACENTA, SIGNAL =  15; EXPRESSED IN HELA, SIGNAL = 7.8; EXPRESSED IN HBL100, SIGNAL = 8.4
gggtgtgatcagaaaatcaggaagactttgagtaatgttgaggaagggatttattataagggttggaccataaacaactgtgggctctggctaaactgtctgtgctgctgcttgtctggggctgcacctaaaggcagcagggccaacaggaaggaaagtggacatgaaatggggagagcaggaataagccagaagctgtgagaagacaatgaaaactcagaggacacactggaaactgtgtctgtctcactgccttcaggcctccacatttgatgatattaatcacctgtaggggaagctgaagccctttgccacagagctgcacatgttggtgcagaagtcacagaagctgtgggaagaggtccagcaagagtcacagg

SEQ ID NO: 5010 - DNA, 383 bp, Homo sapiens
  MAP TO AL078623.24; EXPRESSED IN BONE MARROW, SIGNAL = 1.9; EXPRESSED IN HELA, SIGNAL = 1.2; EXPRESSED IN HEART, SIGNAL = 1.3; EXPRESSED IN FETAL LIVER, SIGNAL = 1.5; EXPRESSED IN ADULT LIVER, SIGNAL = 1.8; EXPRESSED IN BRAIN, SIGNAL = 1.2; EXPRESSED IN LUNG, SIGNAL = 1.8; EXPRESSED IN PLACENTA, SIGNAL = 1.8; EXPRESSED IN HBL100, SIGNAL = 1.6; EXPRESSED IN BT474, SIGNAL = 1.5
tgctttcttaagtgccagaaatgaacattgatcttgatcatgcttggtttgttgactccatatgtgctttatgattggcacgtgataagactaatatttaattctagcaactgaattctgtgggagaaatagatgcagctactacagtagtaattttatgatcaataatataactctttaaaaatgtagttcactctttccttaataatgtcaaataatcacccattacatgaagaaagaactaacatactctggattggcaccttttggaaggttaatcagttcttgtgagtcatcaagctgaccccaacatattactgtgtgctcttcaatgacattttcaccccataagacactaagttcctggaagacaaacacaggaa

SEQ ID NO: 5011 - DNA, 405 bp, Homo sapiens
  MAP TO AL035554.1; EXPRESSED IN BT474, SIGNAL =  12; EXPRESSED IN HELA, SIGNAL =  12; EXPRESSED IN HEART, SIGNAL =  11; EXPRESSED IN FETAL LIVER, SIGNAL =  13; EXPRESSED IN BRAIN, SIGNAL =  12; EXPRESSED IN LUNG, SIGNAL =  14; EXPRESSED IN BONE MARROW, SIGNAL =  14; EXPRESSED IN PLACENTA, SIGNAL =  14; EXPRESSED IN HBL100, SIGNAL =  14; EXPRESSED IN ADULT LIVER, SIGNAL =  17
cccaggaaaaagtacatcagcttttcataatctgttccctgttaataacaatatatgaagccacatacacatactcaatgaaatgacaaacaggaacgtggaagtaagatgctggtaagcactcattcacagcttaggacactctgaagtggtaccctctgtattttgtatatgacttccccattattataattgtttgactagattttttttctaattaggtaagaagagacttaaaaaagaaaacaatatagttgtttactgactcaccttggtgagatcgaatggattaaatggaaaagtttctgcctgattaaatgtcatgacctggatgtaaaaagtccaggaggggtactttcctgtggcaatggcgttaaaaagatcccggatgccatagtcaggatc

SEQ ID NO: 5012 - DNA, 367 bp, Homo sapiens
  MAP TO AL009176.1; EXPRESSED IN HEART, SIGNAL =   1; EXPRESSED IN BT474, SIGNAL =   1; EXPRESSED IN ADULT LIVER, SIGNAL = 0.97; EXPRESSED IN BONE MARROW, SIGNAL =   1; EXPRESSED IN LUNG, SIGNAL =   1
gtgttctctgacagggctgcattgagggcttcactatttcctcacaaaagtccagttttgtgagagcttgggaggcatgagtgacagggagtgaagataaccagaccctgtaggtaagtgacagggaccaaaaatgaccacaccctgcagacaaccaacgtcacagggaccgaaaatgacctcactctgcagacaaccaaagcaacagggaccaaaaatgacctcactctgcaggtaaccaaagtcacagggaccaaaaatgacctcactctgaagacaaccaaagccacagggaacgaaaatgacctcactctgcaggtaaccaaagtcacagggaccgaaaatgacctcactctgcagacaacca

SEQ ID NO: 5013 - DNA, 466 bp, Homo sapiens
  MAP TO AL035662.23; EXPRESSED IN PLACENTA, SIGNAL = 1.6; EXPRESSED IN HEART, SIGNAL = 1.7; EXPRESSED IN FETAL LIVER, SIGNAL = 1.4; EXPRESSED IN ADULT LIVER, SIGNAL = 1.4; EXPRESSED IN BT474, SIGNAL = 1.4; EXPRESSED IN BRAIN, SIGNAL = 1.5; EXPRESSED IN HELA, SIGNAL = 1.2; EXPRESSED IN HBL100, SIGNAL = 1.6; EXPRESSED IN LUNG, SIGNAL = 1.5; EXPRESSED IN BONE MARROW, SIGNAL = 1.5
aaaccataccccaacaccaccaccaccaaacttctgcctctgtctttaatacaagttgggagactggatgggctccagggtgaagtgagaggttcttcaaggtgaactgtttctgcatccagtgccaggtctcctgtctcaaactgcaggggtgcaggcagaagcggggagctatgcccagtcagtgccagcccctcaccctcacgccacagcagcagcagcaccaggctctctggccaactgcctgtttgcccacgtggccacactcctgggtgggtgcagcctcactgtctctcctgcactgagatgcgactctctttgccatcctcctgggtgaccggttggcatccatgtaaagtctcctgcactggagcagcagtgttggagccaggaagatcgtcgggaaaattgatctcctggggttcctgcttggggtggggggcctggagaggcaaggtgtgaggtc

SEQ ID NO: 5014 - DNA, 429 bp, Homo sapiens
  MAP TO AL078645.18; EXPRESSED IN BONE MARROW, SIGNAL = 4.1; EXPRESSED IN HEART, SIGNAL = 2.8; EXPRESSED IN FETAL LIVER, SIGNAL = 3.5; EXPRESSED IN ADULT LIVER, SIGNAL = 3.2; EXPRESSED IN BT474, SIGNAL = 3.1; EXPRESSED IN BRAIN, SIGNAL = 2.4; EXPRESSED IN LUNG, SIGNAL = 3.6; EXPRESSED IN PLACENTA, SIGNAL = 3.4; EXPRESSED IN HELA, SIGNAL =   3; EXPRESSED IN HBL100, SIGNAL = 3.3
gctgatacttcgtgaagggcctgcagaaggccttgctaccttcattcaactgaataaaggacatcgtaagaccataggtactctttctgatccaagttagagcacactgtgagaaaatattaaatgagttgtggagaggtccattctgtcaacctgtcatagtttttgaagaaacatcaatgaaatattagacaagagggagaggacaaggggttcagctgtaaaggtgggagaagggaagaatcccctctctaacccggaggctgctgcgagttgctgtttttgttgctgcagccaatgctgttgctacttctgcttttgctgttgttgttgttgttattgctgctgctattgctgctgttttggattcccagccagcaccttctcaggggcagcatccatccccctgcttcctcatccccagcatta

SEQ ID NO: 5015 - DNA, 419 bp, Homo sapiens
  MAP TO AL079341.13; EXPRESSED IN ADULT LIVER, SIGNAL =  11; EXPRESSED IN BT474, SIGNAL = 7.6; EXPRESSED IN HELA, SIGNAL =   8; EXPRESSED IN HEART, SIGNAL = 7.5; EXPRESSED IN FETAL LIVER, SIGNAL = 7.1; EXPRESSED IN BRAIN, SIGNAL = 6.4; EXPRESSED IN LUNG, SIGNAL = 8.5; EXPRESSED IN BONE MARROW, SIGNAL = 8.7; EXPRESSED IN PLACENTA, SIGNAL = 9.6; EXPRESSED IN HBL100, SIGNAL = 8.5
caacgaagaccccttgaatcaagtcaggtgaaatatctctgtcgagaactgacagaactttgaaataaagtgaatcacttattggatagcttggaaccacctggaaaaccaggaccttccactaatattcctgaaaatgttactgtgaatggtagggaagaaaagcctgcttcttcggattcttctggaaaacagtctactcaggttatggcagcaagtatgtcagcttttgacccttttaaaaaaccaagatgaaataaaaaataatgttacgtcggcatttggcttaacagatgatcaggtttcagggcaacccagtgctcctgcagaagactgttcaggaacatctgacagcattgccgcctcctcctcagtagcagctcacccaccaggagttcagccacagcaaccaccatata

SEQ ID NO: 5016 - DNA, 395 bp, Homo sapiens
  MAP TO AL035704.9; EXPRESSED IN PLACENTA, SIGNAL = 2.8; EXPRESSED IN ADULT LIVER, SIGNAL = 3.1; EXPRESSED IN BT474, SIGNAL = 2.6; EXPRESSED IN BRAIN, SIGNAL = 2.9; EXPRESSED IN HELA, SIGNAL =   2; EXPRESSED IN HBL100, SIGNAL = 2.8; EXPRESSED IN HEART, SIGNAL = 3.1; EXPRESSED IN FETAL LIVER, SIGNAL = 2.2; EXPRESSED IN LUNG, SIGNAL = 2.6; EXPRESSED IN BONE MARROW, SIGNAL =   3
gcaaagcccatagagagctgttcaccagttggtagctagaggtgtaataaagggcttcagggctcacagatacagatgagctcagcctagggggagggaggaggaggagagagtcattgaacaggtagttaggaatgagcttgggtcactccaggcagaggcctctggggatgtaaaaaggaagaggagttagtttctggtttgttttgataattcagtgagtttatgtaaaacatttgaaactgttcctggcctgcaggtgcaagctctagagatgatgatgatgatgatgatgatgatgatgatgatgatgatgatgatgatgaaggtaacgtgggggggatttagcccaatatttgaagccagaaggacggtggcatggtcagacatgtgtc

SEQ ID NO: 5017 - DNA, 420 bp, Homo sapiens
  MAP TO AL080274.13; EXPRESSED IN BONE MARROW, SIGNAL = 2.1; EXPRESSED IN LUNG, SIGNAL = 1.7; EXPRESSED IN PLACENTA, SIGNAL = 1.3; EXPRESSED IN HEART, SIGNAL = 2.1; EXPRESSED IN FETAL LIVER, SIGNAL =   2; EXPRESSED IN ADULT LIVER, SIGNAL = 2.1; EXPRESSED IN BT474, SIGNAL = 1.8; EXPRESSED IN BRAIN, SIGNAL = 1.4; EXPRESSED IN HELA, SIGNAL = 1.5; EXPRESSED IN HBL100, SIGNAL = 2.4
cacattttgcatggttttagcatagactgatttttctagaaatggaatggtagtgtaagaagattgtactttgttatttgcagagctttaacaagaaatgttcatccttttggcaaatcacaacactgatagtaactgtaacttgtgataactaagtgaccaaaacaacacaccaattttgtatttttttggaattcatggtgatttttttgtgagtaggtacaggaataaacttacgtgatcctcatttcaaggagaagaaggagaagttgaagaaggaggagaaggagaaggatgagaagaaaaacaagaagaggaaggagaaggaggaggaaaatgagaaggagaagaagagaaggaacagcagcagttgcaggaggaggagaaagaggaggaggaggaggagggagtgtgcagaag

SEQ ID NO: 5018 - DNA, 376 bp, Homo sapiens
  MAP TO AL035452.6; EXPRESSED IN PLACENTA, SIGNAL = 3.5; EXPRESSED IN HBL100, SIGNAL = 3.6; EXPRESSED IN ADULT LIVER, SIGNAL =   4; EXPRESSED IN BT474, SIGNAL = 3.6; EXPRESSED IN HELA, SIGNAL =   3; EXPRESSED IN HEART, SIGNAL = 2.4; EXPRESSED IN FETAL LIVER, SIGNAL = 3.4; EXPRESSED IN BRAIN, SIGNAL =   3; EXPRESSED IN LUNG, SIGNAL = 3.3; EXPRESSED IN BONE MARROW, SIGNAL = 3.5
ttcccttattcccgtcacagggcatgtgatgggggtgtggctcacttatgtggtgccctgctgctccagcccctaggacaagccacagttctgacttttacgactgcacttctggcaggaggagcgactcaagccttcgcgaaagaaaataaccaaaaagcatacaaagaaacgtacggcgtctctcatattacacgccatgatatgctgcagatccctaaacagcagcaaaacgaaaaataccaagtgcctcaattcgatcaatcaacgattaaaaatattgagtctgcaaaaggacttgatgtgtgggacagctggccgctgcaaaacgctgacggaacagtagctgaatacaacggctatcacgttgtgtttg

SEQ ID NO: 5019 - DNA, 428 bp, Homo sapiens
  MAP TO AL035633.15; EXPRESSED IN BONE MARROW, SIGNAL = 3.3; EXPRESSED IN LUNG, SIGNAL = 2.3; EXPRESSED IN HBL100, SIGNAL = 3.1; EXPRESSED IN PLACENTA, SIGNAL =   3; EXPRESSED IN ADULT LIVER, SIGNAL = 3.6; EXPRESSED IN BRAIN, SIGNAL = 2.5; EXPRESSED IN HELA, SIGNAL = 2.3; EXPRESSED IN HEART, SIGNAL = 2.7; EXPRESSED IN FETAL LIVER, SIGNAL = 2.8; EXPRESSED IN BT474, SIGNAL = 3.3
ggtgaatgtgatgtttgcttagtcaaaacataatgctcaaatggtaattaattgatcaaatcatggtataatatttcatttaacattgtgacaagcaagctcttcttagtgggtaaatttttcttctatgtttggtttgttattcttaggaaataaaaacatgttttttaagttgtaacaagtacagttgactcttaaacaatgcagtttgagcttcgcaggcccgcttatacacaaatttttttgtcaaacaaatgcaaatccaaaataaagtattcatgggaaatattatagaaacctgcatatgcggagggatagctttgattttggtatacatggtggtcatcctggagtcaatccccaacgtttactgtcggacgactgtagaagtgatttgtctattactttgcaacctcccttttcctttc

SEQ ID NO: 5020 - DNA, 419 bp, Homo sapiens
  MAP TO AL079336.5; EXPRESSED IN PLACENTA, SIGNAL = 3.6; EXPRESSED IN LUNG, SIGNAL =   3; EXPRESSED IN BONE MARROW, SIGNAL = 4.4; EXPRESSED IN HBL100, SIGNAL = 3.4; EXPRESSED IN HELA, SIGNAL =   3; EXPRESSED IN HEART, SIGNAL = 3.7; EXPRESSED IN BT474, SIGNAL = 3.4; EXPRESSED IN ADULT LIVER, SIGNAL = 3.9; EXPRESSED IN FETAL LIVER, SIGNAL =   6; EXPRESSED IN BRAIN, SIGNAL = 3.1
tcatgcacagactgtcctccacacacacacgaatacacaccgtatcccacataccccctgcagacatgcacagacaccgctccacacacacacacacacacacgaacacacaccgtatcccacataccctctccacacatgcacacacacccctttacacacacacatacaaacacataccgtatcccacataccctctacacacatgcacacatacccctccacacacacacatacacacatgtgaacacgcaccgtatcccacataccccccaaacacatgcacacacaccccacccccacacactcacatacacaagcacactgtctcggtgtgcaggacaaagctgcctcctgcccgctggcgccaagcatgagcggcaccagttgccaaagcctccggttctcttgacggctct

SEQ ID NO: 5021 - DNA, 393 bp, Homo sapiens
  MAP TO AL035703.19; EXPRESSED IN HBL100, SIGNAL = 9.2; EXPRESSED IN HELA, SIGNAL = 8.2; EXPRESSED IN PLACENTA, SIGNAL =   8; EXPRESSED IN ADULT LIVER, SIGNAL = 9.9; EXPRESSED IN HEART, SIGNAL = 7.3; EXPRESSED IN BT474, SIGNAL =  11; EXPRESSED IN FETAL LIVER, SIGNAL = 8.3; EXPRESSED IN LUNG, SIGNAL =  10; EXPRESSED IN BONE MARROW, SIGNAL = 8.4; EXPRESSED IN BRAIN, SIGNAL = 6.3
ctgctgtggctgagttcaaggatcccgacttagccaacaccccaccctcacatcccaccctggatatcttggcttcctggggactgttcccaggttctggggatgccagctctgttcagatgttagcttaagaccagctctcccagcagctcctccaggccccagatctgagccacttcccagggaatgcagccaggattcacagccctctcctctctggttctcccccctccacttcccagtccctctgctggcccctaaagttactggccttccccagtcacgacctcctggctttcagatgtcacctcctggtggtcctggatcgccatccacacttcagaagcagcctcttggcccacccggcctccagctcgctggctctatggagag

SEQ ID NO: 5022 - DNA, 470 bp, Homo sapiens
  MAP TO AF172274.1; EXPRESSED IN HELA, SIGNAL = 1.7; EXPRESSED IN HBL100, SIGNAL = 0.92; EXPRESSED IN HEART, SIGNAL = 0.98; EXPRESSED IN LUNG, SIGNAL =  11; EXPRESSED IN FETAL LIVER, SIGNAL = 1.7
agttggcaaataaagtggggaaattcaagacctcaagatgccctaaaggttagcttgaaaagggtaaaataaaacacagaacgcttctctttaatagactcacacagtcttatgaaaatgtacgttttatcaagtttgcatccacctctgcagttaggtaaattacaagtgaaagtttccacggttccttcatccactacttcatggctcattcataacaatgacactgtgatctcactccatacctctgcttgtcgataatcctgaagtttggcaaactcatctgcaaagttcatcaggcccagctttaaatgcggggtctctgtaccagcatacgcgttaatttcattcaccaggaggtctgctttgtctctcagcctggcagttttccgcacataggcagcgaaaatttggcacagttctccaaaatgcttctccacatttgaaacagctgtttgcagttgtttcgt

SEQ ID NO: 5023 - DNA, 381 bp, Homo sapiens
  MAP TO AL049176.3; EXPRESSED IN BT474, SIGNAL = 2.3; EXPRESSED IN BONE MARROW, SIGNAL =   2; EXPRESSED IN HBL100, SIGNAL = 2.5; EXPRESSED IN PLACENTA, SIGNAL = 2.2; EXPRESSED IN FETAL LIVER, SIGNAL = 2.7; EXPRESSED IN BRAIN, SIGNAL = 2.2; EXPRESSED IN LUNG, SIGNAL = 2.6; EXPRESSED IN HEART, SIGNAL = 2.1; EXPRESSED IN HELA, SIGNAL = 2.4; EXPRESSED IN ADULT LIVER, SIGNAL = 2.5
ttataacactgtcggatggggtttttgatgtatgtaaatgtaatacagacatatctcagaaatattgtaggttcagttccacaccacttcaatgaagcaaatatcacaaattgttttgtttcccagcatatataaaagttacttttctattatactgtagtctattaagtgtgcaatataattatgcctaaaacataccttcatttaaaaatactttattgttaaaaaatgctaacaatcacctgagccctcaccaagtcatttgctttttgctgatggagggtcttccctcaatgctgatggctgctaactgatcagggtggtggttgattaaggctggggtgactatggccatgacaacaatgaaatttgctgcatcaa

SEQ ID NO: 5024 - DNA, 394 bp, Homo sapiens
  MAP TO AL049542.5; EXPRESSED IN PLACENTA, SIGNAL =   3; EXPRESSED IN HEART, SIGNAL = 3.1; EXPRESSED IN ADULT LIVER, SIGNAL = 3.7; EXPRESSED IN LUNG, SIGNAL =   3; EXPRESSED IN BONE MARROW, SIGNAL = 3.6; EXPRESSED IN HELA, SIGNAL = 3.2; EXPRESSED IN HBL100, SIGNAL = 3.8; EXPRESSED IN BT474, SIGNAL = 3.3; EXPRESSED IN FETAL LIVER, SIGNAL = 3.2; EXPRESSED IN BRAIN, SIGNAL = 2.7
ctggtggacgacatgctgccctgtgatgaggccggctgcctcctcttctcacaggtggggcggcctgcagggtgggcacgggcggcaggggcagcctctgaccccagccccgaaaacaaggccggctgcttcctcttctcccagggcgggtagtgtggggggcgggcgggggtggcctctgacccggccctctgcaggcgcagcggaagcagctgtgggtggccctcatcgagaaggcgctggccaagctgcacggctcctactttgcgctccaggcgggccgcgccatcgaaggcctggccacgctcaccggcgccccctgtgagagcctggcgctgcagctcagctccactaacccccgcgaggagcccgttgacactgacctcatctgggc

SEQ ID NO: 5025 - DNA, 431 bp, Homo sapiens
  MAP TO AL117375.4; EXPRESSED IN BT474, SIGNAL =   2; EXPRESSED IN BONE MARROW, SIGNAL = 3.1; EXPRESSED IN HBL100, SIGNAL = 2.6; EXPRESSED IN PLACENTA, SIGNAL = 2.5; EXPRESSED IN FETAL LIVER, SIGNAL = 2.3; EXPRESSED IN BRAIN, SIGNAL = 2.4; EXPRESSED IN LUNG, SIGNAL = 1.9; EXPRESSED IN HEART, SIGNAL = 2.1; EXPRESSED IN HELA, SIGNAL = 1.9; EXPRESSED IN ADULT LIVER, SIGNAL = 2.5
cagccatgaatcagacgatgttttacatgacctgtccaaagtggtttgagcactggaaaagatgggctaaattttaaacccagatctaccactaactagtcaggaaccgctacacaagtcatgttaggtctttggtgttcaatctcctcatctgtaaacaaaggcattgggctgaggctttctatggtccctgctgccctgtccaacatcatcattctcacgtactttcacaagcaaatggtgcagctcacttacagaaacaccagctcctacccttcaatccaattcagcaggtttgctttggataaacagcagtactcacctcacgcagcaaaatcctacaaactgcatcaaggtgagagcttgcaatgggatgaagctggggtctgggatctggcctggcagcctcaacgtttttgaagcaggaagga

SEQ ID NO: 5026 - DNA, 485 bp, Homo sapiens
  MAP TO AL109809.14; EXPRESSED IN PLACENTA, SIGNAL = 1.6; EXPRESSED IN HELA, SIGNAL = 1.4; EXPRESSED IN HEART, SIGNAL = 1.7; EXPRESSED IN ADULT LIVER, SIGNAL = 1.8; EXPRESSED IN BT474, SIGNAL = 1.4; EXPRESSED IN LUNG, SIGNAL = 2.2; EXPRESSED IN BONE MARROW, SIGNAL = 2.6; EXPRESSED IN HBL100, SIGNAL = 2.2; EXPRESSED IN FETAL LIVER, SIGNAL = 1.9; EXPRESSED IN BRAIN, SIGNAL = 2.8
accctcaatgtctgagcacctgatgcatgcctagctctgtcctggtgatgccctcaccgtggtggtgggagctactttatggagccctccctgtgatctgtctgtgccacaaggtcagagcttctgccctgtgctgtttcagttccacccttcttggaggttactcaacagcccataaaggcagggaaccaggtgaacgtcacctgccaggtgaagaatttctacccctagaacctacagctgacctggttggagaacagaaatgtgtcccagatagaaacagcctccatcctcattgagaacatggaaggcacctacgactggacaagctggctcctggtgaacatatctgcccacagggatgatgtgctcacctaccagatggcgcatgatgggcagctggtggtcagcaaaagccttgccctagaggtctcagcccaccaggagcagagctcagaggccacccttggtgaggttactcccga

SEQ ID NO: 5027 - DNA, 380 bp, Homo sapiens
  MAP TO AL109838.8; EXPRESSED IN ADULT LIVER, SIGNAL =   1; EXPRESSED IN BT474, SIGNAL =  10; EXPRESSED IN BONE MARROW, SIGNAL =   3; EXPRESSED IN HBL100, SIGNAL = 6.4; EXPRESSED IN PLACENTA, SIGNAL = 2.6; EXPRESSED IN FETAL LIVER, SIGNAL = 1.5; EXPRESSED IN BRAIN, SIGNAL = 4.7; EXPRESSED IN LUNG, SIGNAL = 2.5; EXPRESSED IN HEART, SIGNAL = 4.2; EXPRESSED IN HELA, SIGNAL = 7.5
atcggaatttagcctggagcagatgctgtcaaatcacaatccacattccgtcagcatttaccatttccatgcacatcactggcatatctttgcctaaagactttcgctggctgcaggagcctcctctgccataggctggctggacattccaggcaagtaacgtctcctgggagcagccctgaaccaaagactgatggcagtgggtgtataaacaccccagctccctactctcacacacaggatatctctgaggcatctggtctgccgtactcccaggcttcctcagtgggattaagctccaggtgcctgcattggtaaccctgataatacatctcctaccagctgctctccctttgctgccttgcttcctcaatcccctt

SEQ ID NO: 5028 - DNA, 369 bp, Homo sapiens
  MAP TO AL118522.7; EXPRESSED IN LUNG, SIGNAL = 0.93; EXPRESSED IN BONE MARROW, SIGNAL = 1.9; EXPRESSED IN BRAIN, SIGNAL = 1.3; EXPRESSED IN HBL100, SIGNAL = 1.6; EXPRESSED IN PLACENTA, SIGNAL = 1.2; EXPRESSED IN ADULT LIVER, SIGNAL = 1.1; EXPRESSED IN HEART, SIGNAL = 1.6; EXPRESSED IN BT474, SIGNAL = 1.5
aagtgtagccaatcccgttgggagaggggaggtctcgggggtaggaggcaaagaaggggtgaggaggggcccaagggggggcaggtctccccgttctgcttccccactgtgggggagagccccgtcctcctgttcaatgtgcccctgggcctggggtcccaggtcagggctgggtggtctccaggccatcttggggagcccctccccattccagcactaagatcgttctccgcagggccccacggtgctctcgagggacaactgggatgcctgccggagcagggggcctgtggctgggtccaccatggaggaggtggggaagagcttgtaccagcccacggccagggtggtcaagtccagctcctccag

SEQ ID NO: 5029 - DNA, 404 bp, Homo sapiens
  MAP TO AL121575.6; EXPRESSED IN HELA, SIGNAL = 1.2; EXPRESSED IN HEART, SIGNAL = 1.1; EXPRESSED IN ADULT LIVER, SIGNAL = 1.3; EXPRESSED IN BT474, SIGNAL = 1.3; EXPRESSED IN BONE MARROW, SIGNAL = 1.5; EXPRESSED IN HBL100, SIGNAL = 1.3; EXPRESSED IN PLACENTA, SIGNAL = 1.5; EXPRESSED IN FETAL LIVER, SIGNAL = 1.1; EXPRESSED IN BRAIN, SIGNAL = 1.1; EXPRESSED IN LUNG, SIGNAL = 1.4
cttgtatctgctggtgcctgcactgagaatacatagaatgaatgactgaatcctgtttttacagtgacaagaaagtaaaaagttaagaaactataaaagcactaaacaggacagaaattagggctcagaacttctgtcagttctaaaatcactagggaatgcccacagcagtctaaaatacagtaatcaacaggtgaagtcactccgaccataagatttagtacataccttctgatgaagagaaagcaccatatgtggaaaacttgcaaactggaaaagcacaaagaaaatgagctgacttgagagatgctgccacaggagttggcttgttcccccatcgtcaaacttctcctcggtctcagatcgctccatggcataaacaaccagatccaccaactggtcct

SEQ ID NO: 5030 - DNA, 481 bp, Homo sapiens; identical to SEQ ID NO: 4629
  MAP TO AC007653.1; EXPRESSED IN ADULT LIVER, SIGNAL = 0.85; EXPRESSED IN HEART, SIGNAL = 1.1; EXPRESSED IN HELA, SIGNAL = 0.72

SEQ ID NO: 5031 - DNA, 453 bp, Homo sapiens
  MAP TO AC011334.1; EXPRESSED IN HEART, SIGNAL =   1; EXPRESSED IN LUNG, SIGNAL = 5.8
ttcagtggggattgacttggttcatgacccagttattaagtcaaagatttgtggttagcaacgagttgagtttctaacatttcctggttgaaagataaactaacatgaatggagggatagaggtaagtcccaatcacatttaatgcagacttttaaccaggaacattttcctgttgaaattaatcaacactcaggaacagaaaagtaaagagtttccaaatcctcatagacttataaaatcttagcgaactgaaaggaatattaaaggtaactaactaactccctcactttaagcaggaagctaagacagaagggggcaccatcttgcccagagtcctacagcaaataatggtggagccagcccaagaagagacagcaaagcccttcacacctcaggccagagtcatatccacacagatgaactgaggttttgctgcataatgagtttcaggc

SEQ ID NO: 5032 - DNA, 488 bp, Homo sapiens
  MAP TO AL109935.13; EXPRESSED IN HEART, SIGNAL = 0.91; EXPRESSED IN LUNG, SIGNAL = 5.7
aaaatgtggcagttccctgaaatggtaccttctattatatttaaatagaatttgtgacagattggaacagaggaggcccaggcagcctataaaattcccaaaccacataattaacacttcttgcactatcttctgtgtctacttctgagctactggaatttcggagtagcaaaaatgagccagagaataggtgactctaatatggtacatcttttgctgtctggctatgcttactgaatttaggcagttatggacattgatgataatgatcatgaatatgaggtggcaattcctaaggtagttctggtggacctcagtgcatcagtggggaagagagagtttttagggtggtacaaagtatataaggaagaaactcctgagccacttaaggatgagtctgaatgtgtggtgttggctagatgtgggaagagctgcaaacacagtgaagtgaatgctgcaaggactggtcatactgaccacccagctgt

SEQ ID NO: 5033 - DNA, 397 bp, Homo sapiens
  MAP TO AC011589.2; EXPRESSED IN BONE MARROW, SIGNAL = 0.92; EXPRESSED IN HEART, SIGNAL = 0.99; EXPRESSED IN BT474, SIGNAL = 0.92; EXPRESSED IN FETAL LIVER, SIGNAL = 0.95
atcttccttcgggcttatggtaggcagcctctgagatggactccagtgatcttatcgcctagtactcctgcccctgtgcaatactttccctgagtgtgggctggacctactgactcacttagaataaatagaatatgacaaaagtgatgggaggtcagttctgtggttgggttactacaaatagactgtgacctccctcctcccaccctttctctctctctctccctcacctgctctgagagaagtcagctgccatatcatgaactgccctacagtgagatccatgtggcagggaactgatgcctctggccaacagccatcgaggacctgaagcctgccaatggccacatgaatgagtctgaaagaccactgttgagcctgagatgactgcatccct

SEQ ID NO: 5034 - DNA, 392 bp, Homo sapiens
  MAP TO AL121782.4; EXPRESSED IN FETAL LIVER, SIGNAL = 1.2; EXPRESSED IN BONE MARROW, SIGNAL =   1; EXPRESSED IN LUNG, SIGNAL = 1.2; EXPRESSED IN HBL100, SIGNAL = 1.1; EXPRESSED IN HEART, SIGNAL = 1.1; EXPRESSED IN PLACENTA, SIGNAL = 1.1
cctctctgaccataagcaaaccacattatcattctgtctcattttttttttcatctgaaaaaaataggtatagtatacatctttctgtctgacatggtattttgagggatctcattgatgcaaaagtgctatggaaactaaagcattatgcaaatatagggacttattgttaagatttcacaaagaactagtttctgcatcctgcaaagacataattgcacttagagcgagatccatgtttcattcttctgttcccccataataacttgcagaataaatatttgttaaataatggagcacttttatcacctgtagcaagagggaatattcatgataattctccatgtgagtggtgaaataatagttactgtggggcttgccatgtttatgtg

SEQ ID NO: 5035 - DNA, 477 bp, Homo sapiens
  MAP TO AP000021.2; EXPRESSED IN HEART, SIGNAL = 0.95
ggcagctgagtgttgaagtgaattttggcttctcctgagagcgctgactacttctcatcaggtgatgtggccagggtgttgctcccctaagtcatcacataccaagcatgtggctccctcggatccccagtgggaactgggcgagggcaggaggatgctgtcgacacacctggttgaaccctctgaagctcaggtcataagaaccatagccacagccatctatccttggaggaagggggagcttactctctctgaggtagtggagatgtgagagaaggatgtcggcgttgtagctgggggtgagcctctggaagtcgtccttggtcatcttgcacagttccttcccatcgatgttctggaataacaagatgttgacgtctggaaggccatattctttcaccgcccactccagccactgccgcacatggtctgtactccatagcgtaggatctgaaaggggtgggaacacattcagtc

SEQ ID NO: 5036 - DNA, 414 bp, Homo sapiens
  MAP TO AL121748.2; EXPRESSED IN HEART, SIGNAL = 1.4
tacccagtagtgggatcagcttcttttttttttttttttagtcttgtcctaaggcaaacccataggcttatttaaggcaaagcaagattacagatctttaatattcttcattgatctcttctctgtggctcttccttggaagaatcgttttgagctaattcttactgtcctacggcagggcaggctccttcctaagccaaggtcaagcaaacacttaccaagacgcaaggaagaggtaaaggtgccttggtgccccctctctccgtaagtgcaattagacagttgcccatttcaatctgaatatatacagcttgactaactgactcgcagccatgccgtccattcatttccacttgaatatgtaccatcccctgaagtttattataaaaaaattgacccgtaccaggtttttca

SEQ ID NO: 5037 - DNA, 1991 bp, Homo sapiens
  MAP TO AC005740.1; EXPRESSED IN BONE MARROW, SIGNAL = 0.98; EXPRESSED IN BRAIN, SIGNAL =   1; EXPRESSED IN LUNG, SIGNAL = 5.6; EXPRESSED IN HELA, SIGNAL = 0.99; EXPRESSED IN PLACENTA, SIGNAL = 1.8; EXPRESSED IN HEART, SIGNAL = 1.8; EXPRESSED IN FETAL LIVER, SIGNAL = 1.2
ccctgcacacctacactctgtctcccagtgagcactttgccttggatgtcattgtgggccctgatgagaccaaacatgcagaactcatagtggtgaaggagctggacagggaaatccattcattttttgatctggtgttaactgcctatgacaatgggaacccccccaagtcaggtaccagcttggtcaaggtcaacgtcttggactccaatgacaatagccctgcgtttgctgagagttcactggcactggaaatccaagaagatgctgcacctggtacgcttctcataaaactgaccgccacagaccctgaccaaggccccaatggggaggtggagttcttcctcagtaagcacatgcctccagaggtgctggacaccttcagtattgatgccaagacaggccaggtcattctgcgtcgacctctagactatgaaaagaaccctgcctacgaggtggatgttcaggcaagggacctgggtcccaatcctatcccagcccattgcaaagttctcatcaaggttctggatgtcaatgacaacatcccaagcatccacgtcacatgggcctcccagccatcactggtgtcagaagctcttcccaaggacagttttattgctcttgtcatggcagatgacttggattcaggacacaatggtttggtccactgctggctgagccaagagctgggccacttcaggctgaaaagaactaatggcaacacatacatgttgctaaccaatgccacactggacagagagcagtggcccaaatataccctcactctgttagcccaagaccaaggactccagcccttatcagccaagaaacagctcagcattcagatcagtgacatcaacgacaatgcacctgtgtttgagaaaagcaggtatgaagtctccacgcgggaaaacaacttaccctctcttcacctcattaccatcaaggctcatgatgcagacttgggcattaatggaaaagtctcataccgcatccaggactccccagttgctcacttagtagctattgactccaacacaggagaggtcactgctcagaggtcactgaactatgaagagatggccggctttgagttccaggtgatcgcagaggacagcgggcaacccatgcttgcatccagtgtctctgtgtgggtcagcctcttggatgccaatgataatgccccagaggtggtccagcctgtgctcagcgatggaaaagccagcctctccgtgcttgtgaatgcctccacaggccacctgctggtgcccatcgagactcccaatggcttgggcccagcgggcactgacacacctccactggccactcacagctcccggccattccttttgacaaccattgtggcaagagatgcagactcgggggcaaatggagagcccctctacagcatccgcagtggaaatgaagcccacctcttcatcctcaaccctcatacggggcagctgttcgtcaatgtcaccaatgccagcagcctcattgggagtgagtgggagctggagatagtagtagaggaccagggaagcccccccttacagacccgagccctgttgagggtcatgtttgtcaccagtgtggaccacctgagggactcagcccgcaagcctggggccttgagcatgtcgatgctgacggtgatctgcctggctgtactgttgggcatcttcgggttgatcctggctttgttcatgtccatctgccggacagaaaagaaggacaacagggcctacaactgtcgggaggccgagtccacctaccgccagcagcccaagaggccccagaaacacattcagaaggcagacatccacctcgtgcctgtgctcaggggtcaggcaggtgagccttgtgaagtcgggcagtcccacaaagatgtggacaaggaggcgatgatggaagcaggctgggacccctgcctgcaggcccccttccacctcaccccgaccctgtacaggacgctgcgtaatcaaggcaac

SEQ ID NO: 5038 - DNA, 355 bp, Homo sapiens
  MAP TO AL109809.14; EXPRESSED IN BT474, SIGNAL =   1; EXPRESSED IN HEART, SIGNAL = 1.1
ctgtttgcgttgtaactgcctactgtgcctgatttctatttcactgttgtactctatcattgccacttcctcttgaatcaagggagacagtgcttgtcttctctcctcagagaagtttgacatctccccagcacagatatttggacggagcaggctcctgaggtcttcaggatacccatcccagcctcctggccccaccctcctggtcctttcctgctgctgattctgctgcggggatgcacaggtgagcactgccttgggctagaaccctttctctctgcttgcagccctgaaatccctgcccctgggctttcagggattccagacaaacacaagtgctcccaaggtaggtcaa

SEQ ID NO: 5039 - DNA, 1976 bp, Homo sapiens
  MAP TO AL021331.1; EXPRESSED IN HEART, SIGNAL = 2.7
atggggaaccatggtaggtgcctggccttcttaaatttctcaggccaaaagaactcttactaattttatgacatcattgtttcacacctcttgtaacatacttgaattcatttaactaaatgaaagttgacattcgtgttttgttcttaatcatgctcactttttaggccaacaggacgggccgcagatatgggtctgcagggactcagccctcaaaagtatgatagagtatttgcaaacatttttaacatgttactaacagaatgcaatagcagggcaaaatcggaagaaagagtaaaggggttcccaggacaagatggatttattctaataaagggagcagagatgggtgcattggtgaagagacgtgggtgtccggtgagactgcacagtgggagggtggacacacaggacagctggcagcaccgggtgcacggtttcctcagaaaaatctactaggttatggtcttgaccactctcctaacctttctcaatgatccatttttagaaaaaacctcatttgatggcggaagatgaaccttcaggggccctcttgaagccgctggtttttcgcgttgacgagaccaccccggctgtggtgcaaagcgtcctcctggagagggggtggaataagtttgataagcaggagcagaacgcggaggactggaacctgtactggaggacatcctctttccgaatgaccgaacacaacagtgttaaaccgtggcagcagctaaaccaccaccctggaaccaccaagcttaccaggaaagactgtttggccaaacacctgaagcacatgaggaggatgtatggcacttccctgtaccagttcatccccctgacgttcgtcatgcccaatgactataccaagttcgtggctgaatactttcaggagaggcagatgctgggcaccaagcatagctattggatttgcaagcctgctgagttatctcgtgggagggggatactaattttcagtgactttaaagacttcatctttgatgatatgtacatagtgcagaaatatatctccaatcctttacttattggcagatataaatgtgatctccgcatctatgtttgtgttactggctttaagcctttgaccatttatgtttatcaggaagggttggttcggtttgccacggaaaagtttgacctcagtaatttgcaaaacaattatgcccatttgaccaacagcagcatcaataaatccggggcctcttatgagaagatcaaagaagtgattggtcatggttgtaaatggacgctcagcagatttttttcctaccttcgtagctgggatgtggacgatctgcttttgtggaagaaaatccaccgcatggttattctcaccattctcgccattgcaccatctgtcccctttgctgccaattgctttgagctctttgggtttgatattttgattgatgacaacttgaaaccatggcttttagaggtcaactacagcccagccttgaccttggattgttcaacagatgtgttggtgaagagaaaacttgtccatgatattattgacctgatttacttaaatggtctaagaaatgaggggagagaagccagtaatgccacacatggaaattccaacatcgacgctgcaaaaagtgacagaggtgggcttgatgctcctgactgtcttccttatgattctctttcgttcacaagcagaatgtacaacgaggatgactctgtggtggagaaagctgtgagtgtgcgtcctgaagctgcacctgcctcccagctggaaggagagatgagtgggcaggattttcatctgtcaacaagggagatgccacaaagcaagcccaagttacggagcaggcacacgcctcacaagacactcatgccctacgcgtccctcttccagtcgcactcctgcaagaccaagacctccccgtgtgtcctgtcagaccgtggcaaagctccagatccccaagcaggcaactttgttc

SEQ ID NO: 5040 - DNA, 401 bp, Homo sapiens
  MAP TO AL030995.1; EXPRESSED IN LUNG, SIGNAL = 1.1; EXPRESSED IN BONE MARROW, SIGNAL = 0.95; EXPRESSED IN HBL100, SIGNAL = 1.1; EXPRESSED IN HELA, SIGNAL = 1.2; EXPRESSED IN PLACENTA, SIGNAL = 1.2; EXPRESSED IN ADULT LIVER, SIGNAL =   1; EXPRESSED IN HEART, SIGNAL =   1; EXPRESSED IN FETAL LIVER, SIGNAL = 0.96
gtggttcccatttgcatttctgtgatgattagtggcgttgaacattttttcatatatctgttggccatttgtatgtcttcttttgaaaaatgtcagacttctgcttctgagtcaaagccatggtggtggcaaattcaagccctgagcccccgtggtgttctttgatgtcagcattgtcagtcaggaagttggccacatgaagatccagctctttgtagacattgtgcctaacacagctgagaactttgggcagttctgcactggagaattcagagaagatcgggttccaataggatacaaagggagcacctttcacagggtcataaaggatttcatgattcagggtggagattttgttaatggagatgttactggagtcaccagcatttaccagggaccat

SEQ ID NO: 5041 - DNA, 424 bp, Homo sapiens
  MAP TO AL078624.22; EXPRESSED IN ADULT LIVER, SIGNAL = 0.95; EXPRESSED IN BT474, SIGNAL = 0.98; EXPRESSED IN LUNG, SIGNAL = 1.2; EXPRESSED IN BONE MARROW, SIGNAL = 0.97; EXPRESSED IN HELA, SIGNAL =   1; EXPRESSED IN HEART, SIGNAL = 1.1; EXPRESSED IN HBL100, SIGNAL = 0.93
cctctgaaacagatgtcccctgccaccatcagcagcacataaacatttagatgtagctgaattccccacaagtaaggagattaagcagggttagggtttgggatgtgtgagccatatcctatcagaactaaagataaagataaaatgtatctaaatctcccttccccctcttctgtgctgcttaaatcactgcacagaagcacacttagaactaagcagtgactatcaccagtgttctcgctctatttcacccgtcaagttaagcaccttcttatcgcagctgaagtggtggtacgaagaggctggatcttacacagcctgcccctggcgggatacatccccagggagttgacatatttaacgagtaaagcagctcatttcatcagattagtttacacagaagagaaaggagacttcagaagca

SEQ ID NO: 5042 - DNA, 386 bp, Homo sapiens
  MAP TO AL078645.18; EXPRESSED IN HELA, SIGNAL = 0.99; EXPRESSED IN HEART, SIGNAL = 1.3; EXPRESSED IN ADULT LIVER, SIGNAL =   1; EXPRESSED IN BONE MARROW, SIGNAL = 0.93; EXPRESSED IN LUNG, SIGNAL = 0.94
ggctgggttcacatagcaacaattaactgtccatattcctttgactttagcagccctggaaaaatctctgcttgaccagtatgaaactcaaagctggtgatgccattgtaggctgcagtctgcctagcatcctccactgcctgccccaccaacgaaatcccaaggacctgcgatgtagctgatccagagggaggctgatcacaccggttccacagcagatgtcaaggaggatggtgttagagttcactgcactcagcttccctacaatccaatacagcatctctgcaccagcagtgttaatctggaaaaaggcatctggagagatgcagaccttcaagcccaggagatctttaaagatatgaggttccccaaacaagagctggtag

SEQ ID NO: 5043 - DNA, 403 bp, Homo sapiens
  MAP TO AL033530.1; EXPRESSED IN PLACENTA, SIGNAL = 1.2; EXPRESSED IN HBL100, SIGNAL = 1.2; EXPRESSED IN ADULT LIVER, SIGNAL = 1.1; EXPRESSED IN HEART, SIGNAL = 1.4; EXPRESSED IN BT474, SIGNAL =   1; EXPRESSED IN FETAL LIVER, SIGNAL = 0.99; EXPRESSED IN BONE MARROW, SIGNAL = 1.2; EXPRESSED IN LUNG, SIGNAL = 0.98
ctgctcaggaaaattcaggctcagttgaaattattacaaagttcagctagacgcttatttaaccctgtgacccctccccatttctgctggctgccttccccaaggactccatgaaatacagccaggaatgggttccttgggcatgagctggggaccagtagtgactccagggctcttcccactgcttcttctacttttatatttcgcttggctctctaagtccatttcagttctaggtaaggttaaatccttctcccatgatctggatttttaggtttccctgtgaagatgtgtatttcgaggcagacttttctccccatcactttggggactcacagtgttttggatctcttctggagtttgcagtggcaagccacatttttcaaagggtctgtgaaagggt

SEQ ID NO: 5044 - DNA, 411 bp, Homo sapiens
  MAP TO AL078582.7; EXPRESSED IN BT474, SIGNAL = 0.91; EXPRESSED IN LUNG, SIGNAL = 1.4; EXPRESSED IN BRAIN, SIGNAL = 1.2; EXPRESSED IN BONE MARROW, SIGNAL = 1.2; EXPRESSED IN HEART, SIGNAL = 0.95; EXPRESSED IN ADULT LIVER, SIGNAL = 1.1; EXPRESSED IN HELA, SIGNAL = 0.98; EXPRESSED IN HBL100, SIGNAL = 0.92
tcatctaatgctcaaaacaatcctttgtacagggtagttactgctactaaaccactttcacttttgaggaagctgaggcaagaagggtgaagtgagtagcttgccgaaggtgacagcgacaatgtaggacaaagctaggacttgaactcaggtgctccagctccagagtctgagctctcacccactatcaatacaacccaatcccacacgacttattctctttagatttaatgacaactaagaaaatcaatgttacatacaggcaggcggatcagtttcttatggtatctttccacacgcccgaagacctcctggcagtaccgtcggagctcatctagttcctcctcgatgatcgctgcatccaagggctcactcttttctatcagctgttctccttgggcaattatctgc

SEQ ID NO: 5045 - DNA, 418 bp, Homo sapiens; identical to SEQ ID NO: 2006
  MAP TO AL033539.17; EXPRESSED IN LUNG, SIGNAL = 1.1; EXPRESSED IN HBL100, SIGNAL = 0.99; EXPRESSED IN PLACENTA, SIGNAL = 1.2; EXPRESSED IN HEART, SIGNAL =   1; EXPRESSED IN FETAL LIVER, SIGNAL = 1.1; EXPRESSED IN ADULT LIVER, SIGNAL = 0.98

SEQ ID NO: 5046 - DNA, 466 bp, Homo sapiens
  MAP TO AC007968.2; EXPRESSED IN FETAL LIVER, SIGNAL = 0.99; EXPRESSED IN HEART, SIGNAL = 0.98; EXPRESSED IN LUNG, SIGNAL = 4.8
tgtgtaaattagaaagagacccccccaacttaagacagtttatttcctactgccagaaaattgccataataaactacaaatagcaaagaccatgacattgatggtgcaccttgcgtgttttgcctgacatgccagacattatgacgtgaccctgtttcatttatcagacactaaacaaaaaagtgagtagacatttttttttagcaacaatgtgcaatttttccagcctagacatgaaagcagtgtgcatctgagggcaataagggagacctgtgacaaagaacagctacagaaatgaagattctgagaagttccactgtccctggcagggctttcagaacaatgaagagcaaaaacaatcaaaccagccctataggattccagaccatgccaagaaccaaggtagaagcttgcgttagaggagttaggacaaaaagaggaatggtgaaacccaagaataagttca

SEQ ID NO: 5047 - DNA, 470 bp, Homo sapiens
  MAP TO AC006445.10; EXPRESSED IN BT474, SIGNAL = 1.1; EXPRESSED IN HEART, SIGNAL = 0.85; EXPRESSED IN BONE MARROW, SIGNAL = 1.1; EXPRESSED IN LUNG, SIGNAL = 1.1; EXPRESSED IN FETAL LIVER, SIGNAL =   1
gttcacggtgagctgtgatgagacttgagcctggaagggagtgggagcccatcaggaagagtcttgtgtggtgtgctgagttggggtttttacctttaaagcaatagaatacccattgatggatgaaatacgagattaaattgattttttacttggctttgtttttaaaggttgatgtatttatttttaagttttgtgtactcttgaaaataggcttttatattgtttcaggatgctgggtttttttttgtttaattcacttgaggttagtcttcttgtaaaaaccctggttaacttatttttatggtgctttggattttttaggcttatgtgccttcagaggaagagaaaaatggtgaaattctggcaccaccagaaagtctgtgtgggggaaagccaagtggaataggtgagctctttagaatggttgttcacattgtttttgtttttgccttgcatgtggttttacc

SEQ ID NO: 5048 - DNA, 463 bp, Homo sapiens
  MAP TO AC010731.1; EXPRESSED IN FETAL LIVER, SIGNAL = 1.5; EXPRESSED IN HEART, SIGNAL = 0.98; EXPRESSED IN BRAIN, SIGNAL = 1.1
tgcaaaataatttgtgactacagaaagagaataaggtttaaagagaaaaagaatactgtattaaagaaaatgtgtatatttacttcttcccaatctcagttctagactaagaagtaattcaaacacattttaaaaatatgatatatcagaatccttaatttggcagtaacataaattatatactttaaaggcaaaaacagatattcttatgtgtctcctcttaagtcaattagaatgttatactggtgcattggaacagtgtcaacgaattcagtattccatgaattgaaaccaaaatcacacaaacccttgggtccttcatccttgggggggtgaaggttcctaactggatcccggatactgcaatctgtccctgcccaggtgaaatcacaaatgcaggtggcttcattactacacacctgtgaagaaaaaggaacagatatggcattttcactgtattttg

SEQ ID NO: 5049 - DNA, 464 bp, Homo sapiens
  MAP TO AL078476.2; EXPRESSED IN HEART, SIGNAL = 0.88; EXPRESSED IN FETAL LIVER, SIGNAL = 1.4
cgcactttaggtactccaagcatgaaagcttcattctcaacagattcctaatgtttcagaggccaaaatcttcctaaaccttcctggagataggaccatatgaggatcaagccttgggtgtcgtctctaaatatacactacaggccaccctcatacacctttatcctgtttatgcaagggtgggctgtctccaaaacacgttagttgattcacagatcttaaaaggtcatataattgtaacatccatcatgctgctttgtaagccgccaatttcactaataaaaacccatttgtgaccttcactgtaataattaacaatgtttcaggtgttaattgagatgggaccactgaagcccttttggtggccatctctgtggagtggcttcctgagctgaacactagcttaccatccttgaacagagcatccaacattagggcaaccagctgcccctgtaggaaagatt

SEQ ID NO: 5050 - DNA, 468 bp, Homo sapiens
  MAP TO AC008132.19; EXPRESSED IN HELA, SIGNAL = 1.2; EXPRESSED IN HEART, SIGNAL =   1
ggacagtgtacaagccatcgctaatgaggacactgtatatgacattgctaacgaggacactgtacaaggcattgctaacgaggacgctgtacacaacatcgctaatgaggacaccatataagacatcaccaatgaggatgctgtatatgacatcgctaatgacacccacaaggcatgctaacgaggacgctgtagacgacattgcttataaggacaccgtacaagacatcactaacgaggacgctgtatacgacatcgctaatgaggacgttgtatatgacatcgctaatgaggatgctttacaagacatagcgaatgaggttgctgtatatgacatcgctaatgaggacattgtatatgacatcgctaatgaggacgctctatacgacatcactaatgaggacgctgtatacaacatcgctaatgaggacgctgtatatggcatcgctaatgaggatgctgtatacg

SEQ ID NO: 5051 - DNA, 487 bp, Homo sapiens
  MAP TO AL034384.1; EXPRESSED IN ADULT LIVER, SIGNAL =   1; EXPRESSED IN HEART, SIGNAL = 0.86
ttgtggcctttcctcaaatcactccactctcttgcttccatcctcacatctcctgctactgacactgaccctactgtgcccctctcatgattacattaggactcatccggataatccaggatgatctcgccatgtcaagagtcttgatttaattctacctgcagagtcccctttgccttggaaggtaacatactcccaggctctggggtgtggggagaggcattgttctaccaaccacatcttctctcctctctctagggttcctattcctgatcaggccagtttggagcaaactcagggggctcagagccagaagagcccttagaggccacctattgtgtttggctctgtctattccagctccctggctagactgtcagcccctgaatgcaaggacacaaactagtcttgttcactgcttaatgctcacctccataccacctcagcacagagaatggacagagtcagcacttggtacatctgtgcc

SEQ ID NO: 5052 - DNA, 1976 bp, Homo sapiens
  MAP TO AC005691.1; EXPRESSED IN HEART, SIGNAL = 1.3
ggtgactgtgtgtgctctcctttcctgggtgtaggagtgagtccagggaaagaacaggctggggaggtggccaggggagagcagctgaggctgcagagagggaggtgacacacatcggctcagcatagagtggcacctgcaaggaaggggctggaggagatgggaaggctgaggggtctggagcttggatcagggatttggggtaacttggaggagaaggtgtgattggaggcctgggttggtatggggtggggagaagttcttgggtatgaggtggaaggagtgctgatgtctccaaagcatgctcactgttttatatgtcactctcagaaggctggatccagggcattacattttgtttttgtgaacacaatcaccatcatcactattgtcttcctcatctcaactctcatcaccaccatcaccattgtcaccattattaccagcatcaccaccaccatcacaaacatcaccattatcaccaccatcaccaccaacattaccatcatcataactctcatcactatcatcaccaccatcacagctctcacccccatcatcacgagcatcatcattgtccccatcatcataactctcattaccaacatcgccattatcactgccatcatcactaacattatcattaccctctcataataactctcatcaccctcgttactgtcatcaccaacatctccactatcatcacagctcttgtcactaacatcaccatcatcagtaccatcaataaccttaacatcaacatcatcataactgtcaccaccatcatcgcaactctcatcaccagcatcatcattctcattaccaccaccactgtcatcattaccactctcattgctatcactaccatcattatcatcatcattatcagtcatcagttattgtccttgtcctgccttccattcctgcttgatgctttataatttattccaaaatacttccacatcctttctctaataagaaattaatcagagacctttgaagcaggcaggattggtctagttatctccatttcacagaagaggaaactgaggctcagagatggtaagtgacatgcctgaggttaagcaacatgttcacttactcttactagaactgagttcttatctactgattcaaggctcttcctagtgcacctagctgctgtagaatctccactgccttccttatcttgtttctcctccttctacttggcaccaatacaaactggtgtggaaaactctagttttgataaaacaagagaggctttagtcatagtagtacaaaactggatgtatgttcatgggtaagtctcttcctcatgttgggctccaatttcctcattttcacaggtaccggtttgggcctgataaagtccaaaggctctttctactctgctagtctataacggtgccacagaaaaagagtcatataaacagagaaaaaaaatagaaaaagacagcgcgacagagacgtagacacacacagaccaaggcagagacccagagagacctaggaagacctagacaaaagactcattaagatccaggaagatacagagagaaatagagacagaaagcagccaagagacagagtacacgtcaaagaggagatttaagaggcaaaaagcctagagaggaaaagtaagtttttgagcaggaccagggggcaactgatctgtgtagtggtctctgctcaggatccccacccagagttctccagggagaactggctaaaatgaggacagacagtgcagcctggagatacttctgaaaggtttttggctgaattggcaacttctatgtgtgtattgtatgtgtgtgcttgtctgcatgtttgaattgtgggcttcagaatgctttttttttttttttttcagggaccagaaagggtgttagggcctcctatcatggatttttacctccctgccacctggctttcacagcagcaggcttgctgatttggctgcctctgtc

SEQ ID NO: 5053 - DNA, 451 bp, Homo sapiens
  MAP TO AC007336.2; EXPRESSED IN PLACENTA, SIGNAL = 0.89; EXPRESSED IN HBL100, SIGNAL =   1; EXPRESSED IN HELA, SIGNAL = 1.3; EXPRESSED IN HEART, SIGNAL = 1.3; EXPRESSED IN FETAL LIVER, SIGNAL = 1.1; EXPRESSED IN BT474, SIGNAL = 0.91; EXPRESSED IN ADULT LIVER, SIGNAL = 1.2; EXPRESSED IN LUNG, SIGNAL =   1
atccaggtgctccaacaatggcccctggagtcagtttttatctctctgctccacgtttggctgtgttgcttccttactcacacagatacttacctcatggtagcaaaaaggctgccagaagctccagctccacatatttctgggattggtcccctgggaaacagcatctgttctgtccctagaacaaaagccatgggttatcgctagggctctgaaggggtcctttgcccatcctggagccaatcacagcagtctaggttccccgccggcctggaactaaggataggttccttctggcccattctacccagagttcagagccagagaaactgaatggaggcctgggtgggggcaaaaccgtaggtgtctattaccagggtgactcaggaaaccctttcatttcagcagagcagacaatgaaactaagagaggaggtgagatttggccagag

SEQ ID NO: 5054 - DNA, 1985 bp, Homo sapiens
  MAP TO AL033532.15; EXPRESSED IN HEART, SIGNAL = 1.2; EXPRESSED IN FETAL LIVER, SIGNAL = 0.95; EXPRESSED IN LUNG, SIGNAL = 0.94
aagcagatttctggaccgtggtgtcccctgtcccattcttttgggacacataccagggcaccagggagctctgctggccttgtcagcatggccgtgagctactgagtgacaggaagctccctggcaatcacagcggagcctctggaatgtttcttccgaaaggaaatctgtgctttgagccttaccgccagtcagcctgagaactcacccacaaacaggccagagtggctgagaggaccacagatttcatctgcctcggaggggctatcctaacaatgcccaagttacctgtgatcctgttggaaatgctgaagagcctggaagtcctctgtcgttgcacaaatggttcccgataataccggtccccaaagcacatgcccagtagttctttgcgaactgtcttgttccagagtccatagatcagggggtggcagacagcgctggcaaaggacagccatgtggcccaagtctccaggctcggggagacggagcttttcccccagagggcctcagaggcgatgacaaccatgtaggggccccaggtgaccatgaaggcaccgaggaccaccaggatggtgatgagggctttgcactggttggccgagtagaccacaccctgaaaggcattcctcctgctgcctgaagaggaggtggaggtgctggagttcttcctcccggtcctctgagcatcctcctccacgatgacgactgtgccacagtgcaccttgcgtgccttgaccctggccacgcggaagatgaagccatagcacaccagcatgaccagaaaggggaagagggcacaccagatctgccagaaggccgtgtagccaggctcccggtgccaagcagccacacacatccatttgaactcgtcaaactccacggatgaccaaccaaacaggggtggcaggcagccgatgagcgagtgaagccagatgtagacaagtgccatcacagcccggttccctgtgatcttcatggggtacaccatggggtacaggacagcatagtagctagaaaagggatggagggaggcaagagagagaagtcagcggagagagaaaaccgctgccttcctgcgtcaggggctcccatgactgggttggatgtttctaaaagcagcaccttctcccaagtctccccagacaagttatatagactgcatcgtgttccacagctctgcagagctctttaacagagaagagctcaacactggcaagacacagagctcgaacagtcctgtttccaagtcatcacaccacagcccactcatatttgggggtgtggccagtcttaagatacctacagaggtcctgagggattatgcattgggccagatcaattctgctgctgctgacagcagaatcatccatttacatcaattttcagagggatcattaagaaccagaatgatgttgaaggactacgggcttcattcaaccaatggacatttaccaaaggcttgcgatgtgccaagcaccgcgctacctcctggaaatgcagttgagaagatgtgagggaggcagacacctgagccaagtatcagggcctggagtggtaagggccacattgagtcctcacagcaactgtgagcagcggatatgtcattatcttcattttacagatgaggaaactaaagcagggaaaggctaaataacacaccccagacccatgggagaaagacagaaagccaggcgatctgactctacaatccccagtgcacacgcccagcaattctgtgtaagccttcttgttccacagccaagggggcgggtccgaatcactcagtgctgctaggtaggaggtgggccaggagggctatccattcaaactggcaggcttctggtccagcacagagggtcacagcaggctcctgttggaggtgatgctccagacccaggtctcacagcgttggaggcactgacccaggaccaccccaggcagaaagctagcctggcgaggtatggagttgtgagtgagcacca

SEQ ID NO: 5055 - DNA, 1965 bp, Homo sapiens
  MAP TO AC010680.3; EXPRESSED IN HEART, SIGNAL =  11
ggaggtaccgaaattgagggctacattcttgaaaaacgagataaggaaggcgttagatggaccaagtgcaacaagaaaacattaacggatctgcggctcagggtaactggtcttaccgaaggccattcctatgaattcagagttgctgctgaaaatgcagctggtgtgggagaacctagtgagccatctgttttctaccgtgcgtgtgatgccttgtatccaccaggtcccccaagcaatccaaaagtgacggacacttccagatcttctgtctccctggcatggagtaagccaatttatgatggtggcgcacctgttaaaggctatgttgtagaggtcaaagaagctgctgcggatgaatggacaacctgcactccaccaacaggattacaaggaaagcagttcacagtgaccaagcttaaagaaaacactgaatataacttccgtatttgtgccatcaattctgaaggtgtaggtgaacctgcaactctacctggctcagtggttgctcaggagaggatagagccaccagaaatagaactcgatgctgatctcagaaaggtggtcgttctgcgtgcaagtgctactttacgcttatttgtcactatcaaaggtcgaccagaacccgaagttaaatgggaaaaggcagaaggcattctcactgacagggctcagatagaggtgaccagctcatttacaatgttggtgattgataatgttaccagatttgacagtggtcggtataatctgacattagaaaataatagtggctccaaaacagcttttgttaacgtcagagttcttgactcaccaagtgcccctgtgaatttgaccataagagaagtgaagaaagactcagtgacgttgtcctgggaaccaccacttattgatggtggagctaagattacaaactacattgtcgaaaaacgagaaactacaagaaaagcctatgctaccattacaaataattgcactaaaactactttcagaattgaaaatctacaagaaggatgttcttactacttccgagtcttggcttccaatgaatatgggattggtttgccagctgaaacaacagaacccgttaaagtgtctgaaccacccctcccacctggaagagtaactcttgttgatgtgacccgtaatacagctacaattaagtgggagaaaccagaaagtgatggtggcagcaaaattactggttatgtggttgaaatgcagactaaagggagtgaaaagtggagcacctgcacacaagttaagactctagaagcaactatatctggcttaactgcaggagaagagtatgtcttcagggtagctgcagttaacgaaaagggaagaagtgatccaagacaacttggagtgccagtaattgcaagggatattgaaataaagccttcagttgagcttcctttccatactttcaatgtaaaggctagagaacaacttaagattgatgtgccattcaaaggaagacctcaagctactgtgaactggagaaaagatggtcagactcttaaagagacaactagagtcaatgtttcttcttcaaagactgtaacatcactatctattaaggaagcttcaaaggaagatgttggaacttatgaattatgtgtttcaaacagtgctggatccataacagttcctattactataattgtccttgacagaccaggacctccaggtcctatacgtattgatgaggttagttgtgacagcataaccatttcttggaatcctccagaatatgatggtggctgccaaattagcaattacattgttgaaaagaaagaaaccacctctacaacatggcacatagtttcacaagcagttgcaagaacatccattaaaatagttcgcctgacaacaggaagtgagtatcagttccgtgtttgtgcagaaaaccgctatggaaagagctcctacagtgaatcttcagctgttgttgcagagtatcca

SEQ ID NO: 5056 - DNA, 1921 bp, Homo sapiens
  MAP TO AC010680.3; EXPRESSED IN HEART, SIGNAL =  15
tggctttgtgaacgtcagagtcttggacacgccaggcccagtcctcaacctgcggcctacagacatcacaaaggacagtgtcaccctgcactgggacctccctctgatagatggaggctcacgtataacaaactacattgtagagaaacgtgaagcaacacggaaatcttattccacagccaccactaagtgccataaatgcacatataaagttaccggcttgtctgaagggtgtgaatatttcttcagagtgatggcagagaatgaatatggaattggtgagccaacagaaactacagagcccgtaaaagcctctgaagcaccatctccaccagacagccttaacatcatggacataactaagagcaccgtcagcctggcatggcctaagcccaaacacgatggtggcagcaagatcactggctatgtgattgaagcccaaagaaaaggctctgaccagtggacccacatcacaaccgtgaaagggttagaatgtgttgtgaggaatctaactgaaggagaggaatataccttccaagtgatggcagtgaacagcgcggggagaagtgcccctagagaaagcagacccgtcattgtcaaggagcagacaatgcttccagagctggatctccgtggcatctatcagaaactggtcattgccaaagctggtgacaacatcaaagttgaaattccagtgctcggtcgaccgaagcccacagtgacatggaaaaaaggagaccaaattcttaaacagacacagagagttaattttgaaaccacagcgacttcaaccattttaaatatcaatgagtgtgtcagaagtgatagtgggccctatccattaacagcaaggaacattgtaggagaggttggtgatgtcatcaccattcaagtccatgatatcccagggccacctactggaccaatcaaatttgatgaagtttcatctgattttgtaaccttctcttgggacccacctgagaacgatggtggtgtaccaataagcaactatgtagtggaaatgcggcagactgacagtactacctgggttgagttagcaaccaccgttatacgtactacctataaagccacccgccttactactggattagagtatcagttccgtgtaaaagctcagaatagatatggagttggaccaggcatcacatcagcatgcatagttgccaactatccatttaaggttcctggacctcctggtacccctcaggtaactgcagttaccaaggattcaatgacaattagctggcatgagccactttctgatggtggaagccccattttaggatatcatgttgaaagaaaagaacgaaatggtattctctggcagactgtgagcaaagctttagtaccaggcaacattttcaaatcaagtggacttacagatggtattgcttatgagttccgggtgattgcagaaaacatggcaggcaaaagtaagccaagcaagccatcagaacctatgttggctctggatcccattgacccacctggaaaaccagtacctctaaatattacaagacacacagtaacacttaaatgggctaagcctgaatatactgggggctttaaaattaccagttatatcgttgaaaagagagaccttcctaatggacggtggctgaaggccaacttcagcaacattttggagaatgaatttacagtcagtggcctaacagaagatgctgcatatgaattccgtgtgatcgccaaaaatgctgcaggtgccatcagtccaccatctgagccatctgatgctatcacttgcagggatgatgttgaggcaccaaagataaaggtggatgttaaatttaaggacacggttatattaaaagcaggtgaagcattcagactggaagctgatgtttcaggccgcccacctccaacaatggaatggagcaaa

SEQ ID NO: 5057 - DNA, 1926 bp, Homo sapiens
  MAP TO AE000658.1; EXPRESSED IN FETAL LIVER, SIGNAL = 1.1; EXPRESSED IN ADULT LIVER, SIGNAL = 0.98; EXPRESSED IN BONE MARROW, SIGNAL =   2; EXPRESSED IN HEART, SIGNAL =   1
tgagaggatactaaggaactgttagaaagttagtattttaccttaaactgtgtttgatcatacagtatggctatataaaagagaaaaaacaagaagaaaagaaaaaagttaccgaagcctaaacattataataaattctaattgtggcagcttccctagtgggagaaagacactttcaaacctcactcggagttcttgggcttctgagcattcttttcagggccagcttcacctcttggttccgcagagtgtagataagggggttgaggaaaggagtgatggccgtggggactagggcagctgccccatccagggggctgttggtttcaggcctcaggtagatgaaggcacagggcacatagtacacggtgaccacggttacatgggctccacaagttgaaaaagcccggcgccgcccatcagctgtgtggattctcaggatggcctgaatgatctgtatgtaggagaggaggatcagggagaagcaactggcaaccaccaccccaatgtctacaaacgtcaccagctcgttgactgttgtgtcagcacaggccagtctcaacactgcagggatgtcacagaagaagtaatccacctgattgggcccacagtagggcaggcggaaggttaggatggcctggagagccccatggatggatcctgccatccaggctccagccacaagcaaggcgctcagcttagcagtcatgagcacagggtagcgcaggggctgacatattgccaggtacctgtcataggccattagggtgtagaggaagcactgggtgctgcccaggaagtgatagaaatagagttgagcaacacagccaccaaatgggatgggtttgacacctaaagtgaagttcatcatgaggcgagggacaatgatggaggagatgctcatatcaatgactgagagaacaccaagaaagatgtacatggggcgggcatggagccttgggtctgcccagacagtgattaaaataagcaggtttcccagctgagtcaggatgtagattagaaaaaagaacacaaaaaagagtgtccttagcctgagtggatacggaattcctgtcaggataaacgcagtcaacagtgtgctgttgattctttccatatcccagagaatcttacctagagaatggacaaaacaagaattaacatagaggtgagaggaaagtgagggggaactagaaagagattgtaaaaactaggggcagtggcagagaagtttctttcttacgtggaaagatgacaagtagggagaaacaatgttctctggcaggtgttttgtaaacaagatcttattggaacacagccttgctcatttacttacatattgtccgtaactgttttggagctactatgacagagatgagtggttgcatttagcttgcaaaacataaactatttactccctggacatttatagaaaaagtttgcaccgagggttttgtacttagagcactttttccaataacctttggaaaataatcattgactgttgtgttagtacaggccaggatttcctggaaacatgatatatgtgagaaagggtatttgtttcattaggtgctctgcccgctcagaatcttccagaggccactggctcactcttatctctgccaggacataaacttacatagagtggggaatatgcagaaaggaaatgcagaaaataagtggctgatttttatgtgtgacagtgcttgatgctgtacagatctactttccaagttctttaccattaaaaggaagagaatgaccatgaagctgtaagtacataaataaagtgaggactatcgccactatgcactgtggttggtacttggtgctatataattcagttgctttgcatgtgatcatttagccttaagacacagtaaagagaggagagaaagaagaaatgagggctggctctagtga

SEQ ID NO: 5058 - DNA, 464 bp, Homo sapiens
  MAP TO AC009819.2; EXPRESSED IN HEART, SIGNAL = 1.8; EXPRESSED IN FETAL LIVER, SIGNAL = 0.94; EXPRESSED IN BRAIN, SIGNAL = 0.98
atcgcatgctttttctctgcatgatacctaaatcttccagttatcctagcagggggtaaaaaaaaaatctcctttctgtggtattccttcaggaatttgtgcttttgttttttggcgtctcttctttcttctcctctctctctctttcctttcgttacagtgcatcatgacggtaaacatttcttggttatttagaaacagcccatgggcccagcgctcagcagtgtccaacgggtctttttgctttcagatcactgggtcggggtctgctgctgacctctttaccaaaacagccagcccgctcaccacctcgcgaggacgttcccaggagtacgactcaggaaatgacacgtcctcgccaccctccacgcaaaccagctcagccaggtctcggggccaggagaaggggagccccagtgggggcttgagcaagagccgggagctcaacagtggcaacacctctg

SEQ ID NO: 5059 - DNA, 409 bp, Homo sapiens
  MAP TO AL034377.1; EXPRESSED IN BONE MARROW, SIGNAL = 1.2; EXPRESSED IN HBL100, SIGNAL = 1.1; EXPRESSED IN PLACENTA, SIGNAL = 0.94; EXPRESSED IN ADULT LIVER, SIGNAL = 1.1; EXPRESSED IN HEART, SIGNAL = 1.1; EXPRESSED IN BT474, SIGNAL = 0.99; EXPRESSED IN LUNG, SIGNAL = 0.93
cttctgcaggttccttcctgcagatattccataggaaggagaaattaaagggactttttgatttgtgagtgtgtgtgcatgtattgaggtagcaccattttatatcttgtgctttaacacccacccatactggtatcctagaattatttccttacaaatgttttgtgcttcagaggcaatatatttttatgtaatatcagaagactgctatatcaatgttggccccatcggtttgctctcattagtaaagttactagatttgctttatatgactgggagcatcagaactgcttgttcactacagtgttacaatagcaccatccaatgccaacaatgctgtccgtagtccagttattctaaaagaagtgaggagaagttcacatgtaggacctacttgctttgttgaaga

SEQ ID NO: 5060 - DNA, 394 bp, Homo sapiens
  MAP TO AF069291.1; EXPRESSED IN HEART, SIGNAL = 1.3
tgcttttctttaagctatggattctctgtattcttcaatttatgaaattgaaaaatataatatgaagtcatacaaggtgtttatttctaggaagatggatgttttgaaagctaccgcagaacaaatttcttctcaaactggaaataaggtacattaaaaatcagttatttaatttagatttaggaattataacatgttcaaataatttgttcatgcgtttggtttaagaaagctggaaaatgtcatattctttttgttattttgcaggttcatgcaattcagtgtgatgtgagggatcctgatatggttcaaaacactgtgtcagaactgatcaaagttgcaggacatcctaatgtaagtgtagcaatgatgaagccaaagtgcaagacacttg

SEQ ID NO: 5061 - DNA, 493 bp, Homo sapiens
  MAP TO AC007640.1; EXPRESSED IN BT474, SIGNAL = 0.9; EXPRESSED IN BRAIN, SIGNAL =   1; EXPRESSED IN PLACENTA, SIGNAL = 0.68; EXPRESSED IN HBL100, SIGNAL = 0.76; EXPRESSED IN LUNG, SIGNAL = 0.64; EXPRESSED IN BONE MARROW, SIGNAL = 0.64; EXPRESSED IN HEART, SIGNAL = 0.81
  unsure 122
tcacaaagaagttactctgaatgcttctgtctttttttaggtgaagatatttccttttcagctataggcctcaaaacgctccaaatatccatttgcagttactacaaaaagagtgtttccanaacagctcaatcaaaagtaaggttcaactctgtgagttgaatgcacacatcacaaagaagtttctcagaatgcttctgtctaacttttatgtaaagatatttccttttccaccacaggactcaaaacactccaactatcaacttgcagattctatagaagcagtgtttcaaaactgctcaatcaaaagaaagtttcaactctgtgagatgaaagcgcacatccaaagaagtttctcagaatgcttctgtgtcgttttaagtgaagatatttccttttcagctataggcctcaaagcacctcaaatatccatttgcagttactacacaaagagtgtttcaaaactgctgaatcaaaacattcagctcggtga

SEQ ID NO: 5062 - DNA, 476 bp, Homo sapiens
  MAP TO AC009576.2; EXPRESSED IN FETAL LIVER, SIGNAL = 1.1; EXPRESSED IN HBL100, SIGNAL = 0.93; EXPRESSED IN HEART, SIGNAL = 0.87; EXPRESSED IN LUNG, SIGNAL =  10
  unsure 42
tccagtaaaaattaaccccaaatcttagtaccttaaaactancaaaactttatttcttgcacatccatctcaggctggcaggaactctgctccatattgtccatattcagggtcctcgtctgccagagctttcactgtctggaataacgcaggtcactgtggcaggcgaaaggggttgtagtgaatcgtgttggttcttaaagcttctgcttaaaagtgatgcacatcacttctcacatttcattagccaagcaaatcacatggctacagctaacttcaaaggggcagggaagaacaatcctaccacatactccaaagaacaaggcccagaaacatcagggaatggtgctaatggtgaccatatcacaacttgtgttctttggcaactttcttatggtacatttccagttttatctgtccttctacagcatagcctccttggagtcagagtgagttcactaccctgtctgccacgt

SEQ ID NO: 5063 - DNA, 408 bp, Homo sapiens
  MAP TO AL078634.20; EXPRESSED IN PLACENTA, SIGNAL = 1.3; EXPRESSED IN ADULT LIVER, SIGNAL = 1.6; EXPRESSED IN BT474, SIGNAL =   1; EXPRESSED IN HBL100, SIGNAL = 1.2; EXPRESSED IN HELA, SIGNAL = 0.97; EXPRESSED IN HEART, SIGNAL = 1.1; EXPRESSED IN FETAL LIVER, SIGNAL = 1.2; EXPRESSED IN LUNG, SIGNAL = 1.4; EXPRESSED IN BONE MARROW, SIGNAL =   1
ccttgcatcttccttcttgcatagcttcctcagaaattcaccatctcattaagggaacagaatgatatgagacacaaattaatgccactattaagaagacactgtgtagttggttcagttcattataaaatttcgcgcattaattgcttagtcatacaaatacacactcgtccccagtcctagacatctggtgttaacctggaagagtggaaatacctttgcctcgttgcttcttttccttttgttcacttaatttatccagaggtaggtttgtcatctcaactccataaacggttcttgcaagcactgctgtcaaggagtccataatgttggcccactcgtttataagttcctcccattccgtgagggaggacagcacaccaagaaagtcatcccagagctctcgag

SEQ ID NO: 5064 - DNA, 420 bp, Homo sapiens
  MAP TO AL035685.17; EXPRESSED IN BT474, SIGNAL = 1.1; EXPRESSED IN LUNG, SIGNAL =   9; EXPRESSED IN BONE MARROW, SIGNAL = 1.6; EXPRESSED IN PLACENTA, SIGNAL = 1.1; EXPRESSED IN HBL100, SIGNAL = 1.4; EXPRESSED IN HEART, SIGNAL = 1.2; EXPRESSED IN ADULT LIVER, SIGNAL = 1.3
ccatctgtaaaatgggtgggctggatccacccatttgccatagaatttctacttctgctttcagcccaacagtaaaatgagcacaagtgtctcatacaatgcagacttctaaattctgtccctcaggggatagcaagggtgggctcttcctagctgctcaggatagtcgaaggggacagatcaaaaaaggcagtccgtctgggatagccatgtggacgggaatgagctaccttccccctcacctccacgtcttctggaacttaatgataacatcatccccacgcagctcctggcctaattggcatgattccattacatctgctggttctttcccataacggaacccagcctggtggtccagacccgactgctgggccacagctgagaaaagggccccccgggagtgtgtgttcctcacga

SEQ ID NO: 5065 - DNA, 378 bp, Homo sapiens
  MAP TO AL022067.1; EXPRESSED IN HBL100, SIGNAL = 0.95; EXPRESSED IN HEART, SIGNAL = 1.3; EXPRESSED IN BT474, SIGNAL = 1.2; EXPRESSED IN BRAIN, SIGNAL =   1
ttcccgaacatgaaaagacgataaaactgaaatggaaaaggtaactgacaaaagtgtgccttacctgtttccgccctgatttctgctgattcaagactattctggctaaactgattggattctttttctaactaggcagtaggggatcagaaatcacacacggtaccggctgtgtttattctgagaggtgctggggagctttgggtctgacttccttttacatgcctgtcttctcttttggacagatctattccagaggggagcttcaccacttcattgacggctttaatgaagagaaaagcaactggatgcgctatgtgaatccagcacactctccccgggagcaaaacctggctgcgtgtcagaacgggatgaaca

SEQ ID NO: 5066 - DNA, 394 bp, Homo sapiens
  MAP TO AC008417.2; EXPRESSED IN HEART, SIGNAL = 2.5
actaccctatttgcagaaatgcattgcaataaaaagttggtgcagctgggactctgtcaacagatttcttaatatttgaatatcagtgctgttttgatacagtaatacttatgagggatatcattgttaatgtggtttgatatacactaacaacttcaccaaaagatataatcttattacccataattttaatgatttttttaaagatgatttttctataattagattacctggtaccataatccacaaccacccagtcttttgcagttcctgtgatagcatcatgatgttgaaacagtcccaaattccttctggcttctgtcagtgccgtgtaaagtgatgatgagagaaatttatttatcttgtatttgtgagcttgtctcagggcgaaata

SEQ ID NO: 5067 - DNA, 366 bp, Homo sapiens
  MAP TO AL008627.1; EXPRESSED IN HELA, SIGNAL = 1.5; EXPRESSED IN PLACENTA, SIGNAL = 1.1; EXPRESSED IN HEART, SIGNAL = 1.2; EXPRESSED IN BT474, SIGNAL = 1.2; EXPRESSED IN FETAL LIVER, SIGNAL = 1.1; EXPRESSED IN BONE MARROW, SIGNAL = 0.92; EXPRESSED IN BRAIN, SIGNAL = 1.1
ttctcctaggcccgtgtatgtagtatgctgccgagtggaggtagaaacctgtccagtttccccccggagcccatccttaaccttctgtctcaacactgttaggaagattaaatgaggaactgcctgtaaagtattatatagagtcctggaaagataataagcactgaaaacacacacacacacacacgcacacacacacacacagaaaagatagttatcattattctcttctcttaggtctaaccagctgtgccagaaatgaggctggagatggaagaaggaatttagaagtagttatgatgctggtcccagtgacggtcagcctggctctggttttagttctcaacacagacctcaaggccctta

SEQ ID NO: 5068 - DNA, 395 bp, Homo sapiens
  MAP TO AC008430.2; EXPRESSED IN BRAIN, SIGNAL = 1.5; EXPRESSED IN HELA, SIGNAL =   1; EXPRESSED IN HEART, SIGNAL = 1.2
gccctggttctgaaagactggccttaaaattgacaagaccatcacagtggaatatagatcatgtcatgagccacagtggtttatggctttaattaggagtttatggttgggttttatattcagtgctcatggcaaggcacttctcaaatgctccatgctcccaaataatgtaatctgttcttcgaacaattattttcgataaggtatagatagggtaaatatgtaaaaataggtaaataagctgttgcagtgaataattttaaactgtttttacacaggtgtttcgtggaaacattgataacaacactccatatgctaactctttcacaccccccataaaagctcagtatgtaagactctatccccaagtttgtcgaagacattgcactttgcga

SEQ ID NO: 5069 - DNA, 369 bp, Homo sapiens
  MAP TO AC010740.3; EXPRESSED IN HEART, SIGNAL = 6.4
taggggaggcaagaaacatcattttatcggactattaatgttatttaaatgaattagaaaatactagagtatatttatacttattaaccatctaaagtaaaaatgtattctctctagcattataataatgcctgaagaaagaaaaaaatgtgaaataaaaactaccaacaagtaaaatcataatttctctcctgtcttgcccccctctgcttctctcttcctcatttcaaattaagagattcattctcctgctggttgtaacggaaatgaatttcagtgccaccctgatggtaattgcgttcctgatttgtggcgctgtgatggagaaaaagactgtgaagatggtagtgatgaaaaaggttgcaatgg

SEQ ID NO: 5070 - DNA, 411 bp, Homo sapiens
  MAP TO AC012668.1; EXPRESSED IN LUNG, SIGNAL = 2.2; EXPRESSED IN HEART, SIGNAL =   1; EXPRESSED IN PLACENTA, SIGNAL = 4.6; EXPRESSED IN FETAL LIVER, SIGNAL =   1
gcaacattgcatattttctaaaccaagaaaaattaagcaagtgtttaagtgatttttccttttgatagtgggttaattggacttcatcaaagaaaatggtatctgcaaaactgctttgcatgttataaaaatgcttatttcacaacttgcttttcacataacctcttaccattaatttgcctaacagacattgatcgccctaaaggactggcattcactgatgtggatgtcgattccatcaaaattgcttgggaaagcccacaggggcaagtttccaggtacagggtgacctactcgagccctgaggatggaatccatgagctattccctgcacctgatggtgaagaagacactgcagagctgcaaggcctcagaccgggttctgagtacacagtcagtgtggttgccttg

SEQ ID NO: 5071 - DNA, 466 bp, Homo sapiens
  MAP TO AC012145.1; EXPRESSED IN FETAL LIVER, SIGNAL = 0.93; EXPRESSED IN HEART, SIGNAL = 1.1
ttgggctttacagttttgggtttttttggattcttggaggatttccttgttgccgcaggctttttagcctttttcggagtcttgacgctctttttgctagcccccgtggcctttttgagctttttagatgcaccccgttgccttagtttttgtagccacctttgaggcgccgggcttggtttccacggaggacgccttcttgttgagcttgaaggaacccgaggctccggtaccctttatctgcaccaacgttcccttgcttaccaggctcttaatgcccagcttaatgcggctgttgttcttctccacgtcgtagcctgcggccgccagcgcctttttaagagctgccaacgacacaccaccacgctccttagaggaggaagcagcctgcacgatcagctctgacacggaagggccagcgggttttttcttggaggctgctgcagccttagcaggtttctttgcc

SEQ ID NO: 5072 - DNA, 383 bp, Homo sapiens
  MAP TO AL031132.1; EXPRESSED IN HEART, SIGNAL = 0.94
tttttgctgctttgatgcctagtattgctatttccctgtattgttttccagttagatttttcagagtctacacatctgtgaagcttctcatttcactgaagtgaaatgacacccttgagtgtcaactggcttttagacatgaagatgacaaccttcctgtggtcatcttgagcgacctggtgttggggaaaatgggctgctttcagactgcacaaaatctggaaatggtttaattagtgtgtaagttaatcagggtccctaagtcaaaattacctggagtaggcacatttgcttttcttaacctctttttcttctttcccaccgtgttttactctttgtctcctttccactccccgcaggccaagaatgcaggcaccacacat

SEQ ID NO: 5073 - DNA, 417 bp, Homo sapiens
  MAP TO AL031407.3; EXPRESSED IN HEART, SIGNAL = 0.99
tgacagtggaggagaaagaggagaaagactgggagagatttagaaagtcgtcatggctggacctgatgaacgactgcatatcattgatgaggaagatggaggcaatgcaaggaggatgactctaagtttctatttggggcaacaggagcacgatggtggtatacattgaaacagacatctcaggaagaagaatacgctctgggggaaagcttgatctccgttcgggaaacattgagtttgagatgcttctaggacactgcagtacagatgctgtcagtagttggaaatagcatcctagaattcaggggagagccagaattggagatgtagatttgtgagtatttgctgtatatgtggtttatgttatgggaaaacacgagatcaccagggaagagcaccgtgatggtgataggacaa

SEQ ID NO: 5074 - DNA, 488 bp, Homo sapiens
  MAP TO AC010904.1; EXPRESSED IN HEART, SIGNAL = 1.2; EXPRESSED IN LUNG, SIGNAL = 2.6
tggttaagaaaactgaggcaaagaaagtttaagtaacacccccagggccactcaacaaagtggctattgggggaccgactgtagaatccaggctctcaatgaaattgaatagtttcttagttaaagcatttgatttttaacaaagctgtttaaaaatttaacatagaactaaggctctttcttataacattttaatttcttcattaaaccctagaaaatgaattaggcttgaacatcatgccatattattatataggttagcttcactgcttaattgaataaaaacaattccaatcaaagcatctcactttcgtcttttcagctcctgcatgttggtgtgttggtgcatgtcagactgccattcaacaaaaggcaagactctgcctccactctgggtattctggaaaatgtaagtaattggatcagactttcatatcactgcctcctagatgattagaatctcagttttctgcagagtctatcagacg

SEQ ID NO: 5075 - DNA, 488 bp, Homo sapiens
  MAP TO AL049692.11; EXPRESSED IN HEART, SIGNAL = 0.84; EXPRESSED IN PLACENTA, SIGNAL = 0.93; EXPRESSED IN LUNG, SIGNAL = 8.6
tctggtgtatggtttttgaattgtaaataaggagattaatttggtgcagcccctctcagctccattatcttggggcttgcatgcattccgggttttatttcttcatttaaaatgcgtctcaaacagatggaagcctagctatggagactgttttacattgaagtgcagctcaaagtttgggcagcctaaaagtcaggtccagaggcccctcttattttgcatctggctcttgcatcactgttaattatagcgagtgtggtgactcatttatatcagccgtttttatcttttcctgccagaagacagcatttctctggagaagctcaggacaagcatggcaaacgtcagcgagtcggaaagagccaggtcttacaacaaaagtacagccacattgattgtttcaactgcacagggaagaacagagattctcagacgaccctgtaagtttagcttgcagttaagatcatgggctatggaaagcagaccaa

SEQ ID NO: 5076 - DNA, 405 bp, Homo sapiens
  MAP TO AC007253.2; EXPRESSED IN BT474, SIGNAL = 0.61; EXPRESSED IN BONE MARROW, SIGNAL = 0.63; EXPRESSED IN HEART, SIGNAL = 1.3; EXPRESSED IN PLACENTA, SIGNAL = 0.98; EXPRESSED IN FETAL LIVER, SIGNAL = 0.67; EXPRESSED IN LUNG, SIGNAL = 0.71; EXPRESSED IN HELA, SIGNAL = 0.63; EXPRESSED IN ADULT LIVER, SIGNAL = 0.86
tccatagacccatgaatcccctcttgcatctcccaatttcatgccagacgaacacacaacccaaaagagtaatctcagtctaacgaaatgtataaccttgccatggcccaggtttctcttttctcctgcaattttataatccactgaaaaaaaaaatattctgaatagaaatctaccctcagccaatccattccctttgggttattcttttctatactcaccttacttgcatgtgggagatgaaaatatacttgataattggctttcaaatatgattttcttcctttcatctctcctatgggcatagctccagaaagagtcttcatatctcatttttaaaaaatcattgattttattagagtttagttctggctagtctttctctgtcccaaaggtctggctttt

SEQ ID NO: 5077 - DNA, 469 bp, Homo sapiens
  MAP TO AC004032.7; EXPRESSED IN ADULT LIVER, SIGNAL = 0.71; EXPRESSED IN HEART, SIGNAL = 0.82; EXPRESSED IN LUNG, SIGNAL = 0.59
agataaaaccacccccttgccaagctcccagggttggcggagatcatggagtcactcagcgcccagcactggcagacatcacaggacccagtgagtgctgttctgttttccacttgattgtcagcctcccccatcagactgtggccatgtggagaagggcaggtttggtctgttcaccccccgaccctgcacacaccaggccctcagttgggtccagtgtactgactgtgaagcgcccttcatccccatttgacagacgagaagactgaggctctaaggggcaggagctacccaggggtcacccacggccatgtcaccagctctggtggtgtggctctctcctctcagcccaggattcccagctgctcaggccagggtggaatcccaaatgccctgtatctgggcagctcctgtctgcagagccacagtttcctcatctgcaacttgggggtggtgattcctgctgagc

SEQ ID NO: 5078 - DNA, 453 bp, Homo sapiens
  MAP TO AL049759.10; EXPRESSED IN LUNG, SIGNAL = 0.66; EXPRESSED IN BRAIN, SIGNAL = 0.84; EXPRESSED IN HEART, SIGNAL = 0.97
aggtgttgcttgtcaaagggcagggcaaggacagatccatgtaattcatacctgcacgtgcctggttctgccacttacagaatgtcagagctggaaggaacttagaactcacctggcttacacagcccatcctacagatggggaaaactgaggtttctggtggtcaaatgacagagcccaggtctcctgccttctgacctgagttctatccactgcaccagggcacaggcataaggcaaaacttgcccgggattttcccaccttggggggcttcccaaggcagggcaacactgtgagccccgtcaccaattctctccccatgtgtgttggtgtcttggcagaactcgtctatgatgacgtcttcttggtctgggagaccatctgggcagccaaacacgtctcctctgcgcactacgtcctgttcattgcgctggctctggtggaagtctaccg

SEQ ID NO: 5079 - DNA, 366 bp, Homo sapiens
  MAP TO AC010906.2; EXPRESSED IN HEART, SIGNAL = 0.99; EXPRESSED IN BONE MARROW, SIGNAL = 0.94
tcaccaagcaacaggaaatgtgattctgccatccaggttggagttgtcttcagtaacatgctaggttactgggcatttggggtccaccgactgctaacagcatgaaatcattccgatacttgcataacagtgggttgcggccatggcatgtagcttcctgcctggagaacaccaccagccactgtacggtcagagaaaaagcatccacaagggcaggtcggagatgtacaaagaggccctgccctgcccctccatggcacctgctctgctcccataccttctgcggtatgtgcagcctgcctgcaagggcagcagcaggatggaatcggaagccccgggaagcctccaggaggaatctccaagcac

SEQ ID NO: 5080 - DNA, 389 bp, Homo sapiens
  MAP TO AC010680.3; EXPRESSED IN HEART, SIGNAL =   3; EXPRESSED IN BONE MARROW, SIGNAL = 1.3
tttgatgttcgcattctttccaagaacattggttttattttttatatttttcaccttgtgaaaaggatggtaatgagacaggtgttatataaaagaaaattaaagcatatgcacaggttagcgtagtttatttttaaatttttcacgtttcagttttctaatgaaatcatgtctcaccaaatgcgttcttggctacaacggaatcagattccagtggctcgccaattccatatttgttcacggctcggacccggaagatgtattcatttcctttgataattttggtggttgtaatgatgcactcttccaaatgttcagacaccatagaccacacaacgcggcttgtctcacgcttttccacaatgtagtgagtgatttttgcaccacca

SEQ ID NO: 5081 - DNA, 433 bp, Homo sapiens
  MAP TO AL034408.2; EXPRESSED IN BONE MARROW, SIGNAL = 1.3; EXPRESSED IN HBL100, SIGNAL = 1.1; EXPRESSED IN HELA, SIGNAL = 0.97; EXPRESSED IN HEART, SIGNAL = 1.2; EXPRESSED IN BT474, SIGNAL = 1.1; EXPRESSED IN FETAL LIVER, SIGNAL =   1
atgtgaagtccaggggtctgtggaccccctgaaattgaggttcattttctgtatgtatcatcatatgttcatttttccagtgggggagagggttaatcatattcccaaagaattctgtggccacctaaaagttacatcattagattatagttcaaccaccttgtttaaagatggagacactgagacccagagaagaaaagagacttgcccaagggcacacagtgaattagtggcagagctgaatctagaaactagatttcttttcaatattctttccaccatggcacactactacttcaatatatcccataattaaagtcagtgcaaattttaaaagtcctgattattacctttgtaatgaaaattccagcatccataatagctttaatgtgtcttaaccaccctgagctctccaggccgctaagaaattcac

SEQ ID NO: 5082 - DNA, 485 bp, Homo sapiens
  MAP TO AF042089.1; EXPRESSED IN HEART, SIGNAL = 1.1; EXPRESSED IN BT474, SIGNAL = 1.2; EXPRESSED IN FETAL LIVER, SIGNAL = 1.4; EXPRESSED IN LUNG, SIGNAL = 1.4; EXPRESSED IN BRAIN, SIGNAL = 1.6; EXPRESSED IN HBL100, SIGNAL = 0.91; EXPRESSED IN PLACENTA, SIGNAL = 1.1; EXPRESSED IN HELA, SIGNAL = 1.3
gctacccgatctgacaaagccttttccattgtatgcatcagagagagaaaagatggcagctggactttgaacccaaactgtggggccctggccgaggccggtggctaacctctctaaacaactagacggggtttctaaaggattgtccccctgtttgagggccttggcagcaactgccctgccagtacaagaagcaaataagctgactcttggtcaaaacctggacataaagtcctcccgtgctgtggtgactttaatgaatactaaaggacatcattggctaacgaatgccagactcaccaagtaccaaactgctctgcgaaaatccccgtataaccattgaagtttgcaacaccctacaccccgccaccttgctcccggtatcagagagccctgtcgaacctgattgtgtagaagtgttggactcaattgactctagcagacctgacctccgggaccaggcttgggcatcagtagactgggaa

SEQ ID NO: 5083 - DNA, 410 bp, Homo sapiens
  MAP TO AC009786.1; EXPRESSED IN HEART, SIGNAL = 0.92; EXPRESSED IN BONE MARROW, SIGNAL = 0.9
  unsure 54
  unsure 75
aacttttatccgtgtgttaggcaaaatatttttgtattaacctatcataatgcncctggttggcacataaaaccntaggctgtgttttaatatgtgagccccttaaccctggaagtcaatctgattgtcagtcttatgagataatagggaggaatattttcagtcaatacagaacaaggaccagtggtcccaaatcagtgttttgttgttgttgttgttgtttgtttgttgttgttgtttcctgttctcatagggttagcctctaagattagaaaatggcagacaattctggactttctgacagacaatccccgactttctgagcttcatgaagctcaacgaatagctaatgtcacctcttttgatatgtattaccccctaccaatatcagccactgtgtgagaggtgaa

SEQ ID NO: 5084 - DNA, 485 bp, Homo sapiens
  MAP TO AC004948.2; EXPRESSED IN HEART, SIGNAL =   1; EXPRESSED IN FETAL LIVER, SIGNAL = 5.8
cctaatgccactaaaccgtacacttaaaaattgtttaaatgataaattttatgtagtatgtttattaccacagttaataagtaaaacaaagtttaagctggttaaagtggcaatgttacttgtgccaaacgcaccttgatttactaatccagccattctgcatcctgaacccagaatggtccacctaaaatatcagactgatcactctccatccagtgatttcctccggcatcactgttaagtccaaactccttggcatggcatataagaaagacattccaggttctggccatggcttacctttacctttaatgctgtccctccccaacactttattataaccttcactgagatcttggttaatgtatagtcagatttgttgtactcaggaaccagcagaatccccatatttgctctcttaaaagagcatttgtggtacaaaaagccaggtgcatgacctttgagcaacccctctgtagccaaag

SEQ ID NO: 5085 - DNA, 459 bp, Homo sapiens; identical to SEQ ID NO: 292
  MAP TO AP000123.1; EXPRESSED IN LUNG, SIGNAL = 0.64; EXPRESSED IN ADULT LIVER, SIGNAL = 0.65; EXPRESSED IN HEART, SIGNAL = 0.99

SEQ ID NO: 5086 - DNA, 456 bp, Homo sapiens
  MAP TO AF189005.1; EXPRESSED IN HBL100, SIGNAL = 0.93; EXPRESSED IN HEART, SIGNAL = 1.2; EXPRESSED IN BONE MARROW, SIGNAL = 1.1; EXPRESSED IN LUNG, SIGNAL = 3.3
catccttcccacactccttctcatggacatcttcattctttgactacaccaaactcacgcctacttctgtgctcacactgactgtttattatttctgaaatcctctttgccagattctctcatatctgacactttcttatcgtttagctttcagctgaaatgttaactccagtaggaatcttccctaaccttcatatctgcacaccattttgtattgcattgttcatagcatttatctctaaaaagattatattactcattgattcactcaattattgtttctctctcccaacagaatttaagcttcagtggagcagcgatcttatccacctcatccattactctattgccaatgcccagaacagtgcccagaacacataccatgaatcagggcatgaaaagctgcattaaatacagaataactgtgtatactccacagggctcaaattgcttctc

SEQ ID NO: 5087 - DNA, 465 bp, Homo sapiens
  MAP TO AL080248.7; EXPRESSED IN BT474, SIGNAL = 1.1; EXPRESSED IN FETAL LIVER, SIGNAL =   1; EXPRESSED IN HEART, SIGNAL = 0.97; EXPRESSED IN BONE MARROW, SIGNAL = 0.93; EXPRESSED IN LUNG, SIGNAL = 8.3
gcactcatcagagatctggcaggaaggagactactgcagtctctcctacatctgggcatgcatgagacatagctgttaattaaagcagtttttgtccttcagtcattctatgtttttcttgacttatgccagaaccttggctggatgggatatttttcaagtgtggtgactcaatcctttattcttgtggaatctgaatcttagattaccatggttttccattgactagcgctatttgcaaaggaagtactaacatactaccagaaaactctctgggtttcaagcatactccttcttgcccacaatatgtaatgtcaacctgaattctaccttgtaatggacttcaaccactctactcagaagagtaattcgcttttctgcctgttggttcagtgacacaagaagtccaaggtggtggtggggagaggagactgttaattcattagaacccatgaccatatgcct

SEQ ID NO: 5088 - DNA, 431 bp, Homo sapiens
  MAP TO AL049652.16; EXPRESSED IN HBL100, SIGNAL =   1; EXPRESSED IN HELA, SIGNAL = 0.97; EXPRESSED IN PLACENTA, SIGNAL = 1.2; EXPRESSED IN HEART, SIGNAL =   1
gtatgggaactgagcaagggtcctgtggcagccgtcccctccccacacgtggcctggagccgccccttctatggcaggagcaggtttggtgcccctctgggccagggctgtgtggtatggctgccaggccctgttagatgctcctgtgtgttagggtgccgcctgggggctgtgtgctatctcatgagggcgctgggtgacctaacctgtctagctctctatcccatggacagccctgagccgggaggagctggaagcactcttcctcccctatgacctgaagcggctggagatgtattcacggaatatggtggactatcacctcatcatggacatgatcccggccatctctcgcatctatttcctgaaccagctgggggacctggccctgtctgcggctcagtcggtatgctatctgttgcttgcgtgga

SEQ ID NO: 5089 - DNA, 430 bp, Homo sapiens
  MAP TO AL121580.6; EXPRESSED IN BT474, SIGNAL =   1; EXPRESSED IN PLACENTA, SIGNAL = 0.9; EXPRESSED IN HBL100, SIGNAL = 0.92; EXPRESSED IN HEART, SIGNAL = 1.1; EXPRESSED IN ADULT LIVER, SIGNAL = 1.1
tgtgtgcatcagagccctacggaaggccagagaaagagtggcgtcaccgtgtggccgtgcctgaattgcccagtggtgcagagcatgaggccacagatcaggccaagccgtcctcccagagactcacttctcagcaggtgagcatcaggctgttgttgaccggctgagccaggccctcctcgcctgtcacctgaactgttcatcctgttatggcccctctgcctgactgccttcattctctctccctccaacccgtctttttccctgcagccaatgtggtttttcttaactgtgcatccagcccaccacacctcaactttaaatactccaggagcttcttttctaaagaatggttcaaactccatttgcttactgtgcaaaacacttagagcccaggctgcattcccgcagctgcctacaaacctcatcc

SEQ ID NO: 5090 - DNA, 438 bp, Homo sapiens
  MAP TO AL021407.1; EXPRESSED IN LUNG, SIGNAL = 1.3; EXPRESSED IN BRAIN, SIGNAL =   6; EXPRESSED IN HBL100, SIGNAL = 1.7; EXPRESSED IN PLACENTA, SIGNAL = 0.9; EXPRESSED IN HELA, SIGNAL = 2.3; EXPRESSED IN HEART, SIGNAL =  11; EXPRESSED IN BT474, SIGNAL = 1.2; EXPRESSED IN FETAL LIVER, SIGNAL = 1.4
agtgaaggaatggtttccccagatatgtaatattctttacattgtcagcagtcacaccaagtttaagagtaatttgaacttgagtttggttgtgatccaaacaagtcaagcaactgaagttctcattgaagatggatggaaccaacttggaggcagtcaggcagttgatattggctgggtttcccataacaataaccttaacgaacttcttgtcatatttctccaaggctgcaccctgccatttgatgatttttacattttcagtaaatctttcctctcttggcacagagcccaagagaatggccacatccaggtctttgaaggcaacttctttgtttgtttggatgacatctgtcaggaggggaagggcacagtcttgctgttccattaggacactgttcaggacaacaagcatgggggtgatatccaatggcacaa

SEQ ID NO: 5091 - DNA, 452 bp, Homo sapiens
  MAP TO AF064862.1; EXPRESSED IN HEART, SIGNAL = 1.1; EXPRESSED IN BONE MARROW, SIGNAL = 0.96
ttctggagcagtttggtgtgaatgttcttttccaaagggccacgtgacaccatgagctcacaggatgactgtgcacagtccctttgagaattctcgcgtccagatgatggctggacgggtgatggcatggcacagggacagtcagtggggacagtgcggaaaaacgagcagaaatgggctcagaagtgggattttgttttcttgttcttgtcctccagagctgggtgagattaaaaacatcaccaccacacagccttcactggagctggacgggctggaaaagtacaccaactacagcatccaggtgctggccttcacccgcgcaggagacggggtcaggagtgagcagatcttcacccggaccaaagaggatggtgagagacgggtgggcggtgggtcccagcagttgctggaagggctgggtcacagagagctcacttgcctttaccctg

SEQ ID NO: 5092 - DNA, 398 bp, Homo sapiens
  MAP TO AL109654.16; EXPRESSED IN PLACENTA, SIGNAL = 0.91; EXPRESSED IN HEART, SIGNAL =   1; EXPRESSED IN ADULT LIVER, SIGNAL = 1.1
gcaaagcaaatcaaatccaacaaaatataagaacaatgcataataaccaggtatgttttatattagaaatgcaaatttgatttaacagtaaaaaataaatcagtgtaattcatcatattaaacaaaaaacccacgtgattgtctcaatatatgcataaaagtatctgaaaaaatccaacaaccatgtctagatgaaaactctcaacaaactaggaatagaaagaaacttccttaatctgatgaatgtcatctatgaaaaccctaaagctcatatcatacttaatggtgaaagactgaatgccttcatcctgtggtcaggaagaaggcaaggatgtctgctctcatcaattctattcaacattgtactgaagtatctagccagttcaataaggcaagaa

SEQ ID NO: 5093 - DNA, 447 bp, Homo sapiens
  MAP TO AC007642.4; EXPRESSED IN HBL100, SIGNAL = 0.97; EXPRESSED IN HEART, SIGNAL = 0.8; EXPRESSED IN ADULT LIVER, SIGNAL = 0.74
cagaacaatataagctctttgcagaaggtgacaatcttgtgctttttctccattgtcccacatggttaaagtagaatgctttattctacatgtctttctagagtgattcccacatccatgacttcaactagtactgatatgcccatactcttgtcccaaactttaagctactgtatctattctttctaccaacttggtcaactgaaagtccccaaagtaactgaacctcaaaatgtctacaattcagtcactcttacttctcctgcctctttaaatgtgattccttttattcctaagcttgtggaaatggcattaacatacagaaaatctcctaagccagaaatctgggacaatttcttcttcattatcaccacatcatataccatgaggctctcaggccatagagccttgggtttttcctgtggatgataggatgcccctgtaggg

SEQ ID NO: 5094 - DNA, 410 bp, Homo sapiens
  MAP TO AC008283.3; EXPRESSED IN LUNG, SIGNAL = 1.1; EXPRESSED IN HEART, SIGNAL = 0.86
gtgcttattcaaaattaaattatttccttataaatttttttaaaacatagataaaaaatatcaaaaacttaaaaatctacattttagatgccttttgaattttaaattcaaagataaaaatagttcaaaggtttcttctgcctgcacacatctgtgttttaaataaatgaaaaacagcactatctaatcccagagagtagtaactatcagaatattgaaattcagatactacaattgaacaacaacaacaacaaaagacatagcatgatacttacattaagcagctgttcaaaagcaaaactaaagcccttcttataatctgtaattcctttggctgtgatattattcaccgcgtctttcaacacttttttatttcttacatttgcttggacaaggtgctgaaaacagct

SEQ ID NO: 5095 - DNA, 433 bp, Homo sapiens
  MAP TO AF001548.1; EXPRESSED IN BT474, SIGNAL = 1.4; EXPRESSED IN LUNG, SIGNAL = 2.7; EXPRESSED IN PLACENTA, SIGNAL = 1.1; EXPRESSED IN HBL100, SIGNAL = 1.1; EXPRESSED IN HEART, SIGNAL = 2.2
gcttgactcctaggtcagcgtgactccatcacagggaatttgttctttctgccactcaggtgctctcaggatttccccaatagacaatacttggaaaccctgactgccgaaggaggcgttggtgatggaaggaaagattggagtgggcaggttggtgggtggggctggggctgagcctctggcctatttaggggtgggtgggccagaggctgatgccaccctggctgtgccccatagtggaccgcatcgtgggcctggaccagatggccaagatgacggagagctcgctgcccagcgcctccaagaccaagaagggcatgttccgcacagtggggcagctgtacaaggagcagctgggcaagctgatgaccacgctacgcaacaccacgcccaacttcgtgcgctgcatcatccccaaccacgagaagagggt

SEQ ID NO: 5096 - DNA, 1943 bp, Homo sapiens
  MAP TO AC010680.3; EXPRESSED IN HEART, SIGNAL = 6.3
tcttactacttccgagtcttggcttccaatgaatatgggattggtttgccagctgaaacaacagaacccgttaaagtgtctgaaccacccctcccacctggaagagtaactcttgttgatgtgacccgtaatacagctacaattaagtgggagaaaccagaaagtgatggtggcagcaaaattactggttatgtggttgaaatgcagactaaagggagtgaaaagtggagcacctgcacacaagttaagactctagaagcaactatatctggcttaactgcaggagaagagtatgtcttcagggtagctgcagttaacgaaaagggaagaagtgatccaagacaacttggagtgccagtaattgcaagggatattgaaataaagccttcagttgagcttcctttccatactttcaatgtaaaggctagagaacaacttaagattgatgtgccattcaaaggaagacctcaagctactgtgaactggagaaaagatggtcagactcttaaagagacaactagagtcaatgtttcttcttcaaagactgtaacatcactatctattaaggaagcttcaaaggaagatgttggaacttatgaattatgtgtttcaaacagtgctggatccataacagttcctattactataattgtccttgacagaccaggacctccaggtcctatacgtattgatgaggttagttgtgacagcataaccatttcttggaatcctccagaatatgatggtggctgccaaattagcaattacattgttgaaaagaaagaaaccacctctacaacatggcacatagtttcacaagcagttgcaagaacatccattaaaatagttcgcctgacaacaggaagtgagtatcagttccgtgtttgtgcagaaaaccgctatggaaagagctcctacagtgaatcttcagctgttgttgcagagtatccattcagtcccccaggtcctcctggtactcctaaagttgtgcatgccacaaaatctaccatgcttgtaacctggcaagtgccagttaatgatggaggaagtcgagtaattggctatcatcttgagtataaagaaagaagcagcattctttggtcaaaagcaaataaaatcctcattgctgatactcaaatgaaagtctccggccttgatgaaggactgatgtatgagtatcgtgtatatgctgaaaatattgctggaattggtaaatgcagtaaatcttgtgaaccagtccctgcaagagatccttgtgaccctcctggacaacctgaagtcacaaatatcacaagaaaatcagtgtcacttaaatggtctaaaccacattatgatggtggagctaagatcacaggatacattgttgaacgcagagaactaccagatggccggtggctgaagtgcaattatactaatatacaagaaacatactttgaagtaactgaacttactgaagatcagcgttatgaattccgggtttttgcaaggaatgctgctgactcagttagtgagccatctgaatccactgggcctattatagttaaagatgatgttgagcctccaagagttatgatggatgtcaagttccgagacgttattgttgtcaaagctggagaggtccttaagataaatgcagacattgcagggcgacctctgccagtaatttcctgggccaaggatggtatagaaattgaagaaagagcaagaacagaaatcatctcaacagacaatcatactttgttaacagttaaagactgtataagacgagacactgggcaatatgtactaacactgaagaatgttgccggcactcggtctgtggccgttaattgcaaagtacttgataagcctggtccaccagcaggaccacttgaaataaatggcctcactgctgagaaatgctctctttcctggggacgtccccaagaagatggtggtgcaga

SEQ ID NO: 5097 - DNA, 1967 bp, Homo sapiens
  MAP TO AL080312.8; EXPRESSED IN FETAL LIVER, SIGNAL = 0.93; EXPRESSED IN HEART, SIGNAL = 1.3
tcatactgtgtggggaagctccaccttgggagccaagcagctcagtgggggcaggacaagagctccaggccaggccgatgtgagggtccaatctccaccctgccacttcgtggctgtgtccttgggcaactaacttggccccctcagtcagtttccttgtctgtaaaatggaaatgggcttagtgcatattccacaggggtgcggtgagacctaaaggaacaaaggcagctagagctcagtacaagaccagtaaaatcccctgcatggtgctatcgggccgagccttgcctgccctactcacctgcacgccctggtggtgcttcctgcaaacgcctgtaaatgggatttttggcctgagagcccacaagctcacgtggcagctaggagtgccagagagtgaatgcctggccctcaggtgcacatccctcatccctcaggtggacgcccctcagagggacaaccttcaggtgggactcccctcaggtggattcccctcagatggattctcctcaggtggatgcccctcaggtggattcccctcaggtggatgcccctcaggtggattcccctcaggtggattcccctcaggtggatgcccctcaggtggattcccctcaggtggatgcccctcaggtggattcccctcaggtgaatgctcctcaggtgtgtgtccctcaggtggatgcccctcaggtggactcccctcaggtggactcccctcaggtggattcccctcaggtggattcccctcaggtggactcccatcaggtggacacccctcaggtggattcccctcaggtctgtgcccctcaggtggattcccctcaggtggagtcccctcaggtggagtcccctcaggtggacactcatcaggtggattcccatcaggtgtctgtccctcaggtggacgcccctcaggtggacactcatcaggtggacacccctcaggtgagattccccttaggtggatgcccctcacgtgggattccccttgggtttgtgctcagtctccagagtccccagagctccctgttgggatgaggccctggtcgcctaccacagtcacttgcagaatgatgctggtattggttcctcctcccctgcctgcctcagtttccagtcccttattagagtttcctgcagtcaccaagaaatgattagctatgtccgttttgtccctaccccatccccacttagcaccaaagctgggctgtggtcagctgcctccactctgttttccagcttcatgtttgggttgcagctcccttcccggccaccagtcgaccacctctggtcaaaccataccaacaggtgagctgccctgcacattgggaagactgcaatcatcaccaaccatcttattcaggtgggcttttcccaagtagatgcagccactgtctaaccagtgtcttcaccacctctgaactccacggagctcccacaccgtgctcaaccttcaggagtttttttaatgccagttcatattccctgcccccaggaagttggagaaacaaaaatgagttgcatctctgtagggtcagccagaatggacatcatggtttggagtccacagaagcaaagccaagtcggggattcatgtgcatgtggtttattggagggtgctcaccagaagagagggaaaggaggaggcagggactttgtatcccacccacgcacctctccacccacccctcctggcactcagaggccacaggcagttggagaggtagaaattgcagctctgggccaggcagtttctgctcccagaggggtccagaagcaggtggcaggagtgaggcctgagcccccacagcacctgggaaggacacacccttacatgaaaaggggatagcagggtgtcagagcagggaccaaaggcacgtgccataatggcctaaagattcagagtgtgtcttagtctgttcagactgctataacaaataccttagcctgggtaatttacaga

SEQ ID NO: 5098 - DNA, 1954 bp, Homo sapiens
  MAP TO AL031983.1; EXPRESSED IN HEART, SIGNAL = 1.3; EXPRESSED IN FETAL LIVER, SIGNAL = 1.1
tgcctataatttttcgcataaagatacctccctttactacatttcagtcgctgtctcttgcacacatacatgcacacacacagacatgtggctttcatccattcccacaatgtaatgggtgtgaagaaggcagaggggcagggaactcaaactttctgataaaagcacatagaatctcctctcttttaaagcacattaagcagctctccctcagctttgtgtgagccccatttccttccccagcaatctcctgaatgccctggttacctccttgttcctcagggtgtatatgagagggttaagtgaaggagtgcccactgcatagaagagaccaaagaacttgcccctctcttgggcatagggatttttgggctggaggtagacagcaatgactgagctgtagaagagggtgaccacagtgagatgggaggagcaggtcccaaaagctttcctccgcccttttgcagagttaatcctcagcactgcccaggtaatggctccgtaagagacaaggatgaggctgagaggcacaaccaagatgaagacactggcaacagccacctggatctcattgtaggaggtgtcttcacaggagagtcgaattagagctgggacctcacagacaaaatcatccacctgccgatcggggcagaagggcaggtgcagggtggatggtgtctggaccactgactccactagcccaatgacccaggccacagatgccagctgccagcacaggcgggggtggatgatggtggcatagtggaggggctggcagacagccacgtagcgatcaaaagccatcactgtcaagaggatgcactcagttgtccccagggacaggaagatgaagatctggacagagcagtccaggaagctgatggtcttctttgggccccagaggttgaccagcatttggggaacacaactcgtggtgaaacagaggtccaagaaggagaggttggagaggaaaaagtacattggagagtggagcttggggtccagcgcagacagcaggatgatgagtgtgttgcccactagggttaggaggtaggaagtgaagacaaccacgaagagagtcctttccagccctgggtgttcagagaagcccagaaggaggaagcccggtgtggagctttggttaaccatggcctgttcttgtttgtacctggagggatgaggctgtcaccccagtgtgattcaacctgtcttatcaaaactcagcctgggtgtttgtgaggtcacagcaggtaggtgtttctcttctgtctctgctcgcccagcctccctttccaaggctcatcaccatccagcagctccttctcattccctgttcttcctggtcaaacattgtctagtgagagtgaggaatccatgaatgtactggacagcagatggatactcacactggtgcctctgacttcctgggtgagggcaaaggaggctgattaaaatatgcactaattcattaattcattcattcaggggaaatttattgagtgccactatgttctgaatgctgttctagagttgtctcttatctattggatgatctcgtaaggtatattgaatgaattttctgataagttgtctctgtaggctcaattattgctctattggttgaatgaattttatagaactctgtacattccatttattttgtattttttcatttgcaagtaagcttatcagagacagtgttttatctatgagagagattttgttttgttttaagatatccctacttatagagagatcaggttggttgccctggcctttttagcaacctaagtttctgaaccaactgactttcagggaggggtggaaattggtccacatgcttcgtccttgccatgagtagcttacaagtaggaggcaagagtggccacaagcatgttaaaatcaccagggttcacaggaacattatcgaaagactccaagaatcactctccct

SEQ ID NO: 5099 - DNA, 1956 bp, Homo sapiens
  MAP TO AC010680.3; EXPRESSED IN HEART, SIGNAL = 9.4
cattgacccacctggaaaaccagtacctctaaatattacaagacacacagtaacacttaaatgggctaagcctgaatatactgggggctttaaaattaccagttatatcgttgaaaagagagaccttcctaatggacggtggctgaaggccaacttcagcaacattttggagaatgaatttacagtcagtggcctaacagaagatgctgcatatgaattccgtgtgatcgccaaaaatgctgcaggtgccatcagtccaccatctgagccatctgatgctatcacttgcagggatgatgttgaggcaccaaagataaaggtggatgttaaatttaaggacacggttatattaaaagcaggtgaagcattcagactggaagctgatgtttcaggccgcccacctccaacaatggaatggagcaaagatggaaaagagctggaaggcacagcaaagttagaaataaaaattgcagatttctctactaatctggtaaacaaagattcaacaagaagggatagtggtgcctatacccttacagcgactaatcctggtggctttgctaaacacattttcaatgtcaaagttcttgacagaccaggcccacctgaaggacctttggctgtaactgaagtgacatcagaaaagtgtgtactatcatggttccctccactggatgatggaggtgccaaaattgatcattacatagtacagaaacgtgaaaccagcagattggcatggacaaatgtagcctcagaagtccaagtaacaaagctaaaggtcactaaactcttgaaaggcaatgaatacatattccgtgtcatggctgtaaataaatatggagtgggagagccactggaatcagagcctgtgcttgcagtgaatccttatggaccccctgatccgcccaaaaaccctgaagtgacaactattactaaagattcgatggttgtctgctggggacatcctgattctgatggtggaagtgaaatcatcaattatattgtggaacggcgtgataaagctggccaacgctggattaaatgcaacaaaaaaactcttactgatttaagatataaagtgtctggactgacagaaggacatgaatatgagttcaggattatggctgaaaatgctgctggaattagtgcaccaagtcctaccagtccattttacaaggcttgtgacactgtgtttaaacctggaccaccaggtaacccacgtgttctggatacaagcagatcatccatttcaatcgcttggaataaacctatctatgatggtggttcagaaatcactgggtatatggttgagattgccctgccagaggaagatgaatggcagattgtcactccaccagcaggactcaaggcaacttcgtatactatcactggcctcacagagaatcaggaatataagatccgcatctatgccatgaattccgaaggacttggggaacctgcccttgttcctggaactccaaaggctgaagacagaatgctgcctccagaaattgaactggatgctgacctgcgcaaagttgttactataagggcctgctgcaccctgagactttttgttcccatcaaaggaaggcctgcacctgaggtgaagtgggcccgggaccatggagaatctttagataaagctagcatcgaatccacaagctcttacaccctgcttattgttggaaatgtaaacagatttgacagtggcaaatatatactaactgtagaaaatagttcaggcagcaagtctgcatttgtcaatgttagagttctcgatacaccaggccccccacaggatctgaaggtaaaagaggtcactaagacatctgtcacactcacatgggacccacctctccttgatggaggttcaaaaatcaagaactatattgttgaaaagcgggaatcaacaagaaaagcatattcaactgttgcaacaaactgccacaagac

SEQ ID NO: 5100 - DNA, 470 bp, Homo sapiens
  MAP TO AL121588.6; EXPRESSED IN HELA, SIGNAL = 0.91; EXPRESSED IN HEART, SIGNAL =   1
ttgttgaagctgggtgactggtacatggaagttcacgattctaaactcatttcttttgtataagttttgtatgtttgaaatattttattagaatgaagtttctttaaaaaaagttattagttatttatagctagtagccccaattatgcacatgaaaactgaggctcagaaaagtaaattacattcctaaaatcaaacagtttataagcaaggtatagtagataccaaagtgtgctgcacagaactcctttcagttaattgcttatacctatctgcaggaggctcaatcaagaaacagacttcagcaatgacctccttcagcctctgtctcagcttctgagggtcacctcccctgaagtcatgtcctttatagagaagccaataacagagcaaagcaaaattgtaaaagcccagccttaggagcttaccctaggatgactctgatgattgatattcatcccagggctttc

SEQ ID NO: 5101 - DNA, 457 bp, Homo sapiens
  MAP TO AL109853.3; EXPRESSED IN BONE MARROW, SIGNAL = 0.91; EXPRESSED IN HEART, SIGNAL = 0.98
caatgcatcaaggacttccccaccatctcctataacagctgttctgttcagatgatcacacacctctttctggggatgacagtgtctcctccttgctggcatggcttacaacaggtttgttgaaatctcttatctcctccattacactattattatgagcaatcgggtctgtatacagttggccttgggaatctggacccatgccttcttagtagcagtcacactaatcattgcaattcctgctagttattatggacacaatgtcatcaaccattttaccttgagatccaggccctgctgaagctcgtctgctcagacacccttgtcagcctgattcagggtctggttatcagtgtgttcacactgcccctgcccttcacattcatcctcatctcctaattttgcatttttgttgtgctgtggaggctaggcgtgaagctttctccacctgtggatc

SEQ ID NO: 5102 - DNA, 415 bp, Homo sapiens
  MAP TO AL022171.1; EXPRESSED IN HEART, SIGNAL =   1; EXPRESSED IN BONE MARROW, SIGNAL = 0.91
gccttgaaatgttgcctagcaatatataactaacacgttaattattatgagtaagtccataggatgatttttaaaagtaagtgagaagaagaacaagcttttcctggaggtagaattacctggttcaccaataagaagatgagatcaataaaaaaattgaagatataactgagcttaagcagtactattgtttaatgcccccccacaaactgttttctcttgacccaagcttacacttttatataaactagtatacttttcatggcaacagcagttcaggagttgtaaaggaagtgtgaatggattattttcttgtcttctcaggcacagtaaccttggtgcacgaccgaaagggctgtctactctggtgaagagtggtgtccctgaagcattgagggcagaggtatggcagtta

SEQ ID NO: 5103 - DNA, 477 bp, Homo sapiens
  MAP TO AC009946.1; EXPRESSED IN BONE MARROW, SIGNAL =   1; EXPRESSED IN HEART, SIGNAL = 0.93
tttgttatgatgagcaaagtttcagtgaatttcccttattattcacattttcaaactgtcaacctaaataacaacgagaggctctctaaaagaaatatatttgggaataaaacattgtgatgggaatacatgtgccatgctaagctatgtacattttcagggaggtaaaggaagacaaagatttttaaaggaaaaaataaggaggattacacaattgttttgaaataattatccttggctgcaaagataagtaacaagggttatgccttaccgagagtacacaggaagtttctgggcagatgtccttgcagaagcattttttatgtaagcttgtgatggcctttagtccaaggttgtggttttcgtagtctttttctgttatcgggcatacatgataaccctcttttcacggccttcccagctctatttatcagggttttcttgacattagtgactccattttgatgctgacaactg

SEQ ID NO: 5104 - DNA, 447 bp, Homo sapiens
  MAP TO AL030999.2; EXPRESSED IN HEART, SIGNAL = 1.2
gcttggcgaagcaaataaactgctaagcaagaaggtaataatagcttaaacaatagtcacccatagagagatatgagacatcaagcaaatacatttaggatacaaattggtttggtccagaaaggcacgataactttaagcaggtgggtaggcttccaggttataggtagatttaaaattttttgaacttgcaattggttaaaagaattatcagtggaaagtaatgccttgcttttgattaaaaggttgtggagaccaaagttttatcatgcagataaagcctccaggtagcaggcttcagagagaatagactatcaatgtgtttttgttgttgttgttgttgttgttgttgttgttgtttaaatcaggcttaaagtctgtgttgatgttaaatgctggttgacttttcctgaattccaaaagggaggagggcataatgaggcatgt

SEQ ID NO: 5105 - DNA, 414 bp, Homo sapiens
  MAP TO AL050342.36; EXPRESSED IN HELA, SIGNAL =   1; EXPRESSED IN PLACENTA, SIGNAL = 0.9; EXPRESSED IN HEART, SIGNAL = 0.98; EXPRESSED IN BT474, SIGNAL =   1; EXPRESSED IN FETAL LIVER, SIGNAL = 1.1; EXPRESSED IN LUNG, SIGNAL = 0.97
ctctctggtttttcttggggtaattcaacattggaaaagaaaacctgatttctcagaggtgctttctcacattggaaaaaggttcctaccagtttgcccactggtaaatcatgactggcaggtctggggtgtccctctagtcaggagtaagggagctttccatggtgaccttgtcctgtcccagcttcaccacccagggcctcaggacaaagggcttgaggtgcagaagctgaagctgagagccgatgacctgcctgaggtcacacagtcctgggaggtagagcagagtgtggtgagccccacccgtccagcaccaaaagtccccttgcagtgtgaagatagaactgagaaagatgtggctcaaacatggcccagtgtgagtcaagagttgtcccctcgttctcacccttcaag

SEQ ID NO: 5106 - DNA, 376 bp, Homo sapiens
  MAP TO AL031542.1; EXPRESSED IN HEART, SIGNAL =   1
cctcaggctttctatatccccttccatcatttttgtagcaatattctcctagaaattcatccatttcatgtaagtttctaaacttatttgcatagcttttagtattttctgtattttaaaaatatattataactgtagttataacattttcatccttaagattttatatttgtttttacttccctctcagttgatttgtctaattaaaacatgaatatgggcatttaaattttattgattccatgttgtttttatttatttctgctcttgaattcttctctttccatttactttctctgcatttattatacttttccctattttcttgagatgggcagttagctcactagttttcagcccttccgtctcttctaca

SEQ ID NO: 5107 - DNA, 434 bp, Homo sapiens
  MAP TO AC011456.2; EXPRESSED IN HEART, SIGNAL = 0.96
accctggtgaacccagtatggtgtgaaaacccctttgctttgctcttttgccagataaatgccagccagcatccctgtctctggggccctggagaggccttcaacacacctggcctcactgccctgtggcttcaacaaagaggccgagcatctcctataaaccttgaggtccatggatgacatagcggaatgatggatttcagaaaaggcaggtgcttcccactctttaaatttttgtttattctttccaagtttcccatcaacagccctgcagtaaaaattcagggcttcagagacaaatatttcatgagtacagactgtgatgaggaaaagcaagccattccctctctatcaggatccagaggtaagctgctgctttgctcttaaaacgcaagaaaaaaaaagtgattaacggttggcacaggactcaggat

SEQ ID NO: 5108 - DNA, 427 bp, Homo sapiens
  MAP TO AC011561.2; EXPRESSED IN HEART, SIGNAL =   1
aggtggaaacgttgtgaagctagatagtggtgatggttgcacagcattgatagtgttccagatgtcattaatggccaattttatgttatgtttgttttctgacaattaaataagcaaatacataaatgagaaagaatttttctctcataatgtttgtttgcctcttactcattttctgagctagtcaccaaaacgtatctgacactttcttgcttaacctggcgggagtggtagcggatgctcctggtgcccccgttgcattccctcacctttctgccagctcagcttccagtagccagcgcctgcctgtgtttctctgcctgagggctctctccggctgccaaagcccgtgtccacgcacagcagtaccagagaattaccaggtcccaggagcagcactcgggtgaggactgacatgcgtcaatgt

SEQ ID NO: 5109 - DNA, 392 bp, Homo sapiens
  MAP TO AC012127.1; EXPRESSED IN HEART, SIGNAL = 0.95
ttcaacagaaagctggaatagctatactggcatgcctcagagatattgtggattgagttccagaccaccaaaataaagttaatcacacatattttttggtttcccagtatacataaaagtcatgtttaaaacatattgtagtctattaagtgtggaatagtattgtctaaaaaacaatatacctatctaaatttaaaaatattttattgctaagaagtgctaacaatcatctgactcttcagtgagtcacagtctttttgcaggtgaagagtctcacctcagtgttaatagttgctaattgatcagggtggtggttgctgaagtttggggtagccatggcaatttcttcaaataagacgataatgaagtttgctgcattcattgactcttcc

SEQ ID NO: 5110 - DNA, 350 bp, Homo sapiens
  MAP TO AC011700.3; EXPRESSED IN HEART, SIGNAL = 1.4; EXPRESSED IN FETAL LIVER, SIGNAL = 1.1; EXPRESSED IN ADULT LIVER, SIGNAL =   1; EXPRESSED IN HELA, SIGNAL = 0.95; EXPRESSED IN PLACENTA, SIGNAL = 0.98
cacacaagctgaaaagccagggaatggggaaaaaatggcagtgggtcagagcctcatgattccaatggggactatggaagctcctcatcacagctctacctgttactctattgggggatgcttgtatgcgaaaccaacacaaaaacagatttgggtacatttctaaagaaaataaattttttaaaaaaggaaaagggagatgaccaaaaaataaagattagttcctacctcaaagtcatttgctttattgtagtgcatgttcagagccctgtacagctcacagtctctggttatagacagctcttcagtactggtgaccccatcgttgatggcttgacgtgcgtacttct

SEQ ID NO: 5111 - DNA, 468 bp, Homo sapiens
  MAP TO AC005481.2; EXPRESSED IN HEART, SIGNAL = 0.95
tttgcactgcttacatttgcattgcttatgttatatctaacataagcaatgtggcaaaatcttatcttaaaaatcttcccagttcatgaatttgtcctgtgggataaactctgcttccagtatgcatgggtagatggtgagggctctgccaagacccagtatgcatgggtagatggtgagggctctgctaagatccagtatgcatgggtagatggtgagggctctgccaagacccagtatgcatgagtagatggtgagggctctgccaagacccagtatgcatgagtagatggtgagggctctgccaagatccagtatgcatgggtagacagtgagggctctgcgaagacccagtatgcatgggtagatggtgagggctctgccaagatccagtatgcatgggtagacggtgagggctctgccaagacccagtatgcatgagtagacggtgagggctctgctaagacc

SEQ ID NO: 5112 - DNA, 403 bp, Homo sapiens
  MAP TO AP000009.2; EXPRESSED IN BONE MARROW, SIGNAL = 1.4; EXPRESSED IN HEART, SIGNAL = 1.2; EXPRESSED IN FETAL LIVER, SIGNAL = 1.7
gaactctgctgggggtacagaaatttcttaagcaaaaatattgatccttagttattgtgattatttgtgtatttataacttttcacttagctcattaggtaatgttatttcctgaggtattaacattttacatttatttttcattggtagggacctaatctaatattttaagtaatgaatcagttttcaagcaaaacatttttccttacctgttttctttaacttaagcatatttttgagaaaaaattaaatttatctttttggaacagggtcattatcgttattgtgatgctctttctatgctgggggaatatgactgggccctgcaagcaaacataaaagctcaaaaactctgtaaaaatgaccctgagggaatcaaggatctaattcagcagcatgtaaa

SEQ ID NO: 5113 - DNA, 437 bp, Homo sapiens
  MAP TO AC012109.1; EXPRESSED IN HEART, SIGNAL = 0.99
tatactgcccatttggaggcattgcttctttttcctctcctggattcttgattgttggtgctctggtgagaaaacagaaatgtcttatgaaatctttatagctacgtaggaaacttgagcctgccattttcacccacccagggaaggtatttgcctcccgaaaccgtagggtggcctgacatctgctttttattgaaagtagccaaacaaatcacgtccaccatgtggtgattatgacaagtgtattgaaagacattttatgaaacatgcattgacaaagggcatctgaaaaccgaatgccactacggaccttaggactcttcctcaggcagcttggtcggagtgagatattgccagcattcattctccccttcactctgattccactctgattgagagtgcattgtttaatatcccctacgaacgacaacaaccca

SEQ ID NO: 5114 - DNA, 425 bp, Homo sapiens
  MAP TO AC012443.1; EXPRESSED IN HEART, SIGNAL =   1
aaatgtccagtggcacttcttagtgaccatatcctttcttagtgagttaataaggctatagttatgaaatgctatatttaaaaaatatcaaatttaggagaataaaatctaggatcatgcatgaccaaaaactatgatattgtgtgaaatgtacttaactgaattttcactgttttcttcaatggtagcacacctggaaaaaagcctattctttcaacaccatcatggtttaaccacagaatacatttttgcattttgaaaatacaggcatgaaacaattctaaatacttacagaatcctttccagtctttttcttaggcgatttgtgttttgattctgatctttgtctagttctgtctttttcactttcccgatctttttcttttttatccttctctcgctcagcatcggattctggagagtcc

SEQ ID NO: 5115 - DNA, 479 bp, Homo sapiens
  MAP TO AL109838.8; EXPRESSED IN HEART, SIGNAL = 1.8
gggagagtcccaagaaaaccaactgatgggtactaagcttaatacctgggtgatgaaatattctacacaaaatccctcatgacacaagtaaaaaacctgcacctgtacccctgaacttaaaataaaagttagcaaaagaaaatattccagcaccatttaaatgttttttattagcattagtgcatattacagtaactctctttaaagcgcttaaactcacctctctttacagggtgagttcttgtaatatgcactatataactgggctgcaggaaagtcttttggggcagaatcacaaaataaatgggcattattaacacttccctgatgatgcactttgcatttcctaagaccatgaaagagaaaaagaaccagaggcaaaaatgtggtattagtaataatgaattggagagcatggaggcaggggaagatggaaatattccgggttgggagaagtttcctgagagggtttcaaggaa

SEQ ID NO: 5116 - DNA, 397 bp, Homo sapiens
  MAP TO AP000075.1; EXPRESSED IN HEART, SIGNAL =   1
ctcccaatgtggaatgatcccttgtaagtgaatccacctaaagtaaccaacagccactgcaccaactgggacagagatgaaattgccccatcccaactgtaaacttctaagtttcagggaccctgggctgtcccttcttagatcttcagtttgtaatgaagcctggcctatagtgggccctcagtgaacgttgttgaaagaatgctgttgtctgaagaatgagggaagtatttcacttcacttaccgggcaacttcaggaaagctcattccagcaaagtcatcagagagacgttgggtcagaattttgtttttcatgctattcaagaagtgtttcttccaggtctgtttaggcataacctggaatacataatcatgccacacgaagcaaaacgacaa

SEQ ID NO: 5117 - DNA, 422 bp, Homo sapiens
  MAP TO AL121973.1; EXPRESSED IN HEART, SIGNAL =   1
tctgagctaaacaagtccacaagaattaagacatgtgtctgctagagtacataatacctcccagttctgcgaaaaacaagagttatcacactattgagtttgttgtcttctgccctacccactctaggaagaactgtttcttctcctgattttacccctttatatccttgttagataaacatcttggcaggttcagttgacacacagtctactgtgacataaacataccttagtgcctgtctctcacctggtacttgagcatactttcaacactatacttcatcatgcaacctgctactagcttcagtattctgagaaccattgccattgaaataaatgatagttgtggcaataataaactttccaaattaatgataatttgttgacagctcttcgagatttctttcttcatgttggggcac

SEQ ID NO: 5118 - DNA, 454 bp, Homo sapiens
  MAP TO AL122003.7; EXPRESSED IN BT474, SIGNAL = 1.6; EXPRESSED IN HEART, SIGNAL = 1.2
ccttggcacctccatgtatctcaagtttcctcacctgtaaaatgagaaaacctttgctcctctgtgagtcagctaacacttcactgggatgcagtcatttctttaaaatgctgagagagattaatgtgcccagtgagtgttaaatggcaagtcactctgagcttgttgcaatgcggcacttctaactctctgttagtgccctggtcccctcatgagagccaaaactcttgacattcttatacggccttcagcaactgacccctgctcttctccatggcctcatttttggctccatcctctgaaacagcatttgggcttttacaacaggaccaccatgcctccaggtgtttcctatgcaagcctgggtagtcggaatgccctctgctccgtccaactttgcctgaccacctcctgctctgctcactcaggttcagctttgacatcacctcctggg

SEQ ID NO: 5119 - DNA, 480 bp, Homo sapiens
  MAP TO AC009705.2; EXPRESSED IN HELA, SIGNAL =   1; EXPRESSED IN HEART, SIGNAL =  12; EXPRESSED IN BONE MARROW, SIGNAL = 0.9
  unsure 77
  unsure 124
  unsure 229
ttgcactgaggataaatagagggattgtagaggaatttatattgtgcatgtgtgttgtttgtttcctgagattcctnggtactgagtcatcattgtgtatataaggcagacaggaagacagaanggagggaatgcatttgcagaaacatatctacgtgccttcctttccaggcttatcacttgccctacattttataagctccaactgggctgaacatttccagttccntgtaatatatatgcttaaatgctctgaaaagccccctctgacctctccaggagaatattggagcaccttccgctaggcatccatacagccttgttcatagattcattatcatatttatcacatattcttgtcgttatggctttacacatctttttcttacagtagaagtcccttgtggtgtgagaaagggtataaactgtgttccccttgattgtaatctgcagtgtcctgcattcagtaggggcttaaca

SEQ ID NO: 5120 - DNA, 443 bp, Homo sapiens
  MAP TO AL008726.1; EXPRESSED IN BONE MARROW, SIGNAL = 0.99; EXPRESSED IN HEART, SIGNAL = 1.2; EXPRESSED IN FETAL LIVER, SIGNAL = 0.93
ccacctaggaagacattggctaaaatgctaaaccctagtatgtcctgcccactttaaactctcacacttccaaggagaagtgtttgtggtccaatgcttcagctaaagtgcttcaataatgcatcacagctgtagcaggagggaatccctccccttcttcttgctttccccagaggaaagggaggcggcccacgtccttaaagtctcctggctgctgaaagagctcagatggctgggaggggccagcccagatatccacaatcttgcgcagggtggagtagcgttcctccagctctggcccctcggtctgcatgagcaggtttgctaactccctgcttaggtcctgaatcatgtcgttccgtccttgcttctcaggctggcctgtgtttgggaccataccacgatcctggagctccccattgggcccaaggaggtactggtac

SEQ ID NO: 5121 - DNA, 453 bp, Homo sapiens
  MAP TO AL122015.1; EXPRESSED IN HELA, SIGNAL = 0.94; EXPRESSED IN LUNG, SIGNAL = 2.3; EXPRESSED IN HEART, SIGNAL = 2.3
tggctgagttttgttggactcagtggaaatccagtatatgcaggtgatgctgcaatgtaagaatgtggtgggaagattggtttgtactgagtctgatgaatggttggggatggtaacagacggggatttaagcccactgggacttggtgaactatgccactgggatgggagatattataagttggatgctgtaacataggtcttgaggtacacggagaggctaacaggtgggccactggtgcagcactactgagggtggctgatgatgggtatggaagtagagtaggctgtcctccgaggtgtgtatttccagccaggtgggcatgcactgctgtgtgattgggacttccatgagaaagagtgaatggattactggtaacactagtaggaatataagcttgctgtcttctgtgcccaaagtttccattccactcttgatgcccagatccaaag

SEQ ID NO: 5122 - DNA, 480 bp, Homo sapiens
  MAP TO AC011390.1; EXPRESSED IN FETAL LIVER, SIGNAL = 0.88; EXPRESSED IN HBL100, SIGNAL = 0.95; EXPRESSED IN HEART, SIGNAL = 1.2; EXPRESSED IN BONE MARROW, SIGNAL = 0.92
attgcaatctccttgcagacaagttataggtcttactaatctgtgcatctacagtgcctcagagagggcctgactaaaaagggggcctctgcaaaggctggagaatgactgtataactgaattatcaaatttacctctctgagattcatttcttctaatgaataagaaaaggcagacactgcccaatatccatcaagtcatgtctccagcatggagctccgctatgcacattgttctgtccttacctatccagagaaatgcagcacaggtgaaaaatcgatgccgttgtgagcaggacgtccagagatgtccgaacaagacaaaacacctccccataaatccagatgtcttgaaccagctcaatggcaccaaagggcatcaccagcaccgaaaccagcagatccgcaaaagcaagagatacaatgaaataatttgtttttattttcctgtgagtgaaaaagtgtaagagaggaggcaggg

SEQ ID NO: 5123 - DNA, 488 bp, Homo sapiens
  MAP TO AF152364.1; EXPRESSED IN BONE MARROW, SIGNAL =   1; EXPRESSED IN HEART, SIGNAL = 1.2
aagctccactactagctcttcaattcacaaattaccatgtagatcatagatgtgcatgatgatcagagaccagtcacatcacttcttccaaagtctgtcagtgactgatcactgcacatctggtattcagtcagaggcagccagcaaagtatgtagttttgtatcccactgatcttccagtgatgaacccacatatttcaccaaaatggataatcgaaagagggaactggccaagaaatatgaaacacaagtgaccaaaaacaaaaacaaaaaaccaaatgtgacaaccccagaagtgcactttgaatcaaatgtaaataaaattatagaacaaataactgactttgggaatgccaattgcgctgatgttcaggagattctagatatgtaacccaaggaatttagtaaagacaaacttattaacataaattaccaaagaatttatgatgcagaagaaaaagatgtaccagaggaagtgacatcaaaaa

SEQ ID NO: 5124 - DNA, 1961 bp, Homo sapiens
  MAP TO AC006530.4; EXPRESSED IN BT474, SIGNAL = 0.98; EXPRESSED IN LUNG, SIGNAL = 1.7; EXPRESSED IN HELA, SIGNAL = 1.2; EXPRESSED IN HEART, SIGNAL = 0.94
tgttggacgtagcaaatcttcatatagcatgaaaatacaacatatgttttataagtggtcttcaaaatgttctatctgttgagataatctctttggataatgaggatcttactccttgtccagcattcccatcttcaaaagcatctcatgcacatgaatactacgtacttaccattctcaagtacaacatccacagccacagttgtcaggtctttagtacaagcagcctgaatgtcctcagttggggcaatgaatgtgctgagtccagtcattttgttgacataaaccattcttcccagggctacatcgaaatgccgctgccaatctgaacaacacgtgtttgactcttcagtttcagaacaagctcttgctttagattcctcactctgaaaacaaattccattttggtcacctgtggcatcttctaccggattcattaacattccactgggagagtcaagacttcctatctgttgttctgaggctctgataagaacatctgaatctttaccggtaactttagaattattatagggcaataccaaaggagtttctgatatcacacagttctctgttgtattgctgttagaatgtgttttactatttttattaaaggaattatcctgtgtggcagaatctgatgttgggatgacaccattctctgttttttcatgcttgttgttaaataacatacaaaaatcttgtgttaacacactgcacaacttgctgtctttcctactggaatctgaatttggaagttcattaaaacgactcatcatccccattgtttgagtttctctttcggaacccttcagtctggataatttagaggctagtgattcagatgacttctcaaggtccaaaggttttctattaaagagagataactccttcagggtcataggactttctctcaaactaagcatctgttgttctaaacaatcttcatccttggagaatggaaacttctctgagtcaaggatgtggcttgctggttgacaactactatctgaatcactatgctccatagtagtgattttacaaacatcagagttctctaagcggttcttgtccttcagcagaatgtcaggttcaacttgaagactgagattggtagtgactccattactttcctctacttctgtatccagaggattttcaaccttcccatattgcctcttaaacttctctaaagatcctagctgtgaactcaagcttagcttcttacggacgattggtttggagaaaccaattaatttatctgttttcctactatcattggaaacgtgtctataccaggggaaagagggggatgtatcagataatatgcaatctgtttgtgattttttgctaccttcctgaaaagcagaaaacattgtataagttgctgtaggttcattctctagcccataacttatattcgttctgcaattttttttgttgggcaattgaccagattctttacttaaagtgctggctaaatctttgatgtctggagtttcaactgaatgacgtgttctatttccaaatgtttcttgggcacgtgtgggaccaggtctaacataatttttaaatgaatgttctgtttcagttgatttagttttttcattttgtactacatgagttataaagccagtggaacataatttaactcgcccataactaaaaacatttcttcttccacaattgctagattctttttttttctctttctctgtctgagcactatgtactccccataatgttgttgcaaaaggcagaggctggcatcccacttcagtagcatctttaaatctctttggttgattctgaattctattatttttcaagatgttggcagccatgccattaacagtagtactttctttccatatttctagatcctgcccactctcctcaaagtgacatggtgtctgaaaagggcttaaaaacatttctaaactggttccacacggattttc

SEQ ID NO: 5125 - DNA, 463 bp, Homo sapiens
  MAP TO AC007653.1; EXPRESSED IN LUNG, SIGNAL = 0.71; EXPRESSED IN BRAIN, SIGNAL = 1.2; EXPRESSED IN HEART, SIGNAL = 2.1
  unsure 26
  unsure 112
  unsure 269
cattgatataaactttggaatgctgnatctgctgcttagaactcttttccagtgaatccaattacagatgtcagctgggagacttgcagaatgccatgccaactgaacgtgncctgtcatgcggagtcagagcttcttactcagtggcacttaggactaattaattcagacctccttccctatctgcctgacatctagttgaaatggtcaggacatagtgaggcctgaggctgcatgcattgtaaaaacatctgtttcttttttgttgnttagaataataacctggaaagagcactggattggatctttagccaccctgagtttgaagaagacagtgattttgtgattgagatggagaataatgccaatgcaaacattatttctgaggccaagcccgaaggacctagagtcaaggatggatctggaagtaagttcttgccttagaggctgtctgagcagtcag

SEQ ID NO: 5126 - DNA, 1961 bp, Homo sapiens
  MAP TO AL009174.1; EXPRESSED IN LUNG, SIGNAL = 2.1; EXPRESSED IN HEART, SIGNAL = 1.4; EXPRESSED IN PLACENTA, SIGNAL =  24; EXPRESSED IN FETAL LIVER, SIGNAL =  11
tgctttaacaaatgtcattccctatgaagacgatattctttttatttctatttcatgaatcagaaaaatgaactcataaagataaaatgacttcccaacatcgcacagtaaggaagtaggtggagccaggctttacgattgcatagcctgtggtcttaatatgctgcctaactctgtgaggtcattcagtccatcatcaccccttccccaccttccaattttgttctcatttctctccatcagtacctgctactggccacctcaccccaataaggcccaaatcctctgacaactgtagactggtactcacagtggtggtcagctttcctgcattcttctggacatactggatagaatcatggattgttgaaaagagaccaagcagtacgttctccatgtcatagattctgtacatgccattcacaagttcttcaagggacagaatgtattctctccagtacttgtcaatctccaccacacctgccatacagccttgcatgaccacattgcagtaaccgccacagggtttaaccatcatcagtccctggcagtaagagcagtaccacattctggtgagcattcggccacagtccttactgaacttcaggtgatcagttgtgttgatcacttcaattccaagattcagagcctgaaggaagatcctagtgacttgcagtgacttggaaacctgggtcataataagcttggggaaattcccaaatactttcaggtcacgtcttgctcctcggaggcactcattgatgtccaaggctgaatcaggcaggcctgggttcattagctgggtatagatgactggaaacaggctgtcaaacaattcattgaccatgtcatctacattgatgtcagaacccaagatgtagagagacacatctgtgaaaaattcacccacaaactcaaaagcttgtggagtcaggcttgggtagttgttcttgaacatggcattggtgtagttcttggcatggcgaacaacaatttcaaaggcctctgtaaaaaaaaaaaaaaaagagacacaaaaatgtgtacaaattaaagcatgaaaatccagtgtgaaaatgaatttgagacttctctattgctgtggtgattaaggtcccatttgcgttaaataattgactctcattcatttctggcattgcctctactcttgcagttgtttgctcctataaatcaattttcctttctgaacatgaagtccagattctgatgtgcacataaattcttaaacacacaaattatatttcaaatgacaaaagccaagattcagttaacatttcggcctttcatgaaaatattgattaaaaattggctaaatgagaagttatttctctttctcacactgatttattcagttaaaaagaaattgtatttcaggacatttcatttttagacagagataaatatttgacaacaaaccatacattgtataaactcacacaacaatttaagcctgtttagccctggaggggaggcaagttcctagccaagaataaaagctatcacgaatttaatcattttggtagattttctcctgataactttaaagagagctttctgacagattgccagacctggaaatggaatctatccaatgcatttgtatctgggtggaaaaataatccatgtgcttatctatcatttggtattgaaaacaacacctctggtatttgcaagctgaacatccggagggataactactaagcttccttgctaagttcagcttccacatggcttggaagccttatctgctctacagagaccacaaattcatgattacatctgctgccccaacccctttgcataaagcccaatcagtgtcattggtttgaaagagaaagtagtaatgtcaccatctcattttctccaaactgaaacatcccagacccaaattatttcaaataatcagagtctacatttacatgagggaaggaaaaacaaccaca

SEQ ID NO: 5127 - DNA, 455 bp, Homo sapiens
  MAP TO AC011084.1; EXPRESSED IN HEART, SIGNAL = 1.1
ttaggctgttttgggcaatcctttgaagtggtttttcctcccaaattttctaatttttgttcattatatatttgaaaagaaattcaaattgcctgataatagaaaatgaaaacatgacaagctataaactctgaccttaaaagcatctctaatatagcatcataaaatataattagaaatccatttcaacatcacattacagatctatgacttacaggtaatttctgtcatttaaatatgagggtgagctgatggctgaattggattcttaggagaaaaacaatttcttctgcattaggagttattagtttaattgaataatatctggatcatactggtggtaatgttaatgttattacccattatcttggtgatggtcacaccactgtttccaggaaaaatatagcccattaactgaacagaaggattaaaataggaacaaagtggcaagcttt

SEQ ID NO: 5128 - DNA, 498 bp, Homo sapiens
  MAP TO AC009491.2; EXPRESSED IN FETAL LIVER, SIGNAL =   1; EXPRESSED IN HEART, SIGNAL = 0.86
atcaccttcagactgggtccaggatatgactgcattcttttcagattggttcaatgggtggattatttgccattctggctgcatccaggtagtaactgtttgaggataaggttgaataacatttattcttacattgtttcggttctgaaaccaagcactcacagtattaatgtcagatatgttcaatcattttgcttgaatatgccaacatattattttatcaaccctgcagggacctctcatggtgcaccacctgagcgagggccttggatgtcttatggtggaagcagctgccatgattataacaatacatgagatagatacggcagaagtcaggaaagttgctcaaggagctatggcgatttttattcttgtggtcatgagaacattggcagaaaagaccaaaggaatccaccttctctggatagggtgcactctgctcctcttgaagcatatggtagttcaagttatgtgccatctacaggagatggtggggaa

SEQ ID NO: 5129 - DNA, 401 bp, Homo sapiens
  MAP TO AC007394.2; EXPRESSED IN LUNG, SIGNAL = 0.71; EXPRESSED IN PLACENTA, SIGNAL = 0.6; EXPRESSED IN ADULT LIVER, SIGNAL = 0.86; EXPRESSED IN HEART, SIGNAL = 0.89
aatgttggaatcctacccccagagatgcaaattgtactgatcttggatgagataatctggagaaaatgactttaaaaaattatttcttttaaaactacttactttaaaaaaaattccaaacttatagaaaaatttcaagacacattaatttttaaattttgccacatttgacttattctctttgtctctaataatataatattatagtttgtcttctgaaccgttttaaggaaggttacaaacacaatgcctccttaccccttaatacttcagcatttcctaagaacaaagatattctctatcataaccagaatgcagttacaaaaatcaagaaatttaacatagacacaacagcttattatccatattctaattctaagacaagcatttgacgaagaagg

SEQ ID NO: 5130 - DNA, 454 bp, Homo sapiens
  MAP TO AC006111.2; EXPRESSED IN ADULT LIVER, SIGNAL =   1; EXPRESSED IN HEART, SIGNAL = 0.8; EXPRESSED IN FETAL LIVER, SIGNAL = 0.68
gctgagcagtcgggttttactgattaatgctttttcgggaggaagtgatacggcaatgagacgtgccggaaagggagctccggcttttttattacctgaattgcctatcattacagtggtttcaccgttcttaccgcaatccagcccgcgcagaaaacccatcatgtcaaagcgcattccttctgcagttaaccagcgcaatcctcgccagtgaacccggacgatataatcagcttctccaaaagcaagtgagcggatacattcgggacgcgaaccgaatccccggtcagcaatgcgtatctcgtctgccgtttgcgcaaatcggtccagccgttcagcgtctctgctgtcggttagctcaaaatcagtgaactgacaggtatgaggatcatatcccatatgtagtcgccattcagcgctgccgcccccgggcgcactgattgctgttccatcg

SEQ ID NO: 5131 - DNA, 397 bp, Homo sapiens
  MAP TO AL049744.7; EXPRESSED IN HELA, SIGNAL = 1.3; EXPRESSED IN ADULT LIVER, SIGNAL =   2; EXPRESSED IN HEART, SIGNAL = 0.81
gcatacttacaaaagacatttagcttctctttctgtagtagttagaaaggctaggcttaaatatattaaatagaatatatgtactcagcaatattgaaatatataatattatcactattattattattattattaagtgtgaacaccatgctgtgaaatagatagtaaaatgtattcctctagtctaactgaaaatttataccctttgaccaacacctcctagaaacaccgccatcccttcagcttctggtaaccaccactctactctcaccttctgtaaatttgaatttcttagattccacatatcaataagatcatgcaggatttttctttgtgttgactttattttagatagcataatgtccactagattcatccacgttttccctattgacaa

SEQ ID NO: 5132 - DNA, 464 bp, Homo sapiens
  MAP TO AC009941.2; EXPRESSED IN HBL100, SIGNAL =   1; EXPRESSED IN HEART, SIGNAL = 0.9
  unsure 239
  unsure 245
  unsure 272
agtcagttgtggccattcaggggaggaggacaggatggaaaggatgggacaggagaggaccctgacatgcactgaactccccatctctctgtttgtcacttatgtgcccttttagaggtgttcttatctttacagtgacagctctaaactcacatgtactttgtgtaatttagggcttcatctttgttttgaaataatatgaaaagttcaacttgactgaaaatttcttcatatgtttnggaggnaaatataattacatttatcattttttnttaaaaagaaaaaatattttacatagaactttaccacagtaaagttttaaaagttttaaaatttcttaaaactttgtattacctacttgggcaaccaatgttggcattgatgatgacaagcaagcgtttaaaaagatcatcattaaaagttcttcaccaggtactgttctttgtgaatgaaagtttaagttt

SEQ ID NO: 5133 - DNA, 384 bp, Homo sapiens
  MAP TO AC006441.13; EXPRESSED IN HEART, SIGNAL = 0.98; EXPRESSED IN BONE MARROW, SIGNAL = 0.96; EXPRESSED IN FETAL LIVER, SIGNAL = 0.93
tttgcctgctgacctatgtgtaggagaattgctttgtttatattattagtacatttgtaagagcctccatgacatggcaataacctgtctctgactgaatgccataattggaaaactagagcatttttttctgagcatttcccttggcactaattgtatttccaataaagataaaatattgcatgtacttaatggtatttactatagctgttgtgtgatttctcattaaataattgttcttcctctaataaaagtggttccccgtgagtggcttctagagaataatgcacgtctcctaatgctaagtggaaacaacatctgtttcagtttcatggctagtaaagctgtgaatggacgcaccattgaactggcaaggctcgtagt

SEQ ID NO: 5134 - DNA, 472 bp, Homo sapiens
  MAP TO AC008174.1; EXPRESSED IN HEART, SIGNAL = 0.99
tgatgaagacctgggtagagaagtaaattctgttaggttactttgaagcttttgcaatataatttcaggtttgagagggtaatatgaatggggtatgagatgttccttgaagcaagatggcagtttgtagtctaaaatctctaacaatatgccatttgttatttgttctgctattgaggcattgtcgtataccggattattaccacaggccacttttaattcatactgctgtaaaacatcataataaactgagtcaacaattttgctaacagtttctgtatgaactggtggaaaacacagcctttcttcagcattccgtagaacagtgacttgagcattattaaattcattcactacattgttgacaaataatgtattcatctcattgagccaggacacagtgatgtttttatttttgccccacaatgacatagagagattaaaaaacaattctgaaattattccttccaaa

SEQ ID NO: 5135 - DNA, 468 bp, Homo sapiens
  MAP TO AC006455.2; EXPRESSED IN PLACENTA, SIGNAL = 0.67; EXPRESSED IN BONE MARROW, SIGNAL = 2.3; EXPRESSED IN HEART, SIGNAL = 0.84
aatttgtgggcaaagagtggtttataatgtttctttattattctttaattcttcatgggatcagtaatgatagatcctctttcatttctgaaattaggactgtgtcttctgtctttttcaaccaaaactaaaaaggaacgttttaaaaagtgaaagctatttttgataaactatctaatttcccatgatctgcaactgtgggtacataggaagtacatggaaacagatgtttggcagagcttgccaacaaattcttttctgcatcaagaaggcatgcctctcagcatgacactcttaagaggcagaaatgtgacaaaagaaggatgcgatctgctcctggtgaagagccacctgactctccctcagctgcacatagtggccttaacgtgcatcttgctagaaggggcatgcaagccaggggctgccagccaagccatacaggccaaggacagtttcaagtctgccttt

SEQ ID NO: 5136 - DNA, 474 bp, Homo sapiens
  MAP TO AC007313.3; EXPRESSED IN HEART, SIGNAL = 0.85
ctgtgaacatgtgatgtttttccatttatttaggtttccttcattccttttagcagtgttttagagttctcagagtgtaaattttgtacttcttttgttgaatttattcctaaatattttattctttgtgatgttactataaattaggttactttcttaattttatttttagatttttcattgcaagtaaacaaaaatggaactgatttttgtatgttaatcttgtattctgaaaccttgatgaactcacttatgagttctaatagtatttttagtggattccttaggattttctctctatataagatcatgtcatctgcaaatagagatacttttacttcttgcttttcaatctggttgccctttatttcatttacttgcccaaatgccctggctagaacctttggtacaatgttgaaaaaaagtgagaacagacattcttatcttgttctggatctaaggcattctttaagc

SEQ ID NO: 5137 - DNA, 488 bp, Homo sapiens
  MAP TO AC007033.3; EXPRESSED IN PLACENTA, SIGNAL = 0.94; EXPRESSED IN HEART, SIGNAL = 0.8
agccggatgaccctatgacctctcagttttcttatttgataagtgcaagattttaaatatgccctgcccaccccaagattgccaaatttaagtgagattatagaaggcatggctttccttgaactatatatagcaggctatgcaaagtgagttcttcgtagcctcaccataatcataattgcaaggaacctaattactttccactctccctcagtcattaagtttcacaggcccaaaaactgtgaatcaggaaccttcacaagttccccggaaggtgaaaaaaatatctgcaaaagaagtgaatccagcccaagtttcataaccttaggcaaatccaggaagagtgacggcacaattacaaagagtaactgcatagaatatctgttcagttaccactcttacctggcttgtaaaacaacagcagaaggtgttaacaaatgcttgtttaccaataagtccatactgcagcaaaattcctggccctactg

SEQ ID NO: 5138 - DNA, 404 bp, Homo sapiens
  MAP TO AC010740.3; EXPRESSED IN HEART, SIGNAL = 0.95; EXPRESSED IN BT474, SIGNAL = 0.92; EXPRESSED IN BRAIN, SIGNAL =   1
aaacatcaacctccactgccaagtaggatttagtagggacaagtcttgtacaagtagtgtgtcgacagtcaacccatatggatagatgaagtgccaaattagtctggaaagcagagtagtgtccaaagattaagtaaaagataatttgtattctagcctttgtggcatcaaactctgaattcatttactactgcaataatcagatcatcagcactaggaaagttcagcttagttcaaagcatttacttgcatttttattaagactaactttggaggagatttacgtgtatatccaagcaaacctttacctgtgcaagtttgattggattcatcttcattgctcccacagtcattagctccatcacaaagccatctcttggggatgcagcgattattctggcatt

SEQ ID NO: 5139 - DNA, 500 bp, Homo sapiens
  MAP TO AC007653.1; EXPRESSED IN HEART, SIGNAL = 0.87
  unsure 25
  unsure 437
  unsure 443
caaacaccaagtcctatggattctnattaaagatctctcaaatccacctaattctctcgttctccactgccagcaccctaccctagtcactatcatctcttatatagacaactgtaacagccttataaacatgttgctgtcttcggtgtggagaatagaatgccctatgtactccattctcctcatttcaaccagagtaatctttctaaaacaccgatctaaacaatggctttacacttgtccttagaacaaagtccaagcttattcgtctaactgtataaggtcttttctgatcttgaatattctatatcctcacctctgacaccttctgccttcaggtctacactggcatcgtcataatcagttcccagaatgggtcctgtaatccttctcctagcttttacatatgctgttcctcctactggaaattttctttncctcgntgccattacatggctgacatttgttcaaccttacagtctcagttgggtgttatctgc

SEQ ID NO: 5140 - DNA, 1873 bp, Homo sapiens
  MAP TO AL022152.1; EXPRESSED IN HEART, SIGNAL = 1.1; EXPRESSED IN FETAL LIVER, SIGNAL =   1
ctttcctcagagccctcctcagggggaggactccatgtctcctctctactttcctcagagtcctcttcagggggaggaattccagtcttctctccagagccctgtgagcatctgctcctcctccactccatccagtcttccccagagtttccctgagagttctcagagtcctcctgaggggcctgtccagtctcctctccatagtcctcagagccctcctgaggggatgcactcccaatctcctctccagagtcctgagagtgctcctgagggggaggattccctgtctcctctccaaattcctcagagtcctcttgagggagaggactccctgtcttctctccattttcctcagagtcctcctgagtgggaggactccctctctcctctccactttcctcagtttcctcctcagggggaggacttccagtcttctctccagagtcctgtgagtatctgctcctcctccacttctttgagtcttccccagagtttccctgagagtcctcagagtcctcctgaggggcctgctcagtctcctctccagagacctgtcagctccttcttctcctacactttagcgagtcttctccaaagttcccatgagagtcctcagagtcctcctgaggggcctgcccagtctcctctccagagtcctgtgagctccttcccctcctccacttcatcgagtctttcccagagttctcctgtgagctccttcccctcctccacttcatcgagtctttccaagagttcccctgagagtcctctccagagtcctgtgatctccttctcctcctccacttcattgagcccattcagtgaagagtccagcagcccagtagatgaatatacaagttcctcagacaccttgctagagagtgattccttgacagacagcgagtccttgatagagagcgagcccttgttcacttatacactggatgaaaaggtggacgagttggcgcggtttcttctcctcaaatatcaagtgaagcagcctatcacaaaggcagagatgctgacgaatgtcatcagcaggtacacgggctactttcctgtgatcttcaggaaagcccgtgagttcatagagatactttttggcatttccctgagagaagtggaccctgatgactcctatgtctttgtaaacacattagacctcacctctgaggggtgtctgagtgatgagcagggcatgtcccagaaccgcctcctgattcttattctgagtatcatcttcataaagggcacctatgcctctgaggaggtcatctgggatgtgctgagtggaataggggtgcgtgctgggagggagcactttgcctttggggagcccagggagctcctcactaaagtttgggtgcaggaacattacctagagtaccgggaggtgcccaactcttctcctcctcgttacgaattcctgtggggtccaagagctcattcagaagtcattaagaggaaagtagtagagtttttggccatgctaaagaataccgtccctattacctttccatcctcttacaaggatgctttgaaagatgtggaagagagagcccaggccataattgacaccacagatgattcgactgccacagaaagtgcaagctccagtgtcatgtcccccagcttctcttctgagtgaagtctagggcagattcttccctctgagtttgaagggggcagtcgagtttctacgtggtggagggcctggttgaggctggagagaacacagtgctatttgcatttctgttccatatgggtagttatggggtttacctgttttacttttgggtatttttcaaatgcttttcctattaataacaggtttaaatagcttcagaatcctagtttatgcacatgagtcgca

SEQ ID NO: 5141 - DNA, 388 bp, Homo sapiens
  MAP TO AF152365.1; EXPRESSED IN HEART, SIGNAL = 0.92
tatagcctcaaatgggccagcacttacttgtgagttactaatctaatctcaactatttcttttctttacaacattgtatttcaaaataactcaaacctacaattggttgcaagttagtacgatgaatacctgcaataccctacttcaactgttaaggttttatcatatctgctttctctcttttacacacacagacacacatataggcacacactcagcaatatcatcatcattttcccaattgcttcttagggcacaatggtttgggtattcaagaaaacaagaataaaagtcatggcatcctgcagaccaaagcaagacctaacccttgtgtgaggtataatcagtatcttgagtgaaatcatttccctggagtgaagagttccca

SEQ ID NO: 5142 - DNA, 409 bp, Homo sapiens
  MAP TO AF152364.1; EXPRESSED IN FETAL LIVER, SIGNAL = 1.1; EXPRESSED IN HBL100, SIGNAL =   1; EXPRESSED IN HEART, SIGNAL = 1.1; EXPRESSED IN BONE MARROW, SIGNAL = 0.93
gaagacaaactcagcaaagccttatttttatgctgctgttgtttttaacctttagtgggaagtaataggagacctcatactttatgaagcctttttgtatctggtggtagtttttaaaaagaccatcagctaaaatataaatataaatttaaccatggatgattgtaatttcctgcattatatttttatgtattttcgaaaagtatctgtaatgagcgagtatcatctctgtaatcagaaaagaaactatgaaaatatccccagtgagatctgtgtttgctcacagggcactatttggcatgatgagagtgaggggaatgatctgaatgttttcagtgccaagcaccatgttggcctcaatcggtagcaattctaattctttttcctgtggatttgtatcagttgctgg

SEQ ID NO: 5143 - DNA, 480 bp, Homo sapiens
  MAP TO AC010085.1; EXPRESSED IN HEART, SIGNAL = 1.4
ggaaatgtaagagtttgagagcttgactaaattaatgctatcactgaaaaatggcaacttgaaatgcctctgtgtttactcacctagaaaaccactgctagtctgaatgtgtatttctaaattatcaaaatgagtaaaggccatatatttcagggagctgcactaaagtaaacagaaaaatcttcctctaagctgccagattttccttttccttcaaactgagataacagcacataaagagtctgatagaagaggagcactccttatgaaaaatgcatgggccaaaaccttaggaaacagaactagaaatcacatcttacctctttttccataaagtcaaactccgctgcacaggtatacaataaagtatcaaaatccttataactaaagaattttgatgttagtaagttgccaatatgagcctggtaagaaataaagttaccattatattaagccatacactgcaataatatattttaa

SEQ ID NO: 5144 - DNA, 488 bp, Homo sapiens
  MAP TO AC007773.1; EXPRESSED IN HEART, SIGNAL = 3.2
tagttgcagcaaacccacacacaatttctgcaaactgtcagaatttttaagcccttgctcttgagatgtgatttggtgcattatcgcctccataatagtgtggaatacacacaccgtatgtgaatatttatatgcaaagtgtcactttatgatagttagagcttaaataacaaatgcaagggttttcagagcaacagtttatggtttttctgtttggtttatagagatactggctgctcttgagaaaacttgtctgcaaggttttttattactagagacatgtaaattatacaaaggttttctttttacagaggctgacacttcttgccattttcatatcaacttttctctttagtctgacatggcaatttaatcaatttatgatgctgatgcaagcattagtgctgttcacactggactccctggacatgctgccagcagtgaaggtgagctttgctttcttttctcacttgagattttggccattt

SEQ ID NO: 5145 - DNA, 479 bp, Homo sapiens
  MAP TO AC007841.1; EXPRESSED IN HEART, SIGNAL = 0.93
caaaacaaatgattgtgtgtcagaaataaccacacaattgccaatcctcttcaatgaactaaatgtttgtccccctccctcattcatatgttgaaaccctaatctcaacgtgatcacatttaaaggtaattagagggataattaaatcatgagaggtaattaggtcataagggtggagcccacatgaatggaattagtgcccttctaagaggagactggagagctgctaactctcttttctctatgtgtggaaactaggagaagttgactgtctgcaacctggaagcaagccctcaccagaagctgaccatgcttgcaccctggtctcaaacttccagcctccaaaactgtgagaataaatatctgttgtttgaaagccacccagagtaccatagtactctgttacagcagctcaaactgactgagaccctctttaacaatgacaataaaactaagaatggctaaaatgtactgagtgc

SEQ ID NO: 5146 - DNA, 355 bp, Homo sapiens
  MAP TO AC009421.1; EXPRESSED IN FETAL LIVER, SIGNAL = 0.9; EXPRESSED IN BT474, SIGNAL =   1; EXPRESSED IN HEART, SIGNAL =  27
  unsure 156
  unsure 293
gctccaaacattaatttagtcacagaaagcatgaggcaagtattagcaggctctaacaagtcctttttggaagtaaaaaatatatatatctttcacaaaatttgcaattacgaattatcaataaaataatactggactaagtgtgaagagaaaaantggatcacctcaaatactctaaagtattttaatttataaaattaaatctaatgctggactgtgaaactttgttgagggcggttgtgctgaatgctatttatttggctccacaggcctgactgcaccatctccagctnctctgcttcgggttgctgacctctatgtccataccagccagggtccctttccctttgactcc

SEQ ID NO: 5147 - DNA, 463 bp, Homo sapiens
  MAP TO AC009223.1; EXPRESSED IN PLACENTA, SIGNAL = 0.62; EXPRESSED IN HEART, SIGNAL = 0.81
ggaagaaattgtagattttactaggggaattgccctgtaaaatatttatacaacagttattaccatattttgaaatatatacaatttacatgtttaagttgtgaggcaaccagtggaagtatattaatacacaacatttcaaagcctaacctttgcccaggggatagagaaaaatatgagttcaattacattgtaaatgaacatcttgcaacatataaacagcccaaagcatattacatcacaatgctctaataaaaattaattaaaacaaggaaataacctgtcacaagtaccaaaatgtacccaagagccaataaaaaaagatgcagatgagattccccagtcagccttggacatttgtaggtccttttcctcgatggtgaagtctgtaaaaaagggataatttgaacgagaaattggtttaggatttacagagttgaaggccatttgctgacatctgctc

SEQ ID NO: 5148 - DNA, 375 bp, Homo sapiens
  MAP TO AC008283.2; EXPRESSED IN HEART, SIGNAL = 0.9
tgcattctattggaggggagtggagtgtaaaacaaacaattaaaataatagtgtatatcgtagtgtaatgagtgctctcgataaaaatagagaagaggttaatgatagtgcctgggttaagagagaagagtgaaattttataatgggtagatagagaaggccttgtggctaaggcaattttgtaattgaagtctgtagtttgtgagcaagtgagccataaaaatcacctgtgtaagaaggctgtggccatggaaacagaaaactcaaagatcttcaggcaggagcatggtgggctcataatcagcagggagaccattgtggccagagcagagttagcaagcgaacggggagcaggggtagcagcagacgccatgt

SEQ ID NO: 5149 - DNA, 473 bp, Homo sapiens
  MAP TO AC008272.1; EXPRESSED IN HEART, SIGNAL = 0.82
ccacaaggcaaatggctactaaccaaagactatttatttgcagaaaatccatcaaagtcgttacatgcagatgagtcacaaagagaagatatcatcctttcatgatccccagccccacttcaccaaactgctctcacaagtcagcaacatctccttactggcaaacctatgatggctctcaaactactggatgtgattacagaggactattggtagctataatttatctttccaaccctttatctctttctcttcttttgataacagaatccgtatttcctgtggggaatctattccacttagctgaccctctcctaaccctacccctataacaagtggtagctgctgctcttgtttcttcttcatcactatgaccagcactaccactattgttatcattatgatcatcatggcggctaagatttattgataatttactatgtgccagacactgttctgtccactttatatgt

SEQ ID NO: 5150 - DNA, 458 bp, Homo sapiens
  MAP TO AC007563.1; EXPRESSED IN HEART, SIGNAL =   1
tctcactgttccccatttccatcttctccccagcccccaaaaagcacataagatttaaatgaacaaatcatctacccacataaagtttgtcggagatggcatcacaccctagtaaaattgcttggcacggttaaacaactgaagtgagattgtgcagacggtgcaggaatgcaggaaataaacaaagaaaaaaagcaaaggcctccaggttgaggtctttgggagacggcccatcatcagctgcctctgccaccacatttttttggacaggatctcccaacattatccagagcatacatgaggaagcctcctctgttggggtgccagagcagcttctcactgtcaccaccacagtcatctttctcaacagaaagcatcccatggtacacagcaatctgggcttttaccctgggaggatggacaacttctatctgtgatgaatcctaccaagccccaat

SEQ ID NO: 5151 - DNA, 454 bp, Homo sapiens
  MAP TO AC007631.3; EXPRESSED IN HEART, SIGNAL = 0.97
tgtttcacaaacttatttgaccatagattcattttcatttttggtaagtacatttttagggccattccatgatacaatctttagaacaagttgcttttgaaaagagtgattttttgtctttccttaatgctgttagtgtctccatctttcaaacttcaagaccatggacgcccaaatgtacctttactgcctttccctgagactgtctctactattaaagtcactagccaatcctaaataaaattaagaaacatttctatcacttactctccactttattattattgtttttggtgtgtttttaggttgaccccttcatgtcggacttagctctgatgtgttcctcaacgcactggctcttcataatcatggcatcatttcaaaattttctaggatgtctaaaagtgcttttattcatattagcccaaatgagaaaggaagttggagagatttt

SEQ ID NO: 5152 - DNA, 391 bp, Homo sapiens
  MAP TO AP000130.1; EXPRESSED IN HEART, SIGNAL = 0.8
aaaagattgccaatgcaaggaaagctagtattataataatgactaaagttctatctaagagatagctctagattttgatttgtcatgatagcactgcactgcttcgtgcgtaaacaaaggtgatcattccactctggaatactgagctaagtagggccatctccaccaacttaagggctatgaatgaagctcatttatttttgaactcgttccactccaccaactacaattaacacgagaacactcataatttgaagataatctcccataaagtgtgcttggacaacagtcataacattaccagctcatagatgtcttcctcgggctgtggaacatagagctgcattttgttttctattagaaatttcaggcgcaggtaatgagcagaatg

SEQ ID NO: 5153 - DNA, 470 bp, Homo sapiens
  MAP TO AP000207.1; EXPRESSED IN HEART, SIGNAL = 0.99
acccagaagaaatagagaaatatcctttaagttaatgtttctgccctgtgcatcatgaacaatgattacgttggaatcatttgctagtcaatgccattaattacttttccttttgtggtgactgtcatggtcctgttgctattttcctctccagacagtagaattatactgaaatatatctattagtcattacacatatatcttgcaggttgcttattcctgataccactttagtcctgattaaatacaacatgaactttggctttggacaaaggaagaggcaaatctagcagtgttccttgaatttatgaggctgcaaaatgagttactgtgatttcagagagcacggttaccatattagggaagaagctcacgtgaccttctcctctggcactggtgatcccaatggattcacagccagggcttggcctggcttcttctgcagagactgtgataatgtgccctgggac

SEQ ID NO: 5154 - DNA, 400 bp, Homo sapiens
  MAP TO AL121654.1; EXPRESSED IN BT474, SIGNAL = 0.97; EXPRESSED IN HEART, SIGNAL = 0.84; EXPRESSED IN BONE MARROW, SIGNAL =   1
gccttctggacacagacctcttcccagtgggagccacactttcaggaaatcataaaagataagaaaagtaaaaatgctgccaagagtcataacttattttttgaagagtgagctccctcagggccaagtacttcctggaagaagatgattcaagaaagactatggagtgtttcctgaaaggctggtcagagctagaccagcatctgtggagactttagtgcttttgaattcatgccctggccttctgtgccctggctgtgtctctagctctctttagaagtcactgctggcctttatcctgcctctgcagcagcttcttcccagtctgctccgtcctttttcttttcaaccagatgtacattcttgtctgtaacctaagggcattcttgttcattttctt

SEQ ID NO: 5155 - DNA, 439 bp, Homo sapiens
  MAP TO AL021919.4; EXPRESSED IN HEART, SIGNAL = 1.5
aggaccaaaaatgcatcaccatgcttcctttatctttacacttgcagtctattgctgttgcattgatcactatcaaaacctcatcaatatactctttaccatttcattacctcaagctcttcctcttcatggagagatgcatctgctcttccatttcttggccattatcacaataattatcacagcttcaattgcagtggctccattacaattcattacctcttctgatgaaggagagataggttgctctacaggggtgccctgctttcctttcagaacagccctcagctcccacaaggaatagtggtctctttgccaccaaaactattgtgatttctcccctaacatgctttcatcattgcacaagtgatatttacaccctaacttggaagtgacaagattcaacttacaaaagcctgcctgatttccttcctggtgt

SEQ ID NO: 5156 - DNA, 482 bp, Homo sapiens
  MAP TO AC008283.2; EXPRESSED IN HEART, SIGNAL = 0.84
gaataaccgaggccaaaatgtcagtagggacactgtcatacaaagttttgttttcagaaattctctccagagtataaacctcttgaaaaacatctttcgatgaatactatgtacatgttggtagtagatccagtcaaactgtcctctaaagtgtcgaaaacttgttgataactactggattagagttattttataggtagaacaatgaacatatttaatattattttgtaaataaatgaagacattcagtttttaattacaaatttgaattaattaatggtttctctcttttttgttagcaacaattgtgttaaatgaactcaactggacaagtgccttagatgaagttttcaaaaagaatcgcgaggaagacccttcattattgtggcaggtttttggcagtgccactggcctagctcgatattatccaggtaggtgcttagtgattcaatcattgtcaagttccagcctcaatgtttctg

SEQ ID NO: 5157 - DNA, 1995 bp, Homo sapiens
  MAP TO AL008628.1; EXPRESSED IN HEART, SIGNAL = 1.5
atcattcccttcccctgatggctgcaggatgtgcccatcattcccttcccctgatggctgcaggatgtgcccatcattcccttcccctagtgggagcaggacatgccactgattctcttcccttaatgggtgcaggacatgccccctcatttctatgccccaatggctgcaggatgtacccctcattgctgcagggcatgcccttcattccctttcccagatggcttcaggatgtgaccttcattcccttccccgatggctgcaggatatactcctcattcccatcccaagttggttgcaggacatgcctcttattccttttcccagatggctgcaggacatatcctatccctttcccccagatggctgccagatgtgacccttattattttacccagatagctgcagtacattcccctcatttcctttctctcatggctgcagaacatgcccctcattcccttctcctgatggctgcagaacatgtctctcatttcctttccctgatggctacagaacatgcccttcctttccttcccctgatggctgtgggacatgcccctcatttccttcccctgatggctgcaggacatgttcctcatttccttcccctgatggctgcagaacatgcccctcactcccttcccctgatggctgcagaacatgtcccttatttcctttccttgatggctgcgggacatgcccctactttccttcccctgatggctgcaggacatgttcctcatttccttcccctgatggctgcagaacatgcccctcattcccttctcctgatggctgcacaacatgtccctcatttcctccccctgatggctgcagaacatgcccctcattcccttctcctgatggctgcacaacatgtccctcatttcctccccctgatggctgcaggacatgcccctcctttccttcccctgatggctgcaggacatgttcctcatttccttcccttgatggctgcagaacatgtccctcatttccttcccctgatggctgcagaacgtgtccctcattttcatcccctgatggctgcagaacatgtccctcctttccttcccctgatggctgcaggacatgcccctcctttccttcccctgatggctgcaggacatgttcctcatttccttcccctgatggctgcagaacatgtccctcattttcatcccctgatggtggcagaacatgtccctcttttccttccccagatggctgcagaacatgtccctcatttccttccccagatggctgtaggacatgcccctcattcccttcccctgatggctgcagaacatgtccctcattttcatcccctggcggtggcagaacatgtcgctcatttccttccccacatggctgcagaacatgtccctcatttccttcccctgatggctgtgggacatgcctcttttttccttcccctgctgtgagacatgcccctcattcccttcccctgatggctgcagaacatatccctcattttcatcccctgacagtggcagaacatgtccctcatttccttcccctggtggccgcaggacagttcccttatttccttcccctgacagctggaggacatgctcctcagtcccttctcctgatggctgcagaacatgtccctcatttcctttccctgatggctgtgggacatgcccctcatctccttcccctgacggctgcagaacacgtccctcatttccttcccctgatggttgcgtgatatgcctctcatttccctcccctgatgggtacaggacatgtccctcatttctttcccctgatggctgcagaacacatccctcatttcgttcccttgatggctgcagaacatgtccctcatttccttcccctgatggctgcagaacacgtccctcatttccttcccctgatggttgcgggatatgcctctcatttccctcccctgatgggtacaggacatgtccctcatttctttcccccgatggctgcagaacacat

SEQ ID NO: 5158 - DNA, 473 bp, Homo sapiens
  MAP TO AC009301.1; EXPRESSED IN HEART, SIGNAL = 0.87
atgggatgtgatggaagcaggaatccgctggggactctgtggatcactgagcagtgagggtcccactggcctagtgaggggcaagatcagtaaatgtccttgagcttatctttgctgtccctgaggcaacaagaggaatccctgatctccatggaaactttattgtattatccaaactgctctcccctcctgactctcatgataaccgtggcctggccagagctggcgtggtggttgagtctcttctgcttccctgctcctccctgtctctcctccttgattcctcataaggtggcatcatgtactccttgtcccacaccttcctgcccctgcctctcaaggtagcaaacaccctctttgctcccgtctgcttcatctcaggccgggtgccaccacccttcagactttcacccaagccctgatctgtggcatcatcctgctctccccccactcccattttgttgtctcctctg

SEQ ID NO: 5159 - DNA, 1963 bp, Homo sapiens
  MAP TO AL023279.1; EXPRESSED IN HEART, SIGNAL = 0.96
gcactgtgttctctccagcctcaaccaggccctccaccacgtagaaactcgactgcccccttcaaactcagagggaagaatctgccctagacttcactcagaagagaagctgggggacatgacactggagcttgcactttctgtggcagtcgaatcatctgtggtgtcaattatggcctgggctctctcttccacatctttcaaagcatccttgtaagaggatggaaaggtaatagggacggtattctttagcatggccaaaaactctactactttcctcttaatgacttctgaatgagctcttggaccccacaggaattcgtaacgaggaggagaagagttgggcacctcccggtactctaggtaatgttcctgcacccaaactttagtgaggagctccctgggctccccaaaggcaaagtgctccctcccagcacgcacccctattccactcagcacatcccagatgacctcctcagaggcataggtgccctttatgaagatgatactcagaataagaatcaggaggcggttctgggacatgccctgctcatcactcagacacccctcagaggtgaggtctaatgtgtttacaaagacataggagtcatcagggtccacttctctcagggaaatgccaaaaagtatctctatgaactcacgggctttcctgaagatcacaggaaagtagcccgtgtacctgctgatgacattcgtcagcatctctgcctttgtgataggctgcttcacttgatatttgaggagaagaaaccgcgccaactcgtccaccttttcatccagtgtataagtgaacaagggctcgctctctatcaaggactcgctgtctgtcaaggaatcactctctagcaaggtgtctgaggaacttgtatattcatctactgggctgctggactcttcactgaatgggctcaatgaagtggaggaggagaaggagatcacaggactctggagaggactctcaggggaactcttggaaagactcgatgaagtggaggaggggaaggagctcacaggagaactctgggaaagactcgatgaagtggaggaggggaaggagctcacaggactctggagaggagactgggcaggcccctcaggaggactctgaggactctcatgggaactttggagaagactcgctaaagtgtaggagaagaaggagctgacaggtctctggagaggagactgagcaggcccctcaggaggactctgaggactctcagggaaactctggggaagactcaaagaagtggaggaggagcagatactcacaggactctggagagaagactggaagtcctccccctgaggaggaaactgaggaaagtggagaggagagagggagtcctcccactcaggaggactctgaggaaaatggagagaagacagggagtcctctccctcaagaggactctgaggaatttggagaggagacagggaatcctccccctcaggagcactctcaggactctggagaggagattgggagtgcatcccctcaggagggctctgaggactatggagaggagactggacaggcccctcaggaggactctgagaactctcagggaaactctggggaagactggatggagtggaggaggagcagatgctcacagggctctggagagaagactggaattcctccccctgaagaggactctgaggaaagtagagaggagacatggagtcctccccctgaggagggctctgaggaaagtagtgaggagacagggagtcctccccctgagggctctgaggaaagtagtgaggagacagggagtcctccccctgaggagggctctgaggaaagtagtgaggagatagggagtcctccccctgaggagggctctgaggaaagtagtgaggagacagggagtcctcccactcaggaagacttggaacaatctggagaggagaatgggtattctccccttcagga

SEQ ID NO: 5160 - DNA, 450 bp, Homo sapiens
  MAP TO AC004902.2; EXPRESSED IN HEART, SIGNAL = 1.1; EXPRESSED IN BONE MARROW, SIGNAL = 0.93; EXPRESSED IN HBL100, SIGNAL = 0.91
tgcctgtcactatctgttacgggtttaagggtgagtctgcattggatatttcataggttgggagaggtggaggcagaaataggtaactgaaatgttttctaaaacggaagccatatcttaattataccaagaaatattatttaatataaggataactgaccttcctcagactttgttttaccatttttttgtggaggggacatgcatgtatagactgatggtttttgttttcttttaagaaacgaacgtgctcatttttgtcatatctttttgctctgtaggtgtcgctacctactggatagtgttgcacagcctgtgacaaaggataagtttgctttggaatctgaagtagagtactgtctcgtgaaattaattttctcattctgaatctcattttttgtattattttcttctaaaacttagcgattgtctacctatcattgttttatg

SEQ ID NO: 5161 - DNA, 472 bp, Homo sapiens
  MAP TO AL078582.7; EXPRESSED IN HEART, SIGNAL = 1.3; EXPRESSED IN LUNG, SIGNAL = 1.6
tgagccaaatgttcttctaaactctttgtatacattaactcatctaatgctcaaaacaatcctttgtacagggtagttactgctactaaaccactttcacttttgaggaagctgaggcaagaagggtgaagtgagtagcttgccgaaggtgacagcgacaatgtaggacaaagctaggacttgaactcaggtgctccagctccagagtctgagctctcacccactatcaatacaacccaatcccacacgacttattctctttagatttaatgacaactaagaaaatcaatgttacatacaggcaggcggatcagtttcttatggtatctttccacacgcccgaagacctcctggcagtaccgtcggagctcatctagttcctcctcgatgatcgctgcatccaagggctcactcttttctatcagctgttctccttgggcaattatctgctcaatcttattgtggttcagtg

SEQ ID NO: 5162 - DNA, 352 bp, Homo sapiens
  MAP TO AC008417.2; EXPRESSED IN HEART, SIGNAL = 1.6
caaaaagagaaactagaatccaaagagtttaagcaacttaccaagtcagaacagacatcaggtcaaatcttaaaaagaacaaaaaaaaaaaaaggccagtgattattaacgaatgtatacattacctgcacatctgaattgtgacttccactttgtgaagcaaacagacagtctgcagtgtcaactgagagggataattgtgagggcagaagatgtgagccagcaccttggctgaaattgctttgtgaacttttcggaccatcctccacagactcactcaaattgatgactgagtctctaatatttgagatgatctcattattctcagctagcaaacgctccaaatggtcta

SEQ ID NO: 5163 - DNA, 443 bp, Homo sapiens
  MAP TO AC010856.2; EXPRESSED IN LUNG, SIGNAL = 1.4; EXPRESSED IN BRAIN, SIGNAL = 1.4; EXPRESSED IN HEART, SIGNAL = 1.1
tgcctctttgcattttctccttcacttctgctctctcagttcctctgtctctgcctcatttcacccatttgtcaatttatcagatagagcccattgtgtacaaatcttcccctaaatgctagagaatcagagacaaatcgaacatgaagacagaatcccaccctagagaatcccacttttcaggtctgtgtgagaattatgggagcccaaaggtgggcacccctgagtcatgcctctctcttctcctctgcaggagatcatcacctccatcctgctgagcgggcggatcgggcccaacatccggttggctgagtgctatgggctgaggctgaagcacatgaagtccgatgagatccactggctgcacccacagatgacggtgggtgaggtgcaggacaagtatgagtgtctgcacgtggaagccgagtggaggtaggagtgga

SEQ ID NO: 5164 - DNA, 427 bp, Homo sapiens
  MAP TO AC009232.1; EXPRESSED IN HEART, SIGNAL =  13; EXPRESSED IN BONE MARROW, SIGNAL = 0.93
tccattttgagggtttttccttttattcaagaaattaaaaaatataaacaaaagctttgtaattactatcgagatatttttgtgtatgggcatggtatatgctttttatttccatcttagcatttcagcagtggagcagatgttttgtttttttctagaaatgctgtctggctaatgtcattaactccaggagaagagagagggggagtgagagtgagaaaggggcgtgtgggactctgtctgtggtacctcaggcccggtgggacacagaaaggagagacacttcaagaacgggtgccacctcctgctgccccagggcaccatgcgtccctctagtaaagagaagctggtggatggtctcggcctggagacaccatacagtgcactgcgtcaggagtaagccttgcctctttgtgggcaggtcatc

SEQ ID NO: 5165 - DNA, 1975 bp, Homo sapiens
  MAP TO AC005859.1; EXPRESSED IN HEART, SIGNAL = 1.1; EXPRESSED IN PLACENTA, SIGNAL = 0.96; EXPRESSED IN LUNG, SIGNAL = 1.3
caaataccctctggtttgccagagtctttgacagaacttagtctaattcaaaacaatatatacaacataactaaagagggcatttcaagacttataaacttgaaaaatctctatttggcctggaactgctattttaacaaagtttgcgagaaaactaacatagaagatggagtatttgaaacgctgacaaatttggagttgctatcactatctttcaattctctttcacacgtgccacccaaactgccaagctccctacgcaaactttttctgagcaacacccagatcaaatacattagtgaagaagatttcaagggattgataaatttaacattactagatttaagcgggaactgtccgaggtgcttcaatgccccatttccatgcgtgccttgtgatggtggtgcttcaattaatatagatcgttttgcttttcaaaacttgacccaacttcgatacctaaacctctctagcacttccctcaggaagattaatgctgcctggtttaaaaatatgcctcatctgaaggtgctggatcttgaattcaactatttagtgggagaaatagcctctggggcatttttaacgatgctgccccgcttagaaatacttgacttgtcttttaactatataaaggggagttatccacagcatattaatatttccagaaacttctctaaacttttgtctctacgggcattgcatttaagaggttatgtgttccaggaactcagagaagatgatttccagcccctgatgcagcttccaaacttatcgactatcaacttgggtattaattttattaagcaaatcgatttcaaacttttccaaaatttctccaatctggaaattatttacttgtcagaaaacagaatatcaccgttggtaaaagatacccggcagagttatgcaaatagttcctcttttcaacgtcatatccggaaacgacgctcaacagattttgagtttgacccacattcgaacttttatcatttcacccgtcctttaataaagccacaatgtgctgcttatggaaaagccttagatttaagcctcaacagtattttcttcattgggccaaaccaatttgaaaatcttcctgacattgcctgtttaaatctgtctgcaaatagcaatgctcaagtgttaagtggaactgaattttcagccattcctcatgtcaaatatttggatttgacaaacaatagactagactttgataatgctagtgctcttactgaattgtccgacttggaagttctagatctcagctataattcacactatttcagaatagcaggcgtaacacatcatctagaatttattcaaaatttcacaaatctaaaagttttaaacttgagccacaacaacatttatactttaacagataagtataacctggaaagcaagtccctggtagaattagttttcagtggcaatcgccttgacattttgtggaatgatgatgacaacaggtatatctccattttcaaaggtctcaagaatctgacacgtctggatttatcccttaataggctgaagcacatcccaaatgaagcattccttaatttgccagcgagtctcactgaactacatataaatgataatatgttaaagttttttaactggacattactccagcagtttcctcgtctcgagttgcttgacttacgtggaaacaaactactctttttaactgatagcctatctgactttacatcttcccttcggacactgctgctgagtcataacaggatttcccacctaccctctggctttctttctgaagtcagtagtctgaagcacctcgatttaagttccaatctgctaaaaacaatcaacaaatccgcacttgaaactaagaccaccaccaaattatctatgttggaactacacggaaacccctttgaatgcacctgtgacattggagatttccgaagatggatggatgaacatctgaatgtcaaaattccca

SEQ ID NO: 5166 - DNA, 374 bp, Homo sapiens
  MAP TO AL121675.8; EXPRESSED IN HEART, SIGNAL = 0.95
ccaagctctagcgagtgaccagggctctagacgtagattcagcagacaccacgttgaagccatggggctagcgagagtgtggggaaggggaggcagtcaggaccaagaggggccctcccacattcagaggagcattgtcccgtgaggcaggaggaaaaccgggagagtgtagggtccgagacgtctacagcagaaagccttcccagagggaggcagcggtcagtggactggatgtttctgagagattgagcgaggtggggaccatcggatttggccacgtgggaggtgctggaaaaggaagctggcctgcagtgggctgggaaggaaggagctggggatgggaaggacccacaagccttgaagaaggtttgctg

SEQ ID NO: 5167 - DNA, 476 bp, Homo sapiens
  MAP TO AC009576.2; EXPRESSED IN HEART, SIGNAL = 1.3
  unsure 38
  unsure 77
  unsure 103
  unsure 140
  unsure 213
agactcactgggaagcttgggagaggcacaggtctttngtggcccagatacacagcaagcccattctctcattagcnaacagtgaccactgtttacaataccntgttgctatcagagactttacctttttttttcttaangagttaatcttgctcatagtttgtcagctctttggggatcctagcacacaaactagattatctgcggctgctncttcccagcagccagagattaaaggatatcatttaaagttgtgctttcggtgtctttttatttcttttggtctgctcacttcagtttaccacacagcagctgccaaggcagctgatgttaccatcttcatcacaatggtcttcatcattatcatcaagagaagaacttattacaaacgtaatttcccagatatctttcctatgtgctctcaagaaaattacataagcttgggtctgaccacaaactctgtaaattcatcattc

SEQ ID NO: 5168 - DNA, 465 bp, Homo sapiens
  MAP TO AC009651.2; EXPRESSED IN BRAIN, SIGNAL = 0.9; EXPRESSED IN HEART, SIGNAL = 0.89
  unsure 144
ggtaaaagctgctgctaggcagatgtggacttcaaatctctccaaggtcagacagtctcttaaaaatgtttaccacaaatgtaagattcagcaccaagattcaactggatatcccactgtgacatctgatgattgtaatcaagnatgatgatagttatgacggaaaaatgaatcttccagtagtgctccaagatgttaaaactgctcaagttgaacttttcagccaaatgactgacattgtccatatgataccaaaagtccaggaaaagactgacttgtatcaaaaacagatggaggtcctggaaaccagaatgaatgttaatgaagacaaacaatgcacaacgactaaagatatcctctctatgaaagaagacatcaaggcattaaagaagaaggtgacagaactggaaattcagaattcctgctccacgatacattgtctagagattctggagggagaaaggg

SEQ ID NO: 5169 - DNA, 439 bp, Homo sapiens
  MAP TO AF107885.2; EXPRESSED IN HEART, SIGNAL = 0.86
tcattctgtttgtgcaagggaaatacacacagaggaagaatatacgtcaacatggtgacaaaatgtagcagacgtctttggttgttggatcacggatgaatttctctatgcctttttgtctctcaggttttaggcattgagaatataatacttttattcttaaaaaattgctttggttttgtttcattttgaaaaggtgaaagggtatatagccgctgctggtaatttagccttgggggaggggaggaagatttggtaatctttctcattcgtcagtgctcacatccagtgcctgaaccattgcttctctctggtaatcagcattattagtaaacccccacttccccacaggagccactctgcccagaattagagcattctgcagcgggattggcgtggagcagcaggcttccaccataggaaagtcccctccagcagg

SEQ ID NO: 5170 - DNA, 460 bp, Homo sapiens
  MAP TO AC010740.2; EXPRESSED IN HEART, SIGNAL = 0.94
gcctcagagctgcttaaaaactttattccactgataccaaaaggatttactagattaaagatttctggcaaggaagatcggtaatgctaaatttgagtctacttggttttacctgtgctaggtagcacttttgcaatctctcaaagttgaaatcacattgaaataatttgtactgctgatcacaggcacaaaggccttttcctttgtgcttaacacaatccttgaatgggtgcacatgttggttttccttcttttgtaggtgtcagtgccattgaagtggttgtggagcatggcctggctactccagaaggcctgacagtcgactggatagcaggaaacatatactggatagacagcaatctggaccaaatcgaagtggccaaactagatggctccctaagaactacactaatagcaggagccatggaacaccccagggccattgctttggacccaagat

SEQ ID NO: 5171 - DNA, 465 bp, Homo sapiens
  MAP TO AC011283.2; EXPRESSED IN HEART, SIGNAL = 0.84
ttagtacaacagtaacaattacaaggcatactaaaaagcaacaaacaaacaaagcaaaacaaaacaaaaacacagtttgaagagatacagcaaacatcagaaccagcctcagatatggctgtgatgttgaaagtttcaaactgtgaatttaaaacagctgtgattaatatgcaaagacctttaaagagaaaagcagacaacatgcaagatcaaaaggataacgtaaatagtgatatggatattttaagaaagaagcaagaagaaatgcttgagataaaaagcactgtaacagaaataaagaatgcctttgatgagctaaatagtagactgggaatagctgaggacagaatctcaaagctgaaggatctgtcaatagaaatttacaaaactaaaaagcaaagaggaaaaatagacaaagaagaaaaaagagcagaatatccaagtcctgtggaacaagacaatcac

SEQ ID NO: 5172 - DNA, 478 bp, Homo sapiens
  MAP TO AL109935.13; EXPRESSED IN HEART, SIGNAL = 1.1
caagtaagcgagattgggttgtatactgatgcatgcaaattattttaaaaaataaattagagcaggaataataatgtcattgccactcatggatgttatgatattctgtctggggtgggagtaccaagaaaggagatgcagccaaggccccagggcatttaataacagttggatgagacacccatgggtacacagtggtgtctgtaaacgatatttctcatgagtgttgtaagagagacaggaagacagaactgagttgaacacattcacagctagacaggggagcaaatatgtttctttccagcctactgtgctagtgggttctccttggagccttgtgttgaaaatgactgtggggcctcttctgcagaggtgcaacagggcttcgtgttcatcacatctgcctcctcctcttcctcatattgcactgaggccaaaaggtagagaattacttgaagcaagcaaagggaagccttct

SEQ ID NO: 5173 - DNA, 470 bp, Homo sapiens
  MAP TO AF176315.1; EXPRESSED IN HEART, SIGNAL = 0.9
ttcccccatttgaaacattctccttctaccattttctccctggcaaacttctactcatgctccaaggaccatctcagatgccccctcctctaggaagcctttcatgatttccctgaccagaaacaactgttctctcctctgtgtcttcaggccactctccacaggtctattattttggaatataagcatgtgactgactccccctttccctcaggccatctccctgggagtggggaggagactgggctcctctttgtcctggggatcggctacctaaatgccctgaagctctgccattgtacctggcttccagagccagctccacatccacttggagaaagagaatccacaaccaaaaaccgaaatgatagccacaagaatggacacctttttggatctaaattgagaatcacatggagatgtatgtcatccaactcaaacctggtcatccatctggctggacatgaaga

SEQ ID NO: 5174 - DNA, 465 bp, Homo sapiens
  MAP TO AC010974.3; EXPRESSED IN HEART, SIGNAL = 1.5; EXPRESSED IN LUNG, SIGNAL =   1
tttttctactacatatcttccaaggcagactgacagactgtaaaagcatcactattgtttacaaaatgtaatttgcacatacacgtacatatacatgtatgggaacactgataaactagaataaactttttttaattaggacatgtattatctaatctggaaatgtcaagtcttttgagatttaactgtccaaggcaggattttgagacaaataattaaattatcgctattcaatgtttctgcttggttttacctagaaacttcactcacgtctcttggatctttcatctggagatttgctttcagaggtggaaagaaaccgaagtctgacacagtcacgaactgatgctgaggtgcacgtgagtttcccagttgccttcagaacacttgttttggtggttattttccttccatcaaatatgatgtcacaagcgaaccataaagtgcatccttgaagcattgtca

SEQ ID NO: 5175 - DNA, 472 bp, Homo sapiens
  MAP TO AL034551.14; EXPRESSED IN HEART, SIGNAL = 0.88
gcaacctctcataagttgtgaccaccaaaaatgtctcccaacattgccaaatgttccttggagataaggacaatattgcccctagttggaaaacattgctctgaggccatgaaataaaaattttcgttatcaaaacataacaggagacactgctaagttcaatgacttactcagcattgtaaaaagctggacattcatggaatccccacctggatgaaagcaacaacactttttacttttggcactagttagctgccataacacagaactcagtgccttaattcactgcaagattatccttactcatgtgaaaatccaatgtgggtattcatggtcagatggctttcctgcaggtgattattgaggaactcaggctccaatgtctttggctccataatcttcagcacatgactggaattccctccattcaatcagggactggggaaaggatggtgaggaaagcgcatctctg

SEQ ID NO: 5176 - DNA, 476 bp, Homo sapiens; identical to SEQ ID NO: 1912
  MAP TO AC007158.5; EXPRESSED IN HEART, SIGNAL =   1

SEQ ID NO: 5177 - DNA, 351 bp, Homo sapiens
  MAP TO AL078602.10; EXPRESSED IN HEART, SIGNAL = 0.95
caggactgttttctgggagcttagagaagctgaatcatacagtgagacaatttggtggaggctggaacaaggcttaactagaggccatctgctacaaaggactagaaagcaaggaatggctcttagaggaatctgtttaagctgatagacaggatttggggagaaattcttgaaataaatactgagaggaaaccaaacaaggattgcatctcaagttggtgctcaggtatccgtggagagcgcacaggagagtctcacctgcagggccagtaaagaggactcagaaacttcatgggtcaggttgcggcccgactggcctgacagtcaacgaggtggaaaccgtgacaaatt

SEQ ID NO: 5178 - DNA, 453 bp, Homo sapiens
  MAP TO AC007163.2; EXPRESSED IN HEART, SIGNAL = 1.1
cagagggtcacccaagactcctccctcttagatattagcattagcaccttatataaatgagtcggcagaaaataaagtcagagggagctatgcaccatccagagggaaaaaataaaagtgatcccgagttggacaggcaggatcagaagtccacatgacctgaagataagaagaggggctggaggggaagcaggtgggccggagggaagctgtggtgatgtacagcctgcagcagcaagactcactgccaaatgaccaaaagactgagcagatgttgacattacctgaatgttcacaattataggctccacgtcttggtacacaatcttcaccacttttgtggcctgcttggcatgatcatgtttgtcagcagccacagtgcagaaaatctgacccacacaaatcacctgcagaaaacacagaccaattaactgccagaagggaacaaaaatg

SEQ ID NO: 5179 - DNA, 376 bp, Homo sapiens
  MAP TO AC008496.2; EXPRESSED IN HEART, SIGNAL = 2.9
gcccctctggagtgttctcataataacctgtgtatatctggatatggcccttaccacacattttctatgatcctctgtttttccatctccccacctgagcatgagcttcttgagaacaggaccccaggcttaagtcatcgttgtataaccagcactttgcacaacactcaacacacaataggtgcttaataaacacttactggctgatctcaagagtctgtgaagaactgagcgttgtcttctaatgcacccttagcatccatctccttacctgtcctaaagatggccctttcactgggcaggctacatccagtgaagttcacagccatcacccacacttgatagcatcggtcaggttccagatcttcaaaaatgc

SEQ ID NO: 5180 - DNA, 463 bp, Homo sapiens; identical to SEQ ID NO: 4802
  MAP TO AC007092.3; EXPRESSED IN HEART, SIGNAL = 8.8

SEQ ID NO: 5181 - DNA, 459 bp, Homo sapiens
  MAP TO AC009290.1; EXPRESSED IN HEART, SIGNAL = 2.6
  unsure 150
  unsure 206
  unsure 225
  unsure 269
  unsure 290
  unsure 317
ctgcacatttgttggacctcttgcagactttataagttagtttccatgtggaaagacctttgtctagggttgttgcaagggaacttactggataaagtgcagcttttctggtaccagtgagaatgccagaaatgtagtctctgtgctgcntgtggtaactgaggtcagtgttgatgaagatttcaggggatcctcagcaaccaacnactgtatatgtccacagtnggcagcaagtgttgttagagtctttgatggtgatactttttaantgtcctcatgacctccttttnctcataccagagaagttgttactaagngggaatctgtcctggaactgtatctgtcttgtgtactcatttgtagtggtggtggtactggtatctgatggagaggccagagaggtgaggttaggcctgaagcatgggcaaacatgaaggggctatggctctggaacccagg

SEQ ID NO: 5182 - DNA, 473 bp, Homo sapiens
  MAP TO AC006148.3; EXPRESSED IN HEART, SIGNAL = 0.89
tccccaaatcttagatgcttgagtgtctgtaaatgtctgattcaattattttaaaactttaataaaagttgacattttcaaaaataagttctgaaccaattttcataccttggaaatcatcacattagcttgagctgttaggctaactagtttgggggctgatctaaataagaaagtccttttctaccatcactgaatgatgaagactgtagctctattagagctcttataaagtctagcctctacactgctgctgagctaaatttgtattagcaggtactcagtcgagcacatgcacattgaacttcttaaaatgtcaggcaaagctcaagggtatcttccagcccatgcactcctgctcatgctgctacactacagactccaagcaatgtgtgtaaactgacagtcacttgaagatgagaaaatacaatgacaattatttgtactagaggttcaaattttatttcaaaaca

SEQ ID NO: 5183 - DNA, 380 bp, Homo sapiens
  MAP TO AL109609.5; EXPRESSED IN HEART, SIGNAL = 1.2; EXPRESSED IN BONE MARROW, SIGNAL = 0.96
ttgataaggggttttccctgttatctgttaatttcttgtgtctttaattggcaaaattaagcactagtgttacagaagcccaaagtgagggaaaccactcactttcagaatgtacattagaagtttaaaactgtacccagattttttgtctcttttttttttattagtaggcctctgttaatagagtagtagttgcaaacacatacgtgggtttgccagtaacaactcacaatttgtgcaaagttgagtcttcgaaactgagcaaatttgctctcaatttcccgccagcgcttgctgagctggatctgagttggctccactgccattgcggccccatcctcagacaagccctcagcttgcctacgcactgcattcagctc

SEQ ID NO: 5184 - DNA, 405 bp, Homo sapiens
  MAP TO AC008844.2; EXPRESSED IN HEART, SIGNAL = 7.2
cctttaagggagaagagacgctttttttgtgcacccactatgtatacaaccctgtgttaatggtttatggaatatggataggaaatacagatgctacttgacttacaatggggttatgtcctgataaatttgttggaagttgaaaatattggaagttaaaaactcatgtaaaggataagtcatgattgcggactgtgaatgtcccaactcacgtgtgatggccattactggcctgctgccttcatgctgggcaattatcttgagtttcatctcaagagtaattgccttcctcttcttctcaccagaagcaggagacacagatgggcattttgtagacatgatggatgcggaaacaggatatccaaaaattgctggcaacacagcacactgtcatcatgtgcctga

SEQ ID NO: 5185 - DNA, 456 bp, Homo sapiens
  MAP TO AC009496.1; EXPRESSED IN HEART, SIGNAL = 0.87
aaaatcatgtccctaagcatgacttaatataatgtgggcttggtgagttagaagtggggttagggatattgctaggagttcagcaggacagtaactgagttataagataattattcctcttcaatggctctcaccatgacaactcagttctgaaattcaactattattcagctcaaattattgtcaaagtttaaagcttgaattttattgacctccttctgatgtctatgacatctaatcatctgggtataagaagccagattgttaacagcaagagcagcttaaacgattcttactgaacacacctggacaggtcctttgtgaagcccaaactatgattcggtctctgggctctgttatacatccataaccacttggggaagaaattgaacatggcattcccatcttccttactatgaagctgcaagtctttcacagcccaaatattccagtttg

SEQ ID NO: 5186 - DNA, 399 bp, Homo sapiens
  MAP TO J03071.1; EXPRESSED IN PLACENTA, SIGNAL = 1.1e+02; EXPRESSED IN HEART, SIGNAL = 1.7
tagaggaaggcatccaaacgctgatgtgggtgagggtggcaccagggatcccaatcctggggccccactggcttccagggactggggagagaaacactgctgccctctttttagcagtcaggcgctgacccaagagaactcaccgtattcttcatttcccctcgtgaatcctccaggcctttctctacaacctggaggggagggaggaaaatggatgaatgagagagggagggaacagtgcccaagcgcttggcctctccttctcttccttcactttgcagaggctggaagatggcagcccccggactgggcagatcttcaatcagtcctacagcaagtttgacacaaaatcgcacaacgatgacgcactgctcaagaactacgggctgctctactgct

SEQ ID NO: 5187 - DNA, 1964 bp, Homo sapiens
  MAP TO AC010680.3; EXPRESSED IN HEART, SIGNAL =  10
gaatccttatggaccccctgatccgcccaaaaaccctgaagtgacaactattactaaagattcgatggttgtctgctggggacatcctgattctgatggtggaagtgaaatcatcaattatattgtggaacggcgtgataaagctggccaacgctggattaaatgcaacaaaaaaactcttactgatttaagatataaagtgtctggactgacagaaggacatgaatatgagttcaggattatggctgaaaatgctgctggaattagtgcaccaagtcctaccagtccattttacaaggcttgtgacactgtgtttaaacctggaccaccaggtaacccacgtgttctggatacaagcagatcatccatttcaatcgcttggaataaacctatctatgatggtggttcagaaatcactgggtatatggttgagattgccctgccagaggaagatgaatggcagattgtcactccaccagcaggactcaaggcaacttcgtatactatcactggcctcacagagaatcaggaatataagatccgcatctatgccatgaattccgaaggacttggggaacctgcccttgttcctggaactccaaaggctgaagacagaatgctgcctccagaaattgaactggatgctgacctgcgcaaagttgttactataagggcctgctgcaccctgagactttttgttcccatcaaaggaaggcctgcacctgaggtgaagtgggcccgggaccatggagaatctttagataaagctagcatcgaatccacaagctcttacaccctgcttattgttggaaatgtaaacagatttgacagtggcaaatatatactaactgtagaaaatagttcaggcagcaagtctgcatttgtcaatgttagagttctcgatacaccaggccccccacaggatctgaaggtaaaagaggtcactaagacatctgtcacactcacatgggacccacctctccttgatggaggttcaaaaatcaagaactatattgttgaaaagcgggaatcaacaagaaaagcatattcaactgttgcaacaaactgccacaagacttcctggaaggtagaccagcttcaagaaggctgtagctactatttcagggttctcgcagaaaatgaatatggcattgggctgcctgctgaaaccgcagaatctgtgaaagcatcagaacgacctcttcctccaggaaaaataactttgatggatgtcacaagaaatagtgtgtcactctcttgggagaaaccagagcatgatggaggcagccgaattctaggctacattgtggagatgcagaccaaaggcagtgacaaatgggccacgtgtgccacagtcaaggtcactgaagccactatcactggattaattcagggtgaagaatactctttccgtgtttcagctcagaatgaaaagggcatcagtgatcctagacaactgagtgtgccagtgatcgccaaagatcttgtcattccaccagccttcaaactcctgttcaatactttcactgtactggcaggtgaagacctaaaagttgatgttccattcattggccgccctaccccagctgtaacctggcataaagataatgtaccactgaagcagacaactagagtaaatgcagagagcacagaaaataattcactactgacaataaaggacgcctgccgagaagatgttggccattatgtggttaaactgactaactcagctggtgaagctattgaaacccttaatgttatcgttcttgacaaaccagggcctccaactggaccagttaaaatggatgaagtgacagctgatagtattactctttcctggggcccacccaagtatgatggtggaagttctatcaataattacattgttgagaaacgggacacttccacaaccacctggcaaattgtatcagctacagttgcaaggacaacaataaaggcttgca

SEQ ID NO: 5188 - DNA, 487 bp, Homo sapiens
  MAP TO AC009891.1; EXPRESSED IN HEART, SIGNAL = 1.4
ggtgactcagaatttttcttagctgaatttcttttttgtgttatatattttaaaaacatttgccttaagctaaggtgtgaagatgacatatggtgtattctcaatgtactcaaaagaaattaaatacatctgaaaatactttagaagcatcagctgaaatgttattttattaattagttgtaattatacatttatcctttcaatcatttattcaacaaatgaatcgagccactattaggtgtcattattgatgaacacaaaaagtgaacaaaactattgaatcctttgattcccttagagcttacattttacatgaatgctacttatattaaaaacgaagaagtgtacagtgcgtcaggtggtgataaatacaatgaagaaaataagacagagaaattagataggaagtgccaggcgatgggtgatgcttttgatgagtggagtgaacgtgagataacattaatcagacatgaggataaagtgtgga

SEQ ID NO: 5189 - DNA, 1890 bp, Homo sapiens
  MAP TO AC010680.3; EXPRESSED IN HEART, SIGNAL = 6.7
tctcacagtgacttgtgccccagggatatctgacaggtcaacttcaggtgtaataataagttctttcactgtaattggcccaatagtgacaggatcactcagtcctttctcatttttggcaaacactctgaactccaggactgactgctccttaagttggctaacctcaatttcacatgtcttacttatgccagcgtgggaccacgtctgttcacctttacctttcctttctacaacatattctgtgatgacgctaccaccatcaaagtcaggtttggtccagctgaggatgacagatgtctttgttgagtctttcattgagagatcacgtataggagctggtacttcagcagccttcactggctctgtagtttcacagggttccccaattccaatttcattttctgcaagaactctgaagaagaatggagtcttctccgacaaatctattagcttgaaggatgtgctagaacatttgtgtgacacgacagaccatgttctcttggtggcatctctcttttcaatgacataattaattattggagatcctccatcaatgagaggaggatcccagagcaaagtgactgtgcctcgagaaacatgtttaacctgtagtttctggcaggcagctggtgtgtcaagcactttaacactcacagttgaagacttaggttcaccaactccattttctattgtgagaatatattttcctgtatcattgcgagtaacttgaggaatggtgagtaatgaggatgaatcagtgttttcaatgctgtatctggcatcactgccaagattcttctcatcttttctccatgtgacagtaggtggaggtctgcctttaaagggaatcaacacttgtacatcttcaccagctttggcaataacagaagttctgagagccacatccaggtcaatctctggtgcctctgtagacataaaatggatacatacagtgaattttaaaagcaaaaaagagtgatttcctggaagtatgcttattaaaaaacataatcaaaccagtaggtacataccaagtatatctttagcttgtacaggttcattcatttctataggttctccttgtccagcacagtttacagcagatacccggaagtagtaattgactccaggtttcaggttggataccacatattctgtagttctgacctctcctttggtagagacagtagtccattcctcttcctctccttgtcttatctcgacaacatacccagtaacagcactgcccccatcatagacaggcttactccagccaagggtgatggatgacttggttgaatctgcgattcttatcttagcaggtggacctggaggatctggaatggccattcacaataaaataattacacaatcatgtacaatttagtcacacaggtgaatatagaagacacaggtgaagatgctgcaggtatgagcacttaccaataggatcagcagctttgtagaattcagatggttcagaaaatggaccctgtccagcagcgtttacagcacaaactctgtattgatagtcactgttttctgtgagtcctgttactttttgtctggtgtcacggatagtctcttttagtactttaaaccatcctaggctcttcttgtctcgtttttcaaggaaatagccacttatatcactaccgccatctgcaattggcctgctccatacaacagtcatcgaattcttggtaatctttgtcacttctggtatgcctggtggcccaggtgtaactatttagaaaggaagggaaaacaaggtacaagaatccacattactgataaattatacctttgatgttcgcattctttccaagaacattggttttattttttatatttttcaccttgtgaaaaggatggtaatgagacagg

SEQ ID NO: 5190 - DNA, 473 bp, Homo sapiens
  MAP TO AC011082.1; EXPRESSED IN HEART, SIGNAL = 0.84
tgaaggaaatgaacaaacccacatgaattttttgtccatatgtctatttgcaaagctgaataggtgaggaaaaaatgattttgagaatgtacttagtgttttcctaggctttgtaatgggatctagcagaccaagttttacaatctgaaacaatatggcttcatatgattgaagtttttcaaaagagggtcagacaattgaaagcagaattagaacttaaaaatctgatacataagacgatctattgagtgggtattggtcagcctctatccccagccatctatttcatatttagaccctgtccattgtgcttatgaaccaagtgactatgctgacagcgatgaaggttattcacgagctcaataaaatggactttccgttgtccaggtcacttgaacctctgtttgaacatgtccataagaaagatcaaccctgagcgaaaaatatgacaccgttttccagggtatcagcca

SEQ ID NO: 5191 - DNA, 349 bp, Homo sapiens
  MAP TO AC011145.1; EXPRESSED IN HEART, SIGNAL = 1.4
ttggctcttttgtaataacactgcttaaaacacaaacacattgcacagctttacagaagcattttctttgtttatgtctttattctataaacatagaatatattttataaacatgtctatattttatatattctataaacatgtctgtttttaatttttttaagttatttattaaaaactaagataaacacactaggctaggctacccaaggtcaggttcatcaatttcactgacttccacctccatatcttgtcccattggaagatcttcaagggcaataacaggcatggagttgtcctccatgataacaatgccttcttctggataccccatgaaggacttgacctg

SEQ ID NO: 5192 - DNA, 407 bp, Homo sapiens
  MAP TO AF064858.1; EXPRESSED IN HEART, SIGNAL = 0.97
gctttcgggtgctacagaagtctctgctgggctcagtgctgctgaagcctcgctgaggggttgatggagaatcttggaaggccaatcttctcatccgtggacatccttaggggcagaataccatgggtgggggttatgggatttgaagacccctggccactggggggccagagggcttgcaacctgcagagaacccctagggttgttcccttctcagtagatcctaaagccctgaactgctcatagggtccttggtggcctagcccttaccaacctctccagccccctctgaagccctccccacctcctcttgcttttttccacaaccctcctgaacttctccagccaccgcagctgctgcggctcacctctgggccggcacacacactgttcactctgccgagaca

SEQ ID NO: 5193 - DNA, 454 bp, Homo sapiens
  MAP TO AJ011929.1; EXPRESSED IN HELA, SIGNAL =   2; EXPRESSED IN HEART, SIGNAL = 1.4
cctctagtgctttggttgcctcatctgtaaagtggtgaggataatgctatcacactggttgagaattgaagtaattattgctgcaaagggcttataagggtgtctaatactagtactagtaggtacttcatgtgtcttgacaattttaatcattattattttgtcatcaccgtcactcttccaggggactaatgtccctgctgttctgtccaaattaaacattgtttatccctgtgggcatctggcgaggtggctaggaaagcctggagctgtttcctgttgacgtgccagactagtcatggtttctgatgtgatcttgttttgtctagattccagaattctctgatggtttctggactgggtcccagctggcgtgctggacgaattcggaaacaccttggtcttacttccctaaaatctccatctacctgagagacgagaactccagcaggtc

SEQ ID NO: 5194 - DNA, 449 bp, Homo sapiens
  MAP TO AC007312.1; EXPRESSED IN HEART, SIGNAL =   1
ccacacagaacagggatagtattgatattgctattcccattttacagaagaaaaaaaaaaaaaacaaggaaagtcatatccaaagttaatttttccaaaatccaaattataaccctggcaactgcaaggaaagagccttggtctacatttcccctaccataattaagaagacaaaattaaaattaaaattaaaaagaaatggttcaaataattagagacaaaaatagaaaatcctggctcaccgatgctttgacattgagaaagtattttctcagtacagcatctgtgaactggatattttctgtttgccctgcaaacttcccatctgtttccaatctgctccatgccagaagctgaccactgcatccaaggatccctttccctctggcttccagttgagtttggccaatgaaaatcattggcaagagactggagagagggaggaaggt

SEQ ID NO: 5195 - DNA, 457 bp, Homo sapiens
  MAP TO AC010680.3; EXPRESSED IN HEART, SIGNAL =   4
gcacacttagatgaccaagccaactataatgtgtctttgaccaatcacagaggtgaaaatgttaaaagtgcagccaatctaatagtagaaggtaagtaatttatataccactagagattttttcatcagtttctgttataaaaataattaaaatcaacatatttttctcctttacaacagaggaagaccttaggattgttgagcctcttaaagatattgaaacaatggagaagaaatctgtcacattctggtgcaaggtgaatcgtctcaatgtaacactgaagtggaccaaaaatggtgaagaagtgccttttgacaaccgtgtctcatacagagttgataagtacaagcacatgttaaccattaaagactgtggcttcccagatgaaggtgaatacattgtcactgctggacaagataaatctgttgctgagcttctcatcatagaagccccgac

SEQ ID NO: 5196 - DNA, 430 bp, Homo sapiens
  MAP TO AC010083.2; EXPRESSED IN HEART, SIGNAL = 0.96
agctctacaccaaagagcggcacgtgctggtcacaggggatgccaattacgtggaccctagattctatgtctcctccatcacagctaaaggtggggtggctgtttctgttgcggaagactctgtgctttatgacggccaggtggagccctctcctgagtcacccaagccccctttagagaatgggcaggtgggtctgcaggagaaagaagatggacaaccaattgaccagcagcctatagacaaggagattgagccagatggtgcagagctggaaggccctgaagagaaacgtgagggtgaggagcgggacgaagagtccaggagaccctgtgccatggtcacacccggtgcagaggaaccatctatacctgagcctccaaagcctgcggctgatcaggatggagctgaggtgcttgggactaggagcag

SEQ ID NO: 5197 - DNA, 348 bp, Homo sapiens
  MAP TO AL049553.15; EXPRESSED IN HEART, SIGNAL =   1; EXPRESSED IN HBL100, SIGNAL =   1
tgttcttcatggatcccagctatttaagttatagattggtacagagatggtgattgaatggtgagtcatcaataatagtgtgatggtgttgattggatttttccctctgtaaacaagtttagttgctgaatcggtcaggagaggctaggttatgctgaggtgacaagcaactcctaaatttcagggccgtaagacaactcaatttaattcttactctccatgttcgtcgtgggtcagcaggaggctgtgctcatggcagtcactcagagcactggctgacagagacgctgtgacagagggcaagagagaacgctggaaggtctcgctctcaccaggaattaaatgcca

SEQ ID NO: 5198 - DNA, 447 bp, Homo sapiens
  MAP TO AC012352.1; EXPRESSED IN HEART, SIGNAL = 0.95
ttttctccccactacttcatgtaattaatatcacatttaacatttttttaatgtgtgttcattaacaaattttaatatttatatgtatttttaaatacttctgtattttaacttttatacaaaaattaaaattcatttacccacatccattacagtattacagtattctctattttttatatagttacctttatcaacaattttttttatatgtttgtgtattgccatttagcctcctttcttttcaacctgaagaacttgtttatcatttgtaagacaggtccagtggtgaagtctctcacttttgttcttctggagaagtctttctcttgcctttatatttgaaagaccattttgttggtatcatattcttgattgataatgtattttctttcagcactttgaatatgtcatcacactccactgtggactgcaataattctgttt

SEQ ID NO: 5199 - DNA, 376 bp, Homo sapiens
  MAP TO AL009174.1; EXPRESSED IN HEART, SIGNAL = 2.5
gttcccaagagtggaagctgaaagagtaaaggctgagtctaagtaattccccccactccataaggaaatggaatatggccattagtctacgggaaacaatggccctctcttaaaggaaagagtttcccttaggcctctccctacctccaaaccccctctcactaacaccacacatggcaagaaaaattgaacccatgcaaggccttccattttgatttccatagaagttaaaaaaaaaaccaaaaaacaaacaaaaaaaaaaccaccctgaacttctcccaacccttgcagttttcttggtggatcataaagattattgacaatttgaagaagatcaagatgaggttcgatctaaatgtcaagagcatgaggggct

SEQ ID NO: 5200 - DNA, 369 bp, Homo sapiens
  MAP TO AF064857.1; EXPRESSED IN HEART, SIGNAL = 1.2
tatccatgccgttgatgatgtggagttttgttgctttatattagtgactataaatgtatttacattggctttcaagcttactgcgctttgaaagttcttaaattcctcaacgtcagattctacaatcaaattctatgacccatgggtctaaccctccagtagcggtgcagggaaatctgtagtatttaagggtttggatccccagaacttagtgatgtacttggtggagagggggctggaggtggctggggcaggagtcaggactgggcacagggaggcagctacatgagttgtgggggcaggggcttacggggctcctgtgggacaggcatagtcacgtgacttggagctggaggcatgtagtcagca

SEQ ID NO: 5201 - DNA, 482 bp, Homo sapiens
  MAP TO AB020869.1; EXPRESSED IN HEART, SIGNAL = 2.2
ttgttgttcctcttggactgtgagtacaaggctccttctttgagaatgagcaggaatgcctataaggagttttctttttattttccctgactccactttttgtttctggattatgatttatatcagaaaacatttcctatggtttggagatatttttagaagtctgagggtggtctcaggaaaaatggaaaatactctgttatttgtttctttatcttccaacttctctctttaggttccaatctggaccttgccctcagtcttactcctttcactgtcccagccaatcttttgtcccttgtttatttctgtagggaaacacccaatgcaggaggtgatagctctggaatttgtcattgataagccacctccttccagaaatcacaaattcattctgactgaacccttttttgctttaaatcagaggagcggtaatttctagtttgaaagtaacagacacatgtggatggtatccttgggaa

SEQ ID NO: 5202 - DNA, 464 bp, Homo sapiens
  MAP TO AC009475.2; EXPRESSED IN HEART, SIGNAL = 1.1
tgcatttccttcaaacaaggatgttctccaacaaaaccaaaatacaaccatcaaaagcaggaaattgaaatggattcatcactactatctaaccctgagttccaccaattgtcctgcctaagttccccatagcaacaggatccagttcagtattgtgcctggcattcagtcactatgtttctttagtttccactctggaacagttcttagctcctccttggctttcctgccattgacagacttgaagatgaccagttaattattttatgtaacgtccttcaatttggacttatctgatgtttgctcatgatcagattcaggtttcgtatctttggcaggaaaatcacagaagtgatgctgtgatctttattgcattcattcacgtgactcatttcatttgccccattactgatggtgttcacctgattaggatggtgtctgccaggctgcttcgctgtagagtc

SEQ ID NO: 5203 - DNA, 561 bp, Homo sapiens
  MAP TO AL023553.5; EXPRESSED IN BRAIN, SIGNAL = 4.7; EXPRESSED IN PLACENTA, SIGNAL = 6.2; EXPRESSED IN HELA, SIGNAL = 3.5; EXPRESSED IN HEART, SIGNAL =   9; EXPRESSED IN LUNG, SIGNAL = 3.6; EXPRESSED IN BONE MARROW, SIGNAL = 3.3; EXPRESSED IN FETAL LIVER, SIGNAL = 3.9; EXPRESSED IN ADULT LIVER, SIGNAL = 2.6
gtgaacaggacccagcagtccccacccaagtggaacgttgaggtcctgagttcagactccctgtccctggccactgttgaggttgccacatggactgagagggagaggcagggcgggaggaggccgtgcagctagcaccaggccacccttctgctcttctccccacagactgaaccggccgctgacactctcggagaagattgtgtatggacacctggatgaccccgccagccaggaaattgagcgaggcaagtcgtacctgcggctgcggccggaccgtgtggccatgcaggatgcgacggcccagatggccatgctccagttcatcagcagcgggctgtccaaggtggctgtgccatccaccatccactgtgaccatctgattgaagcccaggttgggggcgagaaagacctgcgccgggccaaggtgagcagaaggtggctttgggggtgggcaagtgggcaagactgggcgagaggcctcaccctcacactggagcaaaccagggcattgcctccaaattctcacacctctttggattggtctgcttttaaaacttg

SEQ ID NO: 5204 - DNA, 567 bp, Homo sapiens
  MAP TO AL023553.5; EXPRESSED IN BONE MARROW, SIGNAL = 2.1; EXPRESSED IN HEART, SIGNAL = 9.1; EXPRESSED IN LUNG, SIGNAL = 2.5; EXPRESSED IN FETAL LIVER, SIGNAL = 2.4; EXPRESSED IN ADULT LIVER, SIGNAL =   2; EXPRESSED IN HELA, SIGNAL = 2.1; EXPRESSED IN PLACENTA, SIGNAL = 1.8; EXPRESSED IN BRAIN, SIGNAL = 2.1
agggactcattctgggctggctgtggggtggtggttggtggggatgaacgggagacggtgggacccaggagggaaaagggaacaagttagactcgaatcttctgggagggaggtagagaccaataagcagcaatgtgaatggcagcagggccatcctgacttcgtggctggcacaggcacacacggcctctcacagccgcctcgccccctcctgtccaggtgattggcgtgaagctgacgggctctctctccggttggtcctcacccaaagatgtgatcctgaaggtggcaggcatcctcacggtgaaaggtggcacaggtgcaatcgtggaataccacgggcctggtgtagactccatctcctgcactggtgaggaaggcggccaggcgacgtggcccctaccctgtgctgggcctgatgggtctccagttgggagtagaagcggtgaatggccttcacttgagaatctgtctgttccatttggggacttgggatagacagaggtagaaggaaaattggagacagcattagagattgtctagtccacatcctcattaaacagatga

SEQ ID NO: 5205 - DNA, 552 bp, Homo sapiens
  MAP TO AL023553.5; EXPRESSED IN PLACENTA, SIGNAL = 5.8; EXPRESSED IN HEART, SIGNAL = 7.4; EXPRESSED IN FETAL LIVER, SIGNAL =   4; EXPRESSED IN ADULT LIVER, SIGNAL = 4.7; EXPRESSED IN BRAIN, SIGNAL = 5.4; EXPRESSED IN HELA, SIGNAL = 5.4; EXPRESSED IN BONE MARROW, SIGNAL =   5; EXPRESSED IN LUNG, SIGNAL = 3.6
cttcattctacccagcagccaccctgagctggggccctgagctctgatccccatggcctcccctcaccggcccaggtttttacccagggcctcaagggatgagtcggcccgctgtcaccacatctctctgagtgggaggagaagcaatgcagctccctggtgtgaagatgcaggtggccgcgtagcaggtgtgtgggaccctggcccggccaccagccaatgcccggggctctgttgctccacaggcatggcgacaatctgcaacatgggtgcagaaattggggccaccacttccgtgttcccttacaaccacaggatgaagaagtacctgagcaagaccggccgggaaggtgagctggcaggggcaggcccgtgtgggtggaacagtcacatgcccgctcctccccaagacagagctatgcctttccctgtagggcaggggttcttaacccattgtctccagacaggcgtccgaggctctgagaaagccctgaagaggtgcaatatgtttctgagtagattgtctggagctctctccagcttctcaaaggg

SEQ ID NO: 5206 - DNA, 583 bp, Homo sapiens
  MAP TO AL023553.5; EXPRESSED IN HELA, SIGNAL = 3.2; EXPRESSED IN PLACENTA, SIGNAL = 2.2; EXPRESSED IN BRAIN, SIGNAL = 3.3; EXPRESSED IN LUNG, SIGNAL = 1.9; EXPRESSED IN BONE MARROW, SIGNAL = 1.9; EXPRESSED IN HEART, SIGNAL = 6.2; EXPRESSED IN FETAL LIVER, SIGNAL = 2.8; EXPRESSED IN ADULT LIVER, SIGNAL = 1.8
agtgcaagtcccagttcaccatcactccaggttccgagcagatccgcgccaccattgagcgggacggctatgtgagtgcccatatccccctgcccatctcccccaccccatgctgagtaatgcctccaggcggcacaagcccagaggcctgttgggccggggctggggcaggtcccagtggctgccctggggttccagtacagcacttcgtcctgcagccaccacatcaccccttcccatcagactctcacccacccttgacattctgtcttcctctctccctggcaggcacagatcttgagggatctgggtggcattgtcctggccaatgcttgtggcccctgcattggccagtgggacaggtaagaggcgtatcttttgacaagacagccccttgtgcacagggtacagagccccagaagttggagggggaattattggggtggagagaagagactccagccaaggtctctagctccagggactcttgcccattagaagcctctggcagacatgcctgggaagaggggctgggtgaggaagggccctgcagaggcactggggggcaacttggctgaagcct

SEQ ID NO: 5207 - DNA, 566 bp, Homo sapiens
  MAP TO AL023553.5; EXPRESSED IN HEART, SIGNAL = 6.4; EXPRESSED IN BONE MARROW, SIGNAL = 1.7; EXPRESSED IN FETAL LIVER, SIGNAL = 3.2; EXPRESSED IN PLACENTA, SIGNAL = 1.9; EXPRESSED IN LUNG, SIGNAL = 2.5; EXPRESSED IN ADULT LIVER, SIGNAL = 1.6; EXPRESSED IN BRAIN, SIGNAL = 3.3; EXPRESSED IN HELA, SIGNAL = 2.7
ctctggcttacgtgtggttgcaggctgggcccagtgatcctgaggttcccttctgctctgcgcgtggccccaggaggaggcaaccctggcagggcctcttcattttccctcggtaggagctaggctgggctgcgccacaggaacccagcttatctgtcctcgggacaggccaggtgacaaggccagatatccctaaccctgatccctctgacctggcaggaaggacatcaagaagggggagaagaacacaatcgtcacctcctacaacaggaacttcacgggccgcaacgacgcaaaccccgagacccatgcctttgtcacgtccccagaggtgagactgcccagctgcgcacaagcctgggatggcctctgggggtccctggcgggtcagaggaggaggcagaaggagatggggactggggtcatccaagtggtagccaggagctacaggccttcccagcctcaggcgcatgcttggtgcttcctgcctggggctccctgggtcatgggattatgagatatttatacagtggtttgtgcttatgagcatggaatttggaatctca

SEQ ID NO: 5208 - DNA, 570 bp, Homo sapiens
  MAP TO AL023553.5; EXPRESSED IN ADULT LIVER, SIGNAL = 3.4; EXPRESSED IN PLACENTA, SIGNAL = 2.4; EXPRESSED IN LUNG, SIGNAL = 3.4; EXPRESSED IN BONE MARROW, SIGNAL = 3.2; EXPRESSED IN HEART, SIGNAL =  16; EXPRESSED IN FETAL LIVER, SIGNAL = 3.5; EXPRESSED IN BRAIN, SIGNAL = 3.4; EXPRESSED IN HELA, SIGNAL = 3.1
gagcgaacattgacctgtcccaactttgggcggcctctgccccataagggagactgagcagccagaggcctttgaggggatgaaggcctggcctgagcccatgtggccttagggtggaagcaccaggaccacagaacacgtgtctgaagacttgcctgcctctcacccctctgtcacccctcctgggccccggggcctgctgcctgcctctggagggcttgtcatccacccctccagggccatgccctgacctctgtcctctctacttaccacccaaggtcaaagggaagtgtaccactgaccacatctcagctgctggcccctggctcaagttccgtgggcacttggataacatctccaacaacctgctcattggtgccatcaacattgaaaacggcaaggccaactccgtgcgcaatgccgtcactcaggagtttggccccgtccctgacactgcccgctactacaaggtgggtcagagttgataggggcaatgccagtggtcactcctgaaggggcctgcaaggcaggtgcagggaggacattaggggagtggaaactgggaaggag

SEQ ID NO: 5209 - DNA, 577 bp, Homo sapiens
  MAP TO AL023553.5; EXPRESSED IN PLACENTA, SIGNAL = 1.4; EXPRESSED IN HEART, SIGNAL = 5.9; EXPRESSED IN LUNG, SIGNAL = 1.8; EXPRESSED IN FETAL LIVER, SIGNAL = 1.4; EXPRESSED IN ADULT LIVER, SIGNAL = 1.9; EXPRESSED IN BRAIN, SIGNAL = 3.6; EXPRESSED IN HELA, SIGNAL = 2.2; EXPRESSED IN BONE MARROW, SIGNAL = 1.8
tctttgccactgcaaacaaccacgtgcctctgtcccctcggggcctcgtttgggtctcattcacgcaggcttcacttgcccttaggcagcaggcgaggaagggcccctccagcccctttaccgggagcctcaggatgcccaggcgccaggtgggtgaggccaggcaggtagggccagacaggtgaggacggtgccctcctctgccttataaccttacccccgcttgcctgacagaaacatggcatcaggtgggtggtgatcggagacgagaactacggcgagggctcgagccgggagcatgcagctctggagcctcgccaccttgggggccgggccatcatcaccaagagctttgccaggatccacggtgagctggagtctgtacccaggccatcctcatcccatccctagtgatcaaggtcactctccctgcccgtggctgagttgggcctggttctaggctgtgtccactgcagcccacaggcccgtcagcctcttgccccttcttaggctcacacagtgcacatccgacgctcagcttcccggcttcccgcaggccctgcttccaggcttgtag

SEQ ID NO: 5210 - DNA, 550 bp, Homo sapiens
  MAP TO AL023553.5; EXPRESSED IN HEART, SIGNAL = 6.5; EXPRESSED IN LUNG, SIGNAL = 2.8; EXPRESSED IN BONE MARROW, SIGNAL = 2.2; EXPRESSED IN ADULT LIVER, SIGNAL = 4.2; EXPRESSED IN FETAL LIVER, SIGNAL = 3.9; EXPRESSED IN BRAIN, SIGNAL =   3; EXPRESSED IN PLACENTA, SIGNAL = 4.7; EXPRESSED IN HELA, SIGNAL = 2.9
cagcgcacacttgctaggggcacccctagtgaaagggagcagaccagggccccatagtcactgcccgggcattgtcccaggcagcaggattaggggcatctcccagagccccagatgggttcagaaaatgaagctctccaggctagtcaggcccccgatgaccgaatgccgcctgctttccagagaccaacctgaagaaacagggcctgctgcctctgaccttcgctgacccggctgactacaacaagattcaccctgtggacaagctgaccattcagggcctgaaggacttcacccctggcaaggttaggggcccgggtccccctgaggtggtggggtgaggggcagccaccttgtttcccctcctgcactggccccagggtagcttctcccaggaggcttcattccagctggaaaggcccccagttctccaggtggccccacagagaaagcaaagtggcttctcagagttgggggttggagtcaacccggggccctcacacctccccaacctccctttactcaccaggacctggcactcaggggacag

SEQ ID NO: 5211 - DNA, 570 bp, Homo sapiens
  MAP TO AL023553.5; EXPRESSED IN HELA, SIGNAL = 3.3; EXPRESSED IN HEART, SIGNAL =  16; EXPRESSED IN BONE MARROW, SIGNAL = 1.5; EXPRESSED IN LUNG, SIGNAL = 2.7; EXPRESSED IN FETAL LIVER, SIGNAL = 3.1; EXPRESSED IN ADULT LIVER, SIGNAL = 3.5; EXPRESSED IN PLACENTA, SIGNAL = 2.4; EXPRESSED IN BRAIN, SIGNAL =   3
actttttagcccccgtcttcctattttgagtttggttcagatcttaagcagctccatgcaactgtatttatttttgatgacaagactcccatctaaagtttttctcctgcctgatcatttcattggtggctgaaggattctagagaaccttttgttcttgcaaggaaaacaagaatccaaaaccagtgactgttctgtgagtgattggtgtctgtgccgtttgttgtcaagtccagggtccaggaagggtcttttcagtcaaggtcagtggaggcccaacagccacagccacagatggatccatcactgcagtgaaggaggagcagggcctagatggtggaggagcggggcaagctggtgggcactcctggccttgcctcactgtccagctcgagacactatctccttagcatcggcctcagctgctgttgtcttcacagccggccataccaccttcccgcaggctggtagggtccactgtccagccccagggctagttgctggtccaccaggagagaaggcccaggcctggctcactgatggatccctgccagggataaagaacacgca

SEQ ID NO: 5212 - DNA, 447 bp, Homo sapiens
  MAP TO AC005831.1; EXPRESSED IN PLACENTA, SIGNAL = 1.6; EXPRESSED IN LUNG, SIGNAL = 1.4; EXPRESSED IN HEART, SIGNAL = 1.4; EXPRESSED IN BRAIN, SIGNAL = 1.3; EXPRESSED IN BONE MARROW, SIGNAL = 1.8; EXPRESSED IN ADULT LIVER, SIGNAL = 1.3; EXPRESSED IN FETAL LIVER, SIGNAL = 1.5
gaaccacaaaggagacaccgtatccgtcttacattctgccattcccagattctagcatcactgatggggtgtttgtggaagtggaaaagtcacagaatctggaacgtgtccacggacccatgtccatggatctttgctggaggggctttcccttccctttccttctctcagatgaaccttcaatgattcctggcaggtgagaaagctgagctcttcctggatgggtatggtctaattcggatccttgtgccctgcaccccccaggtcacttcttcttcagccagaataacccaagtcaggaagatgcaggtgaacaggtggcccagcgccatgaagagaaggtgtatctgtccagaggggatgaggatctgggcgacatgggcgaagatgaggaagcccagttccggatgctgatggacagacttggagcccaaaaggtgttggaag

SEQ ID NO: 5213 - DNA, 458 bp, Homo sapiens
  MAP TO AC003087.1; EXPRESSED IN LUNG, SIGNAL = 1.8; EXPRESSED IN FETAL LIVER, SIGNAL = 1.6; EXPRESSED IN BRAIN, SIGNAL = 1.6; EXPRESSED IN BONE MARROW, SIGNAL = 1.6; EXPRESSED IN PLACENTA, SIGNAL = 1.7; EXPRESSED IN HEART, SIGNAL = 1.7; EXPRESSED IN ADULT LIVER, SIGNAL = 1.5
tacccaaaccaaccactaggaaaactgtaagaggcaatacactcaaaaacacaatatacttttctggatgcttcctattccctggagtgcctttccaactgcaccatacttgctccaagctccaggcttctgctataagcgagcactgctatcatctacctccagccaccatcatgattatctctgacaattacaagatctgagatactgcaaacaggctgtgcctggagggggagaggaagatggtcagtaagacatagggtaatattgatgacttgctcattggtggaaatgcctctactgaaggacccaagggtgaaggtactgaaagcacagtaatcactggtattgatattgtcatgaaccatcacttgcagcaagctggcttcataaaagaagcctacaagatgtatatgaaagattacattaaatcaatcaaaggcaaacttgaagaatga

SEQ ID NO: 5214 - DNA, 471 bp, Homo sapiens
  MAP TO AC004231.1; EXPRESSED IN PLACENTA, SIGNAL = 2.2; EXPRESSED IN LUNG, SIGNAL = 4.7; EXPRESSED IN HELA, SIGNAL = 2.2; EXPRESSED IN FETAL LIVER, SIGNAL = 2.3; EXPRESSED IN ADULT LIVER, SIGNAL = 2.3; EXPRESSED IN HEART, SIGNAL = 2.3; EXPRESSED IN BRAIN, SIGNAL = 2.5; EXPRESSED IN BONE MARROW, SIGNAL =   2
agcttcagtccagcaagagcgaggtcaccgacctgcgtcgcgcctttcagaacctggagatcgagctacagtcccagctcgccatggtaggctcgtgcgcaaacagacgtagcatcctttggacttccaaagaaaatgctgcatccaaattacattagccgttggctaccctcctcttttcggtcccctccatcgttatttctatgccatttccctcccacgtgcagaagaaatccctggaggactccttggccgaagccgagggcgattactgcgcgcagctgtcccaggtgcagcagctcatcagcaacctggaggcacagctgctccaggtgcgcgcggacgcagagcgccagaacgtggaccaccagcggctgctgaatgtcaaggcccgcctggagctggagattgagacctaccgccgcctgctggacggggaggcccaagggtgagcagacaacggaggctgta

SEQ ID NO: 5215 - DNA, 475 bp, Homo sapiens
  MAP TO AC002542.1; EXPRESSED IN PLACENTA, SIGNAL =   2; EXPRESSED IN HEART, SIGNAL = 2.1; EXPRESSED IN ADULT LIVER, SIGNAL = 1.8; EXPRESSED IN LUNG, SIGNAL = 2.3; EXPRESSED IN FETAL LIVER, SIGNAL = 1.8; EXPRESSED IN BRAIN, SIGNAL = 2.2; EXPRESSED IN BONE MARROW, SIGNAL = 2.1; EXPRESSED IN HELA, SIGNAL = 2.1
tcagctgtgtttgcttttgagaaaaaaatactatacattaggcataggcggtgctcctcttccctcccatgaaggcgtgacaccctcaaatcagccccctcctgcctcaatttagagtgctgaaggctggatggagacttgcgaccagcagatgggcctccaaaggctgggtcagatgttggctatggtttgtcaggtgtgctattttttcatttcccataggcttccaactctttcccaagctctggagtcagtgccaccataaagacctcccctgagagtgcagtttactccagccctgatatttcccttttggtcttctccacagctttccatgaagtctcagtttacccaaagaaggagcttcccttctttattctctttactgctggattatgttccttcacagccatgctggccctcctgacacatcagttcccggaacttatgggggtcttcgcaaaagctgtgagtg

SEQ ID NO: 5216 - DNA, 478 bp, Homo sapiens
  MAP TO AC005571.1; EXPRESSED IN BRAIN, SIGNAL = 2.2; EXPRESSED IN PLACENTA, SIGNAL = 1.9; EXPRESSED IN LUNG, SIGNAL = 2.3; EXPRESSED IN HEART, SIGNAL =   2; EXPRESSED IN BONE MARROW, SIGNAL = 2.5; EXPRESSED IN ADULT LIVER, SIGNAL = 2.1; EXPRESSED IN HELA, SIGNAL = 2.1; EXPRESSED IN FETAL LIVER, SIGNAL =   2
tccttcctcaatctatcaaaattagtgactatgactgtgtgtaaaagaaaattaagacactgagcaaataggtaggcaggctttgtagaaaagtagtaggcctcaggaacaaaatgacatcagtctgcagtcacccagtggcacaggctggggagagggacagggtgggcaccttatgaatcctgggcatttgaaccgagacaacttcagttctctgtaggctgtagacacgtaactccatgctgagcacaagcaccatggtcttactcacatctgggaatgttctgcccatagccccataggatgcagggggcctgtggccagcaggagggcagcaggtaaggccagtctttgctgctggcaccacaggtgaagaagttatgtccttccaatctcggcttagctgtcactttgtacaggaggatttccctaattcccatggaccgggctgggtttcccttgctggatgctcctaagg

SEQ ID NO: 5217 - DNA, 391 bp, Homo sapiens
  MAP TO AC003092.1; EXPRESSED IN BRAIN, SIGNAL = 1.6; EXPRESSED IN ADULT LIVER, SIGNAL = 2.5; EXPRESSED IN HEART, SIGNAL = 1.9; EXPRESSED IN PLACENTA, SIGNAL = 1.8; EXPRESSED IN LUNG, SIGNAL = 1.6; EXPRESSED IN FETAL LIVER, SIGNAL = 2.1; EXPRESSED IN BONE MARROW, SIGNAL = 1.8
gatggctgctttcagtctccaatggaggagttgactagtaggtaacagagactataaatatacttgtaaatatttaattaaataattaaattagaatttcattaacactacatacatgcctaaaatatttactctctggccccttacagaaaatgtttgctgaacctgagggataagcacaaattatagtagccaaagagagctttaccttagcagttggttttaaaatagaatgaattcagcctgggtgacaaagcaagaccctatgcagaagaagaagaggaagaaaaggagaggaagacgaagaagaggaagaggaagaggaggagaaggaggaagaagagaaggaggaagaagaggaggaggggtaagaagaaggaggtggaggagg

SEQ ID NO: 5218 - DNA, 465 bp, Homo sapiens
  MAP TO AC004914.1; EXPRESSED IN PLACENTA, SIGNAL = 1.6; EXPRESSED IN HEART, SIGNAL = 1.5; EXPRESSED IN BRAIN, SIGNAL = 1.7; EXPRESSED IN BONE MARROW, SIGNAL = 1.5; EXPRESSED IN ADULT LIVER, SIGNAL = 1.6; EXPRESSED IN LUNG, SIGNAL = 1.9; EXPRESSED IN FETAL LIVER, SIGNAL = 1.3
ccagccgagcttacacttccaaagaggatgagagacatgcagagccttggtgccccacatgaggtcctccccagcagatacacccagaagtccagcggagccatccagccaagtgcagcttaggccagccaactccagctgacccttagacacatgataaatcataaattgttgcttatgtcactgagttttggggtagtccattatgcagcaatgactaatacagagagcatcttaacatcttaatttattactttttcaggaccacgtagcaaaccaaaaagtaggtagaagaacttgaccaaaactgtgggcttcctaggaggggccatttccataaagaggacaagccaatccctttcaaaaatgggtatcaggagaacagacatcatgaatactatggagataggacccccaaatcactggagcccattggaatgtacgtcggcaacacaggagaacttt

SEQ ID NO: 5219 - DNA, 498 bp, Homo sapiens
  MAP TO AC005224.1; EXPRESSED IN ADULT LIVER, SIGNAL = 4.9; EXPRESSED IN HELA, SIGNAL = 5.6; EXPRESSED IN HEART, SIGNAL = 4.9; EXPRESSED IN BRAIN, SIGNAL =   6; EXPRESSED IN BONE MARROW, SIGNAL = 5.6; EXPRESSED IN PLACENTA, SIGNAL = 5.5; EXPRESSED IN LUNG, SIGNAL = 5.9; EXPRESSED IN FETAL LIVER, SIGNAL = 4.9
aggagctcattgaggcacagacacttggtgaggtggcctgcagcctggaagactttgcgggggcggtgattttgggctggaattcccttaaattcagtgaggtcgtttctgtgtttggaaattccagtggaaagtgactgaggctggtgaccctttctcctttctcagctcctggtccatgtgcagaagtaagagcactgccagcaccagcggcggagccagagccagcatgggaagaggcccctccagagagagcactggagctggagggagctccagccaaggaccagaccaacgaggagctgcctgaaatcacggcacgtactgtagccactagccctaaccctggaactgaaagcgtggctggagagagaagtgggagggagggggtgaccagcacagccccagccagcagctcccatgctgcccctagtcctgggcacggtggcaaacatgcaggcagagagcagggcatttggcctggcctcctgtacctcg

SEQ ID NO: 5220 - DNA, 483 bp, Homo sapiens
  MAP TO AC003678.1; EXPRESSED IN PLACENTA, SIGNAL = 3.4; EXPRESSED IN LUNG, SIGNAL = 4.2; EXPRESSED IN HEART, SIGNAL = 3.2; EXPRESSED IN BRAIN, SIGNAL =   4; EXPRESSED IN BONE MARROW, SIGNAL = 3.4; EXPRESSED IN ADULT LIVER, SIGNAL = 3.6; EXPRESSED IN HELA, SIGNAL = 3.7; EXPRESSED IN FETAL LIVER, SIGNAL = 3.6
tcaactttgatgagagataatgtacgtacaataaaatacacccattttaagtggacagttggatgagttttgacaaatacccatgcaacgacttaaattaagatatagaacctctcctcaccccatcaagtgcctcccgccctgtgcgaccacactccctgccccaaccccacacaaccactgtcactgacactgtccctatagcttaccgttgtcatttccagaatacgataaaaatgaaattgcacgctgcacactcgtttccgccttcttccctcacagtcatggtctgggagtccacactgtgttagcagtggtttgctccttttgtattgcagagaaatgcggatacacatgtagatgtacatatatcgccattcatctctttctccattagtggacatcagggtggtttccagtttggggctgttaacgagcagtgctgacgtgagcttttgtgtacaagctgcgtagcaacatatg

SEQ ID NO: 5221 - DNA, 479 bp, Homo sapiens
  MAP TO AC005592.1; EXPRESSED IN PLACENTA, SIGNAL =   2; EXPRESSED IN LUNG, SIGNAL = 2.8; EXPRESSED IN HELA, SIGNAL = 2.5; EXPRESSED IN HEART, SIGNAL = 3.5; EXPRESSED IN BONE MARROW, SIGNAL = 2.1; EXPRESSED IN FETAL LIVER, SIGNAL = 2.1; EXPRESSED IN BRAIN, SIGNAL = 2.4; EXPRESSED IN ADULT LIVER, SIGNAL = 2.4
agatctgtgaatgggaagccaaggatggccatgttgtgaatgaggtaaggggaataagctacagagagaaaaactagaagcaattgccatggataaggcttgagaatttgctggcctgacctgagacactgatggaaggaatatttaagaaatatttaggtagaatcatttggagatgcctgtgggagtgagggaaagggaatatgactagggcatattaagtggcttgggctattttgtaaccactgcactgtcattaattaagcaaaggcaatggaagaaggagaatgcaagacgtccaccgtgggctgttatctgcagaatgtcctggaagatttcttggaggtgatgggagctttgaatgcaaagaccagggtggaggcacagggcaggatttgggagtcctgggtagaatgtgaggcagaccagcactcccagagagcatatatgcatttaagacagaaccacctaggacaggc

SEQ ID NO: 5222 - DNA, 464 bp, Homo sapiens
  MAP TO AC004925.1; EXPRESSED IN LUNG, SIGNAL = 2.4; EXPRESSED IN BRAIN, SIGNAL = 2.4; EXPRESSED IN PLACENTA, SIGNAL = 2.3; EXPRESSED IN HEART, SIGNAL = 2.1; EXPRESSED IN FETAL LIVER, SIGNAL = 2.1; EXPRESSED IN BONE MARROW, SIGNAL = 2.4; EXPRESSED IN ADULT LIVER, SIGNAL = 2.4; EXPRESSED IN HELA, SIGNAL = 2.4
atgtccttcctcccaccttggagcgggtggggggtggggagggatgcaggctgtagttttcccagcagattcttcttacattcctccaacttccccccaagagcactgatccaaaatatacagcctaaaattttatggcaattaataaaattatatcactgcctgaaacaaaagctttacatgtgggtttgttccacagatttttactggaccccattatgtagaaagaattgttgtacctccattttagtatcagacatacccattttctttcctaacagttatttaggagacatacttcagactctgaaagcacagatgaacacaggagagttaacaagttgggtgaagatagcctgcatcgttcagtacactgtcaacctttctaccaatattcagctacaagccaggtgtaagtaaaaaactgatacattagaagtcattggtattaactgatgttgaca

SEQ ID NO: 5223 - DNA, 486 bp, Homo sapiens
  MAP TO AC004928.2; EXPRESSED IN PLACENTA, SIGNAL = 2.9; EXPRESSED IN LUNG, SIGNAL =   3; EXPRESSED IN FETAL LIVER, SIGNAL = 2.5; EXPRESSED IN BRAIN, SIGNAL = 3.3; EXPRESSED IN BONE MARROW, SIGNAL = 2.7; EXPRESSED IN ADULT LIVER, SIGNAL =   3; EXPRESSED IN HELA, SIGNAL = 3.1; EXPRESSED IN HEART, SIGNAL = 2.8
cacccccgttcctgtcacccggtgggtggcctccctctgcccacctgcccacctcctgctgcgcttccctgtggcctgacacttgtcttccatctccacatgtctcacccacaactgttctgtttctgggcctctcatccacccactcttgctctgttcttctgtcacagaacccagaactcctgcagattcctcctcgccttggtggtcatcctgtcggccactccccctttcccgcaggcagcccactccctcactctctccccacctgcactgaaacctgccttcgtccacttacctgctgtcacctgctctggctgccaagccgcacaccctttgagctttcatcagcagattctggggtgtgtgtgtcttcctgggtgtgaggttgtgaccgcagatgacattatacgacatgtctgtcagtgaagcagctttctttactcaaatagtattatttcagcttgagcatggtatcaggtggct

SEQ ID NO: 5224 - DNA, 450 bp, Homo sapiens
  MAP TO AC004074.1; EXPRESSED IN PLACENTA, SIGNAL = 1.3; EXPRESSED IN HELA, SIGNAL =   2; EXPRESSED IN FETAL LIVER, SIGNAL =   1; EXPRESSED IN BRAIN, SIGNAL = 1.2; EXPRESSED IN LUNG, SIGNAL = 1.3; EXPRESSED IN HEART, SIGNAL = 1.4; EXPRESSED IN BONE MARROW, SIGNAL = 0.99; EXPRESSED IN ADULT LIVER, SIGNAL = 1.1
ccgactctgcagaattaccgtcatgtgagcctgccccctcccaatctatctttaaaggggcttcaatgtgaaatagagcaatgtaaaaaaagatattcaaaactttgtatttccctctacacccaaagagacagatccaactttctttccttttagagaggtaccgcaaggcagaggggctgttggctttgtaaacgctcccttaactagttcagaggtccggaatttaaaaaaggagcttaagccattactggatgacccttatggagtagcagatcaaattgatcaatttttaaggcctgacataggcacttgggctgagttgatgtccatcaggggcatcctcttttcaggggaagaacgaagtatgattcggagggctgctgtggcagtctgggaacgtgagcaccctccgggtcaaaatgttcctcctgtggaccatgaatttcc

SEQ ID NO: 5225 - DNA, 488 bp, Homo sapiens
  MAP TO AC005028.1; EXPRESSED IN PLACENTA, SIGNAL = 1.6; EXPRESSED IN LUNG, SIGNAL = 1.7; EXPRESSED IN HEART, SIGNAL = 1.7; EXPRESSED IN FETAL LIVER, SIGNAL = 1.4; EXPRESSED IN BRAIN, SIGNAL = 1.8; EXPRESSED IN BONE MARROW, SIGNAL = 1.6; EXPRESSED IN ADULT LIVER, SIGNAL = 1.7; EXPRESSED IN HELA, SIGNAL = 1.7
gtcatacgtgggacatggtgcaaccgtcctggggctctgctcatgccctgactgatggctggagagcatatgcaaggtttaccttatctgaggtcatcatggagcagatacaggaagaggactaagcactcttctcctactttgcttccctacacgcaaaaacctctgctcctggaagggtccctaagaaaagatggggaaagaaaaagcgctcgccccctccctgtgaacagcccaacccactttgaatcctgcagtgcctccagatgagtgttcttcccctgcagctggaaagcctcctgtgctcagaaattccagggtcccgacatgatccatgctcagaagttgggctgcagctcctcggagctggcaggcacaagcctccagcccttcagggcttgcaagagccaaacgcgctgcggaggtgtgattcactgagttcccagaggaaagggaggcagccagctggcaggggattactgaacagc

SEQ ID NO: 5226 - DNA, 353 bp, Homo sapiens
  MAP TO AC005609.1; EXPRESSED IN PLACENTA, SIGNAL = 1.2; EXPRESSED IN LUNG, SIGNAL = 1.5; EXPRESSED IN FETAL LIVER, SIGNAL = 2.2; EXPRESSED IN BRAIN, SIGNAL = 1.8; EXPRESSED IN ADULT LIVER, SIGNAL =   1; EXPRESSED IN HELA, SIGNAL = 1.8; EXPRESSED IN HEART, SIGNAL =   3; EXPRESSED IN BONE MARROW, SIGNAL = 1.2
caagactgttttgtgcgtccaaagtgaaataatcgttgggatccagtcggtaggtcaatgccgagtttactccaatatctgcatcggatgcgccatctagtggaaatcgagtttccggaggtctagattctgcaatgattattcgtttcttgctttcagggaatatgggcgggttgtcgttaatgtccctcaccttcacctccacatggaaaacctgcagaggcctgtccacgatcacctccaggtggatgctgcactccgcgctccgcccacacagctcctcgcggtcgatccgagaattcacaaacaaaatgccattctgcagatttacctccagaaggtccccgtgtctt

SEQ ID NO: 5227 - DNA, 466 bp, Homo sapiens
  MAP TO AC003070.1; EXPRESSED IN PLACENTA, SIGNAL =   2; EXPRESSED IN LUNG, SIGNAL = 2.3; EXPRESSED IN HELA, SIGNAL = 1.9; EXPRESSED IN HEART, SIGNAL = 1.6; EXPRESSED IN BONE MARROW, SIGNAL = 2.1; EXPRESSED IN FETAL LIVER, SIGNAL = 1.9; EXPRESSED IN BRAIN, SIGNAL =   2; EXPRESSED IN ADULT LIVER, SIGNAL = 3.6
gctgctgtagaagaggaggggccatggcgatgtgggtgagggggagaggagtgccaatttcagcaaagaatggaggtgagggctggtaggggactctggagggtactgggcaaagatgaccttacaagaacaggtcctgggcacaccttccagagatctagcctcctctcccaactttggagccttcttagggtgccctggcttgacacaaattcttctcatttcctgatttggagattttcccctccagactcacctgcttacctctagtctcctctccacactatcctcaagccttctggtgaattgaatcttcctaagagatcgcataggtcctgtcattccactcccaatgtcccagcatctcctgcccttcgatatctccctcctttcgcttcttcctttcaacctacaaatgaggtcaagccgaggacaccctaaaaacaacaaacaaacaaaaccttgc

SEQ ID NO: 5228 - DNA, 475 bp, Homo sapiens
  MAP TO AC003692.1; EXPRESSED IN PLACENTA, SIGNAL = 2.3; EXPRESSED IN BRAIN, SIGNAL = 3.5; EXPRESSED IN ADULT LIVER, SIGNAL = 2.7; EXPRESSED IN LUNG, SIGNAL = 2.9; EXPRESSED IN HELA, SIGNAL = 2.5; EXPRESSED IN HEART, SIGNAL = 2.5; EXPRESSED IN FETAL LIVER, SIGNAL = 2.6; EXPRESSED IN BONE MARROW, SIGNAL = 3.2
tggactctgtcagtgtgctatcttattaaatggttcttgaatttaaatggaaatatttatttatcatacaacactgaagggtagggagtgtggctataaatgctctcaatgacatctattagatgttattagactcttcataacatcagccaggtttcctttccattatggattctctaatgatgaaaaagagtgaggtgcttttccacatgatttaccactggttcccaaacttgtctgcatattagaatcacctggagatgggacccaggtaccagtattttttgtatctcttaggtgattccaatatgcagacaagcctggaaaccactgtgatttccacttcaatgctatcactggaagacttgaagcaggaggtggataaccacttactagccatgctggagaaggggttccttcattggaagatagtatctaaggcccttactcaggctctatgactctctaatattgg

SEQ ID NO: 5229 - DNA, 471 bp, Homo sapiens
  MAP TO AC005212.1; EXPRESSED IN BONE MARROW, SIGNAL = 1.7; EXPRESSED IN HELA, SIGNAL = 1.7; EXPRESSED IN HEART, SIGNAL = 1.9; EXPRESSED IN FETAL LIVER, SIGNAL = 1.7; EXPRESSED IN ADULT LIVER, SIGNAL = 1.8; EXPRESSED IN PLACENTA, SIGNAL = 2.3; EXPRESSED IN LUNG, SIGNAL = 1.7; EXPRESSED IN BRAIN, SIGNAL = 2.1
gctcagcaccctagatccccagcagctcttcccagcaggagcgggaggtgacacccttgggacagcacagggagctccaagacacattcattctgcttcagctgcccacctccggttctctagcctccttcccaccagcttgcctggtgtgagccctagagaccccggggtgggcatgaagagacctgggggatcagccaaagatctcacacgtggccctgtattccaggtgccggctatcacatgacgctggtgaaggagccgcactgcaacccggaagacatctcccagctggtccaccaccacgtgcccaacgccacgctggagagcagcgctggggccgagctgtctttcatccttcccagagagagcacgcacaggtacgcctcccagggagggcacgcacaggtatacatccaagatgggatccccatgggccatgagggctttgtgctcagaggcacctgctct

SEQ ID NO: 5230 - DNA, 479 bp, Homo sapiens
  MAP TO AC003083.1; EXPRESSED IN PLACENTA, SIGNAL = 2.7; EXPRESSED IN HEART, SIGNAL =   3; EXPRESSED IN BONE MARROW, SIGNAL = 2.8; EXPRESSED IN ADULT LIVER, SIGNAL = 2.8; EXPRESSED IN HELA, SIGNAL =   3; EXPRESSED IN FETAL LIVER, SIGNAL = 2.8; EXPRESSED IN LUNG, SIGNAL =   3; EXPRESSED IN BRAIN, SIGNAL = 2.9
acacacacacacacacacacacacacattttgtttttaagctttcttgtaattttttctacccattatcccatctatttttatttcttcataacctgtaatttcttctagaacaaacgtatactcctatttgcttctactaggatccctctgtcatcatttattccctttagaaagtgtagcaaaccaatgggaaattatctattacaaaattatgtaagtcttgtgataagactattataatgtaaataaaaattcttctacccatgattataatagtttgcataaaaagtaaaataggtataatgttaaaagaagctggttacaaacctctacaaatgaatctgatggatgttggtgacatccttgtctttgacctatcaaatacctattctcctcttatattagaagctaatgaaaacctgggaggtaatcaaaattttattatattagggttctcccacttccctgttttaggca

SEQ ID NO: 5231 - DNA, 414 bp, Homo sapiens
  MAP TO AC003962.1; EXPRESSED IN LUNG, SIGNAL = 8.7; EXPRESSED IN BRAIN, SIGNAL =  10; EXPRESSED IN ADULT LIVER, SIGNAL = 8.5; EXPRESSED IN PLACENTA, SIGNAL = 8.8; EXPRESSED IN HELA, SIGNAL = 8.4; EXPRESSED IN HEART, SIGNAL = 7.6; EXPRESSED IN BONE MARROW, SIGNAL = 9.1; EXPRESSED IN FETAL LIVER, SIGNAL = 8.6
ccaggcaagaactactgcgcccggccttgctcaagtatttttataattaccatagattctcatatatgattaaaaattaagataactttcctatggtttcattcttattttacatagttcagtttaagattttctaagccaaactctctttccaattttgcatcttcagctataaatattttgagtagcataatgtagtaactaaaagcagtaacaaattattttatgcttttaaagaaaatgattccctccaatttcccattggaagtttatacgcaacaagacatacacaatcataacttacaggaatatcatcagtgcggttgtccttccagacttctaaaagtgcaaccaccatgtctctcagttcaaccctggagagaactccatcacggtcaacatcaaataccttga

SEQ ID NO: 5232 - DNA, 453 bp, Homo sapiens
  MAP TO AC005755.1; EXPRESSED IN HEART, SIGNAL = 1.8; EXPRESSED IN FETAL LIVER, SIGNAL = 1.6; EXPRESSED IN BONE MARROW, SIGNAL = 1.7; EXPRESSED IN PLACENTA, SIGNAL = 1.7; EXPRESSED IN BRAIN, SIGNAL = 1.6; EXPRESSED IN ADULT LIVER, SIGNAL = 1.6; EXPRESSED IN LUNG, SIGNAL = 1.6; EXPRESSED IN HELA, SIGNAL = 1.7
ggagtgtaagctgcctggagctcaaaggcaggagcttggtctgttttgttcactgtccttgcctctctttcaagacagattttccacctctacatgtgtctgtgctgaagcagaagggttcattttttccctcctaattttagaaaaattcataaaaagttctttgagtgttaaatttgtctgctgaaattatttttagaaaaaatgtaataaaatgtaatagaagctaatggtgtttgctgaacttaatctttgacttattgttctagccactatcgaaaacgatcggcatcccggggtcgctctggaagtcggtctagaagtcgctcaccctcagacaaaagaagtaaacgtggagatgacagacggtctagaagtagagatagagataggaggagagagaggtctcgtagcagggataaaagaagatctcggtcaagggacaggaagcgt

SEQ ID NO: 5233 - DNA, 423 bp, Homo sapiens
  MAP TO AC004674.1; EXPRESSED IN LUNG, SIGNAL = 5.1; EXPRESSED IN HELA, SIGNAL = 5.3; EXPRESSED IN HEART, SIGNAL = 4.7; EXPRESSED IN FETAL LIVER, SIGNAL = 4.6; EXPRESSED IN BONE MARROW, SIGNAL = 4.6; EXPRESSED IN PLACENTA, SIGNAL = 5.1; EXPRESSED IN BRAIN, SIGNAL = 5.1; EXPRESSED IN ADULT LIVER, SIGNAL = 4.8
tacctgaatgctagtgggggcccccaagctcagggcggtggtcccagaagacagcatttctctctacaggacacctgcaaaatgtccatggtcactgctgtgggaaggaacaccggataattaccaagtattcaaagttccactgtgaacacggggttaggcattgtctctgaaatatgcagagggaaaactcacggtttcgaatatgtcagggacacctgaagcgaaatcgggaacaacagggaggcctacaccatcatcaccatcatcacttaccaagacaagactcaatcatttctcacctgaataagtatgaaggaaataatggtggtaaggcctgtagggacacatcatcactcaactgtgtctctgtgacagtcccacggtgcaggctgtggtttaggcccacatcagcacttacct

SEQ ID NO: 5234 - DNA, 465 bp, Homo sapiens
  MAP TO AC005876.2; EXPRESSED IN PLACENTA, SIGNAL = 3.5; EXPRESSED IN LUNG, SIGNAL = 3.6; EXPRESSED IN ADULT LIVER, SIGNAL = 3.9; EXPRESSED IN HELA, SIGNAL = 3.9; EXPRESSED IN HEART, SIGNAL = 3.8; EXPRESSED IN FETAL LIVER, SIGNAL = 3.7; EXPRESSED IN BRAIN, SIGNAL = 3.8; EXPRESSED IN BONE MARROW, SIGNAL =   4
ccaggttttatggcttcaggttatctaacctttcttgttcagctttcttacctatgaaatagggtgagaaatgtctaaatcattattctagtcatgtgaatgtttactgagcatcttctgtgtgctccagtgtgtaagggttaaatgagattacttacgttaggtgcctggcacatgagaggtgttcctttgatgtttgttccaattttctctattcaggtaatttttcaggctgattatctttttatttagaatctacatcaggagacaaacccgtatcacattcttgcacaactccttccacgtcttctgcctctggactgaaccccacatctgcacctccaacatctgcttcagcggtccctgtttctcctgttccacagtcgccaatacctcccttacttcaggacccaaatcttcttagacaattgcttcctgctttgcaagccacgctgcagcttaata

SEQ ID NO: 5235 - DNA, 475 bp, Homo sapiens
  MAP TO AC002069.1; EXPRESSED IN PLACENTA, SIGNAL =   4; EXPRESSED IN BONE MARROW, SIGNAL = 3.7; EXPRESSED IN ADULT LIVER, SIGNAL = 3.5; EXPRESSED IN LUNG, SIGNAL = 4.3; EXPRESSED IN HELA, SIGNAL = 3.5; EXPRESSED IN HEART, SIGNAL = 3.2; EXPRESSED IN FETAL LIVER, SIGNAL = 3.5; EXPRESSED IN BRAIN, SIGNAL = 3.8
atttgacgcggtcttagtgctgcactgaggtggatgtttgagttcagccacccctcagctgctgaggcctctgctgcctcccatggaaacctgggccccctgtgcagcttcctccctttgtctcatatccatgcgcaccaatgagaatgctaatacaccagccacccgacttaacagattcaagaacaaagaaaaagacagcacagaaatgaggcatcacagaatagaagtcaatgtggagctgaggaaagctaagaaggagaaatataagctcatttcctgatgatgctacttctccgctgcagaagaactgcaacaaccaggatactgtaaattggtctgttgatgacattgtcaaaggtataaataacaacaatgtggaaagtcagctgtaagctactcaagctgccaggaaactaccttctggagaaaaccagcccccccccccccccccccccaaagacaacataatcca

SEQ ID NO: 5236 - DNA, 456 bp, Homo sapiens
  MAP TO AC006238.1; EXPRESSED IN PLACENTA, SIGNAL = 1.7; EXPRESSED IN HELA, SIGNAL = 1.9; EXPRESSED IN HEART, SIGNAL = 1.7; EXPRESSED IN FETAL LIVER, SIGNAL = 2.4; EXPRESSED IN BONE MARROW, SIGNAL = 1.5; EXPRESSED IN LUNG, SIGNAL =   2; EXPRESSED IN BRAIN, SIGNAL =   2; EXPRESSED IN ADULT LIVER, SIGNAL = 3.1
aaacaagagcagaagctggcaatactgcaggccagatcacaaataattagaatgtgtgctaaagtaaggaacttgcagcaatgagaaaccacgggaagactgttaaaagaggagtagggtggggagcaaaggcactggggcaaagaagaaagaactgaccaagcaaaaatttaaaagctaattgctaaaatggcctaataacactcacatgtcctataccttcatttcaatcaatttattttcaaccaacagaacttactctcaggtgccgattttcttctgatagcttcatcatttctccctgaagtcttttacactcttccattagtttccttgtttcggtatcattaagtgaaacactgtgtggttttggcataggtccatcttgcttagatgcattcagtggaacagctttgctaggttccatatcattctgcattacaaagatattgggaa

SEQ ID NO: 5237 - DNA, 440 bp, Homo sapiens
  MAP TO AC002073.1; EXPRESSED IN PLACENTA, SIGNAL = 2.2; EXPRESSED IN LUNG, SIGNAL = 2.5; EXPRESSED IN HELA, SIGNAL = 2.3; EXPRESSED IN HEART, SIGNAL = 1.9; EXPRESSED IN BONE MARROW, SIGNAL = 2.2; EXPRESSED IN FETAL LIVER, SIGNAL = 2.2; EXPRESSED IN BRAIN, SIGNAL = 2.6; EXPRESSED IN ADULT LIVER, SIGNAL = 2.2
gagagaagcccttccctacggccttcctctctcatttgccttgtccctgagatggttcagccctctcaggcctgatcttacctctggggcagaatttgactttgggttgtgtgtggggggaaattcttaggtgacccaccttcatctaccctaacactcaggccaggttcagctgtggaattcactcagggcagtccctgatgagagctgtttcccacctcatctccagagaccacctcccaggccctgccagccttcacgacagaaatccaggaagcgtctgaagggccaggtgcagatgaggtgcaggtgttcgctcctgccaacgccctgcccgctcggagtgaggcggcagctgtgcagccagtgattgggatcagccagcgggtgcggatgaactccaaggagaaaaaggacctgggaactctgggtatgacggt

SEQ ID NO: 5238 - DNA, 477 bp, Homo sapiens
  MAP TO AC004820.2; EXPRESSED IN PLACENTA, SIGNAL = 3.5; EXPRESSED IN LUNG, SIGNAL = 3.2; EXPRESSED IN HELA, SIGNAL = 3.4; EXPRESSED IN HEART, SIGNAL = 3.1; EXPRESSED IN BONE MARROW, SIGNAL = 2.9; EXPRESSED IN FETAL LIVER, SIGNAL = 3.3; EXPRESSED IN BRAIN, SIGNAL =   3; EXPRESSED IN ADULT LIVER, SIGNAL = 3.3
aaaaagaaaacactttgcatcctaaagtaaacaaaaaataataggttcacccttccttttctaaacactgctatctccacatcttccttttttactattgttgaaacagtttccttacccttccaggacccagctggtgttacttggaagacacatatctaaaagatacaacagtaaatgctagaaaaagttacagtataattttatgctacttactcagtattaatttgaaggccaaaattagagaggtcttcatttgcagaagtatatttgccataacattcactcatcaaagactgaaaagatgaatagactttgcatgtgttgttgcggacttttagttgacgaactctgggaactcctagaagtatattttcatagtagatgcgactgctgttctttaaattatacagctgctggttattgtaccatgaatcccagtacagaccttccaaaaggggtccttccataaactcc

SEQ ID NO: 5239 - DNA, 455 bp, Homo sapiens
  MAP TO AC006159.2; EXPRESSED IN PLACENTA, SIGNAL = 2.6; EXPRESSED IN LUNG, SIGNAL = 2.7; EXPRESSED IN HEART, SIGNAL = 2.1; EXPRESSED IN FETAL LIVER, SIGNAL = 2.8; EXPRESSED IN BRAIN, SIGNAL = 2.5; EXPRESSED IN BONE MARROW, SIGNAL = 2.7; EXPRESSED IN ADULT LIVER, SIGNAL = 2.5; EXPRESSED IN HELA, SIGNAL = 2.5
tgctcagtgacaagcagtagcttgagagaggtgggaatagagagcaatataatagccaatccctttgtactttttatggaaagtagtgaaactgaagagagacaaaagccatcttgaaagagtgaaaatgacaacaggacatccgtggctcattaggctagcacagtaggcttccccatttggagaaatgggatttgaagtcccaagaacaaatgaaaggtaattgttttgaatgctcatgctattatttatttataagaatctacacacacataccacatgcacacacacacataccttcacacctacatgcacaccagagagcttagtaaatgagtatgctgtgcccaagaatggaaagggtagaaacagcaggagcaggttcgttggcagagctatacagcaaaagacaaatatacccagcatacagtatgtgtgcttggctcaagtctgtg

SEQ ID NO: 5240 - DNA, 457 bp, Homo sapiens
  MAP TO AC004863.1; EXPRESSED IN PLACENTA, SIGNAL =  10; EXPRESSED IN HELA, SIGNAL = 9.3; EXPRESSED IN HEART, SIGNAL =   9; EXPRESSED IN BONE MARROW, SIGNAL =  10; EXPRESSED IN FETAL LIVER, SIGNAL =  11; EXPRESSED IN LUNG, SIGNAL =  13; EXPRESSED IN BRAIN, SIGNAL =  12; EXPRESSED IN ADULT LIVER, SIGNAL =  11
tgcacaacccaagagtgaaccctcaggtaagccgtcgactcggtggtggtggtgtgggaacaggcccgtgattgcaccgcacgtgcctccggccgggatgtgggacagggtgctagaaatctctgccttccactcaaatttctgtgaacctaacaccgctctcaaaaacaatactttttaatttttaactgaacatattatttaaatttacatatggccacatcttaaaatgtagcagcctcatgcaaaaattaatgaagaaagaccgtaagtggcacccgtggccgaagcccccccacaaccagcagctggtccagagcttccccacttgcctgttgggggagacctgctgtttggcgacaggacccagatcgctctggaggaggtcccagatgtagatgttggatgtgtcgtcctgcaccaggaacacggcaggcctggttggggaccactgcag

SEQ ID NO: 5241 - DNA, 486 bp, Homo sapiens
  MAP TO AC005585.1; EXPRESSED IN LUNG, SIGNAL = 0.43; EXPRESSED IN HEART, SIGNAL = 1.5
ctctgcagtatgtgcttggggtaggggaactgagaggctggtaaggccacccagaaccgggtcggaaaggccttgtcacctggggctgggaaacagacttctccccagggtctggggtgaacttccggcctagcagctcctgggcagatgagggtttcagggagtttcctcctgcagcagccacgtggctctggctggcagggctcttctctgctcaccccaggatctgtgaggatggcgcacctgctgggcagccaggcctgcatggagagcctgcgcacagacctcaccgacctgcagggtgccatcgtagacgtcttctcccgcgccgggcctgtgcgcttcccctcctggaagttccctgaccgcatggcctgtgacctcgacatggtggccctgctggagcactatgaccatgttccgggtgaccccgagttcacgcagctgtcccatgccgtgctgctggagctggtcatcgacaggtga

SEQ ID NO: 5242 - DNA, 474 bp, Homo sapiens
  MAP TO AC004472.1; EXPRESSED IN PLACENTA, SIGNAL = 2.8; EXPRESSED IN LUNG, SIGNAL = 2.8; EXPRESSED IN HELA, SIGNAL = 2.8; EXPRESSED IN HEART, SIGNAL = 4.1; EXPRESSED IN FETAL LIVER, SIGNAL =   3; EXPRESSED IN BRAIN, SIGNAL = 2.9; EXPRESSED IN BONE MARROW, SIGNAL = 2.4; EXPRESSED IN ADULT LIVER, SIGNAL = 2.9
cagcaaatgtgttgacaccctgagatcacccaggtcaattacaatgtactgagacagtgactcaccctggaccaagttgccctacctggaccagctcctgtagctcacgtttgacatcctctaggcccccgatgtcttcccaggttacctgtggcacctctaccacggtttcccgcagtgctgatgggttactctggctcaaggcccactagaaaaggagggaaaactggggatgagacttaccaagggaggggtcaaagcacgtatgtgtgtacctgaggcacgggtgtggtccttacccggaagtcatccatagtaactgctagagagttcatgacctcggcatcaatggtctcatcctctaggtcaatgagatccatcttcttgcggatggcttgcagagcagcctctgagcacagggctgctaagtcagcacccacatgcccgtgagtctcattggctacctgcagagaa

SEQ ID NO: 5243 - DNA, 462 bp, Homo sapiens
  MAP TO AC004954.1; EXPRESSED IN PLACENTA, SIGNAL = 6.3; EXPRESSED IN LUNG, SIGNAL =  18; EXPRESSED IN FETAL LIVER, SIGNAL = 6.5; EXPRESSED IN BRAIN, SIGNAL = 6.2; EXPRESSED IN ADULT LIVER, SIGNAL = 6.2; EXPRESSED IN HELA, SIGNAL =   6; EXPRESSED IN HEART, SIGNAL =   6; EXPRESSED IN BONE MARROW, SIGNAL = 5.5
ccatgcacagttcctgacacttagtaggcattcaacaagtgctcatcaagtgagtatctgaataaaacaaaatgatttagaactgtgtttttcaaaggaaaagatgatggggtgggataagcaggaatacccatgaaactgaggaatcctggacaactatttatagcccctttagcataacatatgttagagaaaaggctggggctttctgtctattcaccttctttctcatcagtgctgcatttagtgaaacagctgggacctccaggcaccctcctgacacatcagttgaattctttcatctacattctctcctccacctttttctctacttccttcctcttgtttttcttccttctctttctctttctcttcttcctctcctcctcctccttctatctgtcttgtgttatccttgtcatttctgggttatcactataccccctcctccctttctgtttt

SEQ ID NO: 5244 - DNA, 473 bp, Homo sapiens
  MAP TO AC004587.1; EXPRESSED IN FETAL LIVER, SIGNAL = 5.3; EXPRESSED IN BRAIN, SIGNAL = 6.2; EXPRESSED IN BONE MARROW, SIGNAL = 5.1; EXPRESSED IN ADULT LIVER, SIGNAL = 5.6; EXPRESSED IN PLACENTA, SIGNAL = 5.9; EXPRESSED IN LUNG, SIGNAL = 6.2; EXPRESSED IN HEART, SIGNAL = 4.7; EXPRESSED IN HELA, SIGNAL = 5.3
gaggttctgggagcagtcaggatctggggagccagctggctgtgttgctgcagcagaggaaagtggggtggagaagaaagtggcattcatgctcaggaattttcctaagttccccgcctctgagatctgactgggccaggcagggaaaggatgtgtgtggaactgattgtaaaagagtgctattatgttcagtttaagcttctccaaggagaatggaaataaagcttaaaatctctaaggaaaagttctgaccttccctttctttttttgcatcctctctcctttggtgcaggtggatggaagcatgcctaggggaagatctgcctcccaccacagaactggaggaggggcttaggaatggggtctaccttgccaaactggggaacttcttctctcccaaagtagtgtccctgaaaaaaatctatgatcgagaacagaccagatacaaggtgagtccttccttgctttgtgct

SEQ ID NO: 5245 - DNA, 453 bp, Homo sapiens
  MAP TO AC006352.3; EXPRESSED IN PLACENTA, SIGNAL = 8.6; EXPRESSED IN HELA, SIGNAL = 1.9; EXPRESSED IN HEART, SIGNAL = 1.9; EXPRESSED IN ADULT LIVER, SIGNAL = 5.3; EXPRESSED IN BONE MARROW, SIGNAL =  32; EXPRESSED IN BRAIN, SIGNAL = 1.7; EXPRESSED IN FETAL LIVER, SIGNAL = 2.1; EXPRESSED IN LUNG, SIGNAL = 2.7
ggaatcaccatggagtttgtgctgagctgggttttccttgttgctatattaaaaggtgattcatggagaactagagatattgagtgtgaatgggcatgaatgagagaaacagtgggtatgtgatgtgtggcaatttctgacctttgtgtctctctgtttgcaggtgtccagtgtgaggttcagctggtgcagtctgggggaggcttggtacagcctggggggtccctgagactctcctgtgcaggctctggattcaccttcagtagctatgctatgcactgggttcgccaggctccaggaaaaggtctggagtgggtatcagctattggtactggtggtggcacatactatgcagactccgtgaagggccgattcaccatctccagagacaatgccaagaactccttgtatcttcaaatgaacagcctgagagccgaggacatggctgtgtat

SEQ ID NO: 5246 - DNA, 491 bp, Homo sapiens
  MAP TO AC004874.1; EXPRESSED IN PLACENTA, SIGNAL = 2.5; EXPRESSED IN LUNG, SIGNAL = 2.4; EXPRESSED IN HEART, SIGNAL = 2.6; EXPRESSED IN FETAL LIVER, SIGNAL = 2.4; EXPRESSED IN BRAIN, SIGNAL = 2.5; EXPRESSED IN BONE MARROW, SIGNAL = 2.2; EXPRESSED IN ADULT LIVER, SIGNAL = 2.4; EXPRESSED IN HELA, SIGNAL = 2.4
tgggagatatcaaatagatggttgaacaatttatgaatctggagcttgagagagagataggggttgggagatagacctttgaaggcatcaacatagacgtgaccatcaaagctgagatcactaaggagagagagctggagatgtggcagcagcccaggagtgagtgctgtgccactccaaaatttagaacgtgggtagaggagagaaattcagcaaaggatgtggagaaggaacaactaatgaagcaggtagaaatccaggaaaaagaagtgacgtggaagccagaaaaggagtgttccaggaggaagcagtggttactggtgatgagcgatagtgagatgccagaatcgttcagcagatttggcaacatgaagttcattgatgacctcaacaaggatattcaaccctgattggggttgattaaggagtgaatgggagggaagaaatgagagagcaaaatgactactctgatgaattttattgtgaaaggg

SEQ ID NO: 5247 - DNA, 412 bp, Homo sapiens
  MAP TO AC006084.1; EXPRESSED IN HELA, SIGNAL = 3.2; EXPRESSED IN FETAL LIVER, SIGNAL = 2.6; EXPRESSED IN ADULT LIVER, SIGNAL = 3.2; EXPRESSED IN PLACENTA, SIGNAL = 3.2; EXPRESSED IN HEART, SIGNAL = 2.9; EXPRESSED IN BRAIN, SIGNAL = 2.9; EXPRESSED IN BONE MARROW, SIGNAL = 3.2; EXPRESSED IN LUNG, SIGNAL = 3.6
aacaaaaacgtatgctgggtgactttttaaaaaaatcagttctaacatccattttcaaagctgttgatggatcagacaagaacttctagttcatatgagatgctgccccaaaatctcagtgtgtttcactaaaaacacccacttgttcatcttacatgaaagggagaacagaagatcaagatgaataaggttatccagaaaagggctgtagtcttatcattgcttagggtaatttcggttacaagtaacattatcaggaaaataatgcgtgtgggtaaaattaccttcccatttatcaccatcagaaacattcttcagatctaaatgtggaatactgacacacgctgcttccccttgaacaccaacactctgacctcctggtacttctgattcagtgttggcattcaaatca

SEQ ID NO: 5248 - DNA, 448 bp, Homo sapiens
  MAP TO AC004486.1; EXPRESSED IN BRAIN, SIGNAL = 5.5; EXPRESSED IN ADULT LIVER, SIGNAL = 4.8; EXPRESSED IN LUNG, SIGNAL = 6.1; EXPRESSED IN FETAL LIVER, SIGNAL = 4.5; EXPRESSED IN BONE MARROW, SIGNAL = 4.7; EXPRESSED IN PLACENTA, SIGNAL = 5.2; EXPRESSED IN HELA, SIGNAL = 4.9; EXPRESSED IN HEART, SIGNAL = 4.5
ttttggaggagggaaagacctctaaatgtgatgaagaggcaatgaagccatatgtggtgctgtgtaacatcttcccctggacccaccagcagggttttctctttttcaagagtagacatatttcctttaaaagtgctcgagcacctgggtctgtctggtgggagtggcagaaatttcacaaggagacactggcagatctattgcaaccctccggagctcagcgtctgaggcaacactgcggagtgaaatagtgctgtgctgtcttcccatcagttcatgagatgggcttatttcttttatagcctctaagacaaaaacaaatgaggggaatgtggttggaaatgcagttgagtcagccaagccccaagatctgccatatcagctctttgaacatttgaaaatgggagttttcctcagattgaaacaaactccctttccctttacagga

SEQ ID NO: 5249 - DNA, 421 bp, Homo sapiens
  MAP TO AC006524.1; EXPRESSED IN FETAL LIVER, SIGNAL = 1.5; EXPRESSED IN BONE MARROW, SIGNAL = 1.5; EXPRESSED IN LUNG, SIGNAL = 1.4; EXPRESSED IN BRAIN, SIGNAL = 1.4; EXPRESSED IN ADULT LIVER, SIGNAL = 1.5; EXPRESSED IN PLACENTA, SIGNAL = 1.5; EXPRESSED IN HELA, SIGNAL = 1.9; EXPRESSED IN HEART, SIGNAL = 1.6
aattgaaatacttgaaaggaaaattgtttataaatgtagttttaaaagttttagggcatctaattggctgagttttaaaaagataacaaaatttttcagagactattttaacagtgatttttaaaataaagtcaacctaaaatgtcttataaatggaacaacaaattttcgaactaaatttaattacttgaaggggagcctgtaaatttttactgcctgagacaattttaatctagaagaaaaagatattactctgtggcttctacagccaacttcaaggtagctgcaaataaaggtttggtgacaaaacaaataacctcgggacttgtggtattgaccaggacaaccacaaggctaatagcacccaaggtcgacatttcttccctacttctcactatgttcacaccctcccactgtcttt

SEQ ID NO: 5250 - DNA, 466 bp, Homo sapiens
  MAP TO AC005153.1; EXPRESSED IN BONE MARROW, SIGNAL = 1.7; EXPRESSED IN PLACENTA, SIGNAL =   2; EXPRESSED IN LUNG, SIGNAL = 2.2; EXPRESSED IN HELA, SIGNAL = 1.9; EXPRESSED IN HEART, SIGNAL =   2; EXPRESSED IN FETAL LIVER, SIGNAL =   2; EXPRESSED IN ADULT LIVER, SIGNAL = 1.8; EXPRESSED IN BRAIN, SIGNAL = 1.9
aaacctgagctccttcctccctcccctcatctggcctcatcatttggaggtagtttatcgtaatcttttccatcttccttttctctctgtgtgccattctggatagtttctattactatgtcttcatagggtgctcctaccctagacctctccagaccacgccagccgttgggcgagggagcctcacagtgtgtctttggagattggtcactggggatggagggaggggagagaagcgtggtgtccaatgtctggttaatcctgcccacatatttttcatctcctgtgttgcatttttcatctgtagggttggatttggtcattttatatcttccacttctctccttatcactcatgctttgcttttccttcttgaatgcacagagcatatttatcttcatcattttaatatatcgcctgctgtttcatcttggacatttctgtatccgtttctcttggctgattt

SEQ ID NO: 5251 - DNA, 465 bp, Homo sapiens
  MAP TO AC005553.1; EXPRESSED IN LUNG, SIGNAL = 2.5; EXPRESSED IN FETAL LIVER, SIGNAL = 2.3; EXPRESSED IN BRAIN, SIGNAL = 2.6; EXPRESSED IN BONE MARROW, SIGNAL = 2.3; EXPRESSED IN HELA, SIGNAL = 2.6; EXPRESSED IN PLACENTA, SIGNAL = 2.5; EXPRESSED IN HEART, SIGNAL = 2.6; EXPRESSED IN ADULT LIVER, SIGNAL = 2.5
ggaacataggggcctattcagacaaaatgttacacacccctaacccgtgcaccaggctgcatgccggccttctgcaggggggacagccaaggcgaatgggacagggaggtgaaggaggagggaggggttattttggtggattctgaggggcccttccaagaaagatgcaaagggggagtggggagatctgggggcagagattaggagtgaaccgcaatactcttctctgtgctcacccccaccccaactctcccaggttgaccagagctggccaagacctttccttacatggcaacacaggaatctcctttgaggattttttttcccccaaatgtttgcttcttggtgacagcatatccccctgaagttggaaagttggagagggctaagtctgggctttatcctcactgtcatttgttgtccttcctgcatggtggttccacgcccattccagcattcagtggg

SEQ ID NO: 5252 - DNA, 466 bp, Homo sapiens
  MAP TO AC004149.1; EXPRESSED IN LUNG, SIGNAL =  26; EXPRESSED IN FETAL LIVER, SIGNAL =  22; EXPRESSED IN BRAIN, SIGNAL =  25; EXPRESSED IN BONE MARROW, SIGNAL =  24; EXPRESSED IN ADULT LIVER, SIGNAL =  23; EXPRESSED IN HELA, SIGNAL =  23; EXPRESSED IN PLACENTA, SIGNAL =  24; EXPRESSED IN HEART, SIGNAL =  21
actcgggtttctccaactccaaagcctgggctctttccttcatgcagtctccacacaagaacttgcacaggtgctcaagggtgctgaggaggagtgtttggttgaagatgcaagaagagagagagattaaatgggagtgggcttagatgagggaggaagaagatgatggggaaggaaggtggcagacggactgagtgatggagaagggaggtgggggagggaagggtcacagggttctgctttgacagggatttgggatcccaagaatggagctttttttccacactgtgccttgctggaatcacctcacgtccccacatgcgatgagctcatccttctcttggcaccacctgcctctcatcttggccctggctgggacgcaccaacgtttctgcaggaggaataaagcaataacaggaatctcatttttctccttaaaataatatctctctgttctgccagcaag

SEQ ID NO: 5253 - DNA, 472 bp, Homo sapiens
  MAP TO AC004592.1; EXPRESSED IN PLACENTA, SIGNAL = 9.8; EXPRESSED IN LUNG, SIGNAL =  11; EXPRESSED IN BONE MARROW, SIGNAL = 8.7; EXPRESSED IN HELA, SIGNAL = 9.5; EXPRESSED IN HEART, SIGNAL = 7.8; EXPRESSED IN FETAL LIVER, SIGNAL = 9.5; EXPRESSED IN BRAIN, SIGNAL = 9.8; EXPRESSED IN ADULT LIVER, SIGNAL = 9.5
tcacagtccatgtctcccactaaactgtaagctccatgagagcagaacccttttcttttttaccattacactctaccttgtagcacagtggctgacctcgagtaggcactcaggaagtccctgtcaaataaccagcaggtgaatgacttggactccaatagccatgtgctgcattctctcctgccctggaggacaggctgctcagggtctaccatgcagtaagtccctgccctcaaggagcccttgacctagggagagagacaaatgaaaccaagcttttcaacagagagtgaagaatgctgtgcgagtaccatgtacagtgccgaggggaaatctccacccacttattggtggggtcctaccaggtgccaaagttgctggagacacttcaccaagatgacctcatgcagctcctcataatacccctacagtgagccaagggatggcattctccgaggcagagctgtaaatc

SEQ ID NO: 5254 - DNA, 482 bp, Homo sapiens
  MAP TO AC004241.1; EXPRESSED IN PLACENTA, SIGNAL = 2.9; EXPRESSED IN LUNG, SIGNAL = 3.1; EXPRESSED IN FETAL LIVER, SIGNAL = 2.6; EXPRESSED IN BRAIN, SIGNAL = 3.1; EXPRESSED IN ADULT LIVER, SIGNAL = 2.6; EXPRESSED IN HELA, SIGNAL = 3.5; EXPRESSED IN HEART, SIGNAL = 2.3; EXPRESSED IN BONE MARROW, SIGNAL = 2.3
aggcacgatcaaagggagagcagaaaaaaaatagttctccagagacaaagccatcttgagggactgtggatatccagttgggagggtttctgtgattggccaggctgaggatagaacagctcttccaaaacatgaggtggaagaaaagtgacctgatgtgtgactttcaagagtacccgaagtgccccctcggctcctgaacccagccctcgcctgtctgcccctggcctgtctagaagtctctggaggggtcgctgccctgtgtttggggctctcagtggggctcccctctgcctcccccagactcttcacttatgtcaatgagaagctgttctccaagcccacctatgcagccttcatcaacctcctcaacaactaccagcgggcaacaggccatggggagcacttcagtgcccaggagctggccgagcaggacgccttcctcagagagatcatgaagacagcagtcatgaaggagctct

SEQ ID NO: 5255 - DNA, 481 bp, Homo sapiens
  MAP TO AC006385.3; EXPRESSED IN PLACENTA, SIGNAL = 5.5; EXPRESSED IN BRAIN, SIGNAL = 5.9; EXPRESSED IN ADULT LIVER, SIGNAL = 5.5; EXPRESSED IN LUNG, SIGNAL = 5.7; EXPRESSED IN HELA, SIGNAL = 5.6; EXPRESSED IN HEART, SIGNAL = 5.4; EXPRESSED IN FETAL LIVER, SIGNAL = 5.2; EXPRESSED IN BONE MARROW, SIGNAL =   6
aaatacacaagattccacagcaacttttataggaaaatttgacagttgtctaaattatttctacccaatttcatagactagcctaaggaaatgggttaaacagaataatcagatctctttaggaagagggagtgcaggtaacttaatcatgctgtgtttatcttgttttcctcaggtagttctgaaggctgtttatcttgtccttaatcatgacatcagctctcgtatctgtgacgtggcgctaaacattgtggaatgcttgcttcaacttggtgtggtgccctgtgtagaaaagaatagaaagaagagtgaaaacaaggaaaatgagaccttggaaaagaggccaagtgagggagctttccaattcaaaggagtatctggaagttccacctgtggattcggaggccctgctgttagtggagctggagatggtggaggagaagaaggaggaggtggagatggaggaggtggaggaggtgat

SEQ ID NO: 5256 - DNA, 456 bp, Homo sapiens
  MAP TO AC006097.1; EXPRESSED IN BONE MARROW, SIGNAL = 3.5; EXPRESSED IN HELA, SIGNAL = 3.6; EXPRESSED IN HEART, SIGNAL =   7; EXPRESSED IN FETAL LIVER, SIGNAL = 3.1; EXPRESSED IN BRAIN, SIGNAL = 3.4; EXPRESSED IN ADULT LIVER, SIGNAL = 3.2; EXPRESSED IN PLACENTA, SIGNAL = 3.3; EXPRESSED IN LUNG, SIGNAL = 4.4
gagttttctcctggagcagccgggtgaaaaggtttagcattggcaagagacagtcctcccagaaacaaagtagtatggaacctcagctccctcatgatgctgcctttcagagccaggacttgggcctttctgacagaagggtggcagtgcccagagtgccgattctcctgctcccgaaagcccggaaatctttcctgcattttcacatcactcctgcaaagggtgggcttcaactaacaaaacgggccttgttttggtatattcaaggttgaatataagaaaggctttgaagagagtaagacccggtttcacctgcccatggatatggtaaacatcaggcatgctaagaaggcccaaactctcgccagtgacctggactacaggaagaaactgcatgaatacactgtgctgcctgaagatatgaagactcagtgggccaagaaggcctatgggctc

SEQ ID NO: 5257 - DNA, 482 bp, Homo sapiens
  MAP TO AC004049.1; EXPRESSED IN ADULT LIVER, SIGNAL =   1; EXPRESSED IN PLACENTA, SIGNAL = 1.9; EXPRESSED IN LUNG, SIGNAL = 1.4; EXPRESSED IN HEART, SIGNAL = 1.4; EXPRESSED IN BRAIN, SIGNAL = 1.2; EXPRESSED IN FETAL LIVER, SIGNAL = 1.3; EXPRESSED IN BONE MARROW, SIGNAL = 2.1
tggcctaaatcttaagtgagcagtttaatatgtgaatgacaataaatttaagttctatgacatgccacatgccgtgttaagcattttacatgcatttccttgcataatccctttaacaagcctaaaaggtagttataattatacctactttacccatgatgaaattgaagctcagagaagcaaagtggcagagcctaggttcaaaccaagatttacccaagtccaaagacaatggcctttaccattatgctgtaatgtttctcattgctatttttcagattttagaggacaagacaataaagggatgtatcagtgtggagccttacatactgggagaatttgtaaaattgtcaaataacacgaaagtggtgaaaacagaatacaaagccacagaatatggcttggcctatggccatttttcttatgagttttctaatcatagagatgttgtggtcgatttacaaggtatgtgaaactgggaa

SEQ ID NO: 5258 - DNA, 370 bp, Homo sapiens
  MAP TO AC004499.1; EXPRESSED IN FETAL LIVER, SIGNAL =   2; EXPRESSED IN BRAIN, SIGNAL =   2; EXPRESSED IN BONE MARROW, SIGNAL = 1.8; EXPRESSED IN ADULT LIVER, SIGNAL =   2; EXPRESSED IN PLACENTA, SIGNAL = 2.4; EXPRESSED IN LUNG, SIGNAL = 2.3; EXPRESSED IN HEART, SIGNAL = 1.8; EXPRESSED IN HELA, SIGNAL = 1.9
ggggcttactatatgccaggaaccgtgctagccttggtgatgtagttaaaaaagagagctggaagaaaagggttttaggtagataataaaacatctggacttgatcctaggacaatgggaaatcattgatgactttgggcaaagaattaaaaccaacagatttgcatttcctaagagattactgagcagtgtggagcattggtcaaggaagcatgggagactagagctcaacacggctggagcaatgacgttgagaggccagaagctggtacaattatggcttggagagtttaccagattggaggaagagctgaacccagctgacaatacagtttttgtttcaaataaagcccagaaaggtgagaaccaa

SEQ ID NO: 5259 - DNA, 462 bp, Homo sapiens
  MAP TO AC006208.3; EXPRESSED IN PLACENTA, SIGNAL = 7.2; EXPRESSED IN ADULT LIVER, SIGNAL = 6.6; EXPRESSED IN LUNG, SIGNAL = 8.4; EXPRESSED IN HEART, SIGNAL =   7; EXPRESSED IN FETAL LIVER, SIGNAL = 6.9; EXPRESSED IN BRAIN, SIGNAL = 8.2; EXPRESSED IN BONE MARROW, SIGNAL = 8.4; EXPRESSED IN HELA, SIGNAL = 7.6
aatgccctgtgttccagcaaagctgcctccccaccacccacatctcctccatccctgccccaaccaatccttcaaggcctggctaaaaggccacttccaataggacatgatataagcttacgtgctcagccttaccccccagcccaccaaaaacttcctggggacctggggtcagccccatcatgccagcctcccccagggccccaaactccgcaggtgctcaacattatctgctgcagggcattctcagacacagactgagatattcaggatgggatccgaagcacctagaacctggtagccttagaaagctgggctgacctaagggcagagttggtgttctgcacgtcatcctcctcgtcatcctcatagtcatcctcatcatctgagtactgctggggtgggcggactggaactcggctgcggcccacacctgccgccaggtcttcttcctcctgggac

SEQ ID NO: 5260 - DNA, 465 bp, Homo sapiens
  MAP TO AC005572.1; EXPRESSED IN PLACENTA, SIGNAL = 9.5; EXPRESSED IN ADULT LIVER, SIGNAL = 8.7; EXPRESSED IN LUNG, SIGNAL =  10; EXPRESSED IN HELA, SIGNAL = 9.2; EXPRESSED IN HEART, SIGNAL = 9.2; EXPRESSED IN FETAL LIVER, SIGNAL = 8.6; EXPRESSED IN BRAIN, SIGNAL = 9.7; EXPRESSED IN BONE MARROW, SIGNAL = 8.1
acagcctctgaccaccaatctcatattatttcctctacactacaatgaaggggcctatttcatacctggttaaatacactaagaattttggatctcatgaaaactcacgttttctcaaagtttctcaaagacatgaatgctatttttaagcaaggctgataaagtttttctggcttccttctaaaaatgaatgcaaacagtaagctcttacataaaattgacagggatagactcacttgccctccttaggatgggcgtagcctctatgcagccacaatgcaactgagtcaggaagctgcatttataacagttgccctgggaattctgacaccagtaattcacatggtatccaccatcatcctgagctccatgctgatcagtggctcaaaaagtttcttgtaagggaaaagtgcctggagcacctggatggaggtaaatcgtaaaacaaaacagaaggggcgtatg

SEQ ID NO: 5261 - DNA, 471 bp, Homo sapiens
  MAP TO AC006004.1; EXPRESSED IN HELA, SIGNAL = 1.7; EXPRESSED IN FETAL LIVER, SIGNAL = 1.5; EXPRESSED IN BONE MARROW, SIGNAL = 1.6; EXPRESSED IN ADULT LIVER, SIGNAL = 1.6; EXPRESSED IN PLACENTA, SIGNAL = 1.9; EXPRESSED IN HEART, SIGNAL = 1.6; EXPRESSED IN BRAIN, SIGNAL = 1.4; EXPRESSED IN LUNG, SIGNAL =   2
tggaacacaacagtggatgccatttagtctttcattcttttaacgtatgtttacatggatgaaaagacccacagaaaatctgacctgttttccacttaaaactggacctattttcacattaagagtaaggaagcagctttcttcaaattatttacggtgtaagaaatcacaagccctaccattggatgacatttgtgtttattctagtagacagaggacatgattgtttctaaagtatttttcccaatttttaaaatactatttccttttccaggcatttcccggaaacattaactctgacggtgtggtccggcacgaattacagcatccgattattgcccgctatgtgcgcatagtgcctctggattggaatggagaaggtcgcattggactcagaattgaagtttatggctgttcttactgtgagtatcgtattgtttaaatttgtggcaggttttatctttatttaaa

SEQ ID NO: 5262 - DNA, 445 bp, Homo sapiens
  MAP TO AC004595.1; EXPRESSED IN BRAIN, SIGNAL = 3.3; EXPRESSED IN LUNG, SIGNAL = 3.8; EXPRESSED IN FETAL LIVER, SIGNAL =   3; EXPRESSED IN BONE MARROW, SIGNAL = 3.1; EXPRESSED IN ADULT LIVER, SIGNAL = 3.3; EXPRESSED IN PLACENTA, SIGNAL = 3.1; EXPRESSED IN HEART, SIGNAL = 3.1; EXPRESSED IN HELA, SIGNAL = 3.4
ctgatattcttggttgcggggttagggggtgctttctgtcctgctcacatctgactacctactgtaacatttcctcccttaagagtccaagaccccagttctttgaggaaaatggatggtcagtcttctgtaactgcttcttgctgacagggatgatggtggttgttctgtaggtcttggcctcttgctggctgtcagggcagggtggctctgtgggttgatgaaagctgaattcagccaggtccaagggagacaggggcaggattttgcctctgtcatgtcccactgatgggcagtctaggagtcccctatagaagggtgactcttggatattgagaggatggtattctttactgaggatcatctggagctggatggcctgaaggtgagaggagacaaatcagattattagatttagaagacagaggccaaaaacgacaagtag

SEQ ID NO: 5263 - DNA, 450 bp, Homo sapiens
  MAP TO AC006360.2; EXPRESSED IN LUNG, SIGNAL = 2.8; EXPRESSED IN FETAL LIVER, SIGNAL = 2.7; EXPRESSED IN BRAIN, SIGNAL = 2.6; EXPRESSED IN BONE MARROW, SIGNAL = 2.5; EXPRESSED IN HELA, SIGNAL = 2.5; EXPRESSED IN PLACENTA, SIGNAL = 2.6; EXPRESSED IN HEART, SIGNAL = 2.7; EXPRESSED IN ADULT LIVER, SIGNAL = 2.3
gattcataggggcatgaacgatatgcagttttctaagcaattgcctgaactgtgagcatataaaccatggtgaagagtgcacagtgtggttctgtatgactcaccagttacctccttgaggtcatgatgatgccttcagccaggtggctgagggacaggccttgtcctggctcggactctggtctctattgctgctatgtttttatttttttctcagttctttgagccacttagtgtccctcaccagccatcctggggtcctcacatccttgtttcaagaccagagcctcacggatacatttgtggatattggcctgcaattcttccatgtccagacaccaaaacccagtgcctgcatcctctgtagcttcttctgtttctgtggctgcctgcccagatccaagtagatgctggggattgagcgagactgccttttagggccagcttttc

SEQ ID NO: 5264 - DNA, 474 bp, Homo sapiens
  MAP TO AC005282.1; EXPRESSED IN LUNG, SIGNAL =  13; EXPRESSED IN HELA, SIGNAL =  13; EXPRESSED IN BRAIN, SIGNAL =  13; EXPRESSED IN BONE MARROW, SIGNAL =  14; EXPRESSED IN ADULT LIVER, SIGNAL =  11; EXPRESSED IN PLACENTA, SIGNAL =  12; EXPRESSED IN HEART, SIGNAL =  12; EXPRESSED IN FETAL LIVER, SIGNAL =  13
ggaagccacactcacaaaggcccgagggcaagggaggggtaactgcccaacactctccatgaagccaagggtctcagagctcttcccacgcctgccctccatcctccacccctcccggggcgcacccacgacaggtggagggtgaagagcgggaccaaggcctgccggccaggtgtgcaccaccctacgctaacatagcacgcggggcgcccacccaaccaccccacacccgccccgggccgcctgccaccctggaatgcagggtggacacttgcgttcacctggaacctcttctccacctcatccacatcctcctcaggactccccaccagacgaaagtcccatggcaacagccggatcttgttctccactgggcccccgacaccaggcaccaggcctgcacacagggggtctaaggaaggttcgctggcctggctcggagccctgctcctcagcacctggctgtgtaacaga

SEQ ID NO: 5265 - DNA, 466 bp, Homo sapiens
  MAP TO AC005373.1; EXPRESSED IN LUNG, SIGNAL = 4.1; EXPRESSED IN HELA, SIGNAL = 3.7; EXPRESSED IN FETAL LIVER, SIGNAL = 6.8; EXPRESSED IN BRAIN, SIGNAL = 6.4; EXPRESSED IN PLACENTA, SIGNAL = 5.3; EXPRESSED IN HEART, SIGNAL = 5.6; EXPRESSED IN BONE MARROW, SIGNAL = 3.6; EXPRESSED IN ADULT LIVER, SIGNAL = 5.6
tgcaaagttatgtacctcccctgtgcacatgttccatattcgagtattgagattggccagtagttaactactgcagctcaactttaagatggccacagaatttgctacaaatttgagtccttcaatgttttaactttgtggaacaatgctacatctatacttgagctgacttagtcagcctcttcaatgggggccctggggaagctccagcagagggagctccaccatcagggaatcccccaggcattccttctggtgtgcctcctgtactctggtacaggttggtaattatgtggttgcagactttctccagattttgatgttgaaattcttccttcttctgaatctgattcttatccagccagttgataattttaatacccttatcaagaatcttctgtttgtcctcaacgttaatcttgccttgaagtttctcatcttcaacagctgctttcatatcgaatgc

SEQ ID NO: 5266 - DNA, 460 bp, Homo sapiens
  MAP TO AC006538.1; EXPRESSED IN PLACENTA, SIGNAL =   6; EXPRESSED IN LUNG, SIGNAL = 5.9; EXPRESSED IN BRAIN, SIGNAL = 6.9; EXPRESSED IN ADULT LIVER, SIGNAL = 5.6; EXPRESSED IN HELA, SIGNAL =   8; EXPRESSED IN HEART, SIGNAL = 5.7; EXPRESSED IN FETAL LIVER, SIGNAL = 5.6; EXPRESSED IN BONE MARROW, SIGNAL = 5.5
ttaaagcagggtctctcccccttggaattcaaggatggatcgttctctgtggtcaccctgggcacggcagggtgctgagcagcatccttggcctccacccagtccatgccaggagctgcccctctcttaactgtgacgaccacaaatcagtacccaactatgtttaaaactctccagctgatctcagacaacccaccttccaccaactcccagcagctcaggagcctttctgatgaccaccctggcagttgcaggaaggccgaggaccaccccggatccccctggacaccggtggctctgagcctcgacctggccagcaccagccaaaaggaccaaccctccaagtgctgacgaacgaggtgaatgaggctcaaggtgacgttgtccggcctgccttctgcctcacacgcttcccccagcttcagccgcctccccgagacccgagagctggggaggagcc

SEQ ID NO: 5267 - DNA, 451 bp, Homo sapiens
  MAP TO AC005588.1; EXPRESSED IN PLACENTA, SIGNAL = 4.3; EXPRESSED IN LUNG, SIGNAL = 5.1; EXPRESSED IN HEART, SIGNAL = 4.3; EXPRESSED IN BRAIN, SIGNAL = 4.6; EXPRESSED IN BONE MARROW, SIGNAL = 4.1; EXPRESSED IN ADULT LIVER, SIGNAL = 4.3; EXPRESSED IN HELA, SIGNAL = 4.2; EXPRESSED IN FETAL LIVER, SIGNAL = 4.2
tgcagtggatagacaatgggaactttggcctgtctttgacctccggtttttttatttcttccctcttacttgaaatgtttccctcactgcattcccttctgttgcttctcaagtctcatggtttctctccctgccgtgagctgtcctagggaagactatctgctcacctaggtgttggccgctccctgtgctccatcctgtcttctctccctagggcaccgcacgcacacctacgtggcttgcattccacgagacatgttgacccccagcttgatcttcaggttcgacctctatgttccagacctagagagccaactctttactgcatccaccaccgatatgttccttgccattgtacatgtccatgtctgcatctccatcttctctgccctctgctccttcttattttccttgaatgaggtcagcatccacccaactggcaaggtaagaa

SEQ ID NO: 5268 - DNA, 487 bp, Homo sapiens
  MAP TO AC006368.2; EXPRESSED IN PLACENTA, SIGNAL = 7.2; EXPRESSED IN ADULT LIVER, SIGNAL = 8.6; EXPRESSED IN LUNG, SIGNAL = 5.1; EXPRESSED IN HEART, SIGNAL =  20; EXPRESSED IN FETAL LIVER, SIGNAL = 9.8; EXPRESSED IN BRAIN, SIGNAL = 3.5; EXPRESSED IN HELA, SIGNAL = 6.3; EXPRESSED IN BONE MARROW, SIGNAL = 5.7
atgatttttcattgtagagtgccttttttttttttttaagaaaaccaaatttgagaatctgcgtggtatatctggggtaaaatcatatgatatttttagtactttccttatgctttctggtttctgtaagaaaagataacatcccaatccaattaaacaaggtaaatcctccagccttggatgtctggatgaaagagagcaggatgggatggtaggcacggaactcagaatccactaaggagtgtgtaacaactcacctgccaaatcaactagcccttacattttttttttaattttgtatagtccatgagatcctgatactgacctatgaaaggtgcagaagcctgaagaaaagaaacaacttgctcaaaatcacatgacacaactgccccacctgtttcaagaggcacctgtggatagacacaaaacccacccaatggcagtggaatccggtgggggggagcacaggctgtggagtcagaatgct

SEQ ID NO: 5269 - DNA, 485 bp, Homo sapiens
  MAP TO AC004892.2; EXPRESSED IN PLACENTA, SIGNAL =  15; EXPRESSED IN HELA, SIGNAL =  14; EXPRESSED IN HEART, SIGNAL =  14; EXPRESSED IN ADULT LIVER, SIGNAL =  15; EXPRESSED IN BONE MARROW, SIGNAL =  14; EXPRESSED IN BRAIN, SIGNAL =  17; EXPRESSED IN FETAL LIVER, SIGNAL =  15; EXPRESSED IN LUNG, SIGNAL =  17
agccaggtgaggtgcattaggtgatcacccatgtgagttcgtacttggcttggagccactattgtatgtacaaggtataactaccctgctgacgctgtacatacggcttgcacccaggcgcgtacccatgacttgctggcgcccagagaaagagtaaagccatgtcgaaattccctacgattcctcaagtgttctttcagctgcccaccactcgttcacccactcccctcggtcctcagcttgggctggaacctgacacttggtatagccagcaggatactgaggagagtgagcctttggtccccactgattctgagtcagccatgcagctgaaacattggttgtggtggccggtggcagcttactgctcggatgggatccagtggaaacctgggcggcagtagatgggtcccccgtgaggatggagaaggcgctgaaacagctgaagtacagagcaccaagaaggaataagcctttgctggcag

SEQ ID NO: 5270 - DNA, 455 bp, Homo sapiens
  MAP TO AC002457.1; EXPRESSED IN BRAIN, SIGNAL = 4.4; EXPRESSED IN ADULT LIVER, SIGNAL = 4.5; EXPRESSED IN PLACENTA, SIGNAL = 4.4; EXPRESSED IN LUNG, SIGNAL =   5; EXPRESSED IN HELA, SIGNAL = 3.9; EXPRESSED IN HEART, SIGNAL = 3.6; EXPRESSED IN BONE MARROW, SIGNAL = 4.2; EXPRESSED IN FETAL LIVER, SIGNAL = 4.6
tccaatatgaagaattaggccagaactcaatggaagaatcaaatgtccatttctaattagactattgcaataatttagcaaaggtagagggtgtcttggactaggttggtatcagtagtagtctgaaaaatgtttggattttggatatattttgaaggaaaagcaaatcttccatgaaactgtactaatttttcctctgctattcttttttctctctttttagtttcgctattcaaattggcttgacaagttgtatatggtggtgggaactttggctgccatcatccatggggctggacttcctctcatgatgctggtgtttggagaaatgacagatatctttgcaaatgcaggaaatttagaagatctgatgtcaaacatcactaatagaagtaagtattgtttgtgtaccaattttattggaaacttgcagcaaaaacaagcacttagagtga

SEQ ID NO: 5271 - DNA, 445 bp, Homo sapiens
  MAP TO AC004518.1; EXPRESSED IN HEART, SIGNAL = 1.4; EXPRESSED IN BRAIN, SIGNAL = 1.5; EXPRESSED IN PLACENTA, SIGNAL = 1.5; EXPRESSED IN LUNG, SIGNAL = 1.7; EXPRESSED IN FETAL LIVER, SIGNAL = 1.6; EXPRESSED IN BONE MARROW, SIGNAL = 1.5; EXPRESSED IN ADULT LIVER, SIGNAL = 1.7
caaagttgggctctctgaggctgttccttgagcaaagaggtgtatgcctctggctgcccacttggcagtggatatcttcatgcttcttttttccacccaaatattatggccactggagtatttgtaggaaacagtctaaaaaaagacaacactcacttccccttgcttcaggctcttcacagtcaactccactggcatgtttcaggcacctgctgtgtgccaggcattttttttcagaatggaacaatattgcccttgtctttaatgccttaactgtctagcaggaaagacattattatgagtacctggggcagaaacagtgtgagaaacattttggagacccaaaggaaggggccattgtaaagaagttccaccagagtagaggtaagaacggggagagggcatgcctatagacacctatccatcattcgcttgtccacacatt

SEQ ID NO: 5272 - DNA, 458 bp, Homo sapiens
  MAP TO AC005598.6; EXPRESSED IN LUNG, SIGNAL = 4.4; EXPRESSED IN HELA, SIGNAL = 2.8; EXPRESSED IN HEART, SIGNAL = 2.5; EXPRESSED IN FETAL LIVER, SIGNAL = 3.5; EXPRESSED IN BRAIN, SIGNAL = 2.5; EXPRESSED IN PLACENTA, SIGNAL =   4; EXPRESSED IN BONE MARROW, SIGNAL = 2.8; EXPRESSED IN ADULT LIVER, SIGNAL =   3
ccctgcttcttgttggaaagagaccccaagtggaagagtggagctagttggagcagctgttagagcagcctagcgatgctcctgtattcccctctcagactgccccttgcagtgtgtccctctcactgccatctaaagtcatttaccagtccatcccaagtccctttagacacacttttgtagatgaggagggacttggcatgtgtgttctgaagcgggctgtgtttccatagcgatcaaggagaccaaagaggcgttggagaacatgaacagcaccttgaagagcttgcaccaacaaagtacacagcttagcagcagtctgaccagcgtgaaaactagcctgcggtcatctctcaatgaccctctgtgcttggtgcatccatcaagtgaaacctgcaacagcatcagattgtctctaagccagctgaatagcaaccctgaactgaggcaggtgagca

SEQ ID NO: 5273 - DNA, 495 bp, Homo sapiens
  MAP TO AC004606.1; EXPRESSED IN PLACENTA, SIGNAL = 1.3; EXPRESSED IN LUNG, SIGNAL = 1.4; EXPRESSED IN FETAL LIVER, SIGNAL = 1.7; EXPRESSED IN BONE MARROW, SIGNAL = 1.3; EXPRESSED IN ADULT LIVER, SIGNAL = 1.4; EXPRESSED IN HEART, SIGNAL = 1.6; EXPRESSED IN BRAIN, SIGNAL = 1.3
cagagctttctggttggctgttatttgcatgtatgaattactcaaattaaccattccatattaaaaattaattttatatacaactgctcaaagttcttatctttatttcattatagtttaatttcaaaaagccatagatagatgctttaaatggtttctagagtaaggacaaacttagtctttttcctgggcatctgttctactgccttcatttatcattacatggtaaaacatctatagtgaaggagattgctttggaaaaaagattcatttatttaacatgtcttagtaaatgttaccttaattaattgtgattccaggaaaaataataaatgtgatttgacagactggaataaagttgacttagccaatgagaaacctgaagtttatgctggcatattttttgatatgggtattacatttcaacttaaggtaattcaatatgggctattgtgatacttgaaatcttagtgttcagatccagaaaatatggtc

SEQ ID NO: 5274 - DNA, 484 bp, Homo sapiens
  MAP TO AC005165.1; EXPRESSED IN BONE MARROW, SIGNAL =  23; EXPRESSED IN PLACENTA, SIGNAL =  71; EXPRESSED IN LUNG, SIGNAL =  29; EXPRESSED IN HELA, SIGNAL =  21; EXPRESSED IN FETAL LIVER, SIGNAL =  35; EXPRESSED IN BRAIN, SIGNAL =  48; EXPRESSED IN ADULT LIVER, SIGNAL =  95; EXPRESSED IN HEART, SIGNAL =  41
tccagtcaatgaaagggacactttattgaggccccagggccatggggcctgggcaggaggctgcccttgggggaaggaagagccttatttgatcttcctcttggggcacaggttgttggtgtggcctcacttcttgcagcagttgacagcacgggggtgcaggcaagcacagcacttgcggcagatcatcttgtcgcagttgtatttctgggcaagctggcagagggctcaataatgccacctcacaggtgcagccccaggtgcaggatggactctttctggatgttgcagtctgagagagtacggccatcctccagctgtttgcccacaaatatcagacattgctggtcaagtggaacgccctccttgtcttgaatttcggccttgacattctcagtggtgtcactgggctcgacctcgagggtgatggtcttgcctgtgagggtcttcacaaagatctgcatctctgcgtctgtagctcagc

SEQ ID NO: 5275 - DNA, 450 bp, Homo sapiens
  MAP TO AC005288.1; EXPRESSED IN BONE MARROW, SIGNAL =  28; EXPRESSED IN PLACENTA, SIGNAL =  23; EXPRESSED IN LUNG, SIGNAL =  25; EXPRESSED IN HELA, SIGNAL =  25; EXPRESSED IN HEART, SIGNAL =  23; EXPRESSED IN FETAL LIVER, SIGNAL =  23; EXPRESSED IN BRAIN, SIGNAL =  31; EXPRESSED IN ADULT LIVER, SIGNAL =  24
gctcaagtgatccttccaccttgacctcccaagtgatgggattataaatttgagtcaccatgcctggcctaagatcttttgtagctgctagtttctagtacccactcgtttatgagattatctaattggagaatacaatatgggtcaggagtaagacacatcatttgggagtaagtggatagggcctgataaatttttggatccattttagtcattagttggttgaattgtgaacttgaatattgctgccttttccccttaattttagcttctgctcattctgtctctttttctttaaaataggcctggaatgttctggctctggatggcagtaactggcagcgaattgacctatttgatttccagagggatattgaggtataattatgtggtgtgtggccccagttttcatgttagtaattacagcatggaacagattagccctagcca

SEQ ID NO: 5276 - DNA, 454 bp, Homo sapiens
  MAP TO AC005231.2; EXPRESSED IN LUNG, SIGNAL =  11; EXPRESSED IN FETAL LIVER, SIGNAL =  12; EXPRESSED IN PLACENTA, SIGNAL =  11; EXPRESSED IN HELA, SIGNAL =  10; EXPRESSED IN BRAIN, SIGNAL =  13; EXPRESSED IN BONE MARROW, SIGNAL =  11; EXPRESSED IN ADULT LIVER, SIGNAL =  12; EXPRESSED IN HEART, SIGNAL =  10
gttttccagtttgagcccaggccaccagattcagagttgctccaaattccttggtgcaaagggtcaggctccagttccattagcctaatgcagcaggcatccaggagaccggcagggccctgcctggggacatgagacccagaggggcaagtgcagcctggcagaggagcagagtgacagctgtggcatgtggcgctggccccaggctccccagaggtgtgccctggctctcatgagcagacccagttacctgccctgctctggggctctgagatggtggctggatcccatcttacatgcagctgagctgggctggggcacacaggagccaggcgtgtgcccagtaacaaacaaaaccatgtggccatgcttgcacatgatccatgtcttcttggtcagcagctctttgctgctcagagccttcatggcgcctgccctgtgaagccacgtggtg

SEQ ID NO: 5277 - DNA, 466 bp, Homo sapiens
  MAP TO AC006531.1; EXPRESSED IN PLACENTA, SIGNAL = 1.5; EXPRESSED IN LUNG, SIGNAL = 1.4; EXPRESSED IN BONE MARROW, SIGNAL = 1.7; EXPRESSED IN HEART, SIGNAL = 1.7; EXPRESSED IN FETAL LIVER, SIGNAL = 1.8; EXPRESSED IN BRAIN, SIGNAL = 1.2; EXPRESSED IN ADULT LIVER, SIGNAL = 1.8
gtctgaccaggaaggcaatgagccagaacagaaaatatcgatgagaacctagatgttctgtaagtacatgaacaaacccctggcccatctggatgcttttactgtttattttttatttggtgcaaagaagaccttttctgtttagcaccacaaaagttgtttctgtgttactaacttgactacattattgccagtgcaacactaaagaagttgtgtttgatactagagttgtgcacgggcaactatggtgatgatgagaaggagaaggatgaagaggaggaggagggtggtggtgatggccatgatgatggtggtgatgatcgtggtaatgaggatgatggcaatggtcatgatgatgatgatgatgacggtgatggtggtggtgatgataatgataataatgatatcagaggcgtgtgaaccagaacactccatcttaaatagtagctgggtaaaatgaggctga

SEQ ID NO: 5278 - DNA, 458 bp, Homo sapiens
  MAP TO AC004927.2; EXPRESSED IN LUNG, SIGNAL = 7.7; EXPRESSED IN BONE MARROW, SIGNAL = 5.7; EXPRESSED IN PLACENTA, SIGNAL = 6.8; EXPRESSED IN HELA, SIGNAL = 6.3; EXPRESSED IN HEART, SIGNAL = 5.1; EXPRESSED IN FETAL LIVER, SIGNAL = 6.2; EXPRESSED IN BRAIN, SIGNAL = 6.2; EXPRESSED IN ADULT LIVER, SIGNAL = 6.4
ttctttgtgctggcttctccctctgcctggagtgctctgcagcgcacagcctcctgttccctttaagtcttggctcacacgcccctttcacagggagatgcctcctgtcctcctatttcaaatggcgccttcccactccagcactcccaacccccttccaacagatcccattttactcattaattctccttgtctcttctcaccactagaaggtgagcaccacaagggcagggaccttttgctggttttgttcactgatgtttctcgtacctagaatcagcactgatgatatggatctagtacctagaatcagcactgatgatatggatctagtacctagaatcagcactgatgatatacatctagtacccagaatcaatgctgatgatatggatctagtacctagaataatcctgacacagccatcacccttcaccagcatccgacaatgatgaaca

SEQ ID NO: 5279 - DNA, 467 bp, Homo sapiens
  MAP TO AC005393.1; EXPRESSED IN PLACENTA, SIGNAL = 2.8; EXPRESSED IN LUNG, SIGNAL = 2.2; EXPRESSED IN HEART, SIGNAL = 1.8; EXPRESSED IN BRAIN, SIGNAL = 1.6; EXPRESSED IN BONE MARROW, SIGNAL = 9.8; EXPRESSED IN ADULT LIVER, SIGNAL = 1.7; EXPRESSED IN HELA, SIGNAL = 1.7; EXPRESSED IN FETAL LIVER, SIGNAL = 2.4
agagcaagcaacaacacctgttgaatgagagagggaaatgataaaagtaaagggaacccctgtgtgtgtgataaaaagcctgggacagggggagttatgggtgatgaaaagcctgggataaggggagttgtgggtgatgaaaagccggggacagtgggagttatctggagttagggcatgaagagctgccacctgctctgagatcccacggaagccgggtgcagggagctcctggggtgctcacctggtacttatctggcagcactgagatgctcagttcaaattcttggccatcctgaaagggcatgttcttggattccacctgctgcttccaggccccatactcacggctgttcatgaccacacgacgaccaaagcacacttggaaatggaagacaatgtctgattcctccttcatctcagtgtggaaatccacctgcagatatggttcattcctgagggcagag

SEQ ID NO: 5280 - DNA, 493 bp, Homo sapiens
  MAP TO AC004161.1; EXPRESSED IN PLACENTA, SIGNAL = 3.8; EXPRESSED IN LUNG, SIGNAL = 4.1; EXPRESSED IN FETAL LIVER, SIGNAL = 3.8; EXPRESSED IN BONE MARROW, SIGNAL = 3.3; EXPRESSED IN HELA, SIGNAL = 3.1; EXPRESSED IN BRAIN, SIGNAL =   3; EXPRESSED IN ADULT LIVER, SIGNAL = 4.1; EXPRESSED IN HEART, SIGNAL = 2.5
gagggtagctgagctgatggggctttctgttcagaaagtcttctgatgttgaagagtcatagagtcaaaaagcttggctgtgctgtctttggatgcagtgacaaacacgatcatgtccctggataactggatgtcattaatctgctaggagtgctccttaatattcaccaacacctctccaggcttggcactatactggttgagctttccactctcatggcctgcaatgatgcactccccacaggagccccaaatggcactagtgattttagagtcactgcaagggatcttcaggtagcactcattgctgtcaatctggctcagatcctgcaggtcaaagaagctcacaaagcactgatagcttttctgcttctccatggagaacgtgatgatattgcccccaaagtcaaaactgcagatccacacagttgaattggtcttgagtagggccagctgtttccctgtttcacaggcccaaagatggttgtcagct

SEQ ID NO: 5281 - DNA, 495 bp, Homo sapiens
  MAP TO AC006144.1; EXPRESSED IN BONE MARROW, SIGNAL = 1.4; EXPRESSED IN HEART, SIGNAL = 1.5; EXPRESSED IN FETAL LIVER, SIGNAL = 1.3; EXPRESSED IN ADULT LIVER, SIGNAL = 1.4; EXPRESSED IN PLACENTA, SIGNAL = 2.3; EXPRESSED IN BRAIN, SIGNAL = 1.3; EXPRESSED IN LUNG, SIGNAL = 1.5
ggaagcagaacacacatatttttaagaaaataatattgcaaatggtcagtttggggtcaatttaccacactagagtaacaaagttgataaaatacagctatgttcaactaaaccatttatctacactatagtaaaatactcgcaatcattcccaagatcacagtttaaaactattttaacagataagacgtgttttacgggcacctctgtaagagatgctttgccttcctcagtcaaaagcatgattagaaggttgacaatatttactttttcctcttatcatatagcctgctcaaaatagtattatcattggtaatatggtctgtatcttgtctgacccggatgatgtgtcccaagaagtagggtttgagaaggtagattctgcattcatagaggaaggggtggccgtccaggtacaggccacatgtcatgaatcatttcccctggttgtataaatggaggactcggagttccttgatattcagtgaacttggg

SEQ ID NO: 5282 - DNA, 470 bp, Homo sapiens
  MAP TO AC004526.1; EXPRESSED IN ADULT LIVER, SIGNAL =  17; EXPRESSED IN PLACENTA, SIGNAL =  15; EXPRESSED IN HEART, SIGNAL =  15; EXPRESSED IN FETAL LIVER, SIGNAL =  16; EXPRESSED IN BRAIN, SIGNAL =  22; EXPRESSED IN BONE MARROW, SIGNAL =  15; EXPRESSED IN LUNG, SIGNAL =  13; EXPRESSED IN HELA, SIGNAL =  11
tggtagcattatgttggtccagataatctcatttctcatttggacaagatattttggggtttgaaaaattcctataatgattaaaggaaaaagctcttgtgagttattgtatgcggagacacacacacacacacacacacacacacacacacacacacagtttattgcattgttagattttatacataaaattacccaagttgcaaatatatgtcttccacccttgactctcaggatagtgcagcaggatgcagcggaacccccccgatttgccgacaagcccagaccaaactagaagtggccctgtacatgtttctgtggaaccctgacactgaagctgttctggttgccatgtcctgtttccgccacctctgtgaggaagcagatatccggtgtggggtggatgaagtgtcagtgcataacctcttgcccaactataacacattcatggagtttgcctctgtcagcaa

SEQ ID NO: 5283 - DNA, 455 bp, Homo sapiens
  MAP TO AC004991.1; EXPRESSED IN PLACENTA, SIGNAL = 5.1; EXPRESSED IN ADULT LIVER, SIGNAL = 5.1; EXPRESSED IN LUNG, SIGNAL = 5.3; EXPRESSED IN HEART, SIGNAL = 5.3; EXPRESSED IN FETAL LIVER, SIGNAL = 5.3; EXPRESSED IN BRAIN, SIGNAL = 7.2; EXPRESSED IN HELA, SIGNAL = 5.6; EXPRESSED IN BONE MARROW, SIGNAL = 5.2
tagcacaatacctcctgggggcaatcactgccattttcagatcctttctaactcgactgacccggggaaggaacctacgggcctaatcccccagaacctacgggcctaatctgcattgatctgattcctagcgaagcttgatgtttttctctgcaccaagggtttgaaggcaaactagcaaatgggagcgaccctcacctgtgatggggaggaccacaaagcccctggccacaggctggcacatccagcagtcagcggcagtgacccagacagagaccgggaattccccgggcacgtggccgaccacacggatggtggagctgagacccttctccatcttgccagtaagcaccagcggggtgtggatccagtggaagcggtagaggtgggcgtcagcgggcagggccaggctgccgttgtccttggccaccaggctggccgagatggtcaccacc

SEQ ID NO: 5284 - DNA, 481 bp, Homo sapiens
  MAP TO AC005316.1; EXPRESSED IN PLACENTA, SIGNAL = 3.8; EXPRESSED IN LUNG, SIGNAL = 5.7; EXPRESSED IN FETAL LIVER, SIGNAL = 3.6; EXPRESSED IN ADULT LIVER, SIGNAL = 3.7; EXPRESSED IN HELA, SIGNAL = 3.9; EXPRESSED IN HEART, SIGNAL =   4; EXPRESSED IN BRAIN, SIGNAL = 4.1; EXPRESSED IN BONE MARROW, SIGNAL = 3.6
agacaacccctaccctaccctacctcccacccatgctccccaccttcctgatccatgggatcaccaggggccccagccccctcgatgggcaacttgctggctgtggctggttccttcttcaccttcttagctttcttctgcttaaattcttgcaggtcccactccaggtcccagagccaggggtcttctttgtacctacagagccagtccactagggcagggctaaggctaagccgaaggctaggccgcccacctgccagtcccctgcctagatcctgcccacccaaggcctggctacctctctcctgagagcagctggcaggcatcattggccagatccatcaacgacttcttcatctcccgctggagctcctcataagtgccctgtgcctctgccaggtaacgctcccagttctggttgacaggcaggtaggagacacccatctccagcatgccggccagagtcactgggtggggacac

SEQ ID NO: 5285 - DNA, 402 bp, Homo sapiens
  MAP TO AC004222.1; EXPRESSED IN ADULT LIVER, SIGNAL =   3; EXPRESSED IN PLACENTA, SIGNAL = 3.3; EXPRESSED IN LUNG, SIGNAL = 3.6; EXPRESSED IN HELA, SIGNAL = 3.5; EXPRESSED IN HEART, SIGNAL = 3.3; EXPRESSED IN BRAIN, SIGNAL = 3.1; EXPRESSED IN FETAL LIVER, SIGNAL =   3; EXPRESSED IN BONE MARROW, SIGNAL = 2.9
gcatattaacaactcagtggaagactaacaatttatttcaaatgctttttattttcatcttactttgttcagaaaaggatttcaagtaagctacttgaatttcccctgtaaacttacaaagtagtgaccttaaatacattctcaaaatcagatgccatgtgctttgaggcagactgagtaaaaaaaaccactattcacatttacctgttgacatcatattgctgacagaggcaaactccatgaatgtgttatagttgggcaagaggttatgcactgacacttcatccaccccacaccggatatctgcttcctcacagaggtggcggaaacaggacatggcaaccagaacagcttcagtgtcagggttccacagaaacatgtacagggccacttctagtttgg

SEQ ID NO: 5286 - DNA, 461 bp, Homo sapiens
  MAP TO AC004615.1; EXPRESSED IN HEART, SIGNAL = 2.4; EXPRESSED IN ADULT LIVER, SIGNAL = 2.6; EXPRESSED IN PLACENTA, SIGNAL = 2.6; EXPRESSED IN FETAL LIVER, SIGNAL = 1.9; EXPRESSED IN BRAIN, SIGNAL = 3.6; EXPRESSED IN BONE MARROW, SIGNAL = 2.7; EXPRESSED IN LUNG, SIGNAL = 3.1; EXPRESSED IN HELA, SIGNAL = 2.6
cttggctgctttcatgggctggcgttgagttcctgtgggttttccagaaacacagtgcaagttgttggtggatctataattctacggtctggaggatggtggccctcttctgccagctccactaggcagtgttccaatggggagtccatactggggctccaaccccacattcccactctgcactgccctactgtaggttccccatgaggggtccacccctgcagcagacttctgcctggacatcaaggtgtttacatacatcttctgaaatctaggtggaggttcccaaacctcaactctcaccttctgtgcacctgcaggcccagcaccacgtagatgctactgaggcttggggcttgcaccctctgaagcctcagcctgagctgtaccttggcccctttagccatagctggagctggggcatgtgtgatacagggcactgtgttctgaggctgcacaga

SEQ ID NO: 5287 - DNA, 457 bp, Homo sapiens
  MAP TO AC005919.1; EXPRESSED IN LUNG, SIGNAL = 1.9; EXPRESSED IN BRAIN, SIGNAL = 1.8; EXPRESSED IN PLACENTA, SIGNAL = 1.8; EXPRESSED IN HEART, SIGNAL = 1.5; EXPRESSED IN FETAL LIVER, SIGNAL = 1.7; EXPRESSED IN BONE MARROW, SIGNAL = 1.8; EXPRESSED IN ADULT LIVER, SIGNAL = 1.7; EXPRESSED IN HELA, SIGNAL = 1.7
acaacagatgggaatggctgcaggaacatttccagtcatctaatgcagaggagaacactgtgatgaacaggatttggaagagatgactctcttccaaaaaaacaagagatggacatgcttttctgcagtgggaatgaaaaagaaaaggcttggaagtatggaaggctaatgggcagcccacatttgtagcttaaaagaggtaaaaactggattttcaaatggctttacttactttccatctccatctatcaggcggcagtaggtctcaatttctttttccaagtggaccttgacatcgaggagatgctcatactccagcttctggccctcggtctcggttctgacctggtgcagctgctcctccagggccccgatctgagcctggatctgcgccagctgcgtacagtagttgctctcggtctccgtcaaggagcactccagggagtgtttctgagga

SEQ ID NO: 5288 - DNA, 480 bp, Homo sapiens
  MAP TO AC006538.1; EXPRESSED IN BRAIN, SIGNAL = 3.4; EXPRESSED IN LUNG, SIGNAL = 2.9; EXPRESSED IN FETAL LIVER, SIGNAL =   4; EXPRESSED IN BONE MARROW, SIGNAL = 3.2; EXPRESSED IN ADULT LIVER, SIGNAL = 3.3; EXPRESSED IN PLACENTA, SIGNAL = 2.5; EXPRESSED IN HEART, SIGNAL = 4.4; EXPRESSED IN HELA, SIGNAL = 3.4
ggctctcccctaatctccacccagcgccgatccacagatgggaaaggagtggggagcaggacttggtggccacctggaaaggggcccaatgcccagagatgcccccacctgcctgggcggttcagggtgatcttctgagctggatgcacccaggactcgctgtccagtgtccagacaggctccacagcccccgggcgtcactcctgctggctgccctcactgccaggcactcacgtggtgtcactcctgctggccaccccccagcccccggccccatgcactcacgcagcgtcactcctgctggtcgtcgttgctggcgctgggcgtccgactccggatctggctcctgagctgctctatcaactctgggttctgctgctgcatctgctgggcaaactgctggcccctgcggggaagggcacatggggctcagccagggccaggaggctgcctgctgcctccgtccatccccagctgacc

SEQ ID NO: 5289 - DNA, 389 bp, Homo sapiens
  MAP TO AC006379.2; EXPRESSED IN LUNG, SIGNAL = 3.3; EXPRESSED IN HELA, SIGNAL = 4.6; EXPRESSED IN HEART, SIGNAL =   5; EXPRESSED IN FETAL LIVER, SIGNAL = 8.3; EXPRESSED IN BRAIN, SIGNAL = 6.8; EXPRESSED IN PLACENTA, SIGNAL = 4.7; EXPRESSED IN BONE MARROW, SIGNAL = 5.7; EXPRESSED IN ADULT LIVER, SIGNAL =   6
ctggaatacacgcacacatcataaatatgtgacacatttgtcactttggaaaaaactggcttttgcatttttcagttttcagaggtctgcttgctccagaggcaacaggtacatattgtcatttctggatggttattgtcatttttttttaacttccagtacgaaaatgaggatgagtttgtgtgtgtgtgtgtgtgtctgtgtgtgtgtaaaaattttcccaattcctaagaattgggagtcgccaagtgagtcttgaagaaatactcatcagctgccaacctcaagtctgcatcttcgtaaagtggatgattcacaatgggatgaagtgtagacagcttgacgcttgccattgtaggcatggcacctgcgaagacagcatctgaaaa

SEQ ID NO: 5290 - DNA, 475 bp, Homo sapiens
  MAP TO AC004904.1; EXPRESSED IN LUNG, SIGNAL = 2.6; EXPRESSED IN FETAL LIVER, SIGNAL = 2.3; EXPRESSED IN BRAIN, SIGNAL = 2.1; EXPRESSED IN BONE MARROW, SIGNAL = 2.3; EXPRESSED IN HELA, SIGNAL = 2.6; EXPRESSED IN PLACENTA, SIGNAL = 2.6; EXPRESSED IN HEART, SIGNAL = 2.3; EXPRESSED IN ADULT LIVER, SIGNAL = 2.4
ttttaattttctgaagtttgctcaacatatgtcttgacataagtttctctggttttatcctatttggataaaacttttagaatctgctttaaaaatctatagggtttttttggtattttgccaaatttgggaaattttcaactattgttttttcagtgctttttcagctctgccctttatctcttcttcactccaatgacaaaatgtgttttttttttgttatggccccacaagtgcagagactattcatttttttctcagtgttttttctctctgttgttcacattgatggtaatttgggtaattgctctatcttcagattcgatgattttttcctctttttccttcattttcttattgagcccattgagcttgttactttcattattgtattttttcattctcaaattttcatttggttcttctttatactttctatttctttactactttctgttttcatttgttttaagaa

SEQ ID NO: 5291 - DNA, 490 bp, Homo sapiens
  MAP TO AC004477.1; EXPRESSED IN PLACENTA, SIGNAL =   7; EXPRESSED IN LUNG, SIGNAL = 5.6; EXPRESSED IN HEART, SIGNAL = 4.5; EXPRESSED IN HELA, SIGNAL = 4.6; EXPRESSED IN FETAL LIVER, SIGNAL = 8.8; EXPRESSED IN BRAIN, SIGNAL = 5.2; EXPRESSED IN BONE MARROW, SIGNAL = 6.1; EXPRESSED IN ADULT LIVER, SIGNAL = 6.9
ggaattgtgcttggtgtgtcatgtggattctctcttgcatcttcatgataaatgttattgtcgctgttttaccgatgagggttggattagaggggttaaacaacttgtcttaggctccacagctgggaacaagtggggctgggaagctgacttcgtgctcttcaccaccacaaaggatgtgtgtgcatcctggggcatgcctgcctcatgtgggggtgtcctgggctgaatttcctgggcacttctcagtggaactctctagcctcctggttcggaatgtcaactatgagatcccctcactgaagaagcagattgccaagtgccagcagctgcagcaagaatacagccgcaaggaggaggagtgccaggcaggggctgccgagatgcgggagcagttctaccactcctgcaagcagtatggcatcacggtgagcggcggcagcctcttcgcagccagaggacacctgggcccctgcttgtcttcctctga

SEQ ID NO: 5292 - DNA, 419 bp, Homo sapiens
  MAP TO AC002467.1; EXPRESSED IN LUNG, SIGNAL = 2.1; EXPRESSED IN HELA, SIGNAL = 1.9; EXPRESSED IN HEART, SIGNAL = 2.5; EXPRESSED IN FETAL LIVER, SIGNAL = 2.8; EXPRESSED IN BONE MARROW, SIGNAL =   2; EXPRESSED IN PLACENTA, SIGNAL = 1.8; EXPRESSED IN BRAIN, SIGNAL = 2.2; EXPRESSED IN ADULT LIVER, SIGNAL =   2
catggacgtgtgtgtgtgtgtgtgtgtgtgtgtgtgtgtgttggggcactctatgcaattttatcccatgtatagctttgtgtaaacaccatcacaatcaagaagtttaactatgccatcagcacaagactccttctggggacccttttaaaaatgcactccaagtgcagatatacctcttcttctgacaccattcccagacttatggctgaacaaagacattctgaattagaggaatagctctgatattagacttcctacaatcagggtaagttgaacactgaatattctgttgtagaattcatttgcaatgacttctggtgagcctccaatgaggacatactctttctctgcaatttcatttttgcccacagccacctcagccatggaggagctctaggtgatactggggagcatgt

SEQ ID NO: 5293 - DNA, 451 bp, Homo sapiens
  MAP TO AC004932.1; EXPRESSED IN PLACENTA, SIGNAL = 2.5; EXPRESSED IN LUNG, SIGNAL = 2.5; EXPRESSED IN HELA, SIGNAL = 2.3; EXPRESSED IN FETAL LIVER, SIGNAL = 2.3; EXPRESSED IN ADULT LIVER, SIGNAL = 2.3; EXPRESSED IN HEART, SIGNAL = 2.6; EXPRESSED IN BRAIN, SIGNAL = 2.2; EXPRESSED IN BONE MARROW, SIGNAL = 2.3
gaggtattacccgagctctttgtctaatgaccaagaaaattaaggaccatggacaccaaaggtgaagctggggcaaaggtttaataagcaaaataggaaagctctttgcagtagaagggggacctgagagggttgcctttttttcagttgaatacaggtgcttttattaaaaaaaaaaaaaaaaaaaaaaaaaaaaaaaaaaaaaaaaaaaaaaaccacttcccctatctgtgtagctgtctgtgtaattgcccttaccggtgcagctgcaggcatgtctcaggcaagcctccttaccatgcaagtttccacggatcccactgtgtgcatgttcatagaagaggaggaaacttttccctgggagcccaccaattacacagagaacaaagttgtttctatattgggccttgctcccttatctgtgcagctgcagcttgatttttcaggtttt

SEQ ID NO: 5294 - DNA, 491 bp, Homo sapiens
  MAP TO AC004169.3; EXPRESSED IN PLACENTA, SIGNAL = 3.5; EXPRESSED IN HELA, SIGNAL = 3.2; EXPRESSED IN HEART, SIGNAL = 2.5; EXPRESSED IN FETAL LIVER, SIGNAL = 3.3; EXPRESSED IN BRAIN, SIGNAL =   3; EXPRESSED IN BONE MARROW, SIGNAL = 3.1; EXPRESSED IN LUNG, SIGNAL = 4.7; EXPRESSED IN ADULT LIVER, SIGNAL = 3.1
atcccaccctcactgcttcccaggcacagccgggagtcagagcaccccttggagcctccacctgcccgtcggagcctctgccccccggccgtgaatgccaggagacgctctgggggtgaggcactgaccacgtggcagtccttgctgctactgctgttatttttgcccatttccaaaacttatttcttccttgaaataaatcattttcctgctggagaataccagtggcccagaaaccgctcatcacatggggttctctctctccgttaagtctccagtgttccggcaccggaccctggaaaactcgcccatctccagctgtgacaccagtgacaccgagggccccgtgccggtgaacagcgcggccgtcttgaagaagagccaggctgccccgggcagctccccctgccgagggcatgtgctgcggaaggccaaggtaagccctgatgtccgggggtgtctgggtgtcctgggcaggcactttaagctcc

SEQ ID NO: 5295 - DNA, 463 bp, Homo sapiens
  MAP TO AC006070.1; EXPRESSED IN PLACENTA, SIGNAL = 1.8; EXPRESSED IN HEART, SIGNAL = 1.9; EXPRESSED IN LUNG, SIGNAL = 1.9; EXPRESSED IN HELA, SIGNAL = 1.9; EXPRESSED IN FETAL LIVER, SIGNAL = 1.6; EXPRESSED IN BRAIN, SIGNAL = 1.9; EXPRESSED IN BONE MARROW, SIGNAL = 1.8; EXPRESSED IN ADULT LIVER, SIGNAL = 1.8
aggatgatggtcctctgtggtgctgctcagcaacaagaatgctggcagcagctggacacacagcaggctgggcagtagcagggctggcagcagctggatccacagctctggttgaggcaaccaggcaggcagacagtcgtggggtggtagcaggttcttctgcagtacacaggtgcacaggagctgctctggccacagctggacccacagctggtttggccacagcagctggacccacagcagatgggctggtagcagggtgtgctgcagcaggaaggctggcagcagctggtcacacaggtgggctggcagcaggtggtcctgcagcaggtgttttgacagcaagttgggtggcagtaaggctggcagcagctggacacacagcaggagggctggcagcagggtgtgctgctgcaggtggtcacaatggtgggctgccagcaggtagtcctgcagcaagtgg

SEQ ID NO: 5296 - DNA, 477 bp, Homo sapiens
  MAP TO AC004687.1; EXPRESSED IN PLACENTA, SIGNAL = 3.5; EXPRESSED IN LUNG, SIGNAL = 3.7; EXPRESSED IN FETAL LIVER, SIGNAL = 3.7; EXPRESSED IN BONE MARROW, SIGNAL = 3.2; EXPRESSED IN HELA, SIGNAL = 4.1; EXPRESSED IN ADULT LIVER, SIGNAL = 3.9; EXPRESSED IN HEART, SIGNAL =   3; EXPRESSED IN BRAIN, SIGNAL = 4.2
cccagctccactcacttgacagtcactgtgatttgagaatgctgcttaacctctctgggccatagtttcgtaagctgtaagacaggaataattaaatgcatctcatcaagctgttttgacgatcatgtgaaatagtatttgtaaatcagctatacctctatttagtaagtttctctctaaatatttccctttttgtaaggaagcccggctatggagggcctggtccccatatccaagaagcaccaccctatctcctggtccctcctcaggccacagaccccaagcccacgtgccatcttctctttagaccttgacctcccgccgggctcccctgggcgctgcaccccaaagtcttccgagcctgcccctgccactctcactggggtccctcgaaggacagccaagaaggcagagtctctctccaactcctcccactccgagtccatccacaacagccccaagtcatgccctacacct

SEQ ID NO: 5297 - DNA, 485 bp, Homo sapiens
  MAP TO AC006487.7; EXPRESSED IN PLACENTA, SIGNAL = 1.6; EXPRESSED IN LUNG, SIGNAL = 1.3; EXPRESSED IN HEART, SIGNAL = 1.9; EXPRESSED IN BRAIN, SIGNAL = 2.3; EXPRESSED IN HELA, SIGNAL = 3.2; EXPRESSED IN FETAL LIVER, SIGNAL = 2.3; EXPRESSED IN BONE MARROW, SIGNAL = 2.1; EXPRESSED IN ADULT LIVER, SIGNAL = 2.7
agggagaaacttttggagcccgctcatgtctggggccaggagttgtggacactagagggttatactcaggcaggcagtggctccatgaggcctctgatattgttcctaggaaaaggaagggccagtgcatcctgccctcatgaagaatctctgttgctcgtggtggtgcagatgtaggaagataggtgttggaagccacggccatggcagccgtggtggtggtgactatggtgatcatagtgatggtgataactgtggccgtgtcatggtggtgatagttgtgattctggtagtgacactgatggcagtggcataatgatgatggtcataatggtgctggtgttgttagaagtggtggtgatggtggcagtggtggtgatgatggtgatggtactggtggtggtcataatgatgatggtcatagtggtactagttttggtatagatgcttctggtcatggtgatagtgggagtctcagcaaagga

SEQ ID NO: 5298 - DNA, 487 bp, Homo sapiens
  MAP TO AC005318.1; EXPRESSED IN LUNG, SIGNAL = 3.2; EXPRESSED IN PLACENTA, SIGNAL =   3; EXPRESSED IN HEART, SIGNAL =   3; EXPRESSED IN FETAL LIVER, SIGNAL = 2.8; EXPRESSED IN BRAIN, SIGNAL = 2.6; EXPRESSED IN BONE MARROW, SIGNAL = 2.5; EXPRESSED IN ADULT LIVER, SIGNAL = 3.1; EXPRESSED IN HELA, SIGNAL = 2.3
gaaactggacagagggcaagaactctgtcacttgtcaccatgcctaacaatgcaatggagaaaaccagtaactaagcacaaaaatagcctggagctcccaggaagagctgcctactccgagacaggtgtgcatggtgggtgccccctgctgatggtgtgaggtcagatccaggtcactgagggagatgggagacctgaaacagggggtgaggggacgcagcttccagaggagggctgctggagcgtgccagagtccggaggcctcactccaggtcggcctccacctgctccgtgtcagagcactgcaacttgttacgctcccattggcaaatggcgttggcgtactccaccaccagcttatccatccatgtcaggggctcggggaacagcacagagccctcaaagaagcccaagtggcccccatgcagaggcagcacaaacatgacgttctctcgtttctctgcaggggaaacgcagctgagtgagt

SEQ ID NO: 5299 - DNA, 473 bp, Homo sapiens
  MAP TO AC005099.1; EXPRESSED IN LUNG, SIGNAL = 1.6; EXPRESSED IN FETAL LIVER, SIGNAL = 1.9; EXPRESSED IN BONE MARROW, SIGNAL = 1.7; EXPRESSED IN PLACENTA, SIGNAL = 1.6; EXPRESSED IN HELA, SIGNAL = 1.8; EXPRESSED IN HEART, SIGNAL = 1.9; EXPRESSED IN BRAIN, SIGNAL = 1.9; EXPRESSED IN ADULT LIVER, SIGNAL = 1.8
ccgcattgctctaatggaacagcacagtgcctgtgaacacccagccgtgtgaagtggtggtcttcctgggagccagctgcctgtctttgctcgccatcggcagggccctcaggacctgggcagcctgtagaggagatcctaaggttgactcactgaggaataatcaagcagattcccaggtcctctcactttccacaggagacatgctcagatcagacacgtacaaggttgacacttccctctagggaaactaggaaaagtctcaacgggaaaggcctggaggggaacacacctccaggtggccacagtctctaaggagccgaacctttaccttccgctcactgacataacagatgtgtgtgactgtgggggtgggggagacgggatgggctctgcaggtctctggaggaatacagaagaatggggcgtcagtggcagcctgacaggcctcgacaggtcacccagcatgtaag

SEQ ID NO: 5300 - DNA, 480 bp, Homo sapiens
  MAP TO AC005237.2; EXPRESSED IN FETAL LIVER, SIGNAL = 1.7; EXPRESSED IN BRAIN, SIGNAL = 1.9; EXPRESSED IN BONE MARROW, SIGNAL = 1.5; EXPRESSED IN PLACENTA, SIGNAL = 1.6; EXPRESSED IN HEART, SIGNAL = 1.9; EXPRESSED IN ADULT LIVER, SIGNAL = 1.7; EXPRESSED IN LUNG, SIGNAL = 1.9
tggtccttgggttctgagactgttcctcagcaccccaggaaatctgagggttgggaatgagctcaagacagtcttggactcgccactattgtattctaccttcaagtaggatttccactggaagtcttagcagatacgtcactagccccacatcgcagagctgaagcccacatagctctgccccggtccaggcacctgctggctgcctggggcagcctgtcaactgcagtactcattgctgttctgtcctttccacaggcaatcgaaaatatcgacaccttaaccaacctggagagtttgtttttggggaaaaacaaaattactaaacttcagaacctggatgcgctcaccaacctgacagtcctcagtatgcaggtacggagcttcctgagccgcccttccctgcgagccctggcagggccagcgctgctggacacaatcttagtttttatccttcactgccttcacaattggcacttc

SEQ ID NO: 5301 - DNA, 411 bp, Homo sapiens
  MAP TO AC005138.1; EXPRESSED IN LUNG, SIGNAL = 1.7; EXPRESSED IN FETAL LIVER, SIGNAL = 1.8; EXPRESSED IN PLACENTA, SIGNAL = 1.7; EXPRESSED IN BRAIN, SIGNAL = 1.6; EXPRESSED IN BONE MARROW, SIGNAL = 1.6; EXPRESSED IN ADULT LIVER, SIGNAL = 1.6; EXPRESSED IN HEART, SIGNAL = 1.5
cctcttccatcctgcttcaggaaagccatcccaagctctcactttattcattgtaaaatatgtagtgtggaaattcagaaagataatgagatataatgaagttcactggtgtcttagaaaacatttttaaaatcttatcaaaacttgaaattctatgtgaaatcagtgtttatttgtccaaaaaagattttagccacactagtcatgaaatggcttgtctatttgtgtgagtgtcatataaataggcttcattcattttttttttttgaatagacataacttggaattctggattgttgggaagaaaacactatttgactcaggtggggtacagttgaatgatgacagccatagagatgatattgatgatgatgatgatatctatttgttaggtgttcagtctgtgccaag

SEQ ID NO: 5302 - DNA, 427 bp, Homo sapiens
  MAP TO AC005951.1; EXPRESSED IN BONE MARROW, SIGNAL = 3.4; EXPRESSED IN PLACENTA, SIGNAL = 3.9; EXPRESSED IN ADULT LIVER, SIGNAL = 3.7; EXPRESSED IN BRAIN, SIGNAL = 3.6; EXPRESSED IN FETAL LIVER, SIGNAL = 3.3; EXPRESSED IN HEART, SIGNAL = 3.6; EXPRESSED IN HELA, SIGNAL = 3.7; EXPRESSED IN LUNG, SIGNAL =   4
ctgtgtcctcaaaactccaggtagtacttgtctatgaaatttctctgtaaaaagtagaacttttcatccatgacaatgtcctctaattatgcaaccacagcatcaaattctgcatcagaggcggagaaggacagattgaagctctcttcttctaaagtacccatggccgcctctgctgccatcaccgccccctagtgggcaagcgggcgaattgggctcctgccctgtccaactcttacagagggcacggcggtcggccagctgggagcaagcctcgtggcccaggctgcccccccgctcactgcctggccaggtgagcacctgcatgtctagcttggcctcacgctccagctgtggtcacgcagcgcaccagctgggcctcttcatctcaccaggctgctccgcacgcaccaccagagatgatgat

SEQ ID NO: 5303 - DNA, 471 bp, Homo sapiens
  MAP TO AC004227.1; EXPRESSED IN PLACENTA, SIGNAL = 4.8; EXPRESSED IN HEART, SIGNAL = 4.7; EXPRESSED IN BONE MARROW, SIGNAL = 4.3; EXPRESSED IN ADULT LIVER, SIGNAL = 5.7; EXPRESSED IN LUNG, SIGNAL = 5.2; EXPRESSED IN HELA, SIGNAL = 5.5; EXPRESSED IN FETAL LIVER, SIGNAL = 4.6; EXPRESSED IN BRAIN, SIGNAL =   4
ataggcaggcccattcaaaggaggtcatgttgatagagctcagtagaccatgttatttctggccatactacaccaaattttccattaaaagtaataaatatatgacaaatacttttaaaaataaaccatatgcagatactacctctaaaaaaaggctcagaaaaatatttccttaaactgatcatgctttctggaagatgagaacaaaagcagcaggcataatacttttaagaaggcttgaatataagtggttggttatttccttacctgatcaccacgtttcagtcctgaatcagcagctttgctaccaggttctactccttcaacaaaaataccaaatcccttctcactccctccattaaggctgaattgtagaggggactcgcgggaagccttttgcagcacaacctgtctccacttagcctttgcagcacaggcaatattcaataaccggagatgaccattcatctt

SEQ ID NO: 5304 - DNA, 480 bp, Homo sapiens
  MAP TO AC004491.1; EXPRESSED IN BRAIN, SIGNAL = 5.4; EXPRESSED IN BONE MARROW, SIGNAL = 5.4; EXPRESSED IN ADULT LIVER, SIGNAL = 5.9; EXPRESSED IN LUNG, SIGNAL =   6; EXPRESSED IN HELA, SIGNAL = 5.4; EXPRESSED IN HEART, SIGNAL = 4.9; EXPRESSED IN FETAL LIVER, SIGNAL = 5.5; EXPRESSED IN PLACENTA, SIGNAL = 5.3
aagaacccagtaacctgcccaggtaagtggtagagacagattttgaaccccaggacccaaggccttgaccactctgaaatactgttcctagatcaaagtgaggggccctttgagatttgacttctctgagcctcagtttctccagcttgaacatgaaaataggaatcacacttttctgagaattgcatgagacacggtgctctgtcacctccagccttgttccagttgatgttacttgggtagggctgagagggccttgtttattgtgggtagcatcaagtccacacccagggccatggccagagaactgcccatttgaccttgcctcccttactggagatttgttggatataagaggcagcatcttccctccaactactagaaaatctggcagaagtggatgagtgttcagtgctctgtagaccctctggctgacggctggatccacagttgagtagacctcaggatgatggtcaaggg

SEQ ID NO: 5305 - DNA, 462 bp, Homo sapiens
  MAP TO AC004937.1; EXPRESSED IN LUNG, SIGNAL = 7.9; EXPRESSED IN HELA, SIGNAL =   7; EXPRESSED IN BONE MARROW, SIGNAL = 9.5; EXPRESSED IN ADULT LIVER, SIGNAL = 8.9; EXPRESSED IN PLACENTA, SIGNAL = 9.3; EXPRESSED IN HEART, SIGNAL = 8.2; EXPRESSED IN FETAL LIVER, SIGNAL =  12; EXPRESSED IN BRAIN, SIGNAL =  12
gcttattaggaacatagattcctggactctcccgagtgtaaacacctcactaccctgaccctccaccacacacacacacacacacacacacacacacacacacacacacacacacacctgtgttcatggaacagaactctggggacttggaaggttactaatgtctacaggttgagtatttcctatcagaaatgcttgggaccagaagtgtttcagattttggaatttttaggactttggattttttcaaattttggaatatttgcattatacttactggctgaacataccaaagccacaaatttgaaattcaaaatgctccaataagcatttcttttgaacatcatgttggtgctcacacaggttcgcatttcggagccattcaactgaacttggcatgttcatctgtaatatataaatatgtatcaggcacatagatacatttcctatggaaactcactg

SEQ ID NO: 5306 - DNA, 369 bp, Homo sapiens
  MAP TO AC005478.1; EXPRESSED IN BRAIN, SIGNAL =   6; EXPRESSED IN ADULT LIVER, SIGNAL = 5.4; EXPRESSED IN PLACENTA, SIGNAL =   6; EXPRESSED IN LUNG, SIGNAL = 5.7; EXPRESSED IN HELA, SIGNAL = 5.7; EXPRESSED IN HEART, SIGNAL = 5.4; EXPRESSED IN BONE MARROW, SIGNAL = 5.8; EXPRESSED IN FETAL LIVER, SIGNAL = 5.5
tcagtctagtctgggggcactaattggaatgaccttaatcgtctttcctctttgggctttgctttgctttgtagtgagggaaatgagctggatggaggagataatggacttttactcttttaaagcctgtaaactgggtgtgctaacattagtaggacttggggaaaaaaattatcctctcaaagctgggggaagcgttcactgcttctaatttatggctgtgattcctcccttttagatggctcggactcaaaagaacaaggccacagcacaccacttagggctgcttaaggctcgtcttgctaagcttcgtcgagaactcattactccaaagggtggtggtggtggaggtccaggagaaggtttgtg

SEQ ID NO: 5307 - DNA, 473 bp, Homo sapiens
  MAP TO AC004217.1; EXPRESSED IN PLACENTA, SIGNAL = 6.4; EXPRESSED IN LUNG, SIGNAL = 7.3; EXPRESSED IN HEART, SIGNAL = 5.8; EXPRESSED IN FETAL LIVER, SIGNAL = 5.9; EXPRESSED IN BONE MARROW, SIGNAL = 6.4; EXPRESSED IN ADULT LIVER, SIGNAL = 5.8; EXPRESSED IN HELA, SIGNAL = 6.4; EXPRESSED IN BRAIN, SIGNAL = 6.6
aatcccaattttcatggaagcattaacagaaaagccaaaaggggaacaattccatcagcaaagagctggctttacagtatacgttttccatttgattgtaattaaaataatttttggcgttgactattttgggatatcattaaacatattttcttccttagatgactttggtgaaagtaatatttacccacttctccatcgtctttttccttagattttaacctttgagaccaagaacccgtcggaattagcagaacgtttgcgctctgtttgtgggaatcagagcaatgcctatgcccggctgctggaataccgcctgaatgccttgcgaggactgtggaatgcccagcgccagctggccttagaagaacagcatgaaagggaaagttcaggtgatgaggaaactttggccctgctcaaacgccagggcttgttgcagcaacctgagcaagcgcccttcacatcgaggatgg

SEQ ID NO: 5308 - DNA, 482 bp, Homo sapiens
  MAP TO AC005544.1; EXPRESSED IN ADULT LIVER, SIGNAL = 1.5; EXPRESSED IN PLACENTA, SIGNAL = 1.7; EXPRESSED IN LUNG, SIGNAL = 1.9; EXPRESSED IN HEART, SIGNAL = 1.8; EXPRESSED IN BRAIN, SIGNAL = 1.8; EXPRESSED IN HELA, SIGNAL = 1.7; EXPRESSED IN FETAL LIVER, SIGNAL = 1.7; EXPRESSED IN BONE MARROW, SIGNAL = 1.7
agctattccacttctcatggctgttttatgtgtctataagatagggacgtttggttggatgtgttgtgatttcagcattctatggcagaaggtgtctgtccttgtggctatactgtccttgagttcctggagatgagagccagttctgacacactgagtgaatgaggcacatgaacattgctgggctcatccttaaatctgtgtcactgttctctgcttttagcgccacccaagactgtcaaaccccctgaggatcaactgaagtcggagaacctcgaggtgtccagttccttcaactacagtgtgctgcagcatcttggccagtttccaccccttatgcctaacaagcagatcgcggagtcggccaatagcagtagcccccagagctctgcggggggcaagcccgccatgtcctatgccagcgctctgcgggcccctccaaagcccaggccccctcctgagcaggccaagaagagtagcga

SEQ ID NO: 5309 - DNA, 462 bp, Homo sapiens
  MAP TO AC004774.1; EXPRESSED IN LUNG, SIGNAL = 1.8; EXPRESSED IN HELA, SIGNAL = 1.7; EXPRESSED IN FETAL LIVER, SIGNAL = 1.6; EXPRESSED IN BRAIN, SIGNAL = 1.9; EXPRESSED IN BONE MARROW, SIGNAL = 1.7; EXPRESSED IN ADULT LIVER, SIGNAL = 1.4; EXPRESSED IN PLACENTA, SIGNAL = 1.6; EXPRESSED IN HEART, SIGNAL = 1.7
tagttcgaacctccacagggctctcctactaaaaatccctaaaatgctggcccgagaaactctctttgttggagggtctgagtcctactcccttctgccgcgtgcgcccccactgccgtgaaccgctgtgacccccaatctaccaccccatctcgcgcccccagcgtcctagtcgccctgtatctgcccagccttccccctgtccatgtacctggctggttggtggcgcttgggacgcggttgtaggcgccgccgtactggtggtaggagctagcgtagctatagtcggcataagctttggctgggtagctcccggcggagccgttcacgccgtgatactgatactggtaggggttgagagctttgccataggaagccgaggtaggagagcagtagccgtgcggggctccccccgtagggctgtagtagtcagaatcggtagctgaagactcgggcaaagtt

SEQ ID NO: 5310 - DNA, 483 bp, Homo sapiens
  MAP TO AC002042.1; EXPRESSED IN HELA, SIGNAL = 3.4; EXPRESSED IN HEART, SIGNAL = 3.1; EXPRESSED IN BRAIN, SIGNAL = 4.1; EXPRESSED IN PLACENTA, SIGNAL = 3.7; EXPRESSED IN LUNG, SIGNAL = 3.8; EXPRESSED IN FETAL LIVER, SIGNAL = 2.7; EXPRESSED IN BONE MARROW, SIGNAL = 3.9; EXPRESSED IN ADULT LIVER, SIGNAL = 3.2
cacctccatcccccaatgccgccagtagcatatacctgatagtgccctaacctgtcctcctccatgggcactgcagccccagaaagtgcccataacccaccctccctgccacgggaagtgcagccctgtacagtgctaccaaccagtgcccctaatgcaggcaatgacaccctggatagcacccccaacccaccccacactgtgaaaggtgcagccctggatagcccctgtcctaccactctggtcgtgctgcagtctctgtcaccgccaccatcaaccacagtgaggcaagccagtgggccacaggctctagcactcagcagacagacatggagcagctctcgccgatgaccagctccaccactctgaccacactgctgtctccgtggccatcttctttgactacaaaggaataaaactagatatcaataagaagagtaattttggaaacaatacaatcacatggaagttaaacactaccca

SEQ ID NO: 5311 - DNA, 473 bp, Homo sapiens
  MAP TO AC005962.1; EXPRESSED IN PLACENTA, SIGNAL = 5.2; EXPRESSED IN HEART, SIGNAL = 5.5; EXPRESSED IN LUNG, SIGNAL = 6.5; EXPRESSED IN HELA, SIGNAL = 5.3; EXPRESSED IN FETAL LIVER, SIGNAL = 7.4; EXPRESSED IN BRAIN, SIGNAL = 6.2; EXPRESSED IN BONE MARROW, SIGNAL =  19; EXPRESSED IN ADULT LIVER, SIGNAL = 5.2
atgagcctgggtgagtcaaggagggcttcctggaggaagggagttttaagcaaggttttgaggaggtggaagatgacggagaggagtgagtctgctattgagggggccccatgtcactgtctcctcttccatctcagatcccacccaatgacccccgcatcaagaaccagcgtgactgcatccctttcttccgctcggcaccctcatgcccccaaaacaagaacagagtccgcaaccagatcaacgcgctcacctcctttgtggacgccagcatggtgtatggcagtgaggtctccctctcgctgcggctccgcaaccggaccaactacctggggctgctggccatcaaccagcgctttcaagacaacggccgggccctgctgcccttcgacaacctgcacgatgacccctgtctcctcaccaaccgctcggcgcgcatcccctgcttcctggcaggtcagacagggaggaag

SEQ ID NO: 5312 - DNA, 468 bp, Homo sapiens
  MAP TO AC004828.2; EXPRESSED IN PLACENTA, SIGNAL = 3.2; EXPRESSED IN LUNG, SIGNAL = 3.7; EXPRESSED IN FETAL LIVER, SIGNAL = 3.6; EXPRESSED IN BONE MARROW, SIGNAL =   3; EXPRESSED IN HELA, SIGNAL =   3; EXPRESSED IN HEART, SIGNAL = 2.9; EXPRESSED IN BRAIN, SIGNAL = 3.4; EXPRESSED IN ADULT LIVER, SIGNAL = 3.2
acatacatgccaccatgcagacagtgtgagaccctttgtcaaatctagttgggatcaagtgatggcatcaaaatggaggagagatcccagaagcaggcagtgtcctggaatcataaagactatctgtgtaagaatgaaccagccattcctattatagatggagaaactgagccaattcacatcagtgctcagcacggtgcttggcaaatagtaggtgctcaatatatgggtttcagagtgaagacggacgcatctggagcaatgctgaagaggcatatgttgaaaacttctctgcagaatggttctccttctgctgagagcaagagagaaaaatctgctcacttccgtatttgcctctgtttaatccctcagcatccgcatgggagcagtgagctcttttctgctgagagcagcagcagccagagccaaagcttggacaacagctaccgggtcttaaggatggttccc

SEQ ID NO: 5313 - DNA, 448 bp, Homo sapiens
  MAP TO AB019441.1; EXPRESSED IN LUNG, SIGNAL = 0.96; EXPRESSED IN PLACENTA, SIGNAL = 1.3; EXPRESSED IN HEART, SIGNAL = 1.8; EXPRESSED IN BONE MARROW, SIGNAL = 0.56; EXPRESSED IN ADULT LIVER, SIGNAL = 0.48; EXPRESSED IN HELA, SIGNAL = 3.5
acaaccacatccctcctcagaagcccccagagcacaactcctcaccatggactggacctggaggatcctctttttggtggcagcagccacaggtaaggggctgccaaatcccagtgaggaggaagggatcgaagccagtcaagggggcttccatccactcctgtgtcttctctacaggtgtccactcccaggttcagctggtgcagtctggggctgaggtgaagaagcctggggcctcagtgaaggtttcctgcaaggcttctggatacaccttcactagctatgctatgcattgggtgcgccaggcccccggacaaaggcttgagtggatgggatggagcaacgctggcaatggtaacacaaaatattcacaggagttccagggcagagtcaccattaccagggacacatccgcgagcacagcctacatggagctgagcagcctgag

SEQ ID NO: 5314 - DNA, 450 bp, Homo sapiens
  MAP TO AC002538.1; EXPRESSED IN PLACENTA, SIGNAL =   1; EXPRESSED IN HEART, SIGNAL = 3.5; EXPRESSED IN BONE MARROW, SIGNAL = 0.76; EXPRESSED IN ADULT LIVER, SIGNAL = 1.9; EXPRESSED IN LUNG, SIGNAL = 0.67; EXPRESSED IN FETAL LIVER, SIGNAL = 1.7; EXPRESSED IN BRAIN, SIGNAL = 0.94
cccagtttctagaatagtaagccccccaaaaatatctttcctgaatgattagatgaaatccattcttccatgggggtaatcccatagcaaaataaactcctacatctttaacctttctactctatatttctctgcctcactgtggtgattacgacctgattctcccagaggtaaaatttcttctgcagatcttccaaatccatgagtttatctgcctggggtaaaacctcttttccctttgaagttcctgcatttgactctcctctgccctgccatgttgtcctcatcaatccactccccagtacccactcttccttcatcaaggactttggcatgtggctttccatcttcattgccatcacagttcctaccaacactctgcgagtctccaataggcacagggatgacacctctgatgcccggccctcttggttcctccacactctcagc

SEQ ID NO: 5315 - DNA, 487 bp, Homo sapiens
  MAP TO AC004702.1; EXPRESSED IN ADULT LIVER, SIGNAL =  21; EXPRESSED IN PLACENTA, SIGNAL =  27; EXPRESSED IN HELA, SIGNAL =  22; EXPRESSED IN HEART, SIGNAL =  20; EXPRESSED IN FETAL LIVER, SIGNAL =  21; EXPRESSED IN BRAIN, SIGNAL =  24; EXPRESSED IN LUNG, SIGNAL =  29; EXPRESSED IN BONE MARROW, SIGNAL =  23
cagcaaggccctgtctctacaaaaaacttggatacatggcattatacatttatccaaacctacagaatgcacaatgccaagagtgaacctcaatgtaaaccacggactctgagcaatgttacatcggtgtgggttcactgattggaagatgttgataatgaggaggctgagtgtgtttgggaacaggagtacactataggaaaacttgtacttttcactcaattttgctgtgcctaaaactgctctttaaaaaagagtgtttatttttttagaaggcagtaaaagcataataaagtgtttacctttgagaagagggacaagaaatgggaaggggtagggcagcagggcagcagcagtcttgcttttcataataagctccttgtcctggttcattattttaacccctgtatatactactttgataatgaaaattaggaaaaagaaatatgaatgtttatgagtacagtgtggaaacaggcaattagca

SEQ ID NO: 5316 - DNA, 477 bp, Homo sapiens
  MAP TO AC004615.1; EXPRESSED IN PLACENTA, SIGNAL = 1.7; EXPRESSED IN LUNG, SIGNAL = 1.6; EXPRESSED IN FETAL LIVER, SIGNAL = 1.4; EXPRESSED IN BRAIN, SIGNAL = 1.3; EXPRESSED IN BONE MARROW, SIGNAL = 1.5; EXPRESSED IN ADULT LIVER, SIGNAL = 1.4; EXPRESSED IN HEART, SIGNAL = 1.4
cccttgctacatgagagcatcattttaaaagatactgctgcctgggccccacatccagtgcagctgacctaactggtctgcagtggtgtccaggtgtactgtttttgaaggatgctcagatggctttcctggctgaagatccatggctgcatacacagcacactctgtttaaccagggattggtttgtgagaccctctgaccttgtttccttttcatcctgtgaccttcatagattacggaaccattaagaaagtgcgggtacccctgaatcagacctcaagcagctgtttgctggaagagattgagctcttccctgagaggcggagggagcccatcaggagcctgcagatcctgcacagccagagtgtcctgttcgtggggctgcgggagcacgtggtcaagatccccctgaagaggtgccagttctaccgcacacgcaggtagggcatctccggggtcaggatgcactggtgtgt

SEQ ID NO: 5317 - DNA, 467 bp, Homo sapiens
  MAP TO AC004957.1; EXPRESSED IN ADULT LIVER, SIGNAL = 3.2; EXPRESSED IN PLACENTA, SIGNAL = 3.6; EXPRESSED IN LUNG, SIGNAL = 3.6; EXPRESSED IN HELA, SIGNAL = 3.1; EXPRESSED IN HEART, SIGNAL = 3.1; EXPRESSED IN BRAIN, SIGNAL = 3.1; EXPRESSED IN FETAL LIVER, SIGNAL = 2.7; EXPRESSED IN BONE MARROW, SIGNAL =   3
cgagcttcaatctcacctccgctagctgtttaactatgaactattatctgacatcaaatatatcatcaaatgtaaaatgtaaatagtaattctctcaggtttataacagtcaataaaatagcactttaaaagtgccaaagataggactagcatggatattatataaaataattttgaatgggaagagatgagagatggggagatcagttagtaaacaataaaatggtggcaataaaccagagatgaggtaatgaagacctataggaaaatggtaaccatagaaagaacaaggtcaacagatattttcaaggaagtaaaagctcttagaaatagattagataaaggagaggaagaagaggaaggaatcaaagataactccaaggtaactgggtggatgaagttaggaaagttaaaatagataaaaatcagaaaatggatattgaaggacaggtttgaaagaagaaaca

SEQ ID NO: 5318 - DNA, 493 bp, Homo sapiens
  MAP TO AC006324.2; EXPRESSED IN PLACENTA, SIGNAL =  25; EXPRESSED IN HELA, SIGNAL =  24; EXPRESSED IN HEART, SIGNAL =  21; EXPRESSED IN BONE MARROW, SIGNAL =  22; EXPRESSED IN ADULT LIVER, SIGNAL =  20; EXPRESSED IN BRAIN, SIGNAL =  25; EXPRESSED IN FETAL LIVER, SIGNAL =  22; EXPRESSED IN LUNG, SIGNAL =  25
ttgaccccataaatcctttgtaacctgtaacttccctgtcactctctggctctcctcttctgctaagctttgtttcctggcaggaattaaaaccttctgccactgccatagctactgctgccactggaaccaccccagccatcttgattttgtggcttggcaaagtattggccttggccatcataggggccagagcttctgcctccaaagtttcctcccttcatggctccaaaatttaaagattgattgttgtaatttccaaaattatcatagttccactacctccaaaattgctttcactaccaccaccagagtcacttccacctcctccactgatacagctgttatagctgccactcccaccatagccactgccctggtttctataaccctgtccaccacttccatagcgtctgcttcctctggagtaactaggactgcctccaacataactaccatcgttatcaaatccattatagctatccccatcaaa

SEQ ID NO: 5319 - DNA, 475 bp, Homo sapiens
  MAP TO AC004595.1; EXPRESSED IN BRAIN, SIGNAL = 4.7; EXPRESSED IN ADULT LIVER, SIGNAL = 4.5; EXPRESSED IN PLACENTA, SIGNAL = 4.5; EXPRESSED IN BONE MARROW, SIGNAL = 4.2; EXPRESSED IN LUNG, SIGNAL = 4.9; EXPRESSED IN HELA, SIGNAL = 4.3; EXPRESSED IN HEART, SIGNAL = 5.4; EXPRESSED IN FETAL LIVER, SIGNAL = 4.4
ccagttcatagcagaagcaggacttaaacttcaggtcttttcgtctcaatcacatggtctttctctttgcattgtgtatttgataacgtttttaaataaaacaaagcattttgcaactagtgaaactgtacaaaaagtcatataatgtgaccagaagggagattattaaaaattataatttcacttaagcaaaatgtgtataacgccatttactgtttttctatgtaggtgaaaagagatttgaatgcccggaatgttctaaaaggtttatgcggagtgatcatctctccaaacatgtcaaaacgcaccagaataaaaaaggtggtgggacagctcttgccattgttacctcgggagaactggactcatctgttacagaggtgcttggctccccaagaattgtcacagttgcagccatttctcaagattcgaatccagcaactcccaatgtttcaaccaacatggaagaattctg

SEQ ID NO: 5320 - DNA, 460 bp, Homo sapiens
  MAP TO AC005971.5; EXPRESSED IN BRAIN, SIGNAL = 1.9; EXPRESSED IN BONE MARROW, SIGNAL = 1.8; EXPRESSED IN PLACENTA, SIGNAL = 1.9; EXPRESSED IN LUNG, SIGNAL = 2.2; EXPRESSED IN ADULT LIVER, SIGNAL = 2.1; EXPRESSED IN FETAL LIVER, SIGNAL =   2; EXPRESSED IN HEART, SIGNAL = 2.2; EXPRESSED IN HELA, SIGNAL = 2.1
ggagttcccaacggaaatgcaggtactgaatacaaccaactgcaactgtttctctgctcctcaatcctgctggcgtagtacgcgagctgccgacgtcccccaacccaccaggtaagccggccgctcctgtccctaggctgtgaggggttcagaggtaagaccttcggtgtattcacttagctccctacggaaaacttcgagaagaaggcgactgagatcggttagcacttaaatccctttcaaagccccggctcccatcgcccctcctatggcctcctacctgcagagaagcaaagcaggtacacccagtgccttaggcgggccaagcctagcactgtgggagcaaaaaacatggcttcatcgtcagggtgcgctatgaccagcagggtccggctttcggctcccagccgtcctccctgctcccgactcttcattcgttctgaggagtcccaaacccaga

SEQ ID NO: 5321 - DNA, 454 bp, Homo sapiens
  MAP TO AC002091.1; EXPRESSED IN PLACENTA, SIGNAL = 1.9; EXPRESSED IN LUNG, SIGNAL =   2; EXPRESSED IN HEART, SIGNAL = 1.8; EXPRESSED IN BRAIN, SIGNAL =   2; EXPRESSED IN BONE MARROW, SIGNAL = 1.9; EXPRESSED IN ADULT LIVER, SIGNAL = 1.9; EXPRESSED IN FETAL LIVER, SIGNAL = 1.9
cagatctgcacccatcctgcagcttggagccaagccactctgagcccagcctagatcaggtggtccctagatgtcctccagatgcatgagcaagaacaaatgatcggagacttagttccctgaattgaaggtatgcttcattgtttgcaatagccagctgatgcagagctggaacagctcacagttctttctccctccatcctgaatagtgttctggcaacctggtacttacctccctctcccaagccacaggtgtcctctaccatccctccacttcttcttctctctttccttatcacccaagtctaaaggcagtcccagatccaaagggccattattgagctctcttcccctcctctcagctgcatggtaggtccaggatccactgtgccacccatccgcagcaacggcctcaggcccgtcccctccctggagcttggggtacaggaaacag

SEQ ID NO: 5322 - DNA, 440 bp, Homo sapiens
  MAP TO AC002542.1; EXPRESSED IN LUNG, SIGNAL = 1.9; EXPRESSED IN HELA, SIGNAL = 2.8; EXPRESSED IN HEART, SIGNAL = 3.2; EXPRESSED IN FETAL LIVER, SIGNAL =   4; EXPRESSED IN BRAIN, SIGNAL = 3.2; EXPRESSED IN BONE MARROW, SIGNAL = 3.9; EXPRESSED IN PLACENTA, SIGNAL = 4.2; EXPRESSED IN ADULT LIVER, SIGNAL =   5
tccttccaggtagtatgatgatgtatttgttggagacaaaatatttgccctagcctttttactaatatttcagatgagattctgtggaggagaagcatctccccaaatgtccttgttttatagtaaataattctaccacgaggatccttatccataaatctatattcatgtttattttgtgctagatacagatcttgcaatattcatgaagctttaagaagagcactttgaatcttaaaagagattctctgagcaggggttggcagtggtgaggtccaggtagttataatagccataagagcagggattatggttattgagctcaccagtgtgtttcaagccatgatctggagtcaaggtgttagtgattcctctaaggggagaaaaaataattacaggaagcataattttgtagttaatgccatatgaagtgacagcca

SEQ ID NO: 5323 - DNA, 452 bp, Homo sapiens
  MAP TO AC004228.2; EXPRESSED IN PLACENTA, SIGNAL = 2.7; EXPRESSED IN HEART, SIGNAL = 2.4; EXPRESSED IN FETAL LIVER, SIGNAL = 2.3; EXPRESSED IN BRAIN, SIGNAL = 2.3; EXPRESSED IN BONE MARROW, SIGNAL = 2.4; EXPRESSED IN ADULT LIVER, SIGNAL = 2.3; EXPRESSED IN HELA, SIGNAL = 2.5; EXPRESSED IN LUNG, SIGNAL = 2.9
aaagctcccaccctctctgggctgcagggtctccacagtaaagcagggaggtggacgaagcctggtagcttctgggatcccacaagtgacaaaaagttgtcacagtgggagggacagttcaagttgggcttggtgcagtgagaaaccctggctggaaggggaggggctgctgtggagtttccccctgctcccagggccctgcaggtcccctccctatcccccaggactgatccagccccaactcgcggtaggcctccaacccaggccagttcgagagcgacagcgatgtgttgtggcagcgggcacaggtgcccgacaccgtcttccaccacggccgcgtgggcatcaacacagaccggccggatgaggcgctggttgtgcacgggaatgtcaaggtcatgggctcgcttatgcacccctccgacctgcgcgccaaggaacacgtgcaggag

SEQ ID NO: 5324 - DNA, 473 bp, Homo sapiens
  MAP TO AC004801.1; EXPRESSED IN HELA, SIGNAL = 2.9; EXPRESSED IN HEART, SIGNAL = 2.9; EXPRESSED IN BRAIN, SIGNAL = 7.2; EXPRESSED IN BONE MARROW, SIGNAL = 1.7; EXPRESSED IN PLACENTA, SIGNAL =   4; EXPRESSED IN LUNG, SIGNAL = 3.3; EXPRESSED IN FETAL LIVER, SIGNAL = 1.7; EXPRESSED IN ADULT LIVER, SIGNAL = 2.8
ttttaacagcagagccccagcaacctagaagcgcctcacctagcctcttaatggagtgggaaggggcagggacttggaaattagaggctcaaaatgtaaagaaggctgatggcaagcctggggagaggcctgagaatgagggaagggctgagggctgtgaggagtcctcacacaaagaccctagcacaggtcttcggcagtgaacatgcccctggccctccgcagggtggagtccttggcgtcctcatatgggtgctccttggaggggatctccaggacagtagggatagagtgctggtgggtgtccagggcatgctgcaccatctctgcgatgtactggttgatgaggatgatgccagtgtcatcccggtttagaaattgccggaaagtgtcttcgatctcattgatggtcgtatccttctccaccaccaggaaattggggtggcagttcttgttaagctcccctatgctgc

SEQ ID NO: 5325 - DNA, 465 bp, Homo sapiens
  MAP TO AC005154.1; EXPRESSED IN PLACENTA, SIGNAL = 5.1; EXPRESSED IN LUNG, SIGNAL = 4.3; EXPRESSED IN FETAL LIVER, SIGNAL = 6.1; EXPRESSED IN BONE MARROW, SIGNAL =   5; EXPRESSED IN HELA, SIGNAL = 4.3; EXPRESSED IN BRAIN, SIGNAL = 5.4; EXPRESSED IN ADULT LIVER, SIGNAL = 5.3; EXPRESSED IN HEART, SIGNAL = 4.6
gatgatcaggtgcctgtgtgggtcctcaccaaacatctgaagatctgtcatgagccacagcatctagtggacccacctgtacagtgcaaattgaaggtttaaggattgcttttaagccttgatttgctttcctggtgccttctgttggaagggcctgtttctcaatatcagtggcctcccagctacagccacaacagtttttgcttctgtttcagtagatttactaatgtgggggtgagggtatgcttgtgtttttgcaggagatgaacgaaccatgtggatgccctcaagacgtgtacgaccatggaatgggagactggagggacccatggatcctaagcatggactgggttccccagtacgagccatgagccagctgaatctgaatgagaagatggaacgaggaccgaccggagtcttgatgcttaacagaccaatgctttctggctgagctcctctctaccc

SEQ ID NO: 5326 - DNA, 471 bp, Homo sapiens
  MAP TO AC005690.7; EXPRESSED IN PLACENTA, SIGNAL = 1.3; EXPRESSED IN HEART, SIGNAL =   2; EXPRESSED IN ADULT LIVER, SIGNAL = 1.4; EXPRESSED IN LUNG, SIGNAL = 0.69; EXPRESSED IN FETAL LIVER, SIGNAL = 4.1; EXPRESSED IN BRAIN, SIGNAL = 1.2; EXPRESSED IN BONE MARROW, SIGNAL = 1.6
gacttgtcttgggaatgtctccaagaacaatcaactgttccctttgaggaccatcaaaccactcctcatgcaacacacacacacaatcatacgcacacacgcatgcaagacaaatatgctgcttcctcatgagctatatcatgtctacgaaactcctctctatataaaactttctgcataattcccagtctggttcatttctactagtcaacacctgcagaggctccctgcccgccctaccttgtcctcaccttacctccccactaccactgccaccatctctccgcttatcacaaccaccatcaagagtgtttgtgagtttgtgtttttatgtctgtcttccccctcagccttcaagaagacaaggtcagtgttcatttcttgttgtatcctcattatttggagcagagtttgatacacagcagaagcccaattactacctgttgatagaaaaacaatattagctcgcca

SEQ ID NO: 5327 - DNA, 444 bp, Homo sapiens
  MAP TO AC005826.1; EXPRESSED IN LUNG, SIGNAL = 0.89; EXPRESSED IN FETAL LIVER, SIGNAL = 0.8; EXPRESSED IN BRAIN, SIGNAL =   1; EXPRESSED IN BONE MARROW, SIGNAL = 0.64; EXPRESSED IN ADULT LIVER, SIGNAL = 0.55; EXPRESSED IN PLACENTA, SIGNAL = 0.61; EXPRESSED IN HEART, SIGNAL = 1.9
atctgacagcccttcaaaccaatatactccctatctctctctctcctctggttcaatgacaagatttttggccaacttctttctactcagaccttgctattatttcctactaggcacccacaaacccttgcttgttaaactgatctccttcaagactcaagaaaagcgccatgcggctccctcctagggctctcctgccctctccttaccgatgctgagagtggttctgctggggaaccaccgcgcctgcagttcgtgcacctcttcccggagctgcgccagggaattacggacgaactggaaggggtcgagaagggtcttggccaccacctttagctccaagccttttcgctttttcagatttgggatcctccccggggaggacctcctggcgccccctggcagtttcccgccgcctagggccgacttttccacctccagctc

SEQ ID NO: 5328 - DNA, 465 bp, Homo sapiens
  MAP TO AC006227.1; EXPRESSED IN BONE MARROW, SIGNAL = 4.1; EXPRESSED IN ADULT LIVER, SIGNAL = 3.9; EXPRESSED IN PLACENTA, SIGNAL = 4.1; EXPRESSED IN LUNG, SIGNAL =   4; EXPRESSED IN HELA, SIGNAL = 5.3; EXPRESSED IN HEART, SIGNAL =   5; EXPRESSED IN FETAL LIVER, SIGNAL = 5.6; EXPRESSED IN BRAIN, SIGNAL = 4.3
cagccctgctcttgtcaacatcctgcccctgtgccaacactgctgcaagagcaaaactaggcatggagaacagcagaccttcccttgccttgagcaaccaacccagcctgtgtgaatgcacatagagggtacactccgacctggagccaccagggcccacccctgtgctaacaccatcaccagcatgaccatgcacccagtcaccagttgggggcccctacccatcccccagccataccacagttaccgctactgtgaatgtctacacataggcaggcacctcagcatctgccagcaccctgctgctgctgatgagcatgcaccctgccgtgctgttactgctgctgctgctgctgctggcacatgtgagcaaggacagaccccattgccaccatcctatgaaatgctttggttggcaccacacatcagaatgtagagatcagtggtctaggagcacctccccct

SEQ ID NO: 5329 - DNA, 464 bp, Homo sapiens
  MAP TO AC005544.1; EXPRESSED IN PLACENTA, SIGNAL = 1.9; EXPRESSED IN LUNG, SIGNAL = 2.2; EXPRESSED IN FETAL LIVER, SIGNAL = 1.9; EXPRESSED IN HELA, SIGNAL = 1.9; EXPRESSED IN BRAIN, SIGNAL = 1.9; EXPRESSED IN BONE MARROW, SIGNAL = 1.9; EXPRESSED IN ADULT LIVER, SIGNAL = 2.1; EXPRESSED IN HEART, SIGNAL =   2
ggacttattttccggttgaggtgaaattcatgcaagataaaagtaacccttttgaagggcacaatccagtggcttttggcgcattcaaaatgttgtgcaagcatccaaaacatttctgtcaccccaaaaggaagctctgtttggcagctgctccccattctccatccacccccagtcctgaacattgggactttacaagtcagttgcatgtggcgatgttatgtctgcattcccctctaggatgcacactgcctggcagtggggaccacacgagacaggcactcctgtgtccccagctcccggcccagcaccagcccgggcgggcggctcacctgcagccacgaagaggatgccggcactgaggacgatgttgttcttgcggctgtagatcctgccagcaccgatgcacaggccacccagcaggagcaggatggtgctgaggatggggaagacgctggaggctc

SEQ ID NO: 5330 - DNA, 462 bp, Homo sapiens
  MAP TO AC005316.1; EXPRESSED IN PLACENTA, SIGNAL = 0.97; EXPRESSED IN HEART, SIGNAL = 7.2; EXPRESSED IN ADULT LIVER, SIGNAL =   1; EXPRESSED IN LUNG, SIGNAL =   1; EXPRESSED IN FETAL LIVER, SIGNAL = 1.1; EXPRESSED IN BRAIN, SIGNAL = 0.78; EXPRESSED IN BONE MARROW, SIGNAL = 1.1
tgggagaaagaaaaacaaacatctcaattttctatgaaatgagaaaaggcttctgtcatttgattttccaaatagaaaagcgtgagtaccacccttcggaacaattcccctaacctcactgcttccctcaatgatcagtcttggtatttcacattttcaaacccaataactctttttttacgaattgaggctagtctttttaggacttctacaactttttaaaaattagaaataaataaataagctgaaacattcacttctagggggatgaaaagtcaaaactgaccagtctggcccaaggaacgctcacccaaagccccacataggagcacatggccaggctagaggccatgggccccgcatacctggtcaagaggttggtgatctgcaaggccagggcagcgcggtagcggtcctcctcccgcaccaggtagcgaacctcgtcatggatgctgatgcaga

SEQ ID NO: 5331 - DNA, 478 bp, Homo sapiens
  MAP TO AC002036.1; EXPRESSED IN PLACENTA, SIGNAL = 2.5; EXPRESSED IN LUNG, SIGNAL = 2.6; EXPRESSED IN FETAL LIVER, SIGNAL = 3.3; EXPRESSED IN BRAIN, SIGNAL = 2.7; EXPRESSED IN ADULT LIVER, SIGNAL = 2.3; EXPRESSED IN HELA, SIGNAL = 2.3; EXPRESSED IN HEART, SIGNAL = 3.1; EXPRESSED IN BONE MARROW, SIGNAL = 3.3
tcgtgctttagactgttcagagaaatcatgagtagtagtatccgaagcaatgggaacaaatctccatcaagatttcacttttgtttgggtgttgtgggaagtcagagcatggaaactccctcctgtaatgaggcatttaatagacgcttcaagcacattagacctactgtccaccatagtctcataattctaccctagaattatgcctgaaagtactcagtgtgtcaccagggtaataaagttaatactcaaaactggttttaaattctatgattacttttgaaatttctattgtctttttctcccataggccagtaatggtgacattactcaggcagtcagccttctcactgatgagagagttaaggagcccagtcaagacactgttgctacagaaccatctgaagtagaggggagtgctgccaacaaggaagtattagcaagtaggtaccatatatcctgtcttggtcctttgctg

SEQ ID NO: 5332 - DNA, 454 bp, Homo sapiens
  MAP TO AC004915.1; EXPRESSED IN LUNG, SIGNAL = 2.6; EXPRESSED IN BRAIN, SIGNAL = 2.1; EXPRESSED IN BONE MARROW, SIGNAL = 2.5; EXPRESSED IN PLACENTA, SIGNAL =   2; EXPRESSED IN HELA, SIGNAL = 2.1; EXPRESSED IN HEART, SIGNAL = 1.7; EXPRESSED IN FETAL LIVER, SIGNAL =   2; EXPRESSED IN ADULT LIVER, SIGNAL = 2.1
aggagatggagcctagtctggcctagtcttcatattcttcagtctccaccagcccaataaagtcagtgtctgactccctcagggtgcagcaagactttgactggtggccttttcatttcacagccctggccattttcttcactgctctgtggacactagtttttccagtgtcccttctttttgccttgtgcacgttgatccctacctagccttgagtgactttcaggtctctgtccaacctggccctttctgcatcggcatctgcatctgcatcccttgtgatgctagtttccctttctgtgagggctgccactagcagatcagcctttttcctgagcctccgctcagcctcccttttagcctcctggttgtggttaacgtacaccttggaggccacttctaaaagctgggtggcaatcatacctgcaaaatcctctagcttttgcagcttcca

SEQ ID NO: 5333 - DNA, 471 bp, Homo sapiens
  MAP TO AC005369.1; EXPRESSED IN LUNG, SIGNAL = 1.3; EXPRESSED IN BRAIN, SIGNAL = 1.1; EXPRESSED IN PLACENTA, SIGNAL = 1.6; EXPRESSED IN HEART, SIGNAL = 1.3; EXPRESSED IN BONE MARROW, SIGNAL = 1.2; EXPRESSED IN ADULT LIVER, SIGNAL = 1.3; EXPRESSED IN FETAL LIVER, SIGNAL = 1.5
agcttcaaccgttcttggagaaagttcttctgtggtgtggccacaaacacttgagtctctgtagtccgcaccttctcacctttggtctaataagagagaagaaagtaaaactaataaaaacctcctttccaccagcaattccaaaaatcaagacaaaaagaatcatcagaaaaccactccaactacacctccagaaacaggagggtttttaggtctccagccccacctcacacctatctaggacctaccttcatcctctgctccacaatgtagaagattcgctcaaccccaatgctgagtcccacacatggcaccttgtggcccttggggtcaaacatgcccaccagcccatcatagcgcccaccagcagccacactgcccacattcaggggctcctccccagcctgagttggggtctgcagcagcactgcttcatagatcactcctgtatagtagtctaggccccgagcc

SEQ ID NO: 5334 - DNA, 467 bp, Homo sapiens
  MAP TO AC002544.1; EXPRESSED IN PLACENTA, SIGNAL = 1.2; EXPRESSED IN LUNG, SIGNAL = 1.3; EXPRESSED IN HEART, SIGNAL = 1.3; EXPRESSED IN BRAIN, SIGNAL = 1.3; EXPRESSED IN BONE MARROW, SIGNAL = 1.2; EXPRESSED IN ADULT LIVER, SIGNAL = 1.2; EXPRESSED IN FETAL LIVER, SIGNAL = 1.3
gcccacaggtgaatgtgacctgcgtcctgaggatcccgagtatcaggagagctggcagaggaagtcatgcagaggcaaagccaggagccccgacagggagatccccagtgtgtcagagatgcaggtggccgccattgcaaactcccggtgctcatcactggtctgggagggcagagagcaggggtgaggcttcagtcccagacatccctgccctgggtgtccctggacaggccacccccagcccttgcccggccaatgctgacctccagggcgatgttgtggaaggtgttcacgtaggctgcgcctcccaggagcccctcatacagaatgatcaggaagacgaggtagatgcttggcagaaagccgaaccacacgtctgccagcaggaacaccaggttgaggcactgtgaacagggggagaggctaagcctgggaccagggcggggcagggaaggagaggtggcctc

SEQ ID NO: 5335 - DNA, 449 bp, Homo sapiens
  MAP TO AC004958.1; EXPRESSED IN ADULT LIVER, SIGNAL =  14; EXPRESSED IN PLACENTA, SIGNAL =  17; EXPRESSED IN LUNG, SIGNAL =  19; EXPRESSED IN HEART, SIGNAL =  12; EXPRESSED IN BRAIN, SIGNAL =  17; EXPRESSED IN FETAL LIVER, SIGNAL =  14; EXPRESSED IN BONE MARROW, SIGNAL =  16; EXPRESSED IN HELA, SIGNAL =  15
ttttatatagttccgtgcctcaggaataaacacacgaatatttcttgctgagtcaactattattttacaatatgcggtctgtgaaagtatatagggcattttgcctctatcctaagtagtactacaaagaaatacatttcaatgctaataacttaaactggtagggttgtaaggatttttattctgtaatattgtataatgaaatattttaaaaatagtaaaagtgtctgtgtaaaacatctgattctaaacatctttaataggtggaatccaagtcaaaaatgaaaaaaacagaccatctctgaaatctctgaaaactgataacaggccagaaaaatccaaatgtaagccactttggggaaaagtattttaccttgacttaccttctgtcaccatatctgaaaaacttcaaaaggacattaaggatctgggaggggtaagtgaaaacc

SEQ ID NO: 5336 - DNA, 464 bp, Homo sapiens
  MAP TO AC006101.2; EXPRESSED IN LUNG, SIGNAL = 1.5; EXPRESSED IN FETAL LIVER, SIGNAL = 1.5; EXPRESSED IN BONE MARROW, SIGNAL = 1.6; EXPRESSED IN PLACENTA, SIGNAL = 1.6; EXPRESSED IN ADULT LIVER, SIGNAL = 1.2; EXPRESSED IN BRAIN, SIGNAL = 1.6; EXPRESSED IN HEART, SIGNAL = 2.2; EXPRESSED IN HELA, SIGNAL = 1.8
cgttaaatcattgctgatggcttattttcttgcaattctcttggctttaataatattgctctatatagtttctccattccatgaccattcttgcttgcttctctagttctcatttatcttctttttctgctaatgtgattattcctctttcccaacagtgccactctgctaagttagaaaatagagacagatgcaccatgacaacacataaaattcggattacgttttccactaaatgaaagcattcaaattgagcaaggtttaaaggttttaatgtgttctactaaccaatctgtgcagaatgccctcttctggccatattctttgacctgactgcttcctttatgcgatctacttcttgctgatagcgtttgcgatcacgagatgcattttctttagcttctttcagtgctgattccaaagctttcactctctcagctgtagctcgaagtcgcttttccaac

SEQ ID NO: 5337 - DNA, 464 bp, Homo sapiens
  MAP TO AC000134.14; EXPRESSED IN BRAIN, SIGNAL = 1.7; EXPRESSED IN PLACENTA, SIGNAL = 1.6; EXPRESSED IN LUNG, SIGNAL = 1.2; EXPRESSED IN HEART, SIGNAL = 1.8; EXPRESSED IN BONE MARROW, SIGNAL =   2; EXPRESSED IN ADULT LIVER, SIGNAL = 1.5; EXPRESSED IN HELA, SIGNAL = 2.1; EXPRESSED IN FETAL LIVER, SIGNAL = 2.5
gggtttgggtagaggtgaggcctgtcccctttgggctgggggcagaacatgggctcagagttgggggactaagggcggagcctgggtccccacaagcggtccgaagtccccagtagttcagaggcctttgcgctgccgcttgaggaaagacagagtgtagtcactaggggtggacactttctgcttcttcatctgcacttgcgactgtgccgtgagttgcagcttgatggcgctcgagttgatcttggtggccaccagcagctccttcatgcccttcatcttctcactctggaaagtgagcactggaccctccggcggtggtgatgctgcgggtgctggcacctgagccgtgctgccaccttcagggcctcgggctgtgccagcgacagtcccaggaggcttccgggggggtcctgacactgcaccctggccggtgcccaggcccttgtccagtgctggcttct

SEQ ID NO: 5338 - DNA, 481 bp, Homo sapiens
  MAP TO AB019437.1; EXPRESSED IN PLACENTA, SIGNAL = 2.1; EXPRESSED IN LUNG, SIGNAL = 2.5; EXPRESSED IN HEART, SIGNAL = 1.8; EXPRESSED IN FETAL LIVER, SIGNAL = 2.1; EXPRESSED IN BRAIN, SIGNAL = 2.4; EXPRESSED IN BONE MARROW, SIGNAL = 2.1; EXPRESSED IN ADULT LIVER, SIGNAL = 3.2; EXPRESSED IN HELA, SIGNAL = 2.3
ttaagcacccacaggaaaccaccacacatttccttaaattcaggttccagctcacatgggaaatactttctgagagtcctggacctcctgtgcaagaacatgaaacacctgtggttcttcctcctcctggtggcagctcccagatgtgagtgtctcagggatccagacatgggggtatgggaggtgcctctgatcccagggctcactgtgggtctctctgttcacaggggtcctgtcccaggtgcagctgcaggagtcgggcccaggactggtgaagccttcggagaccctgtccctcacctgcactgtctctggtggctccgtcagcagtggtggttactactggagctggatccggcagcccccagggaagggactggagtggattgggtatatctattacagtgggagcaccaactacaacccctccctcaagagtcgagtcaccatatcagtagacacgtccaagaaccagttctcc

SEQ ID NO: 5339 - DNA, 370 bp, Homo sapiens
  MAP TO AC004804.1; EXPRESSED IN LUNG, SIGNAL = 2.5; EXPRESSED IN PLACENTA, SIGNAL = 2.5; EXPRESSED IN HEART, SIGNAL = 2.6; EXPRESSED IN FETAL LIVER, SIGNAL = 2.3; EXPRESSED IN BRAIN, SIGNAL = 2.9; EXPRESSED IN BONE MARROW, SIGNAL = 2.2; EXPRESSED IN ADULT LIVER, SIGNAL = 2.4; EXPRESSED IN HELA, SIGNAL = 2.6
agccattaaacacagattcctgtaagaccacagtaacaaactataaggtgctgtgcccacaggaaactttgggaagataacctaacagaactgactacaaaaagctttgtaacttactctccttttaaaggaagtctatgatattcatcaaggaggaagaagaaagaaacaagcagcttccccagaaagcaagctgaagcaagcaggatcagataaagaaccagtcatcttcagttgtaatatgctggtatctttcttttccttttcagttttttcattttttaaacacagaccattctccctcaagcaagaacacatattatataattactctgagccaccatccgcagccccagtcatctctcttcca

SEQ ID NO: 5340 - DNA, 500 bp, Homo sapiens
  MAP TO AC003025.1; EXPRESSED IN LUNG, SIGNAL = 1.7; EXPRESSED IN HEART, SIGNAL = 1.8; EXPRESSED IN FETAL LIVER, SIGNAL = 1.7; EXPRESSED IN BRAIN, SIGNAL = 1.6; EXPRESSED IN BONE MARROW, SIGNAL = 1.6; EXPRESSED IN PLACENTA, SIGNAL = 1.5; EXPRESSED IN ADULT LIVER, SIGNAL = 1.9
caataggattgtggccatcgcccccttgccagtgtttaaagaatctgaatggagcagtgtccactgtgaggctgagtccagagcagctccgacacccaccgggccacttacaagccaggccacgctccctaaacccaccgaccctgggctcctgccacgcttgtgtttatgtgattccaccagcaagccagggaggcagtaccactggccccattctgcagacgggaaaagggaagctctggtggggggctgcagtgggggtcacctgtcgcctgtgtgtgacctcgccactccctgccatacctgacagcaacaaagaagagcagcaccccagggacgccgtagaaggggaggtaggataagaagaagcgggcatagaagctggcggcccagagcaaatcctgcagaggagggcagaggcgataccgagaggtctccaggtgcccggaggtctggaggcctggtgggtgggaggaggacctcaggcatccaacccttct

SEQ ID NO: 5341 - DNA, 472 bp, Homo sapiens
  MAP TO AC004872.1; EXPRESSED IN LUNG, SIGNAL = 4.5; EXPRESSED IN HEART, SIGNAL = 3.5; EXPRESSED IN FETAL LIVER, SIGNAL = 5.8; EXPRESSED IN BRAIN, SIGNAL = 4.1; EXPRESSED IN PLACENTA, SIGNAL =   4; EXPRESSED IN BONE MARROW, SIGNAL =   4; EXPRESSED IN HELA, SIGNAL = 4.3; EXPRESSED IN ADULT LIVER, SIGNAL = 3.3
catctgagggcaaatttaagctttgccagcttggttttgggtgctaagcaaagtggctaatgtctaagctttattacatgtattttgctcttgccagaacgtaaaaaggtaatgttcctttataatgcagcttggcccccagcgcgatggtgtggcaagctgagtcactgaggtcactcagggaaagggaacccagaagcctggcatgctggcaaaagggtaagaatttcttaccagtcagattactggctttggtctctctgtgcaaacggttgaatgaatggtaaaaatgactgtttgtctcttctgtaaagttctgattaatgccaaaaagaattctgaggccagtatgaaactgatgtatttgtgctgtgaattcatttttctgtgttgaggggtactttaggaaaaaacatgaacttaggaccccataagcttgctgctcaagacggcccaataagcaggtcaataa

SEQ ID NO: 5342 - DNA, 411 bp, Homo sapiens
  MAP TO AC006010.2; EXPRESSED IN HEART, SIGNAL = 2.5; EXPRESSED IN HELA, SIGNAL = 2.4; EXPRESSED IN FETAL LIVER, SIGNAL = 2.4; EXPRESSED IN BRAIN, SIGNAL = 2.6; EXPRESSED IN BONE MARROW, SIGNAL = 2.3; EXPRESSED IN ADULT LIVER, SIGNAL = 2.4; EXPRESSED IN PLACENTA, SIGNAL = 2.5; EXPRESSED IN LUNG, SIGNAL = 2.5
cacctaaatgggagaggaggtagatgtgtaagcagtttgtgtagacagagaaactgaaaccgagaaaacagaagagaatggacatagactgaaatcagaagtgaaataagaagctaaagatcattactaagaagcattagtgaacaggccataagaaaacaaaggccctatttgaatctatttttgaatcaaccgaagtctgtagaataaaatatgaacagggatctgaacacgttccttttcctctgcctgggttatgctgttctcacctcctctagctgagatgtatttaagaaaaagtgagcactttgtggctatgttgattcttatgtatactgtgcctttccattttgaagtgagtgtatctggaatgtaagtagtttgttttaggacaggttttgatagccttca

SEQ ID NO: 5343 - DNA, 417 bp, Homo sapiens
  MAP TO AC002115.1; EXPRESSED IN PLACENTA, SIGNAL = 4.6; EXPRESSED IN LUNG, SIGNAL = 7.5; EXPRESSED IN HELA, SIGNAL = 6.4; EXPRESSED IN HEART, SIGNAL = 6.5; EXPRESSED IN BONE MARROW, SIGNAL = 5.9; EXPRESSED IN FETAL LIVER, SIGNAL =  11; EXPRESSED IN BRAIN, SIGNAL = 2.8; EXPRESSED IN ADULT LIVER, SIGNAL =  14
gaggactgagaacacctgcgccctcaaggtggcatgacctggatccgggtcagccgggccccaagtgccagggttgagagcttagaccctagagtttttgagggggcacctgggctcccctcactcgggatccgttactcctcacagagcccgactctcaggctcttccgtggtccggggactggacagacatggcgtgcacagcctgggactcttggagcggcgcctcgcagaccctgggccccgcccctctcggcccgggccccatccccgccgccggctccgaaggcgccgcgggccagaactgcgtccccgtggcgggagaggccacctcgtggtcgcgcgcccaggccgccgggagcaacaccagctgggactgttctgtggggcccgacggcgatacctactggggcagtg

SEQ ID NO: 5344 - DNA, 468 bp, Homo sapiens
  MAP TO AC005318.1; EXPRESSED IN LUNG, SIGNAL = 1.5; EXPRESSED IN HELA, SIGNAL = 1.6; EXPRESSED IN HEART, SIGNAL = 1.8; EXPRESSED IN FETAL LIVER, SIGNAL = 1.6; EXPRESSED IN BRAIN, SIGNAL = 1.6; EXPRESSED IN BONE MARROW, SIGNAL = 1.6; EXPRESSED IN PLACENTA, SIGNAL = 1.6; EXPRESSED IN ADULT LIVER, SIGNAL = 1.6
aggcaaaggctcagtgagtgtaggcagtcatttttagaaacttttagactgttggccatattctgcaaatatgcgaattctctccacacacaacagtctcaggtgttgccagtgcagatgctgcccctggggcagaaaagcaaagctgcggctgcagacccctgggcccccttggctggtctagctctggcaggagactcatcacctgtgtgtcctgcccctcacccgcacctaagtttaacttcatgcacaccccaccctgttctaggccaaggatgagctgaacgagagagaggagacccgggaggaggcagtgcgagagctgcaggagatggtgcaggcgcaggcggcctcgggggaggagctggcggtggccgtggcggagagggtgcaagagaaggacagcggcttcttcctgcgcttcatccgcgcacggaagttcaacgtgggccgtgcctatgagctgct

SEQ ID NO: 5345 - DNA, 487 bp, Homo sapiens
  MAP TO AC004845.1; EXPRESSED IN PLACENTA, SIGNAL = 5.9; EXPRESSED IN HELA, SIGNAL = 5.5; EXPRESSED IN FETAL LIVER, SIGNAL = 5.5; EXPRESSED IN BRAIN, SIGNAL = 6.1; EXPRESSED IN LUNG, SIGNAL = 7.1; EXPRESSED IN HEART, SIGNAL = 5.3; EXPRESSED IN BONE MARROW, SIGNAL = 5.7; EXPRESSED IN ADULT LIVER, SIGNAL = 6.1
gatgagggagggggaagagggggatggggaggtgggaggggacaagaagggaaaaaacaagatgctgtaactgttccaccagccaggcctctttcctcaccccatcctatagtggccctgaaaccatctctacaggcccctagaactctatggaaagttactgaaaaagcctgttctagtccaagtttctgcttctcaaatgtaaaccaagtctctggatttaaaagtgcaaggccctgcataaaccgaaggtctcactgatgagaccggggcatgtctcaggggagaagctgcttgtccgggtcttaccgtccatgtccaagcgctgcatgatgatggccagctccacctcgcttggcatgtaccccaaagagcgcatggccatgcccagctcctgcttggagatgaagccgttcccatcccggtccagaacccgaaaggcctctcggatttctacaatggaaaagcaaagaaagtccagtggtca

SEQ ID NO: 5346 - DNA, 493 bp, Homo sapiens
  MAP TO AC004671.1; EXPRESSED IN HEART, SIGNAL = 1.4; EXPRESSED IN BRAIN, SIGNAL = 1.7; EXPRESSED IN BONE MARROW, SIGNAL = 1.2; EXPRESSED IN PLACENTA, SIGNAL = 1.1; EXPRESSED IN LUNG, SIGNAL =   1; EXPRESSED IN FETAL LIVER, SIGNAL = 1.2; EXPRESSED IN ADULT LIVER, SIGNAL =   1
gaagataacgtctcggtggggatttgtaggaaaaaccaggtctaggctgggggcggggtgtgaacaggggtgacggtgctcctggcgtgggagaagacacacccctgcagcacggtgcacacccagcccaccgtcttggcagatggcttctggagcccaggactgggtagggcagaactgcaggcccctggcagttccgtggggccccgtggtgaaccccgcctcaccaggtgtgctcgtccctgcctcccgtcctccgccctctgggagcagggctgggattctactactcttcgttccaaacagtggtgagactccgccggggcccctccagcccttggcactggctggcagacaacagcctgaggctcctcccaggcagaggtggggtcctcccagggctgcccaccggtcgtcctctctcgcatcctctcagggctctccatgttcaagttcccccagctccagtcctccctctcctatttctggcagc

SEQ ID NO: 5347 - DNA, 466 bp, Homo sapiens
  MAP TO AC006120.1; EXPRESSED IN LUNG, SIGNAL = 1.6; EXPRESSED IN FETAL LIVER, SIGNAL = 2.9; EXPRESSED IN HELA, SIGNAL = 2.6; EXPRESSED IN BRAIN, SIGNAL = 1.7; EXPRESSED IN BONE MARROW, SIGNAL = 1.8; EXPRESSED IN ADULT LIVER, SIGNAL =   3; EXPRESSED IN PLACENTA, SIGNAL = 1.4; EXPRESSED IN HEART, SIGNAL = 2.5
ccatctggtcattggtcctcaggtaaaaggctttaataggctcctgcaggctaacatctggcagcaggttgaagacgtcctgcagctcgtagatgatctggtggttgatgcgcagcttgcctgtggctactttttccaggtagctcctgatatccagaagcttggagttcggtcccttcaaaccatggacccggtttgtgatccgctgggacagagtgcccaccgttgtgttgtgtctttgatgtctcgtaacaagtgttcaactccaacttcctcagcttactctgctccaatttcactggtcacatgttcaaatgttttcaaggttggagttccatcatcttggatttcttccactgaaatgtatgcttctgtgggcagccctaggtcctttggattcacgtcaataatgatcaataccgagttaggatagtatcttttcatgagttcattgatggtaatgcca

SEQ ID NO: 5348 - DNA, 365 bp, Homo sapiens
  MAP TO AC000379.1; EXPRESSED IN PLACENTA, SIGNAL = 1.7; EXPRESSED IN BRAIN, SIGNAL = 1.8; EXPRESSED IN BONE MARROW, SIGNAL = 2.3; EXPRESSED IN ADULT LIVER, SIGNAL = 1.2; EXPRESSED IN LUNG, SIGNAL =   2; EXPRESSED IN HELA, SIGNAL = 2.6; EXPRESSED IN HEART, SIGNAL = 1.7; EXPRESSED IN FETAL LIVER, SIGNAL = 2.9
gcaacttgcttttgaaattgtgatttgtaattcatatcatcagtagaaatttgcatagcaacaatgttttcaggcaatgatgatttgctatggtttttcttatataattcctattttgggacagttttgttttcatataagcattcaatttattttaaacttaccagtataattctgaattgactctgagaagtttatattttgagcagtagatgacactggaagacagtctgtcttggctgaggaaagtctttctgatactgatttaattggccgaccttccttgatgggttgataggcagctgtggaagatttgctggctgctaaattatgcattatgtcttcccagtcatcatcatcatcaa

SEQ ID NO: 5349 - DNA, 449 bp, Homo sapiens
  MAP TO AC003662.1; EXPRESSED IN LUNG, SIGNAL = 2.1; EXPRESSED IN PLACENTA, SIGNAL = 1.6; EXPRESSED IN HEART, SIGNAL =   2; EXPRESSED IN FETAL LIVER, SIGNAL = 1.7; EXPRESSED IN BRAIN, SIGNAL = 1.9; EXPRESSED IN BONE MARROW, SIGNAL = 1.8; EXPRESSED IN ADULT LIVER, SIGNAL = 2.1; EXPRESSED IN HELA, SIGNAL =   2
gagacctcccttccaagctccccactggtgcccactccattctggcacgtcctctccaccgaggcttccagagctactcctcttaccctgcagtgggcactcactccagcccctcgatcctcaaagggtggcccctggcccagcaacagcacgcagaggagcacgcagagatcttgaggaaagtggaatgtatgccctacgccaggcccatggaatcggagcttggttttaggaaaaagcacctctgcagttcagaagccctggtccaaccaccactcacctctccccacacggtgagcagtgaaccttggtccacaaaccagacccccagaatccgtttcatgtcccaccacggtgtgctctcccaggctgtgcctgaggcccaggctcctgtgcgcagcagaacgtggggaaaggggatagagtgtgtgcaagtgttgggtgggtgg

SEQ ID NO: 5350 - DNA, 463 bp, Homo sapiens
  MAP TO AC000053.1; EXPRESSED IN PLACENTA, SIGNAL = 1.6; EXPRESSED IN HELA, SIGNAL = 1.8; EXPRESSED IN HEART, SIGNAL = 1.8; EXPRESSED IN FETAL LIVER, SIGNAL = 1.9; EXPRESSED IN ADULT LIVER, SIGNAL = 1.4; EXPRESSED IN LUNG, SIGNAL = 1.7; EXPRESSED IN BRAIN, SIGNAL =   2; EXPRESSED IN BONE MARROW, SIGNAL = 2.1
gtggaggtcccatcactcagctgtccactctgctgccactgacacatgggcagttttgcccaggagcagggcatcagaaacacccaattggagtccagtgtgacagtttgtccagggcctgtcattgtacaacacatcatttcactttgtttttcaaacatagtgaattctttcctaattaaagaagaaaagagtataaagagaaagtttccagtgcagcctggagacctgtactggttgtatctggaattccagactcagccttgcatttcacatagcagatagatgatgatgatggagaaggagaagaagaaggaggaggaggaggaaagaaggaagaagaagaagaagaggaggaggaagaagaagacgaagggaagaagaagaaggatgaggaggaggaggaatagacagactgacaaagattctctactgttgtcacttaacaacatatccatgcagg

SEQ ID NO: 5351 - DNA, 457 bp, Homo sapiens
  MAP TO AC006461.2; EXPRESSED IN BRAIN, SIGNAL = 2.1; EXPRESSED IN ADULT LIVER, SIGNAL = 1.7; EXPRESSED IN PLACENTA, SIGNAL = 2.3; EXPRESSED IN LUNG, SIGNAL = 1.8; EXPRESSED IN HELA, SIGNAL = 1.6; EXPRESSED IN HEART, SIGNAL = 1.9; EXPRESSED IN BONE MARROW, SIGNAL = 1.6; EXPRESSED IN FETAL LIVER, SIGNAL =   2
aggtggagcaggtataaggggtagggagattgacccctccaaaactgggtcttgaccagtttccaaaggtgactgaagttgggagggctataggtgccagaatgccagcttcctgatgagtaggtgagtgtgggcctgacagtggagatattctggactctctcattactctgggtagtggttaagatgcattgccatcctgcttcctgcaggttctccttccaccattgtttcctcaaacatgttgccctctttctttccttctctgtttaggatgaaggatactagccgcaagaacaacatgtttgcacagtttcggaaaaatgagcgagacaagcagaaactcattgacaccgtggccaagcagctccgaggactcatcagcagccaccactcatgaagggtgaccccggacccacagaggcgacctgctgcagcctctgtgtcagtctggggt

SEQ ID NO: 5352 - DNA, 491 bp, Homo sapiens
  MAP TO AC005701.1; EXPRESSED IN HELA, SIGNAL = 4.7; EXPRESSED IN BRAIN, SIGNAL = 4.9; EXPRESSED IN ADULT LIVER, SIGNAL = 4.4; EXPRESSED IN PLACENTA, SIGNAL = 8.9; EXPRESSED IN LUNG, SIGNAL = 5.1; EXPRESSED IN HEART, SIGNAL = 5.2; EXPRESSED IN FETAL LIVER, SIGNAL = 4.9; EXPRESSED IN BONE MARROW, SIGNAL = 4.3
taccatggtgtccaaaagcctagaacctctaaccagctgtcttaatctttaatttaaccaacatacccatggggaaaaaatataaaaaaggtttaaaaacatggtgttcctcacagcctagcatgctggaagaaagtgaaaacaactgttgtacctgtgagtgacgtggtccacaagatgctgtttgaacaggaggctccacctcttaataatattcagcagagatgccttaaagggtcgaatatcaattttcatccagccgtcaaacaccttgatgggttccagcctgcacacctcttcatagagcgtttcataggagtcgatttgcactttaaactgagaaaggaggggagggttctctgggatgccatcttccacatggtcttcaatttcttccggagtgaggatgtgcccgtacagcagaaactgacccagaacctccttccggtcctccacatagaggtacgaatactggctgaaggtgctctgat

SEQ ID NO: 5353 - DNA, 487 bp, Homo sapiens
  MAP TO AC004904.1; EXPRESSED IN ADULT LIVER, SIGNAL = 3.7; EXPRESSED IN PLACENTA, SIGNAL = 5.9; EXPRESSED IN HEART, SIGNAL = 3.6; EXPRESSED IN LUNG, SIGNAL = 4.3; EXPRESSED IN FETAL LIVER, SIGNAL = 4.2; EXPRESSED IN BRAIN, SIGNAL = 4.9; EXPRESSED IN BONE MARROW, SIGNAL = 2.9; EXPRESSED IN HELA, SIGNAL = 3.8
gtgccacccaccagagtcattactttgagtagctcttgttaatgctgggggctatgtttgttgtcacttctcagttctgttatttggtgtagggcctgtgtgaatacttgcctgtgacggttctcaggcttcataaatagtctcaataggaaaggagcagtgtctgtaatgagtgctcagtgggggcatgcatcgcactatttccatcgctaggaaaagtgattggtattaacccgttttcccttttctggggtagggtgctatcgtggctgtgactggtgacggtgtgaatgactctccagctttgaagaaagcagacattggggttgctatggggattgctggctcagatgtgtccaagcaagctgctgacatgattcttctggatgacaactttgcctcaattgtgactggagtagaggaaggtgagagctatttaaggtgtacaccaagatcttattcagatactgcccattagcatccattt

SEQ ID NO: 5354 - DNA, 482 bp, Homo sapiens
  MAP TO AC005591.1; EXPRESSED IN PLACENTA, SIGNAL = 1.4; EXPRESSED IN LUNG, SIGNAL = 1.4; EXPRESSED IN HEART, SIGNAL = 1.3; EXPRESSED IN FETAL LIVER, SIGNAL = 1.5; EXPRESSED IN BRAIN, SIGNAL = 1.6; EXPRESSED IN BONE MARROW, SIGNAL = 1.3; EXPRESSED IN ADULT LIVER, SIGNAL = 1.5
cttgggccacaggtactttcagtttgcactgaattaaaaattcttatcagacttttaaggttagttttccaaaaatgacttttacaaaataaaacacatgagccaggcgtggtagcgcgtacctacgttcccagccacttgggttggttaaggtgggaggatcgcttgagccagggaggttgaggctgcagtgagctatgattgtgcccctgcactccagtctgggcaacggagtaaacctgctccaaaacgaaacaagagatttttacacttccttaactgcacgatattcagatttcggccttagttatgccaaaaatggagaactacttaaatatattcgcaaaatcggttcattcgatgagacctgtacccgattttacacggctgagattgtgtctgctttagagtacttgcacggcaagggcatcattcacaggtaaccgcgggggtggctgggtgggtttgcaggacgtcagttt

SEQ ID NO: 5355 - DNA, 483 bp, Homo sapiens
  MAP TO AC005510.3; EXPRESSED IN PLACENTA, SIGNAL = 1.7; EXPRESSED IN LUNG, SIGNAL = 1.7; EXPRESSED IN FETAL LIVER, SIGNAL = 1.5; EXPRESSED IN BONE MARROW, SIGNAL = 1.6; EXPRESSED IN ADULT LIVER, SIGNAL = 1.4; EXPRESSED IN HEART, SIGNAL = 1.8; EXPRESSED IN BRAIN, SIGNAL = 1.6
tttgaaattattctcttgaccttccaaaggaaggaggttagagcatcccttttctgcaactaagccatgcttggaatgaatactgttttcagaaggttttgagccttatgacatccctggccacttgactggctttttggcaggtgtctttttcctcttgttggggatagaagggcagtagggaattccagaaaaagaactgttcttccagaaatacttctccaggccttgatgaagcggtccagctggctggagcaaatcttgtagtagacattcataaattcttggttgcagctgtattccaccagccagcaggcgatgcagattacatcctggatcacactcttgggcaggtgctccagggacataatctcctgtacctccagatcatcatcaccaccgatcagatccaggatgagcacaggtgatacaaacttattgtgcctggtcatcaggctgcagagctcagatgtgtgttctggg

SEQ ID NO: 5356 - DNA, 373 bp, Homo sapiens
  MAP TO AC005477.1; EXPRESSED IN PLACENTA, SIGNAL = 1.3; EXPRESSED IN LUNG, SIGNAL = 1.6; EXPRESSED IN HEART, SIGNAL = 1.3; EXPRESSED IN FETAL LIVER, SIGNAL = 1.4; EXPRESSED IN BRAIN, SIGNAL = 1.4; EXPRESSED IN BONE MARROW, SIGNAL = 1.3; EXPRESSED IN ADULT LIVER, SIGNAL = 1.4
ctgcaaacattaaaatgggctaactctgtaaactatggcataggcatttattggagtattatcccaatcatttaaaaaagtgttgtcagtagcaatctggagtagtcaattaggctgttccctaatagtccagtcctggacatacaggattgcgcttgcccaccttctttgaagttagcatggccacatgacttgctttggtcaatgaaatataagcaagtgttatttctcttctagaaaggctttaacagccagtgcaaggattaccatattttcctatgctgctttggtgactgtgagtgcctgtgcatggatggagcctcccatcagtgtcagcatggagtcttcaattccaatgagcagtttcctgttg

SEQ ID NO: 5357 - DNA, 467 bp, Homo sapiens
  MAP TO AC006015.2; EXPRESSED IN LUNG, SIGNAL = 1.5; EXPRESSED IN FETAL LIVER, SIGNAL = 1.1; EXPRESSED IN BONE MARROW, SIGNAL = 1.3; EXPRESSED IN HEART, SIGNAL = 1.3; EXPRESSED IN BRAIN, SIGNAL = 1.5; EXPRESSED IN ADULT LIVER, SIGNAL = 1.1; EXPRESSED IN PLACENTA, SIGNAL = 1.3
tcattttccttagggccaacacggaactccttcccaagccccgcaggacctgcctcctccctggtcccaaggcggctctcttgcctcatctgcagttgactaagctgcagccagtccagccttctcatccacccgggtaacagcctcaggatctctgctcctgcggttccctggccccagctagcccagcccgtccgtctcaagccttgctcagatctgcctcccccaggggaggctccagcagccccgcccggcacatgtggcatcatggccactcacccggggtcagcggccgctccgcagccccgccacgtggcaggtgctcgtcctcagagaagctcgagtcttggttgggttcaaagtcctcctcggctgccatgctctccatcagcttgctcacagcgccccccttgctgaggttctggggacagagcatggccgacaaatgacttaggacctgaacgggg

SEQ ID NO: 5358 - DNA, 479 bp, Homo sapiens
  MAP TO AC002119.1; EXPRESSED IN PLACENTA, SIGNAL = 2.9; EXPRESSED IN HEART, SIGNAL = 2.4; EXPRESSED IN BRAIN, SIGNAL = 5.7; EXPRESSED IN BONE MARROW, SIGNAL = 3.5; EXPRESSED IN ADULT LIVER, SIGNAL = 2.6; EXPRESSED IN LUNG, SIGNAL = 4.3; EXPRESSED IN HELA, SIGNAL = 2.6; EXPRESSED IN FETAL LIVER, SIGNAL = 3.8
gtggcgtctgttcaaccacatggccctccactgtccagtcccatgcgctggcatgggagccaagggccctgccatggtgccgaggctgtggttggaggcccagctagtgccacactcgccttgcctcggcctctctggggcccttcaggcatcctcctggcacttgtggaggaagcaggctgcgccggagccaatggtggccgggagctgccgggcaggtgccctgttctcatgctgcctgctaactgcccgtctggtgtttttggttcctgcagtgagaagcgccaccttcaagtgaacgtcaccaacccagtacagtgcagcctgcacgggaagaagtgcaccgtctccgtggagacgcggctcaaccagccccagcccgacttcaccaagaatcgctcgggcttcatcctcagcgtgcccgggaactgacgccccgcggaggcctggcccggagcccggccacactccgagtcctg

SEQ ID NO: 5359 - DNA, 479 bp, Homo sapiens
  MAP TO AC005323.1; EXPRESSED IN LUNG, SIGNAL = 0.8; EXPRESSED IN HEART, SIGNAL =  23; EXPRESSED IN BONE MARROW, SIGNAL = 1.1; EXPRESSED IN ADULT LIVER, SIGNAL = 0.44
ttttgaggtggaactagcattagttaatttggattttagcatagaaatctaagcaaaatttcctctatttttggaactagtgcttagcatagaaatctaagcaaaacttcttctatgtttggaactagtacattttattctaaatatatttccctaattttattatttctgttatcatgtttgtgctgaacagttattctcagaatactagccctatgttttttctgatatcagtatacaactattttacaaatggctatggaaattgtaattctcactcaccagttagcatgaactgataggcattgtcagagatggagaagatatggggtggggcctcctggcgctttttgcctcggtaggctgtcaccacctcagggttgtacaccggcagccacttgtaggggttgacggtgacacagaagaggcccgagtaggtctgtgggaaaggacggggttcctcgatcagcaatcacctt

SEQ ID NO: 5360 - DNA, 480 bp, Homo sapiens
  MAP TO AC005912.1; EXPRESSED IN PLACENTA, SIGNAL = 3.5; EXPRESSED IN ADULT LIVER, SIGNAL = 3.5; EXPRESSED IN LUNG, SIGNAL =   4; EXPRESSED IN HEART, SIGNAL = 3.4; EXPRESSED IN FETAL LIVER, SIGNAL = 3.3; EXPRESSED IN BRAIN, SIGNAL = 3.1; EXPRESSED IN BONE MARROW, SIGNAL = 3.3; EXPRESSED IN HELA, SIGNAL = 3.6
ccaataaaacaaagcagggcctcacagaggcatgggcccctgcccagcctgtgctgcaggagtgactactgtcagcaccatttacagaaccagcctgtgctccaggctcggggctgggtgctccggatgcatcattacatttcacttcacaccagtcacaggaggtggtgttgataaccaagactcagcaggagggccaggacttgttcccagccccatttgacgctatcatccttatccctccactcccctgctgggcatcagaatcacctgagcattttcacaggctccaccctggacctcctgttgcacgagagtctgcagggctgcagccacgcacctggggttctggggcttccaaacatccacaggtgctgctgatgcctggccaggagggcacaccaccaggcccacgcacagcagacagaacattcccagggacacactgcccacattccctccagaacaaacaccctgtca

SEQ ID NO: 5361 - DNA, 464 bp, Homo sapiens
  MAP TO AC002044.1; EXPRESSED IN PLACENTA, SIGNAL = 2.5; EXPRESSED IN LUNG, SIGNAL = 2.9; EXPRESSED IN FETAL LIVER, SIGNAL =   2; EXPRESSED IN BRAIN, SIGNAL =   3; EXPRESSED IN BONE MARROW, SIGNAL = 2.4; EXPRESSED IN ADULT LIVER, SIGNAL = 2.6; EXPRESSED IN HELA, SIGNAL = 2.9; EXPRESSED IN HEART, SIGNAL = 2.2
cactttgaggctcccatgtctttattaaacatttcctctaaactgcatgctctggctctgtgcccacgtgcaccaagaaagctgcccaggagcagccaaaccccagagccctgcctgctggttcttcctataaataggcctttgaacaggcaggaggcacctgcatggactgccactcctcccctcctctctgcatcctggctttcccagctccccgggtctcaggctgggaggatgctgagcagcctccccagcccctgacagaatgagcagcagtatcggcggcggcggcggcggcggcagcagcagcagcagcagcagagaaaagaccaggagcgagttgcacgtgctccctccctccctccctccgctcaaggccaggagctgctgggacctgtggtctggcagtggggaaggcaggggagcctggtcagcagcagggtgggaaaacgtggaatggagac

SEQ ID NO: 5362 - DNA, 455 bp, Homo sapiens
  MAP TO AC006530.4; EXPRESSED IN BONE MARROW, SIGNAL = 1.2; EXPRESSED IN ADULT LIVER, SIGNAL = 1.2; EXPRESSED IN PLACENTA, SIGNAL = 1.3; EXPRESSED IN HEART, SIGNAL = 1.5; EXPRESSED IN FETAL LIVER, SIGNAL = 1.4; EXPRESSED IN BRAIN, SIGNAL = 1.1; EXPRESSED IN LUNG, SIGNAL = 0.99
ctgtgaaattgggaagggagctaagttgagccagttatctgatggacatttagggaccctgaggactagagaatagtgccttatgtcattgtgtgtgtgtctcatagtgctttgcatattgctgatacccagtagacattcgttacttgattggagctagagtttttgccactaaattttgcttggttgcttctcatttcagacagtgccagtggcatatacttttcttgtttttcagctgctcctgctaaggccaagccggctgaagctcctgctgctgcagccccaaaagcagaacctacagcagcggcagttcctccccctgcagcacccatacccactcagatgccaccggtgccctcgccctcacagcctccttctggcaaacctggtaggcttccaactcccacatgtcatgtgggagaacatctcgtctaatatgttccttcaaaggg

SEQ ID NO: 5363 - DNA, 475 bp, Homo sapiens
  MAP TO AC004675.1; EXPRESSED IN LUNG, SIGNAL = 1.8; EXPRESSED IN PLACENTA, SIGNAL = 2.7; EXPRESSED IN HEART, SIGNAL = 3.8; EXPRESSED IN FETAL LIVER, SIGNAL = 2.2; EXPRESSED IN BRAIN, SIGNAL = 1.6; EXPRESSED IN BONE MARROW, SIGNAL = 1.8; EXPRESSED IN ADULT LIVER, SIGNAL = 7.2
ttggggtagtggaatgaagcctggagtctcccaagtcaagtctcattggtcaaggctggaagatcccaacttaaactcttaagcagaacctacagtcctaagtctcatctccatcctgctcaccacaccatggggtgaagtgctgtggtgctcagtagataattcatttatataatgttgctatacacacaatttcaagaagataccagccctcctttctgagtccctgctcctggtcttcccctgagccccaacctcactcctgcttatttccctgcaggctctaggttggaaggaagacaaggcattgcactcacgtgaggaggattcagtcttggtccctagggcgatggtgatgaggaggaagaagggaatggcagccacggagatcttcatgctgtgggaagctgttgtgggaggagagctggcctggtgggagcttcagaggctcctgcggtgaggaattgttgagaaa

SEQ ID NO: 5364 - DNA, 494 bp, Homo sapiens
  MAP TO AC005392.1; EXPRESSED IN PLACENTA, SIGNAL = 0.75; EXPRESSED IN HEART, SIGNAL = 2.8; EXPRESSED IN BONE MARROW, SIGNAL = 0.66; EXPRESSED IN LUNG, SIGNAL = 0.64; EXPRESSED IN ADULT LIVER, SIGNAL = 0.7
agggctcagggctgataaagccccctccctaactttcttaggccagacacaaggtcagccatgagaaaacagaaaaacaaggagaagagagtttgtagagacaaattggaagggttcaggaggagaatttgggatttgcttgtgcccatgggacacaggctgggaataaaaatgttttcctaactcttctctgaaagccaggtagactccacctaaaaccctattgccaaggatgctgggatccacttaccagagacttcgactgtcatggatttggagctttccttgccagtagctgagttacgaacagagcaagtatagagccctctatgctttgtagtaatttgggggatagagagcttttgtcctgattgctgaaacttcccattaattgtccaaaaatactctgccggtgggttagattccgcgaagcaggacaagtagaggttttctcctgaacggtaataggtgaatgaagggtaaatgctggggag

SEQ ID NO: 5365 - DNA, 463 bp, Homo sapiens
  MAP TO AC005316.1; EXPRESSED IN PLACENTA, SIGNAL = 9.2; EXPRESSED IN HEART, SIGNAL = 8.7; EXPRESSED IN FETAL LIVER, SIGNAL =  11; EXPRESSED IN BRAIN, SIGNAL = 9.7; EXPRESSED IN BONE MARROW, SIGNAL = 9.8; EXPRESSED IN ADULT LIVER, SIGNAL =  10; EXPRESSED IN HELA, SIGNAL = 9.7; EXPRESSED IN LUNG, SIGNAL =  11
ctgggattgcaggtgtgcatcaccatgcccagataaattattttattttatttttttagagatgcgagtcttgctgtgttgttcaggctgatctcgaactcctggccacaagtgatcctgcctcctcagcctcctaaggagctaggattacaagcatgagccaccgcccccggctcattctggttatttcaagcaagaagagatgtaatgcagggcttgacctacatgaatcaagacaattagaagtgccagaggggtggacatcagagagagacttgcttcaaggttacaccatcacagctgtgatctagatccaaaatctgaaggaaagaaggccactgttgctacagctactgttgctgccaccacacatgaaaccagcgactggagagtgacacctggagttgggcagccccaaagagtcttgtcagccagagcttcctggtctgtgccaaggctacat

SEQ ID NO: 5366 - DNA, 475 bp, Homo sapiens
  MAP TO AC005612.1; EXPRESSED IN PLACENTA, SIGNAL = 1.2; EXPRESSED IN HEART, SIGNAL = 1.5; EXPRESSED IN FETAL LIVER, SIGNAL = 1.2; EXPRESSED IN BONE MARROW, SIGNAL = 1.1; EXPRESSED IN ADULT LIVER, SIGNAL = 1.7; EXPRESSED IN LUNG, SIGNAL = 1.3; EXPRESSED IN BRAIN, SIGNAL = 1.2
acgtggcgtgttctacagtggacccgggtgaaggagcttggggagagccacatgctgttctgggaggcatccctgccttcacgcggcttgtcgtggagttcttttctggagcggggctccactgcccccatggttctgcaggggctatggcctgtcctcaagcaaggatgggaggaaaccctgggaggccgggggcgtgagcagttgttcgttcacctctgcctcgtgactgagcacgttctctccccaaatacatctggctcgcaggaatcttgacgaagcctgatctggtggacaaaggaactgaagacaaggttgtggacgtggtgcggaacctcgtgttccacctgaagaagggttacatgattgtcaagtgccggggccagcaggagatccaggaccagctgagcctgtccgaagccctgcagagagagaagatcttctttgagaaccacccatatttcaggtgcgcttg

SEQ ID NO: 5367 - DNA, 485 bp, Homo sapiens
  MAP TO AC006141.2; EXPRESSED IN HELA, SIGNAL = 4.2; EXPRESSED IN HEART, SIGNAL = 3.7; EXPRESSED IN ADULT LIVER, SIGNAL = 5.7; EXPRESSED IN FETAL LIVER, SIGNAL = 5.4; EXPRESSED IN BRAIN, SIGNAL = 4.2; EXPRESSED IN BONE MARROW, SIGNAL = 4.4; EXPRESSED IN PLACENTA, SIGNAL = 4.1; EXPRESSED IN LUNG, SIGNAL = 3.7
agcttccgtgccttctcagggcacgccacctcctcagcacctccgtgtgttcagcaacccagaagctctctgaataccttctgttaagcctttttatgaaggcctcttgacataggcatggttgattaaatcactggccgtggctgcttaagtcagccttcagccccttggatatgtatttttaaatgaacacttgtagtgaaaagtatatactaccaggatacagggtctgtggaaataatcaaaagaaccattttgtacttctttataggttgatgggaaaacaaatcctaaaattcagagcatctatttggaaaggtttccaatctttaaggcttgttttagtgctaatggggaagaagttttagccacgagtacccacagcaaggttctttatgtctatgacatgctggctggaaagttaattcctgtgcatcaagtgagaggtaagatttctgttgaatgcacacaaccagtcattcccc

SEQ ID NO: 5368 - DNA, 456 bp, Homo sapiens
  MAP TO AC004763.1; EXPRESSED IN PLACENTA, SIGNAL = 3.6; EXPRESSED IN HELA, SIGNAL = 2.8; EXPRESSED IN FETAL LIVER, SIGNAL = 3.1; EXPRESSED IN BRAIN, SIGNAL = 2.9; EXPRESSED IN LUNG, SIGNAL = 3.6; EXPRESSED IN HEART, SIGNAL = 2.5; EXPRESSED IN BONE MARROW, SIGNAL = 2.8; EXPRESSED IN ADULT LIVER, SIGNAL = 4.8
tgttcagggctcaccttttctaactagctagtattttcctgctattattcttcaatgcctttattagcgtttcatttgaatctattcttcctttggcatcttgtaatttagtcttcctttttaatatcattttgtcattttcatctattcctctcctgagttcattcaacattcttttttttattttttgtccatttgttatttttttaatttcagattcaagattactgaagcccagataaataattatacttattttcttttaggtttttgtgtcaaaatgttctacattaagccaattaagtataaaggtcctattaagaagggagaaaaacttggaactctattgcccttgcagaaagtttatcctggcatacaatcgcatgtgcacattgaaaactgtgactcgagtgaccctactgcatacctgtaaatcgaaggccaatggtcagatct

SEQ ID NO: 5369 - DNA, 470 bp, Homo sapiens
  MAP TO AC005599.5; EXPRESSED IN PLACENTA, SIGNAL = 5.4; EXPRESSED IN LUNG, SIGNAL = 5.3; EXPRESSED IN FETAL LIVER, SIGNAL = 5.6; EXPRESSED IN BRAIN, SIGNAL = 4.9; EXPRESSED IN ADULT LIVER, SIGNAL = 5.4; EXPRESSED IN HELA, SIGNAL = 5.7; EXPRESSED IN HEART, SIGNAL = 5.3; EXPRESSED IN BONE MARROW, SIGNAL = 5.4
tcctgggaggcagagtttagatgtgtcttgtagaatgagttttctttaacaggcaacgcagggaatgggggtgcatgaaatggtcagaactggtcgctggcctggtaggccaaagtgtaagatgtgcagatatttgtggaaggggtggggaggtcagactgcatccctctccttcagggcggcatcctcttcctccagggtgacatcccccaaactcttcctttatttgttgcgcttagcctggaacagggaggctgttaagttatacccacctcatctcctctgagtcctgtccccagggcaaactgctgattcctctccaggaagcgtatttttacattgtagactttgttctcataaaacacagccaaaacatagggctcttccttggattttgtggaacaatctcggaccaagaaactaccatcctgaagcaaaaagagtaacagtcatcttttcagacacgccag

SEQ ID NO: 5370 - DNA, 425 bp, Homo sapiens
  MAP TO AC004957.1; EXPRESSED IN BONE MARROW, SIGNAL = 1.5; EXPRESSED IN ADULT LIVER, SIGNAL =   2; EXPRESSED IN PLACENTA, SIGNAL = 1.7; EXPRESSED IN LUNG, SIGNAL = 1.8; EXPRESSED IN HEART, SIGNAL = 1.8; EXPRESSED IN FETAL LIVER, SIGNAL = 1.8; EXPRESSED IN BRAIN, SIGNAL = 1.6
ccatactttatttttactctgaaatggttcattaaaaatgttctttaagcatttagtaaaacataaacacttaaatcaattacacgataaacagaattacactattcaataattcagcataaaaatttatgtcctcatttttaaattaatatatacctgttgatatggtttggctctgtgtcccgacccaaatctcatcttgtagctcccataattcccacatgttgtgggagggactctgtgggagatgattgaattatggaggcgggtctttcccatgctgttctcgtgatagtgaatgggtctcacgagatctgatggttttaaaaacaggagttgccctgcataagctctccttgcctgctgccatccaggtaagatgtgacttgctcctccttgccttccgctatgaatgtgaggcctcc

SEQ ID NO: 5371 - DNA, 355 bp, Homo sapiens
  MAP TO AC004883.2; EXPRESSED IN BONE MARROW, SIGNAL = 2.5; EXPRESSED IN ADULT LIVER, SIGNAL = 2.5; EXPRESSED IN LUNG, SIGNAL =   3; EXPRESSED IN HELA, SIGNAL = 2.4; EXPRESSED IN HEART, SIGNAL = 2.2; EXPRESSED IN FETAL LIVER, SIGNAL = 2.5; EXPRESSED IN BRAIN, SIGNAL = 3.1; EXPRESSED IN PLACENTA, SIGNAL = 2.7
aggcccttctgaaactgatgatgttgatgaaaaacagcccctatcgaagcctttgcaaggtataatcttttcacttccattctcccacatactgcttgtgtttaatgtttccttatattgcacagactgtgttttaatatttataagtacagtattacttttctaaatggaaaaggaaaaaaatgtattggcctttttttaacatataaatgaacttcacaagcaacaatttttcaaaaatcaattttcccttttgtgaatctagtaatgaatctcgaaatgggtacatgacacactttcctattgaaggtaaagtacacatttataccttatctcagaacagtcagaagccagg

SEQ ID NO: 5372 - DNA, 463 bp, Homo sapiens
  MAP TO AC006024.1; EXPRESSED IN PLACENTA, SIGNAL = 1.6; EXPRESSED IN LUNG, SIGNAL = 1.5; EXPRESSED IN FETAL LIVER, SIGNAL = 1.2; EXPRESSED IN BRAIN, SIGNAL = 1.4; EXPRESSED IN BONE MARROW, SIGNAL = 1.3; EXPRESSED IN ADULT LIVER, SIGNAL = 1.2; EXPRESSED IN HEART, SIGNAL = 1.4
aattttcaacactgtttggctcttactgagcctccttttgatccatgctttgaattcattatctatcatttctgagtttttatttttgttagggaccattggtagagagctagtgtgatcctttggtggtatcaatacattgagatttttcatggtgtcagaattcttgcactgtttccttctcatctgagacaccagcacttctaatttttgtaaatattttcatgcagatgggatttttttctttttctttatttccaggatggcaggcacaagtaccagtacaagagagcatacaatgagtggccaccacatgcccagaggagctcctaatctaggagcatgggtgctccagtgcctggagatctttctgagtatggagtatagagggacctactgcaccactatctctgcacaggaatggtgaggtggctcatgttaatccaggtgaatgggtacccta

SEQ ID NO: 5373 - DNA, 487 bp, Homo sapiens
  MAP TO AC002287.1; EXPRESSED IN PLACENTA, SIGNAL =  11; EXPRESSED IN BRAIN, SIGNAL =  12; EXPRESSED IN ADULT LIVER, SIGNAL =  11; EXPRESSED IN LUNG, SIGNAL =  13; EXPRESSED IN HELA, SIGNAL =  12; EXPRESSED IN HEART, SIGNAL =  11; EXPRESSED IN FETAL LIVER, SIGNAL =  11; EXPRESSED IN BONE MARROW, SIGNAL =  11
gcctggtctgtgatctctagcatttcttaaaactgcatgtgaatcaacaattgtcttaaaataaaaatgtgtgtgtgtgtgtgtgtgtgtgtgtgtatgtgtgtgtgtgtgttttggaatgtcagtgagggaagtggatggagaggatgcagaggggaaaaggtaaggacttgcccaagttcacactgggtgatggagctacatactcaggctcataacctctgctttgagccaccaccccatctgacagaaaactgttatgaccttcacttctggaatttccccttcctctttccaaacaagccaagattacaaggcccatgctcttactcacacccagggtagggtgtgtgagttctgtacccatcagtaccacagataggaggggtccaagaaggctgggagccacatcaggtctgagtccttttagaggaattaacatagacattgagagacagatgctgtagctctgaaaggaccattgaaa

SEQ ID NO: 5374 - DNA, 469 bp, Homo sapiens
  MAP TO AC004853.1; EXPRESSED IN BRAIN, SIGNAL = 1.9; EXPRESSED IN HEART, SIGNAL = 1.7; EXPRESSED IN BONE MARROW, SIGNAL = 1.8; EXPRESSED IN ADULT LIVER, SIGNAL = 1.8; EXPRESSED IN PLACENTA, SIGNAL =   2; EXPRESSED IN LUNG, SIGNAL =   2; EXPRESSED IN HELA, SIGNAL = 1.9; EXPRESSED IN FETAL LIVER, SIGNAL =   2
aagccatcccattccagagctgtgcagcccagttatttttctccctggccttgggtgggattgagtttgttctcctggcagtgatggcctatgaccgccatgtggctgtgtctgaccgcctgcgatactcggccatcatgcatggagggctgtgtgctaggttggccatcacatcctgggtcagtggctccatcaactctcttgtgcagactgctatcacctttcagctgcccatgtgcactaacaagtttattgatcacatatcctgtgaactcctagctgtggtcaggctggcttgtgtggacacctcctccaatgaggctgccatcatggtgtctagcattgttcttctgatgacacctttctgcctggttctgttgtcctacatccggatcatctccaccatcctaaagatccagtccagagaaggaagaaagaaagccttccacacgtgtgcctctcacctcac

SEQ ID NO: 5375 - DNA, 395 bp, Homo sapiens
  MAP TO AC002064.1; EXPRESSED IN LUNG, SIGNAL = 5.7; EXPRESSED IN BRAIN, SIGNAL = 4.2; EXPRESSED IN ADULT LIVER, SIGNAL = 4.3; EXPRESSED IN PLACENTA, SIGNAL = 4.4; EXPRESSED IN HELA, SIGNAL = 4.3; EXPRESSED IN HEART, SIGNAL = 3.4; EXPRESSED IN FETAL LIVER, SIGNAL = 3.9; EXPRESSED IN BONE MARROW, SIGNAL = 4.2
tactctctggagagggccagtggtggtagctataagcttggccacattttttttcctttattcctttgtcagagatgtgattcatccatatgctagaaaccaacagagtgacttttacaaaattcctatagagattgtgaataaaaccttacctatagttgccattactttgctctccctagtatacctcgcaggtcttctggcagctgcttatcaactttattacggcaccaagtataggagatttccaccttggttggaaacctggttacagtgtagaaaacagcttggattactaagttttttcttcgctatggtccatgttgcctacagcctctgcttaccgatgagaaggtcagagagatatttgtttctcaacatggcttatcagcagg

SEQ ID NO: 5376 - DNA, 456 bp, Homo sapiens
  MAP TO AC004805.1; EXPRESSED IN ADULT LIVER, SIGNAL =   8; EXPRESSED IN PLACENTA, SIGNAL =  12; EXPRESSED IN LUNG, SIGNAL =  10; EXPRESSED IN HEART, SIGNAL = 7.4; EXPRESSED IN BRAIN, SIGNAL = 7.8; EXPRESSED IN HELA, SIGNAL = 7.7; EXPRESSED IN FETAL LIVER, SIGNAL = 9.6; EXPRESSED IN BONE MARROW, SIGNAL = 9.5
acaggttgcagtcagccagggtgagctcattgccatccagaaacttcctctgagagatgccttcatcttcagcactggtttcatccacttcttctgagtggcaggatatcaagtgattgtctaaaaccttcagggctttcaggagtcccttctccagattgtcattgactactgggtttgaattcttgatgtaagcagaaaatttggcaaatatgtcctgctcagctgtgttggattcagggttcagagctgccagcttggggtacctaggagggcacagcactgcctacagaaattcctcaatcttgttggtgtccttgtgttcttccatgccatacagcaggaatgggagctgccctcctgggcacagcttttgcactatcttggtctgcctcttggtgtcaatgatggtgacattgaaggtgactcccttgagccacagcaccatgaacagtc

SEQ ID NO: 5377 - DNA, 478 bp, Homo sapiens
  MAP TO AC004682.1; EXPRESSED IN BONE MARROW, SIGNAL = 6.7; EXPRESSED IN PLACENTA, SIGNAL = 6.4; EXPRESSED IN LUNG, SIGNAL = 6.2; EXPRESSED IN HELA, SIGNAL = 6.1; EXPRESSED IN FETAL LIVER, SIGNAL =   6; EXPRESSED IN ADULT LIVER, SIGNAL = 5.8; EXPRESSED IN HEART, SIGNAL = 6.3; EXPRESSED IN BRAIN, SIGNAL = 7.7
tgtagaagatggctgggaccgagagcatggaaacgatgagcaggatctcggagctgcagcccatgtcacaggacacgatgagcatcttggacagggcagggtccagcgggaactccaccatcagccgcccggtagaggtcagaccacctaggagagatgagcaaacccggatatttgacgggacagtagaggaaagaaggaagtcaagcgccagcacccatgaggctcccggggccgcctcacctgtgttgtccagggccccgaggatccagagctgatacatagagttgagcatgttgtcctccgggggcgggtccatgaagtggaactgcagcaggtcctgcaccccgagggacttgagcagcagcaccacgttggccaggttagtcctctggatctcgggcactgtggtggtcaggagctcattcttgtaggcgctctgggtgtagagcctgccggggagaagaccccatcttct

SEQ ID NO: 5378 - DNA, 488 bp, Homo sapiens
  MAP TO AC005659.2; EXPRESSED IN PLACENTA, SIGNAL = 2.7; EXPRESSED IN LUNG, SIGNAL =   3; EXPRESSED IN FETAL LIVER, SIGNAL = 3.2; EXPRESSED IN BRAIN, SIGNAL = 2.3; EXPRESSED IN BONE MARROW, SIGNAL = 2.7; EXPRESSED IN ADULT LIVER, SIGNAL = 2.5; EXPRESSED IN HELA, SIGNAL = 2.8; EXPRESSED IN HEART, SIGNAL = 2.7
cagagcctcagttttcacctgatcaagtggaaaattgtcaaagctgaccttccccacacagtgggaggcagggctggtaatagacaccaatatggcaagagagacactgttctctatcagggagaagtgaaggacttatgtctcagataagtctttggttccttgggtcttcaaggcttgtcctgttaaaaacaacgcccacagcctcataaagcaggacatccactttcccaagcccccggggactttacttccctcccgctggtccgcctgttagcttgcatgagttctaggccacttctctgcctccacgggaaatggccctccagcccatcaatgatttgaagagaccctttggggctgtagtgccttcctttctgctggaccccagctgtgaccaagtggccaagtggccgggtgggggccactgtcaggaccatgtgagagagtgagatgcctgccttcccaccctgagaacacagtcagca

SEQ ID NO: 5379 - DNA, 475 bp, Homo sapiens
  MAP TO AC004943.1; EXPRESSED IN LUNG, SIGNAL = 4.8; EXPRESSED IN FETAL LIVER, SIGNAL =   4; EXPRESSED IN BONE MARROW, SIGNAL = 3.8; EXPRESSED IN PLACENTA, SIGNAL =   4; EXPRESSED IN HELA, SIGNAL = 3.8; EXPRESSED IN HEART, SIGNAL = 3.2; EXPRESSED IN BRAIN, SIGNAL = 3.9; EXPRESSED IN ADULT LIVER, SIGNAL = 3.7
tgaaccaaatatagaacagaaaagcaaaacaatgagtggagctgaagtcaaagggcttctgtgttgtgggtttcttgtttttttaaggggcagtatttgctgggagtttagctgctatgagataaggagtacttaaagtatatgaacaaggggcatgaatcctgatttccatatgaaaccaggggccggggaaaaggatcttcttctcatgaaaaaaggcaaaaaggctaggggaaaacaaagtttctggtcactacactgggctgtgactttagaaaacttcagggtacatttgaaggaaggtacatcctcgtaatcagaacagaagtggttgtctgtgagctttgtgacagcatcaggtttatctccattgtcaccctgggacaagaatcttaatatacctttatcagacctcatctggattggagtgatcatgacttgcgtagatataaacacaagactacctggccaaggt

SEQ ID NO: 5380 - DNA, 473 bp, Homo sapiens
  MAP TO AC003684.1; EXPRESSED IN PLACENTA, SIGNAL = 3.5; EXPRESSED IN HEART, SIGNAL =   3; EXPRESSED IN BRAIN, SIGNAL = 3.7; EXPRESSED IN BONE MARROW, SIGNAL = 3.4; EXPRESSED IN ADULT LIVER, SIGNAL = 3.1; EXPRESSED IN LUNG, SIGNAL = 3.8; EXPRESSED IN HELA, SIGNAL = 3.2; EXPRESSED IN FETAL LIVER, SIGNAL = 3.2
cctcccttccttccttctttcatttcttccttcctacctcctttcttctttagaacacacactttggggaagcttgcagaaacaaagtactaagcatgatgattaaggatacaagccggggacaagagtgggaaggagacagagcgtgggatgctggtgagaacattgggtcacagcaccagccctgcctggactgtgtttatctgggtcattttcattatgagaagaagaaattacagcgacccttgaacaacacaggtctgaattgcactagtccacttatacgtaatttttcttcagcctctgtcacccctgagacaagaccagcgcctcctcttcctcctcctcttcagcccactcaacaagaagatgacgagggtgaagaccttcgggatgatccacatccacttcgtgaatacaaagtatattttctcttccttaggattttcttcatgacaatttcttttctctgg

SEQ ID NO: 5381 - DNA, 465 bp, Homo sapiens
  MAP TO AC004870.2; EXPRESSED IN BONE MARROW, SIGNAL = 8.8; EXPRESSED IN ADULT LIVER, SIGNAL = 8.5; EXPRESSED IN PLACENTA, SIGNAL = 9.7; EXPRESSED IN LUNG, SIGNAL = 9.6; EXPRESSED IN HEART, SIGNAL = 8.9; EXPRESSED IN BRAIN, SIGNAL =  11; EXPRESSED IN HELA, SIGNAL = 9.1; EXPRESSED IN FETAL LIVER, SIGNAL = 8.6
ttctggaggctggaattctgagatcaaggtgtgggcagtgttggctccttctgaggcctctggccatggaatgcagatggtcatcttttctctgtgtcttcacatggtcattcctctttgctcgcccatttctgtgtctctatgtgtgcccaaatctcctcttgttataaggataccggtgatattagattagggcccaccctaacaacctcattttaagttagtctcatccttaaaggccctatctccaaagccatgagaaggaatataatcattcaagaatggggggtggagagagagagagagagacagagagagaaagagagagagaagaagaagaagaggaggaggaggagaagaagaagaggaggaggagggagaggaggagaggagtaaggagaagagaagtagaggaggaggaggaggtggagggagaggaggagtagaggaggaggaggaggagaa

SEQ ID NO: 5382 - DNA, 474 bp, Homo sapiens
  MAP TO AC000005.1; EXPRESSED IN PLACENTA, SIGNAL = 1.5; EXPRESSED IN LUNG, SIGNAL = 1.6; EXPRESSED IN FETAL LIVER, SIGNAL = 1.3; EXPRESSED IN BRAIN, SIGNAL = 1.4; EXPRESSED IN BONE MARROW, SIGNAL = 1.5; EXPRESSED IN ADULT LIVER, SIGNAL = 1.4; EXPRESSED IN HEART, SIGNAL = 1.4
ctctccgagaaacacccaagaatgatcaataaatactaaaaaaaaaaaaaaaaaaaaaaaaaaaaaatttaaaaatcagcagggcatggtagcatgcacctgtagtcccagctatttgggaggtgagaggatcacttgagcccgggaagtcaaggctgcagggtactgtgatcacagtacagcactccagcctgggcgacaatgagaccctatctcaaaagaaaagaaaaaaaaagtcaaaaggtatattccatttaatgcactcatcgtaaacagagatcactgccatggtccctcccaagttaccgcagagtcttcacaaccgtccagttctccttgttcagctgggcctcgtcctcatcctgaaaagcgatctgctccggctccttgttatcattcaccttccacaataggatgacagcatctgcagggtgattcagtaacagtgatccacgcttcacccacactccttca

SEQ ID NO: 5383 - DNA, 468 bp, Homo sapiens
  MAP TO AC004672.1; EXPRESSED IN PLACENTA, SIGNAL = 2.8; EXPRESSED IN ADULT LIVER, SIGNAL = 2.8; EXPRESSED IN LUNG, SIGNAL = 2.9; EXPRESSED IN HEART, SIGNAL = 2.7; EXPRESSED IN FETAL LIVER, SIGNAL = 2.7; EXPRESSED IN BRAIN, SIGNAL = 2.8; EXPRESSED IN BONE MARROW, SIGNAL = 2.3; EXPRESSED IN HELA, SIGNAL = 2.6
tggaaagtatgtgagggaatgtatatgttagctctatttagccattccacaatgtatacatatttcaaaattacatgttgtacatgagaaacatacatttttaattggtgaattaaaaaaataaaacagtaaaaaatcaattaaaaatcagtttaaaaattatatctggaaacccctccccaccccccaaatcttgaatctaaacatggaattccccaaggtagctcccactgcatgaacctacacagcaacgggattccccaaggtagcccccactgcatcaactacacggcaactggattccccaaggtagcccccactgcatcaacctacacagcaactggattttcacaggctcttttcaaagtttgagtgagaggctcacctgcccccgggtcatcttctgcagctcattctcccaagccgcctggtcatcgtccaagttataggaagctggtggagtgagtc

SEQ ID NO: 5384 - DNA, 473 bp, Homo sapiens
  MAP TO AC006094.1; EXPRESSED IN PLACENTA, SIGNAL =   9; EXPRESSED IN LUNG, SIGNAL = 9.5; EXPRESSED IN FETAL LIVER, SIGNAL = 8.3; EXPRESSED IN BRAIN, SIGNAL = 8.8; EXPRESSED IN BONE MARROW, SIGNAL = 8.4; EXPRESSED IN ADULT LIVER, SIGNAL = 8.5; EXPRESSED IN HELA, SIGNAL = 8.9; EXPRESSED IN HEART, SIGNAL = 8.8
accaagtatcagcacctggccacagagtgcactgtcacgggtgagtgtaaagtctatgaatgggctgtgggaccaagtatcagcacctgaccacagagtgcgctgtcacgggtgagtgtggagtctatgaatagtctgtgggacccagcaccagcacctgaccacagagtgcactgtcaggggcgagcgtggaagctgcggagtcccgtgcgtggtgccctgtgcctcctgttcctcggcgtcagtggggcctgtgctggtgcattgctcaggttcttctccgttttgccctagccttcaactcagcagctccacgccgccttccatctccacgccgccttccatctccacgccgccttccatctccacgccgccttccatctccacgccgccttccatctccacgccgccttccatctccacgccgccttccatcgctggcatcacctgcctccctgcttgtttccttttca

SEQ ID NO: 5385 - DNA, 477 bp, Homo sapiens
  MAP TO AC005529.7; EXPRESSED IN PLACENTA, SIGNAL = 8.4; EXPRESSED IN LUNG, SIGNAL =  10; EXPRESSED IN HEART, SIGNAL =   8; EXPRESSED IN FETAL LIVER, SIGNAL = 8.5; EXPRESSED IN BONE MARROW, SIGNAL = 9.1; EXPRESSED IN ADULT LIVER, SIGNAL = 8.1; EXPRESSED IN HELA, SIGNAL = 8.1; EXPRESSED IN BRAIN, SIGNAL = 8.7
catcgagccagtgacagaagccctcagtgattgttctgggggacccagaagtcacaagaatggaacagttttgcttctacctgccccaattcagaaagctgaaatcttcttggtttataagacagctgtgacttctgttgggacctgctgaaacttgtcacatgtgacagtgtgtgccagattctttggaaggttgaataaaattttgagcctcagctggcgcttacagtagctgttcttattggatccacagaataaaaagggcacagagctgctgcttggagtggatgccctggggcttcacatttatgaccctgagaacagactgacccccaagatctccttcccgtggaatgaaatccgaaacatctcgtacagtgacaaggaggtaggacatgtgtgtactgcagatgggtccagcagatctttccctgtctgcccccctcactggagcctccccagccagggcatctcctt

SEQ ID NO: 5386 - DNA, 486 bp, Homo sapiens
  MAP TO AC005500.1; EXPRESSED IN PLACENTA, SIGNAL = 2.9; EXPRESSED IN HEART, SIGNAL = 3.3; EXPRESSED IN FETAL LIVER, SIGNAL = 5.1; EXPRESSED IN BONE MARROW, SIGNAL = 3.2; EXPRESSED IN ADULT LIVER, SIGNAL = 2.7; EXPRESSED IN HELA, SIGNAL = 3.3; EXPRESSED IN LUNG, SIGNAL = 3.2; EXPRESSED IN BRAIN, SIGNAL = 2.6
aagagtcttgggcatgatggcacacaggtcatcaggaagaaggccatcaggaagttggactagaggtgggaggggagaaggaattaggggatttggaaatagagggaaaacaggtgagcctgagggaggcacaggagcaaggggagcaacagagctggccagtctgtgtgtggtggggctgatgcctgcctgctcacccctgtcccctgttttgccaactgtcaggccacagttgtaagggatcttgtggctgtcaggatggcagaggagcaggagttcacccagctctgcaagttgcctgcacagccctcacacccacactgcgtgaacaacacctaccgcagcgcacagcactcccaggctctgctccgagggctgctggctctccgggacagcggaatcctcttcgatgttgtgctggtggtggagggcagacacatcgaggcccatcgcatcctgctggctgcgtcctgcgattacttcagg

SEQ ID NO: 5387 - DNA, 485 bp, Homo sapiens
  MAP TO AC004891.1; EXPRESSED IN PLACENTA, SIGNAL = 4.1; EXPRESSED IN LUNG, SIGNAL = 4.2; EXPRESSED IN HELA, SIGNAL = 3.4; EXPRESSED IN HEART, SIGNAL = 2.9; EXPRESSED IN BRAIN, SIGNAL = 3.4; EXPRESSED IN FETAL LIVER, SIGNAL = 3.2; EXPRESSED IN ADULT LIVER, SIGNAL = 3.1; EXPRESSED IN BONE MARROW, SIGNAL = 3.6
gccaaacagtagcctggaggtacagagaatgttatggaacaattcctccttctgtgtgtggcatcttgtgtgaataatgccagtgtaaacaaccctccatgtattcatcagagtctgaacaggctacttatgtaaagcttcttattaagagatgcaccaaccgctcacagaaaactttacccatatgctatacattcatttagaaagagaggagtgatttacatgcatttcaattgtggcttaggaaaagcaccagctcctcctctcttcatccctcatttatatatgggaaattaagccacagaccagttgagtcaatttcttcttctggtcaagcaggatcacagggtatagttcaaatgataacatgcatatgcattgggctcttgtactctgctcattggctctgcggaatctactggggattaaaggaattattcaagactaaaataaccaagtaataacagatgctctaagctgaccaa

SEQ ID NO: 5388 - DNA, 488 bp, Homo sapiens
  MAP TO AC004860.1; EXPRESSED IN PLACENTA, SIGNAL = 1.9; EXPRESSED IN HELA, SIGNAL = 1.7; EXPRESSED IN HEART, SIGNAL = 1.7; EXPRESSED IN FETAL LIVER, SIGNAL = 1.7; EXPRESSED IN LUNG, SIGNAL = 1.9; EXPRESSED IN BRAIN, SIGNAL = 1.9; EXPRESSED IN BONE MARROW, SIGNAL = 1.7; EXPRESSED IN ADULT LIVER, SIGNAL = 1.7
ggaccagactcagagccaagagagacagacagctgtcctagctatgacagcctgactctgtaatatattctccttcccatcactttgtggctatcctggcactttttttcctaaacagttacagtttcaagtgatataattctccagagtacattgccatgtcctttatattttgtgatcattgatctttgctataaaactatactgtttgagtgtaaagtttgtaagctttaataatagacttttcactttcagtccacaggataccatcactgagctggaatacaacatggggcatctgaaaagaagaaccaaaatagatgcctggtcttcaactaaattacctgttcatctttttccaggaaaccttggaacaccaaggaatcagcagtcaaacgagctcagtctctcagaacacatgtgggggaattgagtatttcaacttttaggtagacagtttctacaagctaaatagtggaacgaaagga

SEQ ID NO: 5389 - DNA, 463 bp, Homo sapiens
  MAP TO AC004812.1; EXPRESSED IN LUNG, SIGNAL = 2.9; EXPRESSED IN FETAL LIVER, SIGNAL = 2.7; EXPRESSED IN BRAIN, SIGNAL = 2.9; EXPRESSED IN BONE MARROW, SIGNAL = 2.2; EXPRESSED IN HELA, SIGNAL = 2.7; EXPRESSED IN PLACENTA, SIGNAL = 2.6; EXPRESSED IN HEART, SIGNAL = 2.3; EXPRESSED IN ADULT LIVER, SIGNAL = 2.3
tgcaggaatccaggaaaaagcgagaggatgtacagccctctcaagactgcttccaaagaatatatggggaaagcgtgggcgggagtataaacaagacttgccacgagtgggtaaacgccgaagctgagtgacaggtacgtgggggattcttataagtctattcctgtaaatgtctggaattttctaaaagcaaaagttggctgtggggtcagcagtcccctcaccttagtgatggcatttagggcatcccagctctcctccagaaccacagggctggagtcattgaagaggcggatcaggcccgagaccaggctccgcaggtggctggtgtagtcagcctttgagcgggaacagtagatgttgaggatgatggcagcagcttgcctcatgcccacctcagggctgcgggtggcctccagcagatactcgatgatgatccggtgccctgtgtcatcctctacgg

SEQ ID NO: 5390 - DNA, 452 bp, Homo sapiens
  MAP TO AC004616.1; EXPRESSED IN PLACENTA, SIGNAL = 2.9; EXPRESSED IN HEART, SIGNAL = 3.1; EXPRESSED IN FETAL LIVER, SIGNAL = 2.8; EXPRESSED IN BRAIN, SIGNAL = 2.9; EXPRESSED IN LUNG, SIGNAL = 3.1; EXPRESSED IN HELA, SIGNAL =   3; EXPRESSED IN BONE MARROW, SIGNAL = 2.8; EXPRESSED IN ADULT LIVER, SIGNAL = 2.5
tcctcacagaagcactcagggcagaagaggagaccgaggtttctgtgcaattatttatttggaaatggagcccattcccttcctggagcaggagctcaggaagtggagggaaggacgtgaaacaggaaaagaggaaaagcccatttgaggatttatgactggatttgctgccaaagttgcaactacagttttttaggataactgtaaggctgcactggggagatgaaagaggaagctatttctccatctccttccgtcctctatgggtgaaggatggctccttctctcttctgatcctgagtgctggaaagctcaagaaattcttctgagaattgagtgagttcagccagcctggattccctggaattctggtgaagcctgactggggtaagaacaaagattgagaaggtttgacttggtagacaaccagtacctcatgaatagatatcctg

SEQ ID NO: 5391 - DNA, 383 bp, Homo sapiens
  MAP TO AC004485.1; EXPRESSED IN HEART, SIGNAL = 2.7; EXPRESSED IN PLACENTA, SIGNAL = 2.8; EXPRESSED IN FETAL LIVER, SIGNAL = 2.9; EXPRESSED IN BRAIN, SIGNAL = 2.8; EXPRESSED IN BONE MARROW, SIGNAL = 2.7; EXPRESSED IN ADULT LIVER, SIGNAL =   4; EXPRESSED IN LUNG, SIGNAL = 3.1; EXPRESSED IN HELA, SIGNAL = 2.8
aaattacttctaggaaggcccacaccactattgagagaagaacactgtggaggcttgattaatttagcttaagataatgtcattgattctcaagaataagaacttattctgagggttaaggattcagagaataaaaaatagggggtgatatgccctacatgtgcttacatccttatctcctttctctccagtccaagccacatcccctggccaaaatacaaacaaaaccaactgttggcaactcaaccctgcatcttctcctagctgctgagccatttctctcctttgtttcaaagtcaagttgtttatttctaacagctttgttaagataacattgagatactgttgagcttgttgagattcaaaaggaggtgaatcagtgg

SEQ ID NO: 5392 - DNA, 474 bp, Homo sapiens
  MAP TO AC004945.1; EXPRESSED IN LUNG, SIGNAL =  14; EXPRESSED IN FETAL LIVER, SIGNAL =  11; EXPRESSED IN PLACENTA, SIGNAL =  12; EXPRESSED IN HELA, SIGNAL =  12; EXPRESSED IN BRAIN, SIGNAL =  13; EXPRESSED IN BONE MARROW, SIGNAL =  12; EXPRESSED IN ADULT LIVER, SIGNAL =  11; EXPRESSED IN HEART, SIGNAL =   9
cagggggagtaggagtactgacttttgaacagtaaaaaacctgcatataactattgactcccccaaaatttaactactaataggctagttgaccagaagccttactgataacattaagcaatcaacacagattttgtatgttatatgtattatttattgtattcttacaataaaataagagagaaaaaagaaaatgctattaagaaagctgtaagaaagagaaaatgtatatactattcatgagctggaagtgggtcaggagaatggtctccatcttccttgtcttcacactgagtaggctgagggggaagaggatgagggggagctgctctcactgtctcaggggtggcagaggtggaaaaggtggaggaaggggaaggagaagcaggtggagcaggcacactcagtgtaactttactaaaatacatggtaatttctgactttttttccttgtcatttttctaaaattgtttc

SEQ ID NO: 5393 - DNA, 396 bp, Homo sapiens
  MAP TO AC005663.1; EXPRESSED IN LUNG, SIGNAL = 2.8; EXPRESSED IN BRAIN, SIGNAL = 1.7; EXPRESSED IN ADULT LIVER, SIGNAL = 2.5; EXPRESSED IN PLACENTA, SIGNAL = 2.6; EXPRESSED IN HELA, SIGNAL =   3; EXPRESSED IN HEART, SIGNAL = 2.8; EXPRESSED IN FETAL LIVER, SIGNAL =   3; EXPRESSED IN BONE MARROW, SIGNAL = 2.3
gctgtcccaactggaggtagctccagtccccccggccctgtctctgaagctcagcgccctgctcacaggggctcctgtgaccgcctgcacacaggcggtctccaggggctctcctggcagtgcccctcgccctcgcgggatccctgctccttcctggagaggtggggcagaggtgtgttctgacacctagtcctgcccctcagggagctacgccatggctgagcttgtgcggaatgtgcgcaatgcacaggctccgccgcgaccgggggcctgcctggaggaagacaccgtggtggcggtgctcaacaccatccacgaaatcgtgtccgacagcctggataacgcgcgctcgctcctgcaggcacgcggggtgccagcgttggtggctctcgtggc

SEQ ID NO: 5394 - DNA, 464 bp, Homo sapiens
  MAP TO AC005540.2; EXPRESSED IN PLACENTA, SIGNAL =   6; EXPRESSED IN ADULT LIVER, SIGNAL =   5; EXPRESSED IN LUNG, SIGNAL = 6.3; EXPRESSED IN HELA, SIGNAL = 5.7; EXPRESSED IN HEART, SIGNAL = 5.2; EXPRESSED IN FETAL LIVER, SIGNAL =   5; EXPRESSED IN BRAIN, SIGNAL = 5.6; EXPRESSED IN BONE MARROW, SIGNAL = 5.5
ctgctacacaaagccaggagtaagcatctagaatgaaacatgcccaagggaaggaaaacctccagaaatctggggattggaggaaaatttctcattaagcaagatgtattattctaagtaaatctattaagtagatttactactactattagtttttagttaaatgctaagggaaaggtcaaccaagagggctgcagaagatgggatcattttatttacatagataatacacgtatcattgtatataatttatgatcctagtattcacaaggggaaggattgtaaaaaaatgtgctgtcttcattttcaacctgacagttttcaggcttgtgtgtttcctagtcaagtgtttatgcttgttcttgtatgtgctatctaagagggtatcaaacgctttgtagaggtgctgaaaaggtattacattctcagcttctttccaagaggcatcctctgggcctctttaa

SEQ ID NO: 5395 - DNA, 466 bp, Homo sapiens
  MAP TO AC004676.1; EXPRESSED IN ADULT LIVER, SIGNAL = 4.8; EXPRESSED IN PLACENTA, SIGNAL = 5.3; EXPRESSED IN LUNG, SIGNAL = 5.4; EXPRESSED IN HEART, SIGNAL = 4.8; EXPRESSED IN BRAIN, SIGNAL = 4.6; EXPRESSED IN HELA, SIGNAL = 4.8; EXPRESSED IN FETAL LIVER, SIGNAL = 4.6; EXPRESSED IN BONE MARROW, SIGNAL = 4.6
ctgcttagtgacagagccccaaaccgcccccaccgccccgactcctgcttcttaaggcccaagtgaccagaggtatagaataaaagaaagggttggctgggcccctgaccccaccaacagggtggtctctgaacccgacagctggtacaaacagccctggcagtgcaatactccaaatgagtacatcttgtcctcccaagatccttggaaatcgaagctttgctatgctcattactgagaaggctctggcgcccttcaacccatttgtatctcttcaacctctcactaaacatttgttgtctggccggcacagctgcaggctcctaaaagccatggccccagacctctgggaagctcccctgaaagaggtcaaggtgaggagtatcccgaagggcattgtgtttgattctagaagcaagtggacaccaggacaccacaagattgatcacgagaaatccatgcctct

SEQ ID NO: 5396 - DNA, 428 bp, Homo sapiens
  MAP TO AC004590.1; EXPRESSED IN HEART, SIGNAL = 4.2; EXPRESSED IN BRAIN, SIGNAL = 4.4; EXPRESSED IN PLACENTA, SIGNAL = 4.2; EXPRESSED IN LUNG, SIGNAL = 4.4; EXPRESSED IN FETAL LIVER, SIGNAL =   4; EXPRESSED IN BONE MARROW, SIGNAL = 3.9; EXPRESSED IN ADULT LIVER, SIGNAL = 4.5; EXPRESSED IN HELA, SIGNAL = 4.4
gatgtgatgccagtgaggctcccaggagaccgggtgcacatgagaggacagggctgctgggccctgcctgagaccactcctcccctgctcacccacagcccagcgcccgcagctctccgcacagcccctggagcgctgcaagcagctggaccagcaggcgctccagccggaacagcctcggccgtgcacccagcctgaagcggagaagcccaagtggagagcggcggtccctgttgtcgggagaaggccaggagagccaggatgaagaggagagctcagaagaggagcgggccagccctgcgggcagtgaccatcgccacagggggtccctggagcgggaggccaagagttcctttgacctgccagacacactgcaggtgccagggctgcatcgcactgccagtggccgagggtctgcttctgagcac

SEQ ID NO: 5397 - DNA, 475 bp, Homo sapiens
  MAP TO AC005611.1; EXPRESSED IN PLACENTA, SIGNAL = 5.3; EXPRESSED IN HELA, SIGNAL = 5.3; EXPRESSED IN HEART, SIGNAL = 5.1; EXPRESSED IN ADULT LIVER, SIGNAL = 5.2; EXPRESSED IN BONE MARROW, SIGNAL = 4.8; EXPRESSED IN BRAIN, SIGNAL = 5.8; EXPRESSED IN FETAL LIVER, SIGNAL = 4.9; EXPRESSED IN LUNG, SIGNAL = 5.1
aatgaatcaatgaataaataaatagccatttaatttacagagtatcacaatagattaaaaacaagacccaactatatgttgtctacaagaaacttaaagacacagatagattaaaaataaagaaatagagaaagatacaccatgctaatactaatcataagaaagctgaagtagctatattaatgtcattcaaagcagatttttaagagcaagaaatgttgtcagggataaagaggcatattgcataatgataaaggagtcatatgtccaagaagacataacaattcttaatgtctatgcacctaacaacgcaacatcaaaatgtgtgagccaaaaactggcagaactgcaaggagaaataaatgaatctactattgtaattagagacttcaacatccctctattagtaattggcagatccagcaagcagaaaatcattaaggacatagttgaacggaacagcactatcaatcaa

SEQ ID NO: 5398 - DNA, 459 bp, Homo sapiens
  MAP TO AC002302.1; EXPRESSED IN PLACENTA, SIGNAL =   2; EXPRESSED IN LUNG, SIGNAL = 2.8; EXPRESSED IN FETAL LIVER, SIGNAL = 2.1; EXPRESSED IN BRAIN, SIGNAL = 2.2; EXPRESSED IN BONE MARROW, SIGNAL = 2.3; EXPRESSED IN ADULT LIVER, SIGNAL = 2.2; EXPRESSED IN HELA, SIGNAL = 2.4; EXPRESSED IN HEART, SIGNAL = 2.1
gcattctaatgacttatctggagattctaggaaagaaattaaattcagctttcaatgtctgtctttctagatttcttccttctaacgttattgttgttatgtcctcaaacaaaaacatttagtacttattatgagcttcatagggttgttgtggattaatacatgtaaagctcttagtgcaatacacgacacatagataacatttaattttattatcgttactgttgggtagcactcagttcatgaaattcccacacacagtcaagtggtaaatgctattactttgtaaatatcatcgatgaggaacctgaagctcacagaggttgatgacttgcctaggatcgctcagaaagcaggcagcagagctgattgccatggtaaccatttccaagcttcagtgcccagagatggacccagtctggcatgggcttatcccctggagcactgtgagtgtcttga

SEQ ID NO: 5399 - DNA, 488 bp, Homo sapiens
  MAP TO AC004828.2; EXPRESSED IN BRAIN, SIGNAL = 1.8; EXPRESSED IN ADULT LIVER, SIGNAL = 1.7; EXPRESSED IN HELA, SIGNAL = 1.9; EXPRESSED IN HEART, SIGNAL = 1.5; EXPRESSED IN BONE MARROW, SIGNAL = 1.6; EXPRESSED IN PLACENTA, SIGNAL = 1.5; EXPRESSED IN LUNG, SIGNAL = 2.6; EXPRESSED IN FETAL LIVER, SIGNAL = 1.5
aattggaagtgacagctcggcagcatcctaaggtctcagcttcgtgatcctcccttggtgaggcttttggaggggaggggcaggtaggagagcttaatccaagaggctaatctgcggctcccccaggagaaggtctggacaccagtgaagtggaaatgctgactttttccccctttagcagagctgcagggtgacccaagctgcatgtgagcggaggcctaatggaaaaacagccttacagacacagggtttgcagggccaagggcagctgggtttgcaccacctgcagcagtagcgaccttttgactttggtcctcctgctgtcgcttgctctatcgccccccagctttgtcttcagcagagcccatggctcatcccgcgcctggtgctgctgctgaaagggcagagtggactgctggagccggcgctgaccttccccgcccccgcccatgctgccctgtgctgcaagctcagcaatccactgccac

SEQ ID NO: 5400 - DNA, 479 bp, Homo sapiens
  MAP TO AC005371.1; EXPRESSED IN LUNG, SIGNAL = 5.1; EXPRESSED IN HELA, SIGNAL = 4.1; EXPRESSED IN BONE MARROW, SIGNAL = 4.4; EXPRESSED IN ADULT LIVER, SIGNAL = 4.9; EXPRESSED IN PLACENTA, SIGNAL = 4.8; EXPRESSED IN HEART, SIGNAL = 4.1; EXPRESSED IN FETAL LIVER, SIGNAL = 4.7; EXPRESSED IN BRAIN, SIGNAL = 5.1
agtccagatgtttagcttgctgttttgttattctttcagcagattcacattgcagccattgatctctggttttcaaatggggagctctaaattactgcaaacattgtgccttggctgccttttaaatcttttcaagcagtcagctttgaagggaggatggccattagtcatttgggacatattttaatctgtgagataatagcgaggcatcttctcctacagggttgcaagtggctctcccattgccccacacacctgtctctcttgcctcagtaaacagtcaaacaggaaagaggctttactgaattcattttgtagcacattcttcaagcccgagatggttggcactaagtatccaagctgcttgtgaaaggaagcatccatgtgcactgatctaagacatagctttgaacagttaacagtttctggaggaaaatagtgacagaaggggaataatgtcctgccagctctagatccat

SEQ ID NO: 5401 - DNA, 461 bp, Homo sapiens
  MAP TO AC005588.1; EXPRESSED IN PLACENTA, SIGNAL = 3.9; EXPRESSED IN LUNG, SIGNAL = 4.7; EXPRESSED IN HELA, SIGNAL = 4.6; EXPRESSED IN FETAL LIVER, SIGNAL = 4.6; EXPRESSED IN BONE MARROW, SIGNAL = 4.1; EXPRESSED IN ADULT LIVER, SIGNAL = 5.4; EXPRESSED IN HEART, SIGNAL = 3.5; EXPRESSED IN BRAIN, SIGNAL = 4.8
tgtacctagatttacgtctcatgggtactccagtgcctactgctctggctggtacgtagtaggtatttagtatttgctaagtaaagaggaacattgaattaattgaattggattccctgaaacaggattcgaagccttagccaaatgtgagccctcgcttggacatggtcgaagaagccagcgcattaggaaggattagcttcatttccagccagaaaaacactccagagtgacaacttagttgagtcctgctgcaggcttggttctggtttgctgcatgcagggctgctctctctggctgaactgggcacagagattgtgcagcaaagtaaacagctgactgccttgcaccagagtctctctgatgacacagcgcttgacttcaagtgtcaacaaacggaccctgaaatgagactagatgtgaaacaaaggacagaatgttcaagcactttgcaaccgac

SEQ ID NO: 5402 - DNA, 471 bp, Homo sapiens
  MAP TO AC005803.1; EXPRESSED IN LUNG, SIGNAL = 1.8; EXPRESSED IN ADULT LIVER, SIGNAL = 2.1; EXPRESSED IN PLACENTA, SIGNAL = 1.7; EXPRESSED IN HELA, SIGNAL = 1.8; EXPRESSED IN HEART, SIGNAL =   2; EXPRESSED IN FETAL LIVER, SIGNAL = 1.8; EXPRESSED IN BRAIN, SIGNAL =   2; EXPRESSED IN BONE MARROW, SIGNAL = 1.7
cctttgcagacatcatgaccgtaaggcttttggggccagcatcttcccagttccctgtaggtcacgaggggccacttctcccacttcctggggtcagcactgtcctctgtgggctgcagagcaggcagctcaaggcacttggtttgggaagcctggtctccctgcaaagccgggaggcatcaagctctaattgtggtgaccaggccctcagtcacagctggggccaccagaacagaggggccgccctcgctcagagggcgtctggagtcactgggggctggggctctgggggctcgtggaagtagtagggctggaagagtctctcgtggctgcacagctccatggcccggtaggtgtgtgcgaggaggtgggggaagcgagatgtgaagtagcacacgaagtcgtcggggagggaccccagcgtctcccgcacctctgcaggcagctcccggtagtggtgcttctgcaaag

SEQ ID NO: 5403 - DNA, 482 bp, Homo sapiens
  MAP TO AC004070.1; EXPRESSED IN PLACENTA, SIGNAL = 1.1; EXPRESSED IN BRAIN, SIGNAL = 0.73; EXPRESSED IN ADULT LIVER, SIGNAL = 2.4; EXPRESSED IN HEART, SIGNAL = 1.6; EXPRESSED IN LUNG, SIGNAL = 1.2; EXPRESSED IN FETAL LIVER, SIGNAL = 1.9; EXPRESSED IN BONE MARROW, SIGNAL = 1.2
gcaaaaatgtgaaacaaggccattcttctcacttttttgttttaaaatatgtaattttcataaaatatggtatgctaacatgtaataggtttatttttattttaagcaaattaataaatacattttaaagttctcaaacattttaatatagttcatatagatacaacccacacaaacaaaacctctgaaatttccagtcattgttaagagtgtgaaagggccctgagaccaacatgtttgataactgctactctagtccagtggttctcaaagagtggccccagaccaccaccaccaccgccatcgccatcatcatcatcatgcctgggaacttgttagaaacatcagtcctcaggccccactctaaatctactgaattagaaactctggggatgaggcccagcaggttctgttttaacaagctttccaggtaatgctgatcctcactaaactttcagaactccaagtcctactcccaaccc

SEQ ID NO: 5404 - DNA, 463 bp, Homo sapiens
  MAP TO AC004927.2; EXPRESSED IN HEART, SIGNAL = 1.8; EXPRESSED IN BRAIN, SIGNAL = 1.8; EXPRESSED IN PLACENTA, SIGNAL = 1.8; EXPRESSED IN LUNG, SIGNAL = 1.9; EXPRESSED IN HELA, SIGNAL = 1.9; EXPRESSED IN FETAL LIVER, SIGNAL = 2.4; EXPRESSED IN BONE MARROW, SIGNAL =   2; EXPRESSED IN ADULT LIVER, SIGNAL = 2.4
aggtgcatcaagtcacatgccaggagctcttactatgtcacttgtaagagaatcaacaaatgcaaaagaacttgataaatattttccataacaaaacacaattggttgcaatgggatctagctctgttcctcattagttacccttcactactcagacaggctccatatctcactgaaatccattgtggattctttccagtttgttgggaaatgtgactgtacgtttcctttctactgcatgctttcttgagcctgcttttaaatctagagtacatgcttagctccctcttcccacaggagaaggagcttcagcttcaaggagaggtaaaagcaggtaacaagcagctgcttttgaagtggtgcagcggcagaggaggtggagaaggccaggttgccattatcagtggctaccaggtgccgcgggatcgcgttaggtgataaaacacttggctgacaccagaaa

SEQ ID NO: 5405 - DNA, 464 bp, Homo sapiens
  MAP TO AC006501.5; EXPRESSED IN BONE MARROW, SIGNAL = 2.1; EXPRESSED IN BRAIN, SIGNAL = 1.7; EXPRESSED IN ADULT LIVER, SIGNAL = 1.7; EXPRESSED IN PLACENTA, SIGNAL =   2; EXPRESSED IN LUNG, SIGNAL =   2; EXPRESSED IN HELA, SIGNAL =   2; EXPRESSED IN HEART, SIGNAL =   2; EXPRESSED IN FETAL LIVER, SIGNAL = 1.9
gaaggaaaaggaggacagggtccaacccagttgccatgcccggggtggcgcactcgccccttgtcagttgctccaacttgtggtttctctgatgcccctgtgaaacagaggtccctatttttagtgctggactgtcatttctgatgtgctgctgttgcaaaaattcagtagcagctttaacagaaatcctgatttaaaggccccgtttataatgtagatgaagcttgtttaccaaataaaagagcagaatgctgtggtggattggctgcttcagatctcatcaaatggaagagtcctgtgtttattcctttgcatggcatcatgcaaaggccctgcctctgcgtggagcccatgcgtctttgttttgattcattccttcttctggtcaaccagggagaggaggaagagggagttgttccttgcctagaggaaaatggcagagcagcagcagatccaggtagtgg

SEQ ID NO: 5406 - DNA, 482 bp, Homo sapiens
  MAP TO AC004974.1; EXPRESSED IN BONE MARROW, SIGNAL = 1.3; EXPRESSED IN ADULT LIVER, SIGNAL = 1.5; EXPRESSED IN PLACENTA, SIGNAL = 1.6; EXPRESSED IN HEART, SIGNAL = 1.4; EXPRESSED IN LUNG, SIGNAL = 1.3; EXPRESSED IN FETAL LIVER, SIGNAL = 1.4; EXPRESSED IN BRAIN, SIGNAL = 1.5
catgtcctcccgaatctaagactgtttactatattactaaggaataaagcatccaatgctcttattataatatttttagtgaccatgaaaccctgaaactatgaaagttttaatagaatgactatcaggaaaatgaaaaaaaaaatgcttttttatctggttgaagagcgtattgagcaactctaaagggacaatgtgcttgtagaaggaggatgaaagaatgatgctacttcatatttgtatagagctttaattaataagtaaattcaggcattatataggtcaccttgacaatcacatgatctgcctccttgacaatcacatgatctgcctccaaatctttctttatgaaaagtcttatatctcttttaagatcttgaacctcaactgcatttataacactgctgaaaaatggaggagaaaacaaacagtcactaacattgcagcaaattaatgaaggcagggctttgaaggaaagcttt

SEQ ID NO: 5407 - DNA, 446 bp, Homo sapiens
  MAP TO AC004894.1; EXPRESSED IN BONE MARROW, SIGNAL = 3.9; EXPRESSED IN ADULT LIVER, SIGNAL = 3.4; EXPRESSED IN PLACENTA, SIGNAL = 3.6; EXPRESSED IN HEART, SIGNAL = 3.3; EXPRESSED IN LUNG, SIGNAL = 3.8; EXPRESSED IN HELA, SIGNAL = 4.7; EXPRESSED IN FETAL LIVER, SIGNAL = 3.3; EXPRESSED IN BRAIN, SIGNAL = 3.7
gttaattagtggcaacttcaagctctttagacttcaacacttctcgttcttcatgcctcagcatttttttttgcagtaataatggtattcttcattagcatcaccactgttttggggccaacacctccaggaactggagtgatataaccagctttttgtctgactccttcaaaatccacatctccaactaacttgggtttgcagttacgggatcttgaactctatttattcccacattaatgatggctgctccttccttgatcatatgtgctgtgatgagatttggaatgtctgcagcagatattacaatatctgcaagaatggtatgcttcttcagctgctctttgggagtgtatccatgagatattgtaacagtagcatcacctctgggaccttcatgcgccccatctgtgtgcagtaacattgcaactggcatttcaacattt

SEQ ID NO: 5408 - DNA, 447 bp, Homo sapiens
  MAP TO AC005344.1; EXPRESSED IN PLACENTA, SIGNAL = 1.4; EXPRESSED IN HEART, SIGNAL = 1.7; EXPRESSED IN BONE MARROW, SIGNAL = 1.1; EXPRESSED IN ADULT LIVER, SIGNAL = 1.4; EXPRESSED IN LUNG, SIGNAL = 1.3; EXPRESSED IN HELA, SIGNAL = 1.6; EXPRESSED IN FETAL LIVER, SIGNAL = 1.2; EXPRESSED IN BRAIN, SIGNAL = 1.2
ggccatctatgtggggaagattatgattggaaggaaggtttttcttagagctgccagtctttattttctacctgctgctcttcattttgtcctcagaggaggaacgtgtcctctcttccctaggacgtctgtcttggtattgaagacagtgcttctgtgcttcttacttatcttccttgaggttagccatccttgtctctgcaccctctccctcagtcctggccactcccatgtgaacctcagtgtttattcctgacccaggatacctcagctccaactggaccccaggcagtaagaggcttcctcttagagtcagcggattcccactgatgcagcccaagattacctgccccgtcctcctcctcctgctcctcctctggctcctcccactctccctcctcctcctagtgcttctcctcctgttcctctcctcttcttcccctcctg

SEQ ID NO: 5409 - DNA, 467 bp, Homo sapiens
  MAP TO AC006007.1; EXPRESSED IN PLACENTA, SIGNAL = 2.3; EXPRESSED IN LUNG, SIGNAL = 1.3; EXPRESSED IN FETAL LIVER, SIGNAL = 2.3; EXPRESSED IN BRAIN, SIGNAL = 1.9; EXPRESSED IN BONE MARROW, SIGNAL = 1.9; EXPRESSED IN ADULT LIVER, SIGNAL = 2.1; EXPRESSED IN HELA, SIGNAL = 2.1; EXPRESSED IN HEART, SIGNAL =   2
gcattgagggtgagtcttcctctcccaatccacggatgcaaatgtcagtctcctctggcaacaccttcacagacacactcagaaaagatactttaccagccatttaggcatccttcaatccagtcaagttgacacctaatattaaccattgcacatacctgatctagtatatttcttcaacgtaaatcagcctgtagtataccaggccttcaataaatatttattaaatgaatacattgtaagcacagtttcatgttttaaatgatgtaaggtctgtagtccaggaaagatcactttgagtcttgaaataactcaagcacaattgctgctggacatagaaattctgagcacagagagcattactgtcggccatgtattcttctaagagacaggacacacacacacacacacacacacacatatatgtctcagaacaaaacatgttacacttttggatttttgccatt

SEQ ID NO: 5410 - DNA, 459 bp, Homo sapiens
  MAP TO AC004633.1; EXPRESSED IN BONE MARROW, SIGNAL = 1.2; EXPRESSED IN PLACENTA, SIGNAL = 1.1; EXPRESSED IN LUNG, SIGNAL = 1.3; EXPRESSED IN HEART, SIGNAL = 1.4; EXPRESSED IN FETAL LIVER, SIGNAL = 1.2; EXPRESSED IN ADULT LIVER, SIGNAL = 1.9; EXPRESSED IN BRAIN, SIGNAL =   2
tgatcttgggagaatgagccattcagaatgaaggacaacacataaatcatttacaaagaaaaaaactgcatgaaatatattaaatcagcatttccatttaagtggctttactgctacctcattctgaaagataattatcaacgtacaaaacatagagagtgctaaagaatcattatatttatcaccgacattctctggaagctagactgaatttggccattatttgtagcttttacatgtgaataagataaccatgaagagtgcagacagggaacctgatgctcctctcctaaccccaccctctccaggggaccaaatctactccttggataaaggcatggtcaggtctaatgctgttgctgctgctgctgccgctgctgctgatgatgatgacgacgatgactcagcgtaatgttagaaatcattattaatcataaaagcaagataattccagtaact

SEQ ID NO: 5411 - DNA, 465 bp, Homo sapiens
  MAP TO AC004492.1; EXPRESSED IN LUNG, SIGNAL =   2; EXPRESSED IN BONE MARROW, SIGNAL = 1.8; EXPRESSED IN HELA, SIGNAL = 1.8; EXPRESSED IN ADULT LIVER, SIGNAL = 1.8; EXPRESSED IN PLACENTA, SIGNAL = 1.8; EXPRESSED IN HEART, SIGNAL = 1.7; EXPRESSED IN FETAL LIVER, SIGNAL = 1.9; EXPRESSED IN BRAIN, SIGNAL = 1.7
tacccaggaaaagagatgcccaccacagtgcattttttgaagagaacagtggctagacttgcccaaaccctgaaatccaaacagcagcgccaaacagtggctccacctagtgtcagagcccatcccatggtccagcccaggcaaggactatggagcataacctctggacttgtctagaacagtgatccatctaaacctagagcccagcctgccgacctacccaactgcataacccaaatagcaatactccccaacagggaaatacactttgtgacgctgccagatattagaagcaatcacagttcccagccagcagctccgcctgattgcagtggccagccagtagtcttgctggaaggtgaagctcagccagcagccgcatccaaactcagagcaaaggcagagacccagccaactagagaaactgacagcaagctctgcctccctggggttgatatcagctgg

SEQ ID NO: 5412 - DNA, 464 bp, Homo sapiens
  MAP TO AC004953.1; EXPRESSED IN FETAL LIVER, SIGNAL = 1.7; EXPRESSED IN BRAIN, SIGNAL = 1.7; EXPRESSED IN BONE MARROW, SIGNAL = 1.8; EXPRESSED IN PLACENTA, SIGNAL = 1.7; EXPRESSED IN HELA, SIGNAL = 1.8; EXPRESSED IN HEART, SIGNAL = 1.5; EXPRESSED IN ADULT LIVER, SIGNAL = 1.7; EXPRESSED IN LUNG, SIGNAL = 2.1
gacaagggaagcctttttcctgcagcctctggctgcaagagctccctgtcacaccccacaacagtgtttgctgcccctgaatgtcggggagacttgtgatcccctaatccttctcttcaccgtgagtgatgacgtagcacaggtttctgtagtccaggttgccgcacacatctgggggaaatgctgcaaacatctgcttgacctgagaaggagcagagagtcagcctgcaccaggccaagtgggggccagagcagagaatccgccgtgacccaccagaatcccagtttacctcctcctcactgaagcggtctgcctgggtcataagtttttctttgatgctgttcaagggagagacacagtcatgttcagggaacgggatacccagcttgaacatgcagatcccaggggtgatgaggggcaagtgggggcagggggacatcctggaccaggaggacatcaacct

SEQ ID NO: 5413 - DNA, 466 bp, Homo sapiens
  MAP TO AC005479.2; EXPRESSED IN FETAL LIVER, SIGNAL = 1.8; EXPRESSED IN BONE MARROW, SIGNAL = 1.7; EXPRESSED IN ADULT LIVER, SIGNAL = 1.8; EXPRESSED IN HELA, SIGNAL = 1.9; EXPRESSED IN PLACENTA, SIGNAL = 2.1; EXPRESSED IN LUNG, SIGNAL =   2; EXPRESSED IN HEART, SIGNAL = 1.8; EXPRESSED IN BRAIN, SIGNAL =   2
gaagcttgcctgagaaatgcaaccaattgtttgctaatagtaaaacacaaggtataggggtgggagctgggggatagttgatgtggtccaggcagaggaaataaatgtgtttcttatctttttcctccagctggttccaggctcttctcctctgacattattaaaagcctggcaggtactttgaatgtttgtttccatctagtttccttgccattctaatctgcaaatactcttagctagtttcctttcttgcatgttctgtgttgtctagccactaaattttcccagcctcacctgcctggcaaccaggtacatgagtaagaccttgttagaagtggacagcaagtttctgctggacttcttccagccctggtcattctaacaaaagagatgtgaagtaagccacaagtctccactgttgttcatgatcgatttatcattaggtacttgaggaggaaaagagggg

SEQ ID NO: 5414 - DNA, 474 bp, Homo sapiens
  MAP TO AC003691.1; EXPRESSED IN PLACENTA, SIGNAL = 3.6; EXPRESSED IN HEART, SIGNAL = 3.3; EXPRESSED IN BONE MARROW, SIGNAL = 3.1; EXPRESSED IN ADULT LIVER, SIGNAL = 2.3; EXPRESSED IN HELA, SIGNAL = 1.9; EXPRESSED IN FETAL LIVER, SIGNAL = 4.2; EXPRESSED IN LUNG, SIGNAL = 3.6; EXPRESSED IN BRAIN, SIGNAL = 2.2
tcctgaagacagcaccaaggggggatggtgttaaaccatgagaaactgcccccatgatccaatgacctcccaccagacccacctccagtatttgggattacctttcaacatgagatttggtggggacacagatccaacccatacaacacaacttttatttttattgtatatggcctaccaatgattgaacatggacctcccactgtgaattcatatattcacaagcttaagaaccttttcactctgctaggaggtatatctgcttttcttcctcctagagagtctgctctctacttgtatatttgtctccgtgtagcctaaaagtgggattcaaaggcatgctatcaatttgattctttctagagagaaaaagcagcagctgcttcatttcctggaaactctttccagaagccaggaattctgggaaatgctgcaggtgacctatggagggagtgggcagaaactttccctacc

SEQ ID NO: 5415 - DNA, 449 bp, Homo sapiens
  MAP TO AC004881.1; EXPRESSED IN PLACENTA, SIGNAL = 1.4; EXPRESSED IN LUNG, SIGNAL = 1.4; EXPRESSED IN HEART, SIGNAL = 1.4; EXPRESSED IN BRAIN, SIGNAL = 1.5; EXPRESSED IN FETAL LIVER, SIGNAL = 1.3; EXPRESSED IN ADULT LIVER, SIGNAL = 1.4; EXPRESSED IN BONE MARROW, SIGNAL = 1.2
caaagtacttggggagagcggagcatcgtgagggtgagttatctatagaccatgctgatagcacggctcagacactggacatcactgggttataaatgagccagctgacatttttatagtatgtaccaactcttccaagaaccatttgtcactcttcaaggtttccgctgataaaactgggatgtctaaaaatttgtcaacagccacagaaagtaaccctgaggtcatgtcagagggtgaaaaagaatgtgcttacttggcattctgcaaacacacaaatggaacactggtggcgacagtgtttcaaaggtctctccaggtggcagagttcccagttggctctggtctccctgccaaggatgtggacatggagatggtggattcaggagcagtgcatgataaccaagccctcacatacctggtctgaacgagagacctcaaaccccagc

SEQ ID NO: 5416 - DNA, 460 bp, Homo sapiens
  MAP TO AC004695.1; EXPRESSED IN PLACENTA, SIGNAL = 1.8; EXPRESSED IN HEART, SIGNAL = 1.3; EXPRESSED IN FETAL LIVER, SIGNAL = 1.4; EXPRESSED IN LUNG, SIGNAL = 1.8; EXPRESSED IN BRAIN, SIGNAL = 1.4; EXPRESSED IN BONE MARROW, SIGNAL = 1.3; EXPRESSED IN ADULT LIVER, SIGNAL = 1.6
ctcatttaatcactactaccctaggtctagatgtataatactttattatctatagtttatatttttaaaaaaatgaagacacagggtgattagccacagagtgatttactgagttacataacttgttctgaaactaaggactgatttaggctccccacagcaatgtgcactatttaaggagcaagtcatggttaaggaaaacaccagagacatccaaaaatagttcctgttgctctgtggacaaataaagaagccattgtctacctgttttccctgtgtttttcatccaggttttgttagaagactcattgtcgaagccatcgagttgcagttcctggtattcttccccaacacgcgcatactggtctaaaatgtcaataggagactggtgacggcccccacagctgacactagacgtgacccagtgctcaggaccataggcacctgttgaaagaagaca

SEQ ID NO: 5417 - DNA, 492 bp, Homo sapiens
  MAP TO AC004782.1; EXPRESSED IN PLACENTA, SIGNAL = 2.4; EXPRESSED IN HELA, SIGNAL =   2; EXPRESSED IN HEART, SIGNAL = 1.6; EXPRESSED IN FETAL LIVER, SIGNAL = 1.4; EXPRESSED IN BRAIN, SIGNAL = 2.4; EXPRESSED IN ADULT LIVER, SIGNAL = 2.1; EXPRESSED IN LUNG, SIGNAL = 1.4; EXPRESSED IN BONE MARROW, SIGNAL = 1.7
tccatgtcactttatcataattgctaaataaaatatttctcccatcttaatagttttagaaagtaaaaatacttcttgaataaactgtgtagcgcagaccttcccattacagttcatttctatgtatttgtttaaatacccacagctcgaaaaacaaagaaaaaaataaaaggaattcagcaggccactacaggagtctcacaagaaacctctgaaaatcctggtaacaaaacaatagttcctgcaacgttaccacaactcacccctaccctggtgtcactgttggaggttattgaacctgaagtgttatatgcaggatatgatagctctgttccagactcaacttggaggatcatgactacgctcaacatgttaggagggcggcaagtgattgcagcagtgaaatgggcaaaggcaataccaggtaagatgcaaaacataaaagagcaactatataaacctttgtgttttcttcagcaaaaacactttggc

SEQ ID NO: 5418 - DNA, 476 bp, Homo sapiens
  MAP TO AC003071.1; EXPRESSED IN PLACENTA, SIGNAL = 1.4; EXPRESSED IN LUNG, SIGNAL = 1.7; EXPRESSED IN FETAL LIVER, SIGNAL = 1.4; EXPRESSED IN BRAIN, SIGNAL = 1.6; EXPRESSED IN ADULT LIVER, SIGNAL = 1.5; EXPRESSED IN HEART, SIGNAL = 1.6; EXPRESSED IN BONE MARROW, SIGNAL = 1.5
ccaaattcgttgttcttactgttgtggtatatgatttttttcaaatcaaatttttaaaaagatcgtattttaaatgcttttagggaatttgctacttaagaaattctttgtatatacattgcaaaaagtaccatcgctcccctaatttacattctaaaaaagtctcaaaatatactaatgtttaatttatatttactcacatagtcaaaagttttgttccttttgggatagattgccactattgtatatgatcaaaaagtatgcttttttttctgtgtagtcatagcagcagtacaagctttgaaagtggaacaaacaatgaagatattaagaaagccagtgttctactgatccgtaaattgtatatactgatgcaggaccttgagccacttcctaataatgttgtacttactatgaaactccactactataatgcaggtaggtagagaactttaggcaaattcctccttaagtgc

SEQ ID NO: 5419 - DNA, 468 bp, Homo sapiens
  MAP TO AC004904.1; EXPRESSED IN ADULT LIVER, SIGNAL = 2.2; EXPRESSED IN PLACENTA, SIGNAL = 3.1; EXPRESSED IN BONE MARROW, SIGNAL = 1.9; EXPRESSED IN LUNG, SIGNAL = 2.7; EXPRESSED IN HELA, SIGNAL = 3.1; EXPRESSED IN HEART, SIGNAL =   2; EXPRESSED IN FETAL LIVER, SIGNAL = 2.2; EXPRESSED IN BRAIN, SIGNAL = 2.9
ttaaccccaaaaggaagtggcactggcagggccattctgaagcctaccggtagcttcagtattgttcttaatgctcttggatggagagaatgtatcttgagccaatgtattaatagtagattgctttgcttatgtagtaggcaatatatgggtatacattttcctgactattatcttaatgactattccaaattatgactaccttaaaaactaccaaaatcccctgctccagaattttcagtttcagatgaggttcataattcatggcctcacttttcccacattctcctacaggttggacgtgataagtatgagcctgcagctgtttcagaacaaggtgataaaaagggcaaaaagggcaaaaaagacagggacatggatgaactgaagaaagaagtttctatggtaagtactaggaggaatattgtattccatccttattaaaaatccatgatttttaatccccca

SEQ ID NO: 5420 - DNA, 479 bp, Homo sapiens
  MAP TO AC006014.2; EXPRESSED IN LUNG, SIGNAL = 5.1; EXPRESSED IN BRAIN, SIGNAL = 3.5; EXPRESSED IN ADULT LIVER, SIGNAL = 2.1; EXPRESSED IN PLACENTA, SIGNAL = 3.9; EXPRESSED IN HELA, SIGNAL = 3.1; EXPRESSED IN HEART, SIGNAL = 2.4; EXPRESSED IN FETAL LIVER, SIGNAL =   5; EXPRESSED IN BONE MARROW, SIGNAL = 7.4
agagagagggaagaatggggaggggaaggagtggcacatggggttgagcagaggagaaagtcagaaaggtggcttggagaagccagcagtctgcgaggctggggaggatggagagtggtttggggtttggggtcggggtctaacgtgatcagttgcagaagcattacacggtggcctggtttctttactcagcccctggggtagatcccagccccccacgtaggtcccttggctggaaaaggaagagggaatgtttggatgaatctgatgatgagccagagaaggagctcgcccctgagcctgaggagacctgggtggcggagacgctgtgtggcctcaagatgaaggcgaagcgacggcgagtgtcgctcgtgctccctgagtactacgaggccttcaacaggctgcttggtaggaggacaccccagagagcacctccaatcctgttctttctaaagaggaaacttccaataaccaca

SEQ ID NO: 5421 - DNA, 472 bp, Homo sapiens
  MAP TO AC004650.1; EXPRESSED IN PLACENTA, SIGNAL =   3; EXPRESSED IN LUNG, SIGNAL = 3.8; EXPRESSED IN HELA, SIGNAL = 4.9; EXPRESSED IN FETAL LIVER, SIGNAL = 3.8; EXPRESSED IN BONE MARROW, SIGNAL = 3.9; EXPRESSED IN ADULT LIVER, SIGNAL = 4.2; EXPRESSED IN HEART, SIGNAL =   4; EXPRESSED IN BRAIN, SIGNAL = 3.8
cttgcctcgatgttgatggctgctaattgatcagattggtggttgctaaaggttaagatgactgtgacaatttcttaaaataggactacagtaaagttgaccacattgattgactctttcacacacaaaagatttatctgtagcatgcaatgctgtttgatagcattttacccacagtagagcatctttcaaattggattcaatcctctcaaccccagccactactttatcaactgagttcatataatattctaaatcctttgttgttatttcaacaatgtttacagcatcttcaccaggggtgaagtgatgtgagtgatgatcttcataaactcaagaatccactttctttgctcattcatgagaagcaactcctcatgcatttaagttttatcgagattgcagcaattcagtcacatcttaaggctccacttcttatcctagtttcacttgcactttccacgtatctgca

SEQ ID NO: 5422 - DNA, 494 bp, Homo sapiens
  MAP TO AC004503.1; EXPRESSED IN HEART, SIGNAL = 9.3; EXPRESSED IN BRAIN, SIGNAL =  11; EXPRESSED IN ADULT LIVER, SIGNAL =  12; EXPRESSED IN PLACENTA, SIGNAL =  18; EXPRESSED IN LUNG, SIGNAL =  15; EXPRESSED IN FETAL LIVER, SIGNAL =  25; EXPRESSED IN BONE MARROW, SIGNAL =  25; EXPRESSED IN HELA, SIGNAL =  10
ttccaacatccagatccaccactatcctaatggggtaggggatccccagccatactgcatggcccttggtgcataatgaacccatttctgttccatgtgtgggctggtttctggggtttaagctgtagacaacccaccctctttgtgcctgcttctccttgggccctctattccacagcttgtggaacccacattttgctactgtgtttgaaaacactgttttctcctcccggggctttgggactatgcctctgttgtgttgactgctcatccttgctgcttctctgggcagattgtaactgtgaactgtgcccggctgctgaaagccgaccaccatgcaaccaacggggtggtgcacctcatcgataaggtcatctccaccatcaccaacaacatccagcagatcattgagatcgaggacacctttgagacccttcgggtaagggactgccctgggtggaggcccaggcttgggacacattgcctcccaagag

SEQ ID NO: 5423 - DNA, 472 bp, Homo sapiens
  MAP TO AC004706.1; EXPRESSED IN LUNG, SIGNAL = 1.8; EXPRESSED IN BRAIN, SIGNAL = 2.1; EXPRESSED IN ADULT LIVER, SIGNAL = 1.6; EXPRESSED IN HELA, SIGNAL = 1.9; EXPRESSED IN HEART, SIGNAL = 1.7; EXPRESSED IN BONE MARROW, SIGNAL = 1.8; EXPRESSED IN PLACENTA, SIGNAL = 1.8; EXPRESSED IN FETAL LIVER, SIGNAL = 1.7
ggcctgagacaccttcagagcctgtctccccctccacaggtccaggaaccctggcagctgtgggcccctcagtggccagtctccttccccatatgcctgagccgtcatccccagagcccgtatcccctaccattggccctggaagcccgggagctgtgggcactcccacggccatggaacctctagcagccacaggcctcccagcagtctgccttcttccagacaggccagagacatgctcaaagatggtcccctcccccacagaccccagcagccccacagccatggacactcctgtagtctgtctgcctcccaacaaacctgagacacccccagagccagtcttctccgccatgggcccaggcatcctggtcgaggtgggcacctccatccttgtgggacccttggcatctgcaggtccgcccactgtctctctttcaccccacaattctgagccagtttcctcttgcac

SEQ ID NO: 5424 - DNA, 461 bp, Homo sapiens
  MAP TO AC002504.1; EXPRESSED IN BRAIN, SIGNAL = 8.4; EXPRESSED IN ADULT LIVER, SIGNAL = 6.9; EXPRESSED IN HELA, SIGNAL = 6.6; EXPRESSED IN HEART, SIGNAL = 6.8; EXPRESSED IN BONE MARROW, SIGNAL = 7.2; EXPRESSED IN PLACENTA, SIGNAL = 6.7; EXPRESSED IN LUNG, SIGNAL = 8.4; EXPRESSED IN FETAL LIVER, SIGNAL =   7
tccatgaaatcctctccacctaactatggatggagacacagagagaggatggcatctggtatgtttatcatgagccaggcctggatatggctcacatcacatccactcaaattctgttggccagaacttagtcacatggccacactcaactgcaagggaagctagggcccaggaaaaaagagaacaaggacattgataaacatttgcaatcttgccatattcctctcttctggtcatcaaatatgcattacacgcttcaacctagacacaaaccacctccccaaagaaagaaaaaacaaagcgttacctggtcactgcatccagataaaagaccatgatctctgggggatgtgctgttctccccatctgctgaagtccacatttggcttctcttcttctgaaagcctatgaattaataagacaaattaccagcaccctgaagaacgtggtcaccagcctat

SEQ ID NO: 5425 - DNA, 470 bp, Homo sapiens
  MAP TO AC005385.2; EXPRESSED IN BONE MARROW, SIGNAL = 1.3; EXPRESSED IN PLACENTA, SIGNAL = 1.8; EXPRESSED IN LUNG, SIGNAL = 1.7; EXPRESSED IN HEART, SIGNAL = 1.3; EXPRESSED IN FETAL LIVER, SIGNAL = 1.3; EXPRESSED IN ADULT LIVER, SIGNAL = 1.4; EXPRESSED IN BRAIN, SIGNAL = 1.6
taccacgctaggcaaacagctaatactacatagtggtttgggttttttttttttccccctccgtctttctatgaaaaacaaaacaaaataaacgcaagtatctaagtggccgatgcctcagagaacagtaaaagcattctgagtccatctccctccctgttaagtcccaagaatacatgcacattctgaccagggcagagacacacagaggcatgtgcacacacacaggctgtagcaagagcatttcagagaaaacctacattccacatatctatgggaattccagaaggacactcttcataggcatttacatttgactctgtttcagtttttggttcatctgttgagaaatctatgatttctgtttttctgatgctctcatcctctttatcttcctgtaagttaagtccagagttctccaacgtagcttcatcttccgagtttgactcagcgtcactttcatttaggcc

SEQ ID NO: 5426 - DNA, 455 bp, Homo sapiens
  MAP TO AC004254.1; EXPRESSED IN LUNG, SIGNAL = 2.1; EXPRESSED IN PLACENTA, SIGNAL = 1.9; EXPRESSED IN HEART, SIGNAL = 1.7; EXPRESSED IN FETAL LIVER, SIGNAL = 1.5; EXPRESSED IN BRAIN, SIGNAL = 2.7; EXPRESSED IN BONE MARROW, SIGNAL = 1.8; EXPRESSED IN HELA, SIGNAL =   2; EXPRESSED IN ADULT LIVER, SIGNAL = 1.8
ctcccttccagggcaataacacacagccccagcaatcagaagggctgtcatgagcagtgagacctggcaaaggcaggaaggccccaaccatccaggcaggcccttgacttgcccacaccctgctccagagaggcagaaggcagggctcccaaccgtcttctatccctgatagcctcaaagacctgaagaatccctgatccagctgccttgtagacatttaagcctccaaaaggccagacctggtcccacagattccaagccctgccagcaaagcagcccttctcatactcacatgacttttaagtcccagtctccacaggtgacaaaaattgacttgacgtttggatctaagaggccttccttcgccatccattcatcgaccctctgaaaagtacacaagaacaaatgagattttccttttttttccctgagcctgtgaagagccacaacagcaa

SEQ ID NO: 5427 - DNA, 486 bp, Homo sapiens
  MAP TO AC005846.1; EXPRESSED IN PLACENTA, SIGNAL = 4.1; EXPRESSED IN BONE MARROW, SIGNAL = 3.2; EXPRESSED IN ADULT LIVER, SIGNAL =   4; EXPRESSED IN LUNG, SIGNAL = 4.5; EXPRESSED IN HELA, SIGNAL = 3.8; EXPRESSED IN HEART, SIGNAL = 3.6; EXPRESSED IN FETAL LIVER, SIGNAL = 3.5; EXPRESSED IN BRAIN, SIGNAL = 3.7
gttctagcacgtgaggggagggtgctgtcttgtggaagggaggagtttcctcttctttgcagtcaaagttctaaatgcctgaaccatacccttgatagccccttgagtgtctctcaccctgggcctcggcgtgagcgtggtgctaagggtgtgggtttgagtcagctcacttactggctttgtgaatctgggcaagacaagtgcctttgcagagcctcagtttccacatttgtaaagcagaaatagtacctgctgggtcactgaaaaggtaagagagggataatatgtatagagtttagcccagtggggctcaactgttaagagccatgatgatgatgaggaggaggaggaggacgagaaggaggaggaggaggaggaggaggagttgttgttagctggctccccatattctcccactgtcccgtgttttccgctggagtgcccctgccttgagaatgggagccggcagaagcaggacaagcacac

SEQ ID NO: 5428 - DNA, 483 bp, Homo sapiens
  MAP TO AC006299.1; EXPRESSED IN LUNG, SIGNAL = 0.72; EXPRESSED IN BRAIN, SIGNAL = 0.75; EXPRESSED IN PLACENTA, SIGNAL = 0.67; EXPRESSED IN HEART, SIGNAL = 1.8; EXPRESSED IN FETAL LIVER, SIGNAL = 0.76; EXPRESSED IN BONE MARROW, SIGNAL = 0.68; EXPRESSED IN ADULT LIVER, SIGNAL =  22
agttcaaattcaaggtctgtccacagtagctgcatattctatattaggattttaaggtggcaattgacaaaaactgaactttatactgacatagagattacaggattgattgaaaagatactgggtgcttcagaaaacctaagggtcaacccaagggacctcaagaattagagcagaggactcagtaccaacagaactttctttttatctcctccttacattatttccttgcattctctcacctgttcctgcagcatcaacaagactgccctcaactgtgggattacatacatagcactggtggtcaaaaataaagaagttttcactgccagctccagcacaaaatccaaggtagtgactccaattgccctagctggaccatctcctgtttccagacagatgagatctgtcatcagaagaatgatgacaatgagaatgtcaccaagtaacaaaaccatagttgccacagaaactcaagccgtt

SEQ ID NO: 5429 - DNA, 469 bp, Homo sapiens
  MAP TO AC005392.1; EXPRESSED IN PLACENTA, SIGNAL = 3.6; EXPRESSED IN LUNG, SIGNAL =   5; EXPRESSED IN HELA, SIGNAL = 3.5; EXPRESSED IN FETAL LIVER, SIGNAL = 4.2; EXPRESSED IN BONE MARROW, SIGNAL =   4; EXPRESSED IN ADULT LIVER, SIGNAL = 3.4; EXPRESSED IN HEART, SIGNAL = 3.8; EXPRESSED IN BRAIN, SIGNAL = 4.1
ccaggacacgttgatgctcattgagagcggtgagaaggccctggcgtgcagagaccccgccctgtcccctcagtcccttgatccctgtgcagggacccgggagccacccctccgggggatcgactcctagggtcccggtgatcccctttccagcctctcagcctacgccgtgtagcagcgtctccctccaggaccctggaggcctgacctccatcctcgcttgcctccctctttcggtccaggaccccaagtgagcctggtgctctccaagggctgcacggaggccaaggaccaggagccccgcgtcactgagcaccggatgggccccggcctctccctgatctcctacaccttcgtgtgccgccaggaggacttctgcaacaacctcgttaactccctcccgctttgggccccacagcccccagcaggtgcctgcgggagggtcgggaggagagggaggggctgctag

SEQ ID NO: 5430 - DNA, 462 bp, Homo sapiens
  MAP TO AC005684.1; EXPRESSED IN LUNG, SIGNAL = 4.8; EXPRESSED IN HELA, SIGNAL = 4.8; EXPRESSED IN ADULT LIVER, SIGNAL = 5.2; EXPRESSED IN PLACENTA, SIGNAL = 4.5; EXPRESSED IN HEART, SIGNAL = 4.9; EXPRESSED IN FETAL LIVER, SIGNAL = 5.1; EXPRESSED IN BRAIN, SIGNAL = 5.5; EXPRESSED IN BONE MARROW, SIGNAL = 4.4
agcctcaccttgacagcgtggccccgtgccctccttggagaatcccccagcgagatgtccacactcctcctctggtccggtggcttcactgtgactcgctctgctggtgtgtgtggccgccggggtgggaagacccttgggggtcctgggggagggatgtccgagggagatggaggcacagagatggagcggggcacctctagcatgctcctgctccggccctggtcggtgaactctggggagccaaggcagatgggcgctgtggggctgccgtgccggaactgctggcgctgctgccactcgtagagctgccacacggtgccatcccggtgcgcccggcgctcttcactcgacatcttcaggtggctggctcggtcctgcgcatacttgtagtcacttggcaggtttcggggaggtggcgaggagccccccgaggggtgtcgggtgctcttgggaagagtc

SEQ ID NO: 5431 - DNA, 487 bp, Homo sapiens
  MAP TO AC004080.1; EXPRESSED IN LUNG, SIGNAL = 2.4; EXPRESSED IN HELA, SIGNAL =   2; EXPRESSED IN FETAL LIVER, SIGNAL = 2.4; EXPRESSED IN BRAIN, SIGNAL = 2.3; EXPRESSED IN BONE MARROW, SIGNAL = 2.4; EXPRESSED IN ADULT LIVER, SIGNAL =   3; EXPRESSED IN PLACENTA, SIGNAL = 2.5; EXPRESSED IN HEART, SIGNAL = 3.1
cgctctcattctcagcattgttttcagagaaggcgccttcgctgggttgtttttctctatcaactggaggagaaccacaagcatagtcagtcagggacaaagtgtgagtgtcaagcgtgggacagtcaccccttctggccgacagcggttcaggtttaatgccataaggccggctggagggcaagcccgcgaaggagagcgcaccgggcgtgggctccagccaggagcgcatgtacctgccgtccggcgccgccgccgccacgggcgcctgggggtgcacgtaggggtggtggtgatggtggtggtacaccgcagcgggtacagcgttggcgcccgccgcgtgcactgggttccacgaggcgccaaacaccgtcgccttggactggaagctgcacgggctgaagtcggggtgctcggccagcgtcgccgcctgccggggaggctggcccagggtccccggcgcatagcggccaacgctcagctcatc

SEQ ID NO: 5432 - DNA, 485 bp, Homo sapiens
  MAP TO AC005822.1; EXPRESSED IN HEART, SIGNAL = 1.7; EXPRESSED IN BRAIN, SIGNAL = 1.6; EXPRESSED IN BONE MARROW, SIGNAL = 1.5; EXPRESSED IN PLACENTA, SIGNAL = 0.98; EXPRESSED IN LUNG, SIGNAL = 1.3; EXPRESSED IN FETAL LIVER, SIGNAL = 1.3; EXPRESSED IN ADULT LIVER, SIGNAL = 1.4
gcagttccaatggtagagccgggaaacaaaacctaaatccatctggctgtggaggtcaatctcgtattctctatgtgatattgctgacaaagtcaaagtaaggaaagacatatcaagggaaggcaatggaagcaccttttctttatagtacattcacctaccttaacagaccaagataacataggagagaaactggggcttaagtccttgatagagcttctgggggcacagtagttatagggccaggtcagaaaatgtcctcacacactaagaaggcattttaaaatcagaaaagacagtcacactcactttggtcaccaagtcatttagccatcctgtctggaaagcatgttttcctctggggtcttcctctggggtatcttgggaaagggtagagttttgaggagctagagaagagaaagaggtcatgagggagattagtcctttctgaatagcctaggaaacccctcaccaaatagatgcct

SEQ ID NO: 5433 - DNA, 455 bp, Homo sapiens
  MAP TO AC005848.1; EXPRESSED IN PLACENTA, SIGNAL = 2.8; EXPRESSED IN LUNG, SIGNAL = 3.3; EXPRESSED IN HELA, SIGNAL = 3.2; EXPRESSED IN HEART, SIGNAL = 2.5; EXPRESSED IN BONE MARROW, SIGNAL = 2.7; EXPRESSED IN FETAL LIVER, SIGNAL = 2.6; EXPRESSED IN BRAIN, SIGNAL = 2.9; EXPRESSED IN ADULT LIVER, SIGNAL = 2.9
cccagggtagactccctatcctctgccagttctgtaccctaactcgcacctcccaggccacatcaccagcagaactgtatgcttgtttccatgcctgatgactgaagagccctcctcccaccttcactcacacccacactgagccccaggaggcaggggtgatgtcagtcttgttgatggtcagacccagccccctgggaggtaaatagatgctacctccccgacctgcccaccctgtgggcctgacctcatctgtagttggctttttggggtctgtctgttcctcctcttcctcatcttcctcctcatcctcacggtcagcaggtccaagaacataggggcctcggttcaggccctcgtcacccagagacttctgaggctccaggctgggcttctcaagccctacctcctccccattgctcaggcctgggcagctgtcagagctgggagaccct

SEQ ID NO: 5434 - DNA, 468 bp, Homo sapiens
  MAP TO AC004087.1; EXPRESSED IN PLACENTA, SIGNAL = 1.6; EXPRESSED IN LUNG, SIGNAL = 1.3; EXPRESSED IN HEART, SIGNAL = 1.6; EXPRESSED IN FETAL LIVER, SIGNAL = 1.4; EXPRESSED IN BONE MARROW, SIGNAL = 1.5; EXPRESSED IN BRAIN, SIGNAL = 1.6; EXPRESSED IN ADULT LIVER, SIGNAL = 1.6
tgagtattaactgcatatccatggtcttttccagacttcatcaagattagtttttatgtagtcttttctggtggcatcactttttcctgtatctggtcttcctgtctatgatctgtgcatatagtatttaatcgcgttaaggaggcatattctgctgattcatttcctactgataaaacacttcacatggtttctggcattttgttagaaaaatgctgaatcgaacatcctgacacagtgttttcgttcttttgaatatttccttagtatagatttccaggagttggattattaggtcaaagggtatgaacacttttatgactgataattctgccagactgttggaaagaagggctgagcaaggtcataatgacattcactgtacttgtgtccctgctttccctagtctttttggtaggattatttttcttcttgctgtattaatggaaacaaaaagagccctatttc

SEQ ID NO: 5435 - DNA, 467 bp, Homo sapiens
  MAP TO AC005611.1; EXPRESSED IN LUNG, SIGNAL = 6.4; EXPRESSED IN FETAL LIVER, SIGNAL = 6.2; EXPRESSED IN PLACENTA, SIGNAL = 6.2; EXPRESSED IN HELA, SIGNAL = 7.1; EXPRESSED IN BRAIN, SIGNAL =   7; EXPRESSED IN BONE MARROW, SIGNAL = 6.6; EXPRESSED IN ADULT LIVER, SIGNAL = 6.1; EXPRESSED IN HEART, SIGNAL =   6
aaccttccgactgttagcctcgttaatggggatattttttaaaaaatagatgtgtgtaatgttacattgattgtgttctagccttgtaagttgatatagttggcagcctagctgtatttctcagagtttgtcataatctatatttaaaataacatgaaacactttgaaatgtcacttatagctagttccaatgatatttttaaatgtattataagtaatatcaatttcatctttccacaggctcaaagtctaactccccaggactataatctgaggtggtcaggccttttggtgacagtgggtgaagtcctggaaaagagtttactgaatgtcagccggactgattggcacatggcatttactgggatgtcccgtcggcagatgatctacagtgcagccagagcgatagcaggcatgtataaacagcgcctgccacccaggacagtgtgagaggagacctacctggg

SEQ ID NO: 5436 - DNA, 477 bp, Homo sapiens
  MAP TO AC004757.1; EXPRESSED IN LUNG, SIGNAL = 6.4; EXPRESSED IN HELA, SIGNAL = 6.4; EXPRESSED IN BRAIN, SIGNAL = 6.1; EXPRESSED IN BONE MARROW, SIGNAL = 7.8; EXPRESSED IN ADULT LIVER, SIGNAL = 8.5; EXPRESSED IN PLACENTA, SIGNAL = 7.3; EXPRESSED IN HEART, SIGNAL = 5.9; EXPRESSED IN FETAL LIVER, SIGNAL =   9
ttggtctgcctgagtgtgagtgtgtgtgtacacacacacatgcatgcacaggcagccaaagtcagaaaaaacaatggcctgaaattagcaaaaaaaaaaaaattgtttctggaaaaatttgcaccaactgcttgggaatctgaagataaaggcaggcacaggccaagtcagagatcaatgggcctaaagcaagtaatggcaatgatgatgatggtgatagtgatggtgatggtgataatgatggtgataatggtgatagtgatggtgtcagtgatggtgatgatggtgatggtgacagtgatgatggtgatgatggtgatgctgccgatgatggtgatgctggtgatagtgatggtgatgatggtgatagtgacggcgatgatgatagtgatgacggtgatggtgacagtgacagtgatggtgatgatgatggtggtgatggtgatgtgacagtgatggtgatgatgatggtgatgg

SEQ ID NO: 5437 - DNA, 394 bp, Homo sapiens
  MAP TO AC005661.1; EXPRESSED IN LUNG, SIGNAL = 3.7; EXPRESSED IN FETAL LIVER, SIGNAL = 6.9; EXPRESSED IN BRAIN, SIGNAL = 4.8; EXPRESSED IN BONE MARROW, SIGNAL = 4.5; EXPRESSED IN HELA, SIGNAL = 4.8; EXPRESSED IN PLACENTA, SIGNAL = 4.3; EXPRESSED IN HEART, SIGNAL = 4.7; EXPRESSED IN ADULT LIVER, SIGNAL = 4.7
tagcaatctggggtgctagggagggcgccatctgagtagttcggaagaactgaacatgatgagttgccggctgcttcctgagtccttggggaagcacacgcaccatccacttagcactggagcctggctgttctccgggcactcctaccccatcttcctggcggggcttagatgctcctgcctcttccaccagctcctcttgccctgcatgcttcagggacgatggaggtctcggggcacccccaggccaggagatgctgcccagaggccctgggaaagctcttccctggcctctgcttcctctgctttctggtgacctacgccctggtgggtgctgtggtcttctctgccattgaggacggccaggtcctggtggcagcagatgatggagagt

SEQ ID NO: 5438 - DNA, 474 bp, Homo sapiens
  MAP TO AC003078.1; EXPRESSED IN PLACENTA, SIGNAL = 4.5; EXPRESSED IN HEART, SIGNAL =   4; EXPRESSED IN FETAL LIVER, SIGNAL = 4.2; EXPRESSED IN BONE MARROW, SIGNAL = 4.5; EXPRESSED IN ADULT LIVER, SIGNAL = 3.9; EXPRESSED IN HELA, SIGNAL = 4.4; EXPRESSED IN LUNG, SIGNAL = 4.2; EXPRESSED IN BRAIN, SIGNAL = 4.8
agagcaattttggcttccagttttatatacagttaattattgttattttcagtagttatggtctataaagttgcttcaaaaactgaaatagcaaatactgagccattgcttctagggaaaacacatggttaggttcctgtaagcctctggtcacaaatattttcacccagcaatcaatagctaactttgttttatgtgttttgtttaaagacaacttatttaacatatgttgctgcttcattcacactgaactctcaaccaatagcactattacttctacctgaagaaaactccaacacacacatattctctgtaagccacatcacagctttcttgtacttaggaacatcatacagcacttcagtactatgcttgaggggctatttaaaacaataaaatcaccaaccaatttacaaattcataaaaatgtaaaaattgtggcactaaatagaccacaaaaaggacatttgttcg

SEQ ID NO: 5439 - DNA, 466 bp, Homo sapiens
  MAP TO AC004911.1; EXPRESSED IN PLACENTA, SIGNAL = 2.5; EXPRESSED IN LUNG, SIGNAL =   3; EXPRESSED IN HEART, SIGNAL = 2.7; EXPRESSED IN HELA, SIGNAL = 2.9; EXPRESSED IN FETAL LIVER, SIGNAL = 2.5; EXPRESSED IN BRAIN, SIGNAL = 2.7; EXPRESSED IN BONE MARROW, SIGNAL = 2.8; EXPRESSED IN ADULT LIVER, SIGNAL = 2.6
aggacagcaaggacaacctgaaaccacaacataagccggaacccataaggatggactaaaacctgtgtctcagtcttgacgcctgtgatctggagggtaggggacatctgaaagctaacatggcagagttagatcatttataatatttactttagtggccacattaactgcataataaattatgtaattataaatgagtaatattttacatgagagtattaagataaaatcattattaatttttagatatagaaactaactttgaaatctctaatccagcctttcaattcaaagccaggaaaatagaagcttctttgcagaagaagccggtgtccatcaggacggaactgaatgcacctctggatcaggtggcgaaaatgctgcaaaaagatccagggtaagtggcgcatttgcaggacaggcaaatgccccattatgtgaggtagcaggtaaaatgcaacaggtg

SEQ ID NO: 5440 - DNA, 463 bp, Homo sapiens
  MAP TO AC002093.1; EXPRESSED IN PLACENTA, SIGNAL = 1.2; EXPRESSED IN LUNG, SIGNAL = 1.2; EXPRESSED IN HEART, SIGNAL = 1.3; EXPRESSED IN FETAL LIVER, SIGNAL = 0.98; EXPRESSED IN BRAIN, SIGNAL = 1.2; EXPRESSED IN BONE MARROW, SIGNAL = 1.2; EXPRESSED IN ADULT LIVER, SIGNAL = 1.2
  unsure 26
  unsure 46
  unsure 71
  unsure 305
  unsure 323
  unsure 382
  unsure 405
  unsure 410
  unsure 428
  unsure 437
  unsure 441
aacacgggaagcgctctgccttgctngacaccctcagaccttaaanttaggtggccccgtggccccctccntaggagagattccctggctgctgcagctgcaaccctttgtactgtccctctcccctgtctggatgacattgcaggagggcaaagggctgtacaattcatgtcctcccagttcccagcgcaggcctggcacatgtcactgtggacatgtcaatgactggagaatgaggtggggtgatcggaggccccccggcttcccagcgtcctcaccgctggaagtaggccagttcctccttngagcaggaacactttggnctttgagttcattccgctcctgaaggatctgctcaaactcctcccgactgaagcggcanctgccctgcctccgaggggcgcnccgangctgctgcgcggcctccngcctttggnaagngacaggcacagtcagagggtcg

SEQ ID NO: 5441 - DNA, 457 bp, Homo sapiens
  MAP TO AC005664.1; EXPRESSED IN PLACENTA, SIGNAL = 5.2; EXPRESSED IN LUNG, SIGNAL =   5; EXPRESSED IN HEART, SIGNAL = 4.3; EXPRESSED IN BONE MARROW, SIGNAL = 5.2; EXPRESSED IN ADULT LIVER, SIGNAL = 4.8; EXPRESSED IN HELA, SIGNAL = 4.5; EXPRESSED IN FETAL LIVER, SIGNAL = 5.5; EXPRESSED IN BRAIN, SIGNAL = 4.9
tttagcaagaaccaccctgcttttgatatctgatcgccctcaatactgatgaaattcctcatccctccaccatcctctaggtgatgtctgatcaccccagcctgtcttcagcaagaatcctcttaggtcagcttagccagtatcccccttatcacttatgtttcttcttagtaatttttcatccactgacccccgccctgctccttggctatcagttcacacttgtccatgctgtattcagagttcagcccaatctctcccctgcagcaaaaccccattgcctgtggtccatatgccagtggcaatgctcctgaataaggccttcccgaccgtgctttgacaagggctgaataatttttttctttaatggttgtggtgccacaggcctctgacccaggactctcaatgtgcaactttgcagcctttgtcttctgactggctgattggggatctactg

SEQ ID NO: 5442 - DNA, 464 bp, Homo sapiens
  MAP TO AC003665.1; EXPRESSED IN PLACENTA, SIGNAL = 2.6; EXPRESSED IN LUNG, SIGNAL = 2.7; EXPRESSED IN HEART, SIGNAL = 1.7; EXPRESSED IN BRAIN, SIGNAL = 2.8; EXPRESSED IN HELA, SIGNAL = 1.9; EXPRESSED IN FETAL LIVER, SIGNAL = 2.5; EXPRESSED IN BONE MARROW, SIGNAL = 2.2; EXPRESSED IN ADULT LIVER, SIGNAL = 2.8
cagcagttagagccccagtcaccctgccctgctgtgagtcgagacaagggctcaggggcgaatgtcccaggggcttgggaggcagctgggccctggactgggctgtgggcttgccatgtctgggatgcctggtgcccagatggagagtgacatggcagggcggccccaggggggtgtgttccagggagacccatggggccaccccgccgtcgctgcctgccggcggccagcgggcctggggctgacgtgagcctgtggaacattctgcgcaacaacatcggcaaagacctgtccaaggtgtcaatgcctgtgcagctcaacgagccgctcaacactctgcagcggctctgcgaggagctggagtacagcagcctcctggaccaggccagccgcatcgccgacccctgcgagcgcatggtacctgcttcctgtcctcacgcccagcccaaggctgcttccttctc

SEQ ID NO: 5443 - DNA, 475 bp, Homo sapiens
  MAP TO AC005482.1; EXPRESSED IN LUNG, SIGNAL =  80; EXPRESSED IN FETAL LIVER, SIGNAL = 2.8; EXPRESSED IN BONE MARROW, SIGNAL = 2.5; EXPRESSED IN PLACENTA, SIGNAL = 2.6; EXPRESSED IN HELA, SIGNAL = 2.9; EXPRESSED IN HEART, SIGNAL = 2.3; EXPRESSED IN BRAIN, SIGNAL = 3.1; EXPRESSED IN ADULT LIVER, SIGNAL = 2.5
aggtggggtaaggactgagggacccatggggctagagcagtgactgtctcctctctccaacccttcaccccatcgtgatctcgctctgaccacacctctccaccagtgctgcttctgcagccaccaaagcccagacagtctaacccaagggacaggatccagtctttgtttggctggatctggctgctgcatttgaccttgtggactactcactcgtagaaacgtcttctttgatttctgtaattcacggcctcttggtttccatgacttctctcagtctcctttgctgggtttttctttctcttctctgttgataacgctgtggctccatccagagttaacgcgctgggcattctcccttgggatgccgccattcacacccacggcattacctccatctttaccttggtaagtcccaaatctccttgaccatctcctatcttccttttcatcttcaaacccacaggtcctatgc

SEQ ID NO: 5444 - DNA, 450 bp, Homo sapiens
  MAP TO AC004853.1; EXPRESSED IN PLACENTA, SIGNAL = 1.7; EXPRESSED IN LUNG, SIGNAL = 1.9; EXPRESSED IN HELA, SIGNAL = 1.6; EXPRESSED IN FETAL LIVER, SIGNAL = 1.7; EXPRESSED IN BRAIN, SIGNAL = 1.5; EXPRESSED IN BONE MARROW, SIGNAL = 1.8; EXPRESSED IN ADULT LIVER, SIGNAL = 1.7; EXPRESSED IN HEART, SIGNAL = 1.3
aacaagcctgtcatcttggccttgtgaattatctaaaatatttggccaaggctggaatgtcgtatacagtatgcattcctaagaagttattcttatgattctttgattcaacagcttctgtttttttctgactctttctacagattaatattcctcacatttttaaatggaaatagataaccagacgtgggtgagagaatttattctccttggcttatccagtgactggtgcactcagatatccctgttttccctgttcttggtcacatacctcatgacagtgctggggaactgtctcattgtccttctgatcagactggacagccgactccacactcccatgtatttctttctcaccaacctctcccttgtcgatgtctcctatgccacaagcgtagtcccccagctgctggcacattttcttgcagaacataaagccatcccattcca

SEQ ID NO: 5445 - DNA, 492 bp, Homo sapiens
  MAP TO AC003957.1; EXPRESSED IN LUNG, SIGNAL = 0.92; EXPRESSED IN BRAIN, SIGNAL = 1.4; EXPRESSED IN ADULT LIVER, SIGNAL =   1; EXPRESSED IN PLACENTA, SIGNAL = 1.1; EXPRESSED IN HEART, SIGNAL = 1.6; EXPRESSED IN FETAL LIVER, SIGNAL = 1.1; EXPRESSED IN BONE MARROW, SIGNAL = 1.1
catgggcagagaagcagaggccgcggagaggcccccgagcgcgcggtgccccagctgggccggagctaggagctggaccttgcccacccacccccggcagcagtgcccgggcaggcggcgccatggccttctctcaggtgcagtgtctggacgacaaccatgtgaactggcgctccagcgagtccaagcctgagttcttctacagcgaggagcagcggctggcgctggaggccctggtggcccgcggccgggacgccttctacgaggtgctcaagcgggagaacatccgagacttcctctcggagctggagctcaagcgcatcctggagaccatcgaggtgtacgacccgggctctgaggaccctcggggcacgggcccctctcaggggcccgaggacaatggggtcggcgacggcgaggaagccagcggggcggatggggtccccatcgaggccgagccgctgccctccctggagtactggccccagaagt

SEQ ID NO: 5446 - DNA, 461 bp, Homo sapiens
  MAP TO AC002302.1; EXPRESSED IN BONE MARROW, SIGNAL = 3.1; EXPRESSED IN PLACENTA, SIGNAL = 2.3; EXPRESSED IN LUNG, SIGNAL =   2; EXPRESSED IN HELA, SIGNAL = 2.7; EXPRESSED IN HEART, SIGNAL =   2; EXPRESSED IN FETAL LIVER, SIGNAL = 3.1; EXPRESSED IN BRAIN, SIGNAL = 2.2; EXPRESSED IN ADULT LIVER, SIGNAL = 2.8
tgatgagaccttttggggactactgaacactagttctgaactgacactgattctaggagacctaaaatgtcacttgtccctccagtcagaataggggcttatggtggtcaggtgatcaatggaattttagctcaggtctgtcttacagtggatccagtgagtccccaaacacatcctgcagttatttccccagttccagaatggataattagaatagacatacttagcagttggcagaatccccatactggttctttgacctgtagagtgaggcccactatgatgggtgaagccaagaggaagccattagaactgccccagcctaggaaaacagccaaccaagagcaatactacatccttagagggacagcagagatcagtgccatcatcaatgacttgaaagatgcagaggtagtgattcccaccatatcccttattcagctctcttatttggcttctgc

SEQ ID NO: 5447 - DNA, 484 bp, Homo sapiens
  MAP TO AC005345.1; EXPRESSED IN LUNG, SIGNAL =   1; EXPRESSED IN BONE MARROW, SIGNAL =   1; EXPRESSED IN PLACENTA, SIGNAL = 0.83; EXPRESSED IN HEART, SIGNAL =  45; EXPRESSED IN FETAL LIVER, SIGNAL = 0.99; EXPRESSED IN BRAIN, SIGNAL = 0.88; EXPRESSED IN ADULT LIVER, SIGNAL = 0.89
ttgaataaatgttccaagaaccctttctatgttattaggctccaaacaagctatggattatttaatttattagcttatcatctttataactatattgagtacctactaggtactgagaacaaaatagagaaggtcactcctctcctagagattgctagattataatctgtattaaacatgatagacatgagttttgccatcaaggaggtcatattcatgatacaaatcccattgatttaatggaaaaccctatgtatgctattctgtgttcctaagaatattttaaaagttttccatttcaggtttttcttggtcctcattcaacttttctataatctggaaatgatttgagttgaaatgacatgttatgagttgaagcgacacagaaggccggatatggtcaagattgagatcttcgatgcctggtaaaagtgcagtttacgtaaaataaattttatcaggtattgctagttagaacattcat

SEQ ID NO: 5448 - DNA, 467 bp, Homo sapiens
  MAP TO AC003119.1; EXPRESSED IN LUNG, SIGNAL = 1.9; EXPRESSED IN ADULT LIVER, SIGNAL = 1.9; EXPRESSED IN PLACENTA, SIGNAL = 1.7; EXPRESSED IN HEART, SIGNAL = 1.5; EXPRESSED IN FETAL LIVER, SIGNAL = 1.6; EXPRESSED IN BRAIN, SIGNAL = 1.8; EXPRESSED IN BONE MARROW, SIGNAL = 1.7
tcttggcttcattccaaagcccatgctccttgcttctctgtgcctcctctcctcccaacttcattcattcactcattgcattcacagaatcattacacccacatacctcatactaccaatgccttaataattttatttaagtcaactcagttaggaaattaaataccctttcaaactcctctcaagcaatattatctataaaaccacaggtgcttagttataattttctgctactaataaaaattaacacagaactattagaagtttaaaaatcttcacctgtgcatcaccaaatgtctttttgtgcaccagcagctgcatatgacttacactttgggtgacagtacattcgacctcacggtatttcaagtgcagtgttgaggccagcaacagcagcattatgtgggggcctattcaaaatgcagaatctcgtgcctcattcaagacacagtgaatcagaaactaca

SEQ ID NO: 5449 - DNA, 468 bp, Homo sapiens
  MAP TO AC005659.2; EXPRESSED IN LUNG, SIGNAL =  15; EXPRESSED IN FETAL LIVER, SIGNAL =  20; EXPRESSED IN BRAIN, SIGNAL =  16; EXPRESSED IN BONE MARROW, SIGNAL =  13; EXPRESSED IN PLACENTA, SIGNAL =  14; EXPRESSED IN HELA, SIGNAL =  22; EXPRESSED IN HEART, SIGNAL =  12; EXPRESSED IN ADULT LIVER, SIGNAL =  41
ggtgaaatcttgtaaacagggctccatttaactctctcttgggtgttccccaggaacagcctctccgagccccttgggatggaaggatgcttcttctaaaggcatgaaacagggactccagagcagaagctatggcaaggagcttgcaaattgagatagctgtgccaagaaagattctcaactactaactgctgtcattgcccaggtcctggttgggatggctggggaggaagcagaggccgattgtcagacacatgtggggtcctgtcccactgttcctccttcagtgatcttgatgagaaaggatcctgccactctagccatgagggtgggatcatacccagcgtcgaccaatcacagtagagcacctcctacaaacaggttaggttcgtcctggaaatggcccatgactcaaggtgagatggtcagagatcttcattttttccaagccaggaggagaggggtaat

SEQ ID NO: 5450 - DNA, 465 bp, Homo sapiens
  MAP TO AC002519.1; EXPRESSED IN HEART, SIGNAL = 7.7; EXPRESSED IN BRAIN, SIGNAL = 8.4; EXPRESSED IN BONE MARROW, SIGNAL = 7.2; EXPRESSED IN ADULT LIVER, SIGNAL = 8.4; EXPRESSED IN PLACENTA, SIGNAL = 8.1; EXPRESSED IN HELA, SIGNAL = 7.8; EXPRESSED IN FETAL LIVER, SIGNAL = 7.9; EXPRESSED IN LUNG, SIGNAL =   9
tcatcgttgcactggttgagcatgcagtggcacagggtcttgagcagttaactcatgctccagcagatccaggcaacacgatgggggccacaccaccatcttacaaagtcagtggagccatagatgacactctgctcctggtcccactccaggatgccagggatgaggactggaacctgacccagtagctgcggtcatccacctctgctgtgtccagcgtgtacagaccctccatgtccgctgccttgtgcgggtgctcaccgttcaggtcattggtgaatgctatggaggctgccacatccctggcaaagtccttgtagtggccactaatgacaaagcccaggctgaagatgatgcggctccacatgaacatctgcagcttggtctcctcactgggactgatggccatgacgatgcctccctgactaccatggcgccccatgtggctgccattctgaagttgct

SEQ ID NO: 5451 - DNA, 480 bp, Homo sapiens
  MAP TO AC004636.1; EXPRESSED IN PLACENTA, SIGNAL = 4.2; EXPRESSED IN LUNG, SIGNAL = 4.1; EXPRESSED IN HEART, SIGNAL = 5.3; EXPRESSED IN BRAIN, SIGNAL = 4.4; EXPRESSED IN BONE MARROW, SIGNAL = 4.3; EXPRESSED IN ADULT LIVER, SIGNAL = 4.4; EXPRESSED IN HELA, SIGNAL = 4.3; EXPRESSED IN FETAL LIVER, SIGNAL = 4.4
agctgtgcctggaagagaaggacgctggtgggggctgagatcagagctgtcttctggcccagttgcccccatgcttctgtcatggctaacagttctaggggctggaatggtcgtcctgcacttcttgcagaaactcctgttcccttacttttgggatgacttctggttcgtgttgaaggtggtgctcattataattcggctgaagaagtatgaaaagagaggggagctggtgactgtgctggataaattcttgagtcatgccaaaagacaacctcggaaacctttcatcatctatgagggagacatctacacctatcaggatgtagacaaaaggagcagcagagtggcccatgtcttcctgaaccattcctctctgaaaaagggggacacggtggctctgctgatgagcaatgagccggacttcgttcacgtgtggttcggcctcgccaagctgggctgcgtggtggcctttctcaacac

SEQ ID NO: 5452 - DNA, 439 bp, Homo sapiens
  MAP TO AC006150.2; EXPRESSED IN PLACENTA, SIGNAL = 1.7; EXPRESSED IN LUNG, SIGNAL = 1.5; EXPRESSED IN HEART, SIGNAL = 1.4; EXPRESSED IN BRAIN, SIGNAL = 1.8; EXPRESSED IN FETAL LIVER, SIGNAL = 1.6; EXPRESSED IN BONE MARROW, SIGNAL = 1.2; EXPRESSED IN ADULT LIVER, SIGNAL = 1.5
aagttgagctttcggtctggcaggaggtctacagttaaaatgaaggcatttaattgaaaaagaatgggatcctctaagttggaaagggaacacgtgggatagatcctgatgaagctgtggacattgagcctctaagttctgatgagtcttcattaccagtaaaagagatctccccaacctccagcagaattggcctcctctacccacagtgacagcagtattcccacccatagtggtactggcatctctgcctctatagttataaaagattggccttacattgcctaaggaaactgtaatgacctcccccaaggcagatgccatacaagacaatgctgattctctgcagaaccgactctttgcttctagacctataattagactcaagtctcatcagtctcctaaaggtgaggtacaatgtgtgacccatgaggaggta

SEQ ID NO: 5453 - DNA, 425 bp, Homo sapiens
  MAP TO AC004802.1; EXPRESSED IN LUNG, SIGNAL = 5.2; EXPRESSED IN HELA, SIGNAL = 5.7; EXPRESSED IN BRAIN, SIGNAL = 6.5; EXPRESSED IN BONE MARROW, SIGNAL = 5.4; EXPRESSED IN ADULT LIVER, SIGNAL =   5; EXPRESSED IN PLACENTA, SIGNAL = 4.8; EXPRESSED IN HEART, SIGNAL = 4.7; EXPRESSED IN FETAL LIVER, SIGNAL =   5
gttacagcccatagcttcccaatttattcccattctatgttgcctttcagacacctcaacaaagaacgtacaactgacctagaaaaaaggcagctaatacagtaatagcaagaattcgagaacctaaattcagagttagatacactgaaaaagtatgtccccaaaagcatacttttaaaaccatactttaacctcataagccccaatcagcttcactttcttacctttccaactcagctatcttcttatctttgtcattcttctcattttccacctccttcaagatttctaagagtcgatcaacttctgcctgggccttgctagattcatctttgtacctggtgatctctctctccaagtgctgtattcggtcactcatctctggactggctctggcttccaatgctgcctcatgtgcctacaaa

SEQ ID NO: 5454 - DNA, 360 bp, Homo sapiens
  MAP TO AC005549.1; EXPRESSED IN LUNG, SIGNAL = 2.5; EXPRESSED IN HELA, SIGNAL = 2.1; EXPRESSED IN BONE MARROW, SIGNAL = 2.4; EXPRESSED IN ADULT LIVER, SIGNAL = 2.5; EXPRESSED IN PLACENTA, SIGNAL = 2.9; EXPRESSED IN HEART, SIGNAL = 2.6; EXPRESSED IN FETAL LIVER, SIGNAL = 3.7; EXPRESSED IN BRAIN, SIGNAL = 2.5
tcaaaacatcccaggggtagaactgtggttcaagaggaaaagcaatttccccaagtctctgtatctaaaaaacactagtaccatgaaagataaacttaaaacatcaataacttaaataagaattaacattacttaaggcataatgtttcacatcaacaaacaaaattcattataataaaataaaacagggtgtctggggaaagctaggggaaaataagttagctgcagattcttgggttgtggagtgagtgttcaagtcttcggagtttgggtttgcttgtccaggtggtccatggaatcctgaacccacttctgcttggggtcagcacagatctccttggccacaatggtcttgaagct

SEQ ID NO: 5455 - DNA, 465 bp, Homo sapiens
  MAP TO AC002099.1; EXPRESSED IN PLACENTA, SIGNAL = 2.6; EXPRESSED IN HELA, SIGNAL =   3; EXPRESSED IN HEART, SIGNAL = 2.9; EXPRESSED IN BONE MARROW, SIGNAL =   3; EXPRESSED IN ADULT LIVER, SIGNAL = 2.8; EXPRESSED IN BRAIN, SIGNAL = 2.9; EXPRESSED IN FETAL LIVER, SIGNAL = 2.6; EXPRESSED IN LUNG, SIGNAL = 3.1
ctcccttctccagactcggcctatccgactggcgtgagtcctgtggttttcatcacattgcactgtgggaaaggcccagggccctggcatatggatgtgaattgtctgtcggtcaaacgctctggccaggagctctgctctgaaacccaggcatggctccactgctaagaccagcaagaatttgaaaaagcagaaggcagccctgcctgctggccaggcccaggtaggcaggctcccgctctgcatggggagtccagcgctatttatacctggacgagtaatactcctcctccagctcgtagaggtcaatggagatctcgtctcgcagcgtgatgagcttccggtcgcactcctcctgcagtgtgcgcagctgctggttgcgctggtcaatggcctcgttcacggaggggaagtcattgaggatcaggaactgcttgaggtcggacaccagcttcatcagggact

SEQ ID NO: 5456 - DNA, 486 bp, Homo sapiens
  MAP TO AC004782.1; EXPRESSED IN ADULT LIVER, SIGNAL = 1.3; EXPRESSED IN PLACENTA, SIGNAL = 1.4; EXPRESSED IN LUNG, SIGNAL = 1.3; EXPRESSED IN HEART, SIGNAL = 1.3; EXPRESSED IN BRAIN, SIGNAL = 1.2; EXPRESSED IN BONE MARROW, SIGNAL = 1.3; EXPRESSED IN FETAL LIVER, SIGNAL = 1.3
tggaggtgtcaatcctgagctctggctcatttatgaaacttcagtaagccccagactcttctttcagggcaggaaaacaggagatgtctgtttctccattggtttgctcaaagaaaagctggtgttatcaaagagaggcttgatgttgtagcaaataggcctgggaagatggggaagaatcagtacctcccagtccacactcatactgatggtggcatagtgaggagtctgagtccctaggcactgctgtggatggcttcttaggagccccatgtggagatggagtggggacagggttgggggaaagggacagagtcacagggcattacttcctccttggggttggctttatccttggactccatgttcttaaaagcagcatgacataacgtttcatacaaatgctgccagagatggcactgctcattcttattataatactctacaaggtgatattataatattccacaaggtgagtgacaaaca

SEQ ID NO: 5457 - DNA, 466 bp, Homo sapiens
  MAP TO AC005827.3; EXPRESSED IN LUNG, SIGNAL = 1.4; EXPRESSED IN BONE MARROW, SIGNAL = 2.2; EXPRESSED IN PLACENTA, SIGNAL = 1.8; EXPRESSED IN HELA, SIGNAL = 1.9; EXPRESSED IN HEART, SIGNAL = 1.8; EXPRESSED IN FETAL LIVER, SIGNAL = 2.3; EXPRESSED IN BRAIN, SIGNAL = 2.1; EXPRESSED IN ADULT LIVER, SIGNAL = 2.2
cacagaacctctggcatgtgatgacattagtgactacaatcgtcactaaaatgttcactgagcgccctctaagttgcaggtatttttcttaggagttttgtatgttttctcttgtttactatctaccaccctaaaaaggaactattatcatagcattctacagatgagaaaagacattattgcttacccttaattttcataatagtccaaaaagattgctgttaccatgattgccattttagagatgatgaactgaggctcagaaaggtcaagtggcttgcccatggtcacacgggtcttctgatatggagcctgcagctccttcacagtgcataactcagcagcccagaaaatgccttcacaccctcctcccatttgaccattcgtcacaacacatttaagatcagaccctgacggtgacattctgcaaataagttcaacattgggtgttgttgaatctcaggga

SEQ ID NO: 5458 - DNA, 480 bp, Homo sapiens
  MAP TO AC004383.1; EXPRESSED IN LUNG, SIGNAL = 2.3; EXPRESSED IN ADULT LIVER, SIGNAL = 1.9; EXPRESSED IN PLACENTA, SIGNAL = 1.9; EXPRESSED IN HELA, SIGNAL = 2.2; EXPRESSED IN HEART, SIGNAL = 2.2; EXPRESSED IN FETAL LIVER, SIGNAL = 2.1; EXPRESSED IN BRAIN, SIGNAL = 2.3; EXPRESSED IN BONE MARROW, SIGNAL = 2.2
gaccaggcaccaatgtttgcaaaccacttagaacaatgtctggcccatactaaaaatgaggtatgtgtctattaaataaaaatgcccaacatatttttatgcgatcagaattttattttattttttgtttacacatgaatataaaaatatagaaaaaggcttaattcatgaagttgctataggtttctctttctcaaaagtgctcacatgagggtcacaagagcacttatttgtcagacatttgtacactatatactaattctagaaatagcatcttcaggagaccccaaacctgaggatcacatggacccaatcatatcatctgtgtgaagagaccaatcctcagaaatatcaagaaagtgagatggctgcagaggttgagcctcctgagcccctgcttggtgacaagggacctgggtatgctcttcttcactgaagacacaaggtggacaatcgcagttgggcctttgactggactgt

SEQ ID NO: 5459 - DNA, 475 bp, Homo sapiens
  MAP TO AC005856.1; EXPRESSED IN PLACENTA, SIGNAL = 1.2; EXPRESSED IN HEART, SIGNAL = 1.5; EXPRESSED IN BRAIN, SIGNAL =   2; EXPRESSED IN BONE MARROW, SIGNAL = 1.2; EXPRESSED IN ADULT LIVER, SIGNAL = 1.8; EXPRESSED IN LUNG, SIGNAL = 1.2; EXPRESSED IN FETAL LIVER, SIGNAL = 1.1
tctgtcttgaaaaagcttactgtctagtgggtgaatgcaaggtggaaacaaagctatgtccaagatgctccaggtgcagagaagaagaggggatgcttaagtaaaaatattggaagataggagcttgccatgggtactcaggatggaaagaaatgattttatgtagagggaagagcacgggaaaacatttaaataggtgcaaagcattttggagtctaagaggtgctagtagttgagaattgttagagctcaggctgccggtcgcggggaaggcaggcgcgaaggggtgcagggaagaaggaggaggcggcggcagtggcggtggccatggcagaagcggaaacaggagcagcagcagcagcagcagcggcaggagaggcacacaggagccagatcctaaaggctttgtatgccacattaggaaagaatttggaatacagcttctgtttggaaaacattttctgtaaccagcccg

SEQ ID NO: 5460 - DNA, 470 bp, Homo sapiens
  MAP TO AC005737.1; EXPRESSED IN PLACENTA, SIGNAL = 1.3; EXPRESSED IN LUNG, SIGNAL = 1.4; EXPRESSED IN HEART, SIGNAL = 1.3; EXPRESSED IN BONE MARROW, SIGNAL = 0.99; EXPRESSED IN FETAL LIVER, SIGNAL = 3.2; EXPRESSED IN BRAIN, SIGNAL = 1.2; EXPRESSED IN ADULT LIVER, SIGNAL =  15
ctagagggtctgcacccaaggtgtttcacctaacagctattgtcaggaggccacagagctgcttgagtgtcctcaggacatggtggatggtgtctgccagggtgagagatctgagagattaagagcaaagtagaagccacatgggaggatgggagtgaattcctgtgtatcccttagatgatgtagcctcagatgtcctatgccatcgcctctgctgtattcgatcagtcatacaacggaatcctcggaagactgtgggagcataccatacaagggcacgagtacctggaggagggatcatgcggccatcttggagtttggctaccacactcttcataatcttgaaataactatgtcttgcagttccacccaggatgcttgtaatgtcacactgagtctatggaaagaaaacaaagatactaaacacattttgcagatggggaaatgaggcgtggagcaggaaagtgact

SEQ ID NO: 5461 - DNA, 466 bp, Homo sapiens
  MAP TO AC004944.1; EXPRESSED IN PLACENTA, SIGNAL = 8.8; EXPRESSED IN HEART, SIGNAL = 9.2; EXPRESSED IN FETAL LIVER, SIGNAL =  15; EXPRESSED IN LUNG, SIGNAL =   9; EXPRESSED IN HELA, SIGNAL = 8.2; EXPRESSED IN BRAIN, SIGNAL =  10; EXPRESSED IN BONE MARROW, SIGNAL = 8.6; EXPRESSED IN ADULT LIVER, SIGNAL =  12
gaagccaccatgcacagacaggtacattcttttcagtcttctgcaccttcttacaatttatgtgaactttgaaattttcttcgtggtgtgtccataaaatatacatctaattgttgaattagagggacaatggatggctcactcaatatccatttcctccttctttttacttgtaaacccttaattctgtccctgtgcccaccctcccaacacagatgtatacacagcaaggatgatgctgtgtccagtttcagggtgattcaataagccaatcatgggagtcccatgactgttgtcagccatgtagttaggagggacccagtgatttcgaggggtcatactggaatattcttccttgttcttgaaagagagacaatgatgtatcagtcttcttttctggacatttttgtgtctgccatcctcagagctgtggttattctttgacactggggaggtagactgagga

SEQ ID NO: 5462 - DNA, 461 bp, Homo sapiens
  MAP TO AC005859.1; EXPRESSED IN PLACENTA, SIGNAL = 1.1; EXPRESSED IN BRAIN, SIGNAL = 1.1; EXPRESSED IN ADULT LIVER, SIGNAL = 1.6; EXPRESSED IN LUNG, SIGNAL = 1.1; EXPRESSED IN HEART, SIGNAL = 1.5; EXPRESSED IN FETAL LIVER, SIGNAL = 1.1; EXPRESSED IN BONE MARROW, SIGNAL = 1.1
gtttaatgttggcattggatgtttacatattaactggtacaatttacatcggttttatacttacctatttttgcaaagatgtcatgtacacaaagatacatattcaataactgagaaacaagtgaaacttctgatctatactttcaggtttgtttcataaagatatttctgataaggattatcagcatacaagtttcacctcttccagaaggacactgtcattttatctaagagtttactctgggttttattgcagaacacaaattccctcaattgcttttttcttgcaggtgtctttttccagaattttttcttataaccagcctttctcctcacccaaaggccagaatgaagtcgaaaaaacctatagataacagctttcacagttgttctcttgcctttttgtgtactgacgtatattacagttctgactggcagcttcaggacacttggaagcaagg

SEQ ID NO: 5463 - DNA, 452 bp, Homo sapiens
  MAP TO AC005500.1; EXPRESSED IN PLACENTA, SIGNAL = 2.2; EXPRESSED IN LUNG, SIGNAL = 2.3; EXPRESSED IN FETAL LIVER, SIGNAL =   2; EXPRESSED IN HELA, SIGNAL = 2.4; EXPRESSED IN BRAIN, SIGNAL = 2.1; EXPRESSED IN BONE MARROW, SIGNAL = 2.1; EXPRESSED IN ADULT LIVER, SIGNAL = 1.9; EXPRESSED IN HEART, SIGNAL = 2.1
caaggagtggtactgtcatgcattttgatgggacacgacgtgcagaacggagaatcagcgtggcagccatgggggaatccaggcctcaaacaggcacgtcctggcagtggaggccagggtgcctgggagaaggcgtgtgctggggcaggcagctgggcctggcaggaagcagacaggggaggagggacctgggctcaaattccaacctagccactcaccagctctgggtcttgggagaggcactccctcccctaaagcgtaacctcttcataaaggaggggctctgagaggctgtggccaggacgaaggtgcacagacagggccaggcagtgaggagaggcccactgttggcctggtctgcagggcttctgcccagcatgggcctgttgttcctcacctccttcctattccaaattgagaaactggcaacaggagtccagtcccagtccttg

SEQ ID NO: 5464 - DNA, 488 bp, Homo sapiens
  MAP TO AC002299.1; EXPRESSED IN PLACENTA, SIGNAL = 5.3; EXPRESSED IN LUNG, SIGNAL = 5.1; EXPRESSED IN FETAL LIVER, SIGNAL = 5.6; EXPRESSED IN BRAIN, SIGNAL = 4.1; EXPRESSED IN ADULT LIVER, SIGNAL = 4.1; EXPRESSED IN HELA, SIGNAL =   6; EXPRESSED IN HEART, SIGNAL = 4.4; EXPRESSED IN BONE MARROW, SIGNAL = 6.3
cctgaatatcctgaaccctattaagacataagataacaaaagtagttagaactgttcttgtcatagccagtctaagacctctgcctgtttaagccacaggctgtcaaacagaaaaagctctcactccctggagagctagcctgggatggaaactgaatatgtttctttcagcagcttgtaatctttaaaactttctacctccaggtcttgtcctcttgtacatttattctgcttgagaaattactacaacctccactgatgtcttttctttttctctatgcagtcagctgaaagaatcggacaaagacagaagactgtcagtagagatttgggattgggatttgaccagcaggaatgacttcatgggatctttgtcctttgggatttctgaacttcagaaagccagtgttgatggctggtaagtaagattttgccttgaaagctaccatacagcttgctccatcaaacgcggggtcaagtatgttttc

SEQ ID NO: 5465 - DNA, 470 bp, Homo sapiens
  MAP TO AC004522.1; EXPRESSED IN PLACENTA, SIGNAL =   5; EXPRESSED IN LUNG, SIGNAL = 4.7; EXPRESSED IN FETAL LIVER, SIGNAL = 5.3; EXPRESSED IN BONE MARROW, SIGNAL = 4.3; EXPRESSED IN ADULT LIVER, SIGNAL = 4.3; EXPRESSED IN HELA, SIGNAL = 4.8; EXPRESSED IN HEART, SIGNAL = 4.8; EXPRESSED IN BRAIN, SIGNAL = 4.9
gcacagatcactttttgtaaaggtacgtactaatgactttttttttatacttcaggaatagtaaagaaacacatcataaaacctcccaggacataaaggtgagcacagaccctgtttggatcaagtcagttcctggagcctgaatgatgactgctgaatcacgggaagccacgggtctgtccccacaggctgcacaggagaaggatggtatcgtaatagtgaaggtggaagaggaagatgaggaagaccacatgtgggggcaggattccaccctacaggacacgcctcctccagacccagagatattccgccaacgcttcaggcgcttctgttaccagaacacttttgggccccgagaggctctcagtcggctgaaggaactttgtcatcagtggctgcggccagaaataaacaccaaggaacagatcctggagcttctggtgctagagcagtttctttccatcctgccc

SEQ ID NO: 5466 - DNA, 463 bp, Homo sapiens
  MAP TO AC003958.1; EXPRESSED IN PLACENTA, SIGNAL =   8; EXPRESSED IN LUNG, SIGNAL = 8.3; EXPRESSED IN HEART, SIGNAL = 7.7; EXPRESSED IN FETAL LIVER, SIGNAL = 7.8; EXPRESSED IN BRAIN, SIGNAL = 7.9; EXPRESSED IN BONE MARROW, SIGNAL = 8.1; EXPRESSED IN ADULT LIVER, SIGNAL = 6.8; EXPRESSED IN HELA, SIGNAL = 7.8
atattcagctcaccttgccgccgagacagaccatgccttaccagcttcttgcagctttacgatgagtctctctcggtttcacagggcagttattactcatgactgatgctcaccggccaagcctaaacgtgtggcacactccccataccacacacagacacaaacatttgcctggctcacatgaaccgggatgaggatgccatttccacctgggaggagccacgtgaccaggcgttctcagtagcctccactggtgtcagggggaacagagcattcggctgttgccggtctgcctttccaggactagcatccatggaagatggggtccatcgccaacctgcgaagatgtggaaggcaagcccctcattccagagccagaagctgtggccggcttccccttcccatctccaacctgggctaatgacagctggcagatgcttggccatgatgacaggtcttttcg

SEQ ID NO: 5467 - DNA, 448 bp, Homo sapiens
  MAP TO AC004899.1; EXPRESSED IN PLACENTA, SIGNAL = 2.3; EXPRESSED IN LUNG, SIGNAL = 2.2; EXPRESSED IN HEART, SIGNAL = 1.9; EXPRESSED IN HELA, SIGNAL = 2.1; EXPRESSED IN FETAL LIVER, SIGNAL = 1.8; EXPRESSED IN BRAIN, SIGNAL = 1.8; EXPRESSED IN BONE MARROW, SIGNAL =   2; EXPRESSED IN ADULT LIVER, SIGNAL = 1.9
cctagtgggtttacctccctgaaccccaattgtcttacctagaaaagggattgttatctgcgtctcaaggcagtatagaaatgcaattacttctaaggagagagccagcagcatgggcttctctagagagtggtggaagaaaagtggggagaggcagtggggtgcccacctggaagctaacagtagctgggaaactgaccggtgggcacgaactgagaccgagaattgactaaagaaactcaaaaatacctgaaagttcatctgtttcagtgctgggtcctgtatataaagaaactggaactcagaatagaagtgaacaacctggccaaagtcacataacccctgatttacaaagttggaatttaaacaaattatcgtatccactgatctgatgatttctccatcctttgagcttcgagccacctggacagagaaaagggaggcagag

SEQ ID NO: 5468 - DNA, 477 bp, Homo sapiens
  MAP TO AC005610.1; EXPRESSED IN LUNG, SIGNAL =   3; EXPRESSED IN PLACENTA, SIGNAL = 3.2; EXPRESSED IN HEART, SIGNAL = 3.5; EXPRESSED IN FETAL LIVER, SIGNAL = 3.9; EXPRESSED IN BRAIN, SIGNAL = 3.5; EXPRESSED IN BONE MARROW, SIGNAL = 3.4; EXPRESSED IN HELA, SIGNAL = 3.4; EXPRESSED IN ADULT LIVER, SIGNAL =   3
tgggaaacaaacaaacagcctgtcagagattcagaggattgagacaacggtatcctgtgccgagcattgaggttctttttaatttgcaaggattagaaatgtcaacgagcatcacattttcctctaaattctaaaagatgactcagtgcagtggatttaaatcagaaggacagcagaaaaaatgaggctgctaataaatgcacggcttctgtgtaagcataggctatgcatacgggttcaaccacacctacccctagagaaaatattttcacttaacacttgagacactgtgaatcagggagaacataccgatgagctccttatttctgacgtccaaggccatgttccgcagcgcagtggccaccgcgcacaccacacggtcattgtctattcggagcagctccacgaggatgggcaggcctttctcttttcggacagcggctcggatatatactgaccactgcaaaaacagggaag

SEQ ID NO: 5469 - DNA, 477 bp, Homo sapiens
  MAP TO AC003090.1; EXPRESSED IN ADULT LIVER, SIGNAL =  13; EXPRESSED IN BONE MARROW, SIGNAL = 9.3; EXPRESSED IN PLACENTA, SIGNAL =  13; EXPRESSED IN LUNG, SIGNAL = 9.2; EXPRESSED IN HELA, SIGNAL = 9.3; EXPRESSED IN HEART, SIGNAL = 7.5; EXPRESSED IN BRAIN, SIGNAL = 8.2; EXPRESSED IN FETAL LIVER, SIGNAL = 7.9
tgcacttcaagctctgataaattcagtgttctttctaagcacttgtacaaattagattgcagtcagaggagttcagcatttttacatgttcaatacatcaagatctgataagcagctgttgcagctgtctgcttacctctctggtcctcattgaaatctgccctactccacagccttccttggctggattgatcccaagaagaggttttcattactttatatctagaaatagccttcagcttgttctaatgatctccagtcaccaatttgaaagagtgcccttagatgtccaccagttacctcttgaacttcattcttccagccagagaacaaactgccccaaaaatgctgcagactggctgactcagcagtggtgctactgcctgctgataaagatgtgagtttaagaccatcagctaggaaagtggaaagcagtaggacatgaggtttcacacgggggtcagataagcctgggtt

SEQ ID NO: 5470 - DNA, 480 bp, Homo sapiens
  MAP TO AC004797.1; EXPRESSED IN PLACENTA, SIGNAL = 7.6; EXPRESSED IN HEART, SIGNAL = 6.7; EXPRESSED IN BONE MARROW, SIGNAL = 7.5; EXPRESSED IN ADULT LIVER, SIGNAL = 5.7; EXPRESSED IN LUNG, SIGNAL = 7.9; EXPRESSED IN HELA, SIGNAL = 7.4; EXPRESSED IN FETAL LIVER, SIGNAL = 6.4; EXPRESSED IN BRAIN, SIGNAL =   7
accgggagaattctgatgacacagaggaggaagaggaagaagtctcttacaaaagggagcagatcatagtggaggtaaaccttaataatcaaacattaaatgtatctaaaggggaaaagggtgtctcttctcagtccaaagagactcctgttcttaagacaagcagtgaggaggaagaggaagagagtgaggaagaggccacagatgacagcaatgactatggagagaatgaaaagcagaagaaaaaggagaagatagtagagaaagtcagcgttacacaaaggagaaccaggagagctgcctctgttgccgcagctaccacttcccctactcccagaactacaagaggtcgtaggaagagtgtagagccacctaagcgtaagaagcgggccacaaaggagcccaaagcaccagtccagaaagctaagtgtgaagagaaagagactctgacctgtgagaagtgccccagggtatttaaca

SEQ ID NO: 5471 - DNA, 448 bp, Homo sapiens
  MAP TO AC004827.1; EXPRESSED IN BONE MARROW, SIGNAL =   3; EXPRESSED IN PLACENTA, SIGNAL = 2.9; EXPRESSED IN LUNG, SIGNAL = 3.2; EXPRESSED IN HELA, SIGNAL = 2.8; EXPRESSED IN FETAL LIVER, SIGNAL = 3.1; EXPRESSED IN BRAIN, SIGNAL = 2.9; EXPRESSED IN ADULT LIVER, SIGNAL = 2.7; EXPRESSED IN HEART, SIGNAL = 2.5
tgtttggctatgagagcaaggaatttcaattggcaggcaaagtatgttgttgcttaacacccatatatgaacatgcatacttgtacacatacaatgtatacatggtaaaaacaaacaaacaaaaactcaacccatacctaacaacaagtatacaacaaaaggtctctactccctcctccgcaacaacccttagatccttttgaaaatgtaaccactggaccactgttaactgtttcttgtttgccagatacacttcaacatggggaggaggctggtccaagttgcttttcatttgcacaaggtgttgaagtagagagtactcaacagtttagggtgggtggcatcaggaccttgggcttccatggggatagtagccgtgaaaacaggtaagatgagaggatgggagacattgcctgctttacagtcttgcctctttcgtggtgtgact

SEQ ID NO: 5472 - DNA, 452 bp, Homo sapiens
  MAP TO AC004906.1; EXPRESSED IN BRAIN, SIGNAL = 3.1; EXPRESSED IN BONE MARROW, SIGNAL = 3.1; EXPRESSED IN ADULT LIVER, SIGNAL = 2.9; EXPRESSED IN LUNG, SIGNAL = 3.1; EXPRESSED IN HELA, SIGNAL = 3.4; EXPRESSED IN HEART, SIGNAL = 3.5; EXPRESSED IN FETAL LIVER, SIGNAL = 3.2; EXPRESSED IN PLACENTA, SIGNAL = 3.5
acgtgcaggtgcatagtggacctagaactcccagaggccctgtgtcctccattcccccacacctggctggcaggaagctccggcagaccacgtgcatgtgcctgcacctgctttatgggagaattgagccctggtgacatttgtttcccccgggtcaccctggcggagtagcccttgggcacccctcacctcgagttggaggtctcggctcctcatgaccgccatgttcttctcctcactgagctgtgcgtagcgcatggctaagttgtagttgtcgtccttcaccttgaccagctcgtcattgtagctgtcccgctcttccttcatcttgtagtaccgctcctggaaggttagcagctccacgcgcgtcagcgtcatctgcttcttctcatcctccagctgccgcaacctggccagcagctcgcagcgttgcaggtccttggccttcatct

SEQ ID NO: 5473 - DNA, 489 bp, Homo sapiens
  MAP TO AC005664.1; EXPRESSED IN LUNG, SIGNAL = 8.7; EXPRESSED IN HELA, SIGNAL =  11; EXPRESSED IN BRAIN, SIGNAL =  10; EXPRESSED IN BONE MARROW, SIGNAL = 8.7; EXPRESSED IN ADULT LIVER, SIGNAL =  12; EXPRESSED IN PLACENTA, SIGNAL =  12; EXPRESSED IN HEART, SIGNAL = 7.9; EXPRESSED IN FETAL LIVER, SIGNAL =  13
ctgctgtgctgtgtgtgatggggaagacgtcattatcagtccacatctctgaaggatcacgtttctgaaggatggtcaacagcattagacatgctgacaaggaaccgtggcagcccagtgtcacctacagtcctggacatgtgggggcaagaaggtacacatgagtgtgtggttatgagtcaggagcaccacgggatgaccttcagatcaggcatgacaaggtcctgcttagaggacggtctgggcttgtgtacctttatccggcagggacctacccagctggattgacctcactcatgccctctggtttccctgcaggagccagagcctgcagggtgggtgtcgggacatgctgatcttccctcaagacaggtgagtggcctgggtttagcttggggacatcctctcccacataggacagcagagtgttctggtgggcctggcgggtgggggtgacagggatggactggccctggacactgtgtgctc

SEQ ID NO: 5474 - DNA, 462 bp, Homo sapiens
  MAP TO AB019441.1; EXPRESSED IN ADULT LIVER, SIGNAL = 7.6; EXPRESSED IN PLACENTA, SIGNAL = 4.5; EXPRESSED IN LUNG, SIGNAL = 3.9; EXPRESSED IN HELA, SIGNAL = 5.7; EXPRESSED IN HEART, SIGNAL = 3.7; EXPRESSED IN BRAIN, SIGNAL = 4.8; EXPRESSED IN BONE MARROW, SIGNAL = 5.9; EXPRESSED IN FETAL LIVER, SIGNAL = 6.3
ggaaaccaccacacatttccttaaattcagggtccagctcacatgggaaatactttctgagactcatggacctcctgcacaagaacatgaaacacctgtggttcttcctcctgctggtggcagctcccagatgtgagtgtctcaaggctgcagacatggggatatgggaggtgcctctgatcccagggctcactgtgggtctctctgttcacaggggtcctgtcccaggtgcagctgcaggagtcgggcccaggactggtgaagccttcggagaccctgtccctcacctgcactgtctctggtggctccatcagtagttactactggagctggatccggcagcccgccgggaagggactggagtggattgggcgtatctataccagtgggagcaccaactacaacccctccctcaagagtcgagtcaccatgtcagtagacacgtccaagaaccagttctcc

SEQ ID NO: 5475 - DNA, 466 bp, Homo sapiens
  MAP TO AC005841.3; EXPRESSED IN ADULT LIVER, SIGNAL = 5.5; EXPRESSED IN LUNG, SIGNAL =   5; EXPRESSED IN PLACENTA, SIGNAL = 4.7; EXPRESSED IN HELA, SIGNAL = 4.3; EXPRESSED IN HEART, SIGNAL = 4.4; EXPRESSED IN FETAL LIVER, SIGNAL = 5.7; EXPRESSED IN BRAIN, SIGNAL = 4.8; EXPRESSED IN BONE MARROW, SIGNAL = 4.7
aagtcagccagctgtgggccctgccaaccctccctctcttctaggactgggtttttccagccggagtctcactccctctacagcaatctcgggaaattggagactgacgcggctgctcctgcatgttatttatttttcctctttccctcccgtggagaccctcctgttggaaagagagctgcagcacgggacagagacaggcaggaagaagcagagaggactcggtgacgcccccaccgagcagcccctggcccactcctccagcaggggccatgagcaccaagcaggaggccaggagagatgagggagaagccaggacgagggggcaggaggcacagcttcgagaccgagcccacctgagccagcagcgccggctcaaacaggccacccagttcctgcacaaggactcggccgacctgctcccgctggacagcctcaagaggctcggcacctccaaggacttggt

SEQ ID NO: 5476 - DNA, 452 bp, Homo sapiens
  MAP TO AC004824.1; EXPRESSED IN PLACENTA, SIGNAL =  12; EXPRESSED IN LUNG, SIGNAL =  12; EXPRESSED IN HELA, SIGNAL =  11; EXPRESSED IN FETAL LIVER, SIGNAL =  13; EXPRESSED IN HEART, SIGNAL =  10; EXPRESSED IN BRAIN, SIGNAL =  12; EXPRESSED IN BONE MARROW, SIGNAL =   9; EXPRESSED IN ADULT LIVER, SIGNAL =  12
atgaagacacagggagccacccggaacaccaccgtgtctttgtacagcacagtctctggaattgactgcaacaagacaaggtcctgttagcaacctgcttccacatttactcgctcccctcttaccccagggttccggccgttcagtccggcccccagctgggccccacttgccttctgcagctctcccccagcaaacctcaagctctgcccaactgtgggagatggcttttcccccaccggagcatcctagtctgaggacccatctattatggggacataccgggtcttgagactcctccaccagggacacagagtaggagatgaggcctgagaattcggcagatgggaatgctatagcttcaacgtagaaagtctccttcaagtggttcccgaggagggccaaggtataggcgtgctggtcgggccccagcaccaactcaaaggtactgg

SEQ ID NO: 5477 - DNA, 446 bp, Homo sapiens
  MAP TO AC004477.1; EXPRESSED IN PLACENTA, SIGNAL =  37; EXPRESSED IN BONE MARROW, SIGNAL =  38; EXPRESSED IN ADULT LIVER, SIGNAL =  41; EXPRESSED IN LUNG, SIGNAL =  47; EXPRESSED IN HELA, SIGNAL =  38; EXPRESSED IN HEART, SIGNAL =  33; EXPRESSED IN FETAL LIVER, SIGNAL =  38; EXPRESSED IN BRAIN, SIGNAL =  41
ataacctcaaactcctgggctcaagtgatcctcccgcctcagcctcctgagtagctgggactacaggcatacaccaccatgtttggctaattttaaacatttctgtagagacagggtctcatcgtttcccaggctggtcttgaactcctggcctcaagcgatcctcctgccttggcctcccacagtgctggaattgcaagtgtgagccatcatgtacagcctgaaccaatctttcttctgtcctcagcttgagatcttcttagcccagagagcagtggagttgagtgaggaggcagatgtcctgtctgtgagccagttccagctggctccagccatcctgcagggccagaccaaagagaagatggttaccatggtgtcagtgctggaggatctgattggcaagcttaccagtcttcagctgcaacacctgtttatgatcctggcct

SEQ ID NO: 5478 - DNA, 483 bp, Homo sapiens
  MAP TO AC006213.1; EXPRESSED IN BONE MARROW, SIGNAL = 1.7; EXPRESSED IN PLACENTA, SIGNAL = 1.5; EXPRESSED IN LUNG, SIGNAL = 1.6; EXPRESSED IN HELA, SIGNAL = 1.7; EXPRESSED IN FETAL LIVER, SIGNAL = 1.6; EXPRESSED IN ADULT LIVER, SIGNAL = 1.5; EXPRESSED IN HEART, SIGNAL = 1.4; EXPRESSED IN BRAIN, SIGNAL = 1.8
ccttaaatgaagccagtcagctgaactcaccttataccacatcaaaccctcaaggatatcaaatagaataaaaggaaaaaaataatccaaaggaaagcaagttcaaagattgaagaacatcatcccatgaagatgagaaataaccagctcaagaactcttgtcaattcaaaaagccagagtaacttctttcttccaaataaccatgctagctcttcaggaagggtctgaacagagctgagatggctgaaatgatggaaatagaatttgggatatggataggaatgaagatcattgagatgcaggagtacattgaaacccaatccaaagaagctaagaatcacaataaaatgatacaggagctgacagacaaaatagccactacagaaaagaatgtggccaacctgatagagctgaaaaatatactacaagaatttcatagtgcaatctcaagtattaatagcagaatagaccaagctgaagaa

SEQ ID NO: 5479 - DNA, 342 bp, Homo sapiens
  MAP TO AC004106.1; EXPRESSED IN LUNG, SIGNAL = 1.4; EXPRESSED IN PLACENTA, SIGNAL = 2.6; EXPRESSED IN HEART, SIGNAL = 1.4; EXPRESSED IN FETAL LIVER, SIGNAL = 4.5; EXPRESSED IN BRAIN, SIGNAL = 1.4; EXPRESSED IN BONE MARROW, SIGNAL = 1.4; EXPRESSED IN ADULT LIVER, SIGNAL = 1.5
gaaacaccagagaaatggaggagatgagtcgtgattctgaaaaaggagacaatatcagacataacagtctagcatacttgatgttattcccaggtaatggattacaatattcaaagaatgatttgcaagcacccacacaggaaagtagtgagctgtggaaggaggacagaggggtctcaaagaacatcatgtctgatcatcagatttgcttttacttctaccttcactgatgatgttaggcttgttgatcaaagtaatgtggtacaaacagtgtgcagttttctccaacgcatttggcaaggacttggtatccttgtggacaggatggacaggcatgctctg

SEQ ID NO: 5480 - DNA, 451 bp, Homo sapiens
  MAP TO AC002542.1; EXPRESSED IN BONE MARROW, SIGNAL = 1.4; EXPRESSED IN PLACENTA, SIGNAL = 1.3; EXPRESSED IN LUNG, SIGNAL = 1.2; EXPRESSED IN HEART, SIGNAL = 1.5; EXPRESSED IN FETAL LIVER, SIGNAL = 1.5; EXPRESSED IN ADULT LIVER, SIGNAL = 1.5; EXPRESSED IN BRAIN, SIGNAL = 1.4
aaaggcagtcttttattgacaggtacttcctgacttcaaggacagagcattgatggaaccaatccagaaaaagggttgtcattgtccaggccttcttgttgtaaagttaaaaaactggcagctggtgtttatcttttcccttcagggcttgggcatcagcagctttataggtaagggcagtctaggtcataaacccaactgcatttgcactgaacagtagaagtcgcctatctctaccttaaatcctggtgattccttctcttccttactaatgtcctttgtggcatttttttcccagaatagggcactttcgtctacattgaaaacctgttcaggtaggtatcctttctcttcaattattttcttaatggcacctgggaactcatctgctgcctcttggttggcagaagctgcatctcctgttatcttgacatttcttaaaccaaacctc

SEQ ID NO: 5481 - DNA, 412 bp, Homo sapiens
  MAP TO AC004414.1; EXPRESSED IN HEART, SIGNAL = 2.2; EXPRESSED IN BRAIN, SIGNAL = 2.6; EXPRESSED IN BONE MARROW, SIGNAL = 1.8; EXPRESSED IN PLACENTA, SIGNAL = 2.1; EXPRESSED IN LUNG, SIGNAL = 2.2; EXPRESSED IN HELA, SIGNAL = 2.1; EXPRESSED IN FETAL LIVER, SIGNAL =   2; EXPRESSED IN ADULT LIVER, SIGNAL =   2
ggtaccaaagcaaacaagccactcttacacagtctttgtaagttactgcagatgtatagacagcacagagacatgcctgagagcagctgctgtgaatcagggtcggggcccctggtgcagagcaggttgtgatagcacgtgttggatcccatgacaaaagaccctctttagagacacagatgtggctgtgacttccgtacccacccatccttcccgtgactcacctcagatgtgagttctcagagccattcttctcccacaaggggctcttctggggacccaggtctggggttccagcgaggtcctggtcactgcagtcttcctggtctgtggcccacttgtctttgtatttcatgctgtcctgctgcgagtccagagagacgatgtctgagggggaactcatcactcctga

SEQ ID NO: 5482 - DNA, 461 bp, Homo sapiens
  MAP TO AC004491.1; EXPRESSED IN PLACENTA, SIGNAL = 3.5; EXPRESSED IN LUNG, SIGNAL = 4.1; EXPRESSED IN HELA, SIGNAL =   4; EXPRESSED IN HEART, SIGNAL = 3.8; EXPRESSED IN BONE MARROW, SIGNAL = 3.9; EXPRESSED IN FETAL LIVER, SIGNAL = 3.7; EXPRESSED IN BRAIN, SIGNAL =   4; EXPRESSED IN ADULT LIVER, SIGNAL =   4
ctcgccctttgagtgaacctaaattactattagcagtagtagcagcaatgaccctgaacactattttccaagcacccactatgcacagccatacctacctctgaatctgagagggcaaaaataaaggagccagacagagggtggaggaaaacagaggttgttattgccagctgcggttcttcaccccagctgcacactccaattacctgggaagcctgggccccgccccagggattctgatgtaatgggtctgggatcagcctgggcatcagaactttaaacctcccccaggaggctgtgatgtgtagccaagactatgaacaactgaacaaccacagccaggactcaggaacccccggcctggtcttggctgaagctgagggctgcaggaagcaaggaagtgtggcacttcccttactgcttctcctacacggggaatttccaagctcccacctggaatt

SEQ ID NO: 5483 - DNA, 465 bp, Homo sapiens; identical to SEQ ID NO: 5328
  MAP TO AC006227.1; EXPRESSED IN PLACENTA, SIGNAL = 3.3; EXPRESSED IN HEART, SIGNAL = 4.9; EXPRESSED IN FETAL LIVER, SIGNAL = 4.8; EXPRESSED IN BRAIN, SIGNAL =   4; EXPRESSED IN LUNG, SIGNAL = 2.9; EXPRESSED IN HELA, SIGNAL = 4.4; EXPRESSED IN BONE MARROW, SIGNAL = 3.5; EXPRESSED IN ADULT LIVER, SIGNAL = 3.6

SEQ ID NO: 5484 - DNA, 345 bp, Homo sapiens
  MAP TO AC004112.1; EXPRESSED IN PLACENTA, SIGNAL = 3.2; EXPRESSED IN LUNG, SIGNAL = 3.7; EXPRESSED IN FETAL LIVER, SIGNAL =   4; EXPRESSED IN BONE MARROW, SIGNAL = 3.3; EXPRESSED IN ADULT LIVER, SIGNAL =   4; EXPRESSED IN HELA, SIGNAL = 3.3; EXPRESSED IN HEART, SIGNAL = 3.6; EXPRESSED IN BRAIN, SIGNAL = 3.4
ggtttcatttgtaagagggggattattttaaaaataagcattttgaatatttttacatttttccccacactgtactgatgtatactttttataataaatatgtattccttttttttctgtaggcttaaagaaattaaataaagggacaaaatcaaagagttggagtaagaagtgcacatttggttttgcagtacgtactccagttgatcccacgtctttctatcggggagcagcgaagtgtgtttagtttcttccatgtgagttcttaagtctgctttggatttgaacttcacatggcagccataacatctgcattggtgaacttgcctccgaataaaattgacc

SEQ ID NO: 5485 - DNA, 470 bp, Homo sapiens
  MAP TO AC005746.1; EXPRESSED IN PLACENTA, SIGNAL = 2.1; EXPRESSED IN LUNG, SIGNAL = 2.2; EXPRESSED IN FETAL LIVER, SIGNAL = 1.6; EXPRESSED IN BRAIN, SIGNAL = 1.3; EXPRESSED IN ADULT LIVER, SIGNAL = 1.8; EXPRESSED IN HELA, SIGNAL = 1.7; EXPRESSED IN HEART, SIGNAL = 1.6; EXPRESSED IN BONE MARROW, SIGNAL = 1.8
cttgcaaaataggttgccgtttataaggttttatacctaaggctatcaaaaaactattaagtattataatgactttgtactgtatcaatttagctaatctggaactacgattcagataattctcttccatgtatgattatgagttggggttaatcataagaaaaatttccatgagatttggaaggtggaagatggcagcaatcattacgctctgaaggttaaatgtagggcacacggtgctgtggcagtttatgcttaccgtcactgatgtgctggccagcctgccgggctacatgtcttccagctctcatgagatagtctccttcaaattatctgacttctgggccaagtgcatgtgcacctctgtagtgaagagtgccagctccttctgcaggtcagtcaaccattttatcaaggctaaaggcactgacaaggctgcagtgagccactgctcactgtgattgtgccac

SEQ ID NO: 5486 - DNA, 468 bp, Homo sapiens
  MAP TO AC004592.1; EXPRESSED IN PLACENTA, SIGNAL = 1.5; EXPRESSED IN BRAIN, SIGNAL = 2.1; EXPRESSED IN ADULT LIVER, SIGNAL = 1.7; EXPRESSED IN LUNG, SIGNAL = 2.5; EXPRESSED IN HELA, SIGNAL = 1.7; EXPRESSED IN HEART, SIGNAL = 1.6; EXPRESSED IN FETAL LIVER, SIGNAL = 1.4; EXPRESSED IN BONE MARROW, SIGNAL = 1.6
ccttctccaggaagcttgtctagattaacttcaggatcacatgccattctcagaaccatcccttcttcttcccctccaaccagcccagttacacaggatagaatatttttattttgcttgtctccatggccagagaacatctctgagtctgctaatgcagcagcttctcaagggcaaggcctggagcccaccacgcttcccaagccccagttttggcatagagaagtgttagaacaagccgacatgaagtatttttgataacataaaaagacaagaaaaccaaccttggatgtgtaggagtggccatctgagccgcagaccatggctgactgtgccacgggacagggcttgcacttgaccaaattcgaaggtccaacccagtgtttctgggccacgttccccttcttttgcctaaagatgagaaaaaaggggataaattagttgaagctccagaccctatgagtcttt

SEQ ID NO: 5487 - DNA, 490 bp, Homo sapiens
  MAP TO AC004914.1; EXPRESSED IN PLACENTA, SIGNAL = 2.6; EXPRESSED IN LUNG, SIGNAL = 2.7; EXPRESSED IN HELA, SIGNAL =   3; EXPRESSED IN FETAL LIVER, SIGNAL = 2.9; EXPRESSED IN BRAIN, SIGNAL = 2.6; EXPRESSED IN BONE MARROW, SIGNAL = 2.7; EXPRESSED IN ADULT LIVER, SIGNAL = 2.7; EXPRESSED IN HEART, SIGNAL = 2.8
cagcaggctcaattttatctccaagctcatcactgagttattaaatcgaagtacccatcatatcctagacaaaaatacaaaaagataaaaaaaaaaaaaagggaaatagatgtatccctctctagatgcttggaggcactgaaaattatccatgcctttaaaatgtatttctaaactgtgtccattattcacactcctaatgttttgttccagcaaatgttacaaacactaatgttgtctttgcctggggtacttccccacctgaaattttctctttcctctcctctgccaagtcaattcttccctgcatttcaagacccagcccaagaccttctgcttctcgaagtagagtctgactggctggcgatccagaaaggcctagaggccaggccggaagaggagagaaaagagtcaggcatgaagctaccgtgaggcccctaaacgctgcttctgtatttctgggctccttgccacgctcacacctaggaac

SEQ ID NO: 5488 - DNA, 450 bp, Homo sapiens
  MAP TO AC005479.2; EXPRESSED IN ADULT LIVER, SIGNAL = 1.5; EXPRESSED IN PLACENTA, SIGNAL = 3.5; EXPRESSED IN LUNG, SIGNAL = 1.7; EXPRESSED IN FETAL LIVER, SIGNAL = 1.5; EXPRESSED IN HEART, SIGNAL = 1.4; EXPRESSED IN BRAIN, SIGNAL = 1.3; EXPRESSED IN BONE MARROW, SIGNAL = 1.4
aactgtgaagggccatgaagagcaaggttaagagcaaagaaaacttctgctgattgtttttttttttttttttttttttgcataattgtgtttggagtgaatgcttgcactgtgctagtaccaagcaccactatcaagagaaatagaccctaggaatgctgttgcttgggattatttctgaatttttgatttagagtttgaaaataggttattttctttgccatctgattctctttttttctcttagatattcagtctaaaagcagcaaggccgtggtgcatggcatcctgatgggcgtcccagttccctttcccattcctgagcctgatggttgtaagagtggaattaactgccctatccaaaaagacaagacctatagctacctgaataaactaccagtgaaaagcgaatatccctctgtaagtgataccattattgaggacacggga

SEQ ID NO: 5489 - DNA, 482 bp, Homo sapiens
  MAP TO AC005840.1; EXPRESSED IN BONE MARROW, SIGNAL = 1.9; EXPRESSED IN PLACENTA, SIGNAL = 1.9; EXPRESSED IN LUNG, SIGNAL =   2; EXPRESSED IN HELA, SIGNAL = 2.1; EXPRESSED IN HEART, SIGNAL = 5.7; EXPRESSED IN FETAL LIVER, SIGNAL = 1.8; EXPRESSED IN ADULT LIVER, SIGNAL = 1.8; EXPRESSED IN BRAIN, SIGNAL = 1.9
acttgttttctggattcgggggaccatggaaatagaaaatgatagaaacgaggcatgcttttgaggtttcttgggctgggtagtagaaaaataggtgttttcctgtgggatttttttgcagctgagaatacttcgtcattttcctcagtctttaagggagtggtaggctttgacagtccagctgttgacaaaatctgtcttcttaaactgagccttcttgtaggcatgatggagttccgtgtgtgcctacagagaatacaggaggatggaagcagctttacttgctttgttggaggcataggcatcgcctgcactgatggtcataattttctggatgcccccggtattcggaaggcgctgtgcattctggtaactgttttggattacgttgttcaacatgtaacaggcagaggctgtagtttcaatgagaaggtcagtactcgggactgtatcaggaatgatggagaccaaactggggagag

SEQ ID NO: 5490 - DNA, 472 bp, Homo sapiens
  MAP TO AC004695.1; EXPRESSED IN LUNG, SIGNAL = 5.7; EXPRESSED IN BRAIN, SIGNAL = 1.6; EXPRESSED IN BONE MARROW, SIGNAL = 1.8; EXPRESSED IN PLACENTA, SIGNAL = 1.6; EXPRESSED IN HEART, SIGNAL = 1.3; EXPRESSED IN FETAL LIVER, SIGNAL = 1.7; EXPRESSED IN ADULT LIVER, SIGNAL = 1.6
aatcctagagccccagaagcaactggcgtgccagcagtgcaagattttctgtgaccctctgagaggcaacatgcaaagcagttaagaggtgaggcaggtctgggttctgacctcacttccccattccctgggtataatcctgggtaaactaaagcctgggtgtttaacggatgcttaatcattcattaaacaaggatgattatgatgcagaattaagaggcgatgaaggttaaatgagataatgcaggcacagcactcagcactgtgtgagtcacatggtcatagtcagtacaaggaagccaccagcattatagtcactatcatcaccacaaccacccccatcaccatcatcaaagtccatatctgcaccatcatcactatgactgtcatctccatcaccaccatcacaatgatcattaccaccgtcatatctcggtatatgacatctaatagaagattttgcaggtggaaa

SEQ ID NO: 5491 - DNA, 469 bp, Homo sapiens
  MAP TO AC002059.3; EXPRESSED IN LUNG, SIGNAL = 1.9; EXPRESSED IN HELA, SIGNAL =   2; EXPRESSED IN HEART, SIGNAL = 1.9; EXPRESSED IN FETAL LIVER, SIGNAL = 1.9; EXPRESSED IN BRAIN, SIGNAL = 2.6; EXPRESSED IN BONE MARROW, SIGNAL = 2.2; EXPRESSED IN PLACENTA, SIGNAL = 1.7; EXPRESSED IN ADULT LIVER, SIGNAL =   2
atggggacatttgctctcagcactgtcgttaggctggaatgaggtcatctagcaaataccttgtgtacaataaatagctgataaaaggttgtcagttttcctcagactcaggtcttgctgggggacaacacgccaggcctgagtgcctgtgctgctaaactggggaagcagagtgtgaaggcgcaggccgactggccagtctcactcacgaggccgtgcgaggtggcaggctcttgtgcacgacgccccggcccccctccacaaaggcactgggaggcttatggtagacggaagccagcgtgccgatgtagcagataagctcgtctaacagtgtgggctcgatgaggtccgtctcttcagagatgagtggcttctcagccaacaccacctccttggctgccaccgggtccgtggacagcaggcgccagtagatgtagccacggtcccgcaggtctgggttatctgagtc

SEQ ID NO: 5492 - DNA, 397 bp, Homo sapiens
  MAP TO AC006256.1; EXPRESSED IN LUNG, SIGNAL = 1.8; EXPRESSED IN HEART, SIGNAL = 1.6; EXPRESSED IN FETAL LIVER, SIGNAL = 1.6; EXPRESSED IN BRAIN, SIGNAL =   2; EXPRESSED IN BONE MARROW, SIGNAL = 1.6; EXPRESSED IN HELA, SIGNAL = 1.9; EXPRESSED IN PLACENTA, SIGNAL = 1.5; EXPRESSED IN ADULT LIVER, SIGNAL = 2.1
gtgagccatgatcacaccactacactccagactgggtgacagagtgagaccctgtctgaaaaaaaataggtattaagtatagagttttcattgcttcatcctgtactcaggtctaagaacagaacctcaggaggtaccaacagttaagagtactagtagcccttgaacaacgtgggtttaaacttcacgggtccacttatatgcatttttttctgcctcccctgagagaggaagaccaatcccttctcttcctcctcctcctcagcctactcaacatgaaggtgctgagaaacaagatcttcatgataatccaattccacttaatgggtagtaaatatattttctttttcttatgattttcttaataacattttcttttctttagtttattgaacga

SEQ ID NO: 5493 - DNA, 448 bp, Homo sapiens
  MAP TO AC003683.1; EXPRESSED IN PLACENTA, SIGNAL = 5.5; EXPRESSED IN LUNG, SIGNAL = 5.7; EXPRESSED IN HEART, SIGNAL = 5.7; EXPRESSED IN BRAIN, SIGNAL = 5.7; EXPRESSED IN FETAL LIVER, SIGNAL = 5.8; EXPRESSED IN BONE MARROW, SIGNAL = 5.2; EXPRESSED IN ADULT LIVER, SIGNAL = 5.3; EXPRESSED IN HELA, SIGNAL = 5.9
tgaattttctctttttggcaactaacatcatgtttaataaattactgttctttgtggtgtccttcatgttaggaagaattaatttacctttaccactttttttccactggcaaaattagacataattcaactccattacccattttgatattattctgaaacattattacccagaaatgagacttgtgaggctttgacaggatgtggtgcatttaaaaatttacctaaataggatagttttgatagggctattaaatgactcataataaaagctaaacacagaaagagtatatcaactcccaggttgacattcagtttctgtctctcccctcttggctttatcgtaataagagagggggcaaagcttccagtagcccaaatcactgtcaccagctttacacgatggcattcaatgacaatatttgcacgacctaatgctgattgcatt

SEQ ID NO: 5494 - DNA, 455 bp, Homo sapiens
  MAP TO AC005667.1; EXPRESSED IN BONE MARROW, SIGNAL = 2.4; EXPRESSED IN PLACENTA, SIGNAL = 2.5; EXPRESSED IN LUNG, SIGNAL = 2.8; EXPRESSED IN HELA, SIGNAL = 2.4; EXPRESSED IN HEART, SIGNAL = 2.1; EXPRESSED IN FETAL LIVER, SIGNAL = 2.5; EXPRESSED IN BRAIN, SIGNAL = 2.7; EXPRESSED IN ADULT LIVER, SIGNAL = 2.5
tccagctgtgtatgggactgtcacaatggggtctccgtctacccagagttgctttcttacacaccctgtgtagccaacggaaggagcaaaacatccggcagcttactctgagggtctgtgcgtcccacttcctttcctccaaggggaaattgctgcaacaatcaccagtcacctctgtttgaccaaatttgagaaagagcgaggggcagcagggaatagactggtgggacttttgaagaattcaggtaatctgctgactggtgggtaatgcttacttttcgtttctaggcaataaataatgacttacaagcaaaaggctactccctagtttcagacaccatctggatccatttcccccaaggcctagtatacagtgtgacccagtacgatggcaaatgtaaagcctgctgaaatcgagtgcccatgtttgagaaccagactccagacatttggtt

SEQ ID NO: 5495 - DNA, 470 bp, Homo sapiens
  MAP TO AC000003.1; EXPRESSED IN PLACENTA, SIGNAL = 5.9; EXPRESSED IN HEART, SIGNAL = 4.2; EXPRESSED IN BONE MARROW, SIGNAL = 7.1; EXPRESSED IN ADULT LIVER, SIGNAL = 7.4; EXPRESSED IN LUNG, SIGNAL =   5; EXPRESSED IN HELA, SIGNAL = 5.9; EXPRESSED IN FETAL LIVER, SIGNAL =  12; EXPRESSED IN BRAIN, SIGNAL = 6.9
gggagttgttgttgagtcgggtcccagggggcctttctcgctttgttctgagaaaatgggtgtgtttttgagtatttgaatagggccatcacataaactgactgggaaagtgcctagaacggaggctgtctgggtctcgatctcagtgtgcacgtgtctgggagggagaggaaggatgagggtttctagaagatgctggctaaagacagagctctgtttgcaacccctcagtgggagggaaggatgaatgaaaacacaggggctggctggttttggggccttaggagtttcagaagcatcatctcctgggtgggtaccaccggtgtgcacagataaaagtgtgctcccgggagatgcaggtcacactgtacgaggaggagtgagtcgtgtcctccctctgtttacatctcgttgatgatggtgctgatgctattttgggccttggtgtgtgccgtttgagtgtggaagtt

SEQ ID NO: 5496 - DNA, 462 bp, Homo sapiens
  MAP TO AC004668.1; EXPRESSED IN PLACENTA, SIGNAL = 1.5; EXPRESSED IN HEART, SIGNAL = 1.4; EXPRESSED IN BONE MARROW, SIGNAL = 1.5; EXPRESSED IN ADULT LIVER, SIGNAL =   2; EXPRESSED IN LUNG, SIGNAL = 1.3; EXPRESSED IN HELA, SIGNAL =   2; EXPRESSED IN FETAL LIVER, SIGNAL = 1.9; EXPRESSED IN BRAIN, SIGNAL = 1.3
ggatacaggcaacacatcaaagaacttcaccttttttacatcaaagaaaaaatacaccattactggtttattcccgaagtacctatgaactcacgtgcttgggagctaggtgggactaaaatgtagctaactacagtttcacttagattaccagggggaaaattactttctgaaacatactttttgaaaatttgtaaatgtttattttcaacattcataaattcccttatacaccaagaaattctgttatacctacttgatattttcagttggtcccaaaattgtccgtccaagtgcagtattttgataagctgtggcatgaagataatcaaaaacaacttcttgtaaattggtttcaacttcctgcatctctctaaggattactccacgctcacgttcaatctctgcttctcccaatgtgctgttttgtattatatcagcaagaatttctacagctaattg

SEQ ID NO: 5497 - DNA, 478 bp, Homo sapiens
  MAP TO AC000378.1; EXPRESSED IN LUNG, SIGNAL = 4.2; EXPRESSED IN FETAL LIVER, SIGNAL = 3.3; EXPRESSED IN BRAIN, SIGNAL = 4.1; EXPRESSED IN BONE MARROW, SIGNAL = 3.7; EXPRESSED IN PLACENTA, SIGNAL = 3.2; EXPRESSED IN HELA, SIGNAL = 3.4; EXPRESSED IN HEART, SIGNAL = 2.7; EXPRESSED IN ADULT LIVER, SIGNAL = 3.3
tggcagcatttttctgcttagtaacccataaaataatagcacatcttgtaactaaaagtgttgtagatgctatgagatcctggggaagcccagaatctaactccaccctgtctgactccaaacaccacatattttctatgtctttggactggggcacagatgtagataactcgagctttgctgattgtgagaaaggtatgagaaatggccctgatggaattttcttcttgtactttaaggggaagaaagcagcatcatcccactattccaggggaggtgctaaatacgagggtgaggctgtcaagcggtccctggtggagtcctacactcacccaaacagcaacgagacagagcggagggagaacatcgataccgtcatgaactgcttcagcacagaagactttgactttgtgactctgtactacagagagccagataacgtgggacatcgattcgggccagaggcagagaagaggaa

SEQ ID NO: 5498 - DNA, 452 bp, Homo sapiens
  MAP TO AC004837.1; EXPRESSED IN LUNG, SIGNAL =   4; EXPRESSED IN FETAL LIVER, SIGNAL = 3.9; EXPRESSED IN BONE MARROW, SIGNAL = 3.6; EXPRESSED IN PLACENTA, SIGNAL = 3.9; EXPRESSED IN HELA, SIGNAL = 3.9; EXPRESSED IN HEART, SIGNAL = 3.4; EXPRESSED IN BRAIN, SIGNAL = 3.6; EXPRESSED IN ADULT LIVER, SIGNAL = 3.6
aagtcaggaatgccatcagtgctttaaaaagaaaaaaagtacatttagctgtagtgtctcatgttttaatgtctcttgggaagctaaggacaaggtgaactaaaattcctaacatgtatctgagtattcagggatgataaaaatcaacaaggattaaacctctatttgaaagtttcatagactctccagacaaaatggagccaagttaaagcaaaccaacctattttaacatgatgcagtagtaaagagtcacgtgttaccttgtcaacattagctcgtgttttagcagatgtttccacgtagttaacattccactgctcagctctgttttttgcctcttctacagaaacctgtcttttatcttctaaatctgatttgttaccaaccagtagaaatggaacattctcatcttcttttactcttaaaatctgctccctggataagagaaaatg

SEQ ID NO: 5499 - DNA, 464 bp, Homo sapiens
  MAP TO AC003685.1; EXPRESSED IN LUNG, SIGNAL = 1.9; EXPRESSED IN HEART, SIGNAL =   2; EXPRESSED IN FETAL LIVER, SIGNAL = 1.9; EXPRESSED IN BRAIN, SIGNAL =   2; EXPRESSED IN BONE MARROW, SIGNAL = 1.8; EXPRESSED IN PLACENTA, SIGNAL = 1.8; EXPRESSED IN ADULT LIVER, SIGNAL = 1.9
gcaaacaggataattagaagatctcacataggagataaatttccttgtctgagaacattgtagaaggcttcctcaagtgttagaaggtcctccttctctttaggattccttaaaagaactggtttccaaatgagaataaaaaatatatatattttttggtggccaagccagtgcttaataatctattgaattcatgcttctctggtgaaagctagattggagacatggcctaggatggttgcccaagtgtgacccccaagccctctctgctgaattgaatatgagttggaccatccagcaccactaacctgcagagcccagtcaagcaggctggatatgctggaagagggagctctggggctgacggggatgctcctccaagcccagctctgggcacttctctaggaggcccttctgctcctctttctaggaacaaggaatagaggaaagcctggcccttatac

SEQ ID NO: 5500 - DNA, 323 bp, Homo sapiens
  MAP TO AC005871.2; EXPRESSED IN PLACENTA, SIGNAL =   2; EXPRESSED IN LUNG, SIGNAL = 2.4; EXPRESSED IN FETAL LIVER, SIGNAL = 1.9; EXPRESSED IN BRAIN, SIGNAL = 1.3; EXPRESSED IN BONE MARROW, SIGNAL = 1.9; EXPRESSED IN ADULT LIVER, SIGNAL = 1.9; EXPRESSED IN HELA, SIGNAL = 1.9; EXPRESSED IN HEART, SIGNAL = 1.8
gagaggtggaagcaggtgagcactctcagaggtgattgggatggtggtgggagtcagattcctaaagacaagcttaccaggacctgggaggtcatgcctggtctgcaaggaagacactgtggttggatgcagctggctggactgcaacaggtccacctgatgcaaatccccttttcttcttctgtgagctggaaagaacctccctggagccactagatggcaaacaggctagctcaggttaaagccatcaccaccagatgggcaaatgggctagctcaggttaaaaccctcaccaccagatgggcaaacgggctagctcaggt

SEQ ID NO: 5501 - DNA, 483 bp, Homo sapiens
  MAP TO AC006239.5; EXPRESSED IN BONE MARROW, SIGNAL = 1.7; EXPRESSED IN PLACENTA, SIGNAL = 2.1; EXPRESSED IN LUNG, SIGNAL =   2; EXPRESSED IN HELA, SIGNAL = 2.1; EXPRESSED IN HEART, SIGNAL = 1.9; EXPRESSED IN FETAL LIVER, SIGNAL = 2.1; EXPRESSED IN ADULT LIVER, SIGNAL = 1.9; EXPRESSED IN BRAIN, SIGNAL = 1.9
ggcagaatgaagacaccttatcataataagaaagtttaaatgtttacgaaagcattacttctataagtgatgtctccggaaaagggaactataaatgccattttctgctcttctaggttcagtcaagtcttaggattcagcacacattgatagaagaggaaaagaaggcatataatttttactgagcctctgtgatgtcccaggtatttaaaatgtatcttatttaattcttacaaatctctaagacagagttattatttccatcatacaggtgaggaaaccaaggcacgagaaagggctggtaacttcagttttgcaattactgatttagcacaagtgttaagacatgaggatgatatggagtggttaggagcagggggccaaaggcctgaaggggtttacttcttggttctggtcttcacaaactgtgtggccgtggaaagttactaaatctctgtaacctcagtctcttcatctgtcatg

SEQ ID NO: 5502 - DNA, 486 bp, Homo sapiens
  MAP TO AC005878.2; EXPRESSED IN PLACENTA, SIGNAL = 3.4; EXPRESSED IN HEART, SIGNAL = 3.6; EXPRESSED IN FETAL LIVER, SIGNAL =   3; EXPRESSED IN LUNG, SIGNAL = 3.8; EXPRESSED IN HELA, SIGNAL = 2.8; EXPRESSED IN BRAIN, SIGNAL = 3.6; EXPRESSED IN BONE MARROW, SIGNAL = 2.9; EXPRESSED IN ADULT LIVER, SIGNAL = 3.1
tcaatgaccaaccaattatacgatagtggtcataagattataataaacctgaaaatttcctatcacctggtgacactgtagtcattgtaacatcatagcacaatgcattactcatgtgtttgtgaggatgctggtgtaaacagacctacctcactgccagtcttagtacatgcaactatgtacagtgcatactacttgataaaatgataataaatgatgttactggtttgtgtatttactacaccatattttctactgttattgtagagtgtactccttctacttaaataaaaaaatactttttttaaaaaacttaactgtaaaacagcctcaggtagcttcttcaggtgatattctagaagaaagcattgttatcataggagatgacagttccatgtgtgttattgccccagaagactttccagtgggacgagatgtaaaggtagaaggcagtgatattgatgatcctgacccctgtataggcct

SEQ ID NO: 5503 - DNA, 464 bp, Homo sapiens
  MAP TO AC005753.1; EXPRESSED IN PLACENTA, SIGNAL = 1.4; EXPRESSED IN HEART, SIGNAL = 1.5; EXPRESSED IN FETAL LIVER, SIGNAL = 1.5; EXPRESSED IN BONE MARROW, SIGNAL = 1.4; EXPRESSED IN ADULT LIVER, SIGNAL = 1.6; EXPRESSED IN LUNG, SIGNAL = 1.8; EXPRESSED IN BRAIN, SIGNAL = 0.82
gcacacaacgagtgctcaagaaatatactgttaatgtttttattatttgttcatctgtaccggtgctcagatgtttcattttatggctgctcaggtggcagggggctgaggaggggatggagaggctggttatgggcctgggagaggggaagttagctgcagggaggctgtggggcagggggccggtgggctgagatgggagtaggagcctgcatgcagaaagcaggggagggtgaggcgagcagagtggaggaaacagaagtgagtgactatgtatttacttaaagactttgctccggtgagcgcctcattggccagacatctggtttctctgggcatccccagggaatggaagtcagacagtattacttcagtagctctgatgccatctacctcaggctggcttgtactcatggggctcaggatgctcccctgcagagtggggaccaagagctacaggcctg

SEQ ID NO: 5504 - DNA, 483 bp, Homo sapiens; identical to SEQ ID NO: 5355
  MAP TO AC005510.3; EXPRESSED IN LUNG, SIGNAL = 1.7; EXPRESSED IN PLACENTA, SIGNAL = 1.5; EXPRESSED IN HEART, SIGNAL = 1.7; EXPRESSED IN FETAL LIVER, SIGNAL = 1.5; EXPRESSED IN BRAIN, SIGNAL = 1.4; EXPRESSED IN BONE MARROW, SIGNAL = 1.4; EXPRESSED IN ADULT LIVER, SIGNAL = 1.3

SEQ ID NO: 5505 - DNA, 458 bp, Homo sapiens
  MAP TO AC004506.1; EXPRESSED IN PLACENTA, SIGNAL =   3; EXPRESSED IN BRAIN, SIGNAL = 3.4; EXPRESSED IN ADULT LIVER, SIGNAL =   3; EXPRESSED IN LUNG, SIGNAL = 4.6; EXPRESSED IN HELA, SIGNAL = 3.2; EXPRESSED IN HEART, SIGNAL =   3; EXPRESSED IN FETAL LIVER, SIGNAL = 2.9; EXPRESSED IN BONE MARROW, SIGNAL = 3.2
acccaaagggccagtctcactcccaccatgcccacccccacaacagcaccaagtctgtttccaggtagtgggcaaacaggaagttaccccaggctacccacctcccagctgcaaaagtaagtagggcattccttcttcccctgcctgtggagtctgtacgccagattcaccccctccccagagttctggccaggagacttctcgattggttcaaattgttacaaagttcagctggaggtttccttctccctgtggccttttcccagtgcctctggcagccctcctcaaggacacctgtgaggcgaggcagaaagggccttctaggggatccagcaagcccgcagggattttcctgctgcttcctgtacccctgtatttctctcagttctctaaactgacccagctccaagtaaggtaagaatcttctcctgtcatctagaccttcagggttccccagt

SEQ ID NO: 5506 - DNA, 441 bp, Homo sapiens
  MAP TO AC003030.1; EXPRESSED IN PLACENTA, SIGNAL = 1.7; EXPRESSED IN LUNG, SIGNAL = 1.6; EXPRESSED IN HELA, SIGNAL = 1.7; EXPRESSED IN FETAL LIVER, SIGNAL = 1.7; EXPRESSED IN BRAIN, SIGNAL = 1.2; EXPRESSED IN BONE MARROW, SIGNAL = 1.6; EXPRESSED IN ADULT LIVER, SIGNAL = 1.8; EXPRESSED IN HEART, SIGNAL = 1.7
ctccagcagggtctggataggcctctcctgggccttggtgttggacccaacactgggcagtggacaagcctcagtcccacagctgcccgcctggctgtgccccatgccccaaaagcctggctgattcatgggagtgcggcaggggcggcttcatcttgcaggaggtggccctggcagaaggggaaggcagatgctccctagaggaaggagcaggggtggctgggctgggcctggcttcctgagaggccaggctcaggtggatgctcgggtgtgggtgctgcacaggtgaagagcgtgaagccgtgtctgaagcagctgcagcagtgcatccagaccatctccacactgcacgatgatgagatcctgcccagcaaccccgctgacctcttccactggctgcccaaggagcacatgtgtgtgcttgtctacctggtgcgtccc

SEQ ID NO: 5507 - DNA, 465 bp, Homo sapiens
  MAP TO AC004736.1; EXPRESSED IN FETAL LIVER, SIGNAL = 1.5; EXPRESSED IN BRAIN, SIGNAL = 1.4; EXPRESSED IN BONE MARROW, SIGNAL = 1.3; EXPRESSED IN ADULT LIVER, SIGNAL = 1.6; EXPRESSED IN PLACENTA, SIGNAL = 1.2; EXPRESSED IN HEART, SIGNAL = 1.7; EXPRESSED IN LUNG, SIGNAL = 1.3
cctctgtgaccagcccttacaccccctccccctcatggactcctaccatccttcagcaatgtcccttagggtgtcagtgtggccctggggacagagcattagccctccctgggcctggatgcctctccctgcaggctgtgggagggaggtgcggaagtgtgagatgagatgatggctgtggtgaacatggtcaggtgtgcatatatgtaaggaggctgggtgggtacaggccctcctgcaagcatgttcacagcaggactgtgcagaggacactgagttctcctcccagaagcagctggagactcgtggctaccctaaaggtcttccctctgcggctcctctgatagggagagcctggcaagttctcttgtatgtacacctgtggatgtgtcagcctgcaggtgagcatggtcagtatgcagaggtgggtccagggtgtgtagggcctgaagcctggaagttttg

SEQ ID NO: 5508 - DNA, 383 bp, Homo sapiens
  MAP TO AC003688.1; EXPRESSED IN ADULT LIVER, SIGNAL =  14; EXPRESSED IN PLACENTA, SIGNAL =  16; EXPRESSED IN LUNG, SIGNAL =  16; EXPRESSED IN HEART, SIGNAL =  14; EXPRESSED IN BRAIN, SIGNAL =  17; EXPRESSED IN HELA, SIGNAL =  13; EXPRESSED IN FETAL LIVER, SIGNAL =  14; EXPRESSED IN BONE MARROW, SIGNAL =  14
aggaaggtacggcaggatttcccaccaggggaatccactttggtgcgcagctcccagcccagttagcgctctgggcctgcgggccaggccgcctttggttttccggatcctgccgggctccacactgcccctcccccagcccgccgacccctcagagccgccctgtgcgcgcctgcccctcacccagcaccggcttgtccgcctgactccgggccgggggggcgggggttcccgagaccgccgtcgccggattgccaggggtgcgggagcccggcgccgagggggtcccagcagcggggcccgaggcggctccgcccccgccgcccgccccgccgcctttctgcggctcccctgcgggcaccggtaccaccaccgctaccacc

SEQ ID NO: 5509 - DNA, 463 bp, Homo sapiens
  MAP TO AC004216.1; EXPRESSED IN PLACENTA, SIGNAL = 4.2; EXPRESSED IN BRAIN, SIGNAL = 3.3; EXPRESSED IN BONE MARROW, SIGNAL = 3.2; EXPRESSED IN ADULT LIVER, SIGNAL = 3.4; EXPRESSED IN LUNG, SIGNAL = 3.5; EXPRESSED IN HELA, SIGNAL =   3; EXPRESSED IN HEART, SIGNAL = 2.9; EXPRESSED IN FETAL LIVER, SIGNAL = 3.2
tcctccaccttcattatcccttctccctcctccaccaccccctctccctcctccaccaccccctctccctcctccaccttcatcaccccctccctcctccaccacacccttctctctcctccaccacaccctctccctcctccaccacaccttctccctcctccaccttcatcaccccctccctcctccaccaccccctctctctcctccacctccaccaccccttctccctcctccaccaccccttctccctcctctaccttcatcactccctttcctaccccgtctcactcctctacgttcatcacccccctccctcctccatcaccccctctccctcctccaccatcccctctccctcctccaccttcatcaacccctctccctcctccaccttcatcacttcctttcctaccccctctacctcctccaccttcatcaccccctctccctcctccattac

SEQ ID NO: 5510 - DNA, 449 bp, Homo sapiens
  MAP TO AC004601.1; EXPRESSED IN PLACENTA, SIGNAL = 2.1; EXPRESSED IN BRAIN, SIGNAL = 1.9; EXPRESSED IN BONE MARROW, SIGNAL = 1.9; EXPRESSED IN ADULT LIVER, SIGNAL = 2.1; EXPRESSED IN LUNG, SIGNAL = 2.6; EXPRESSED IN HELA, SIGNAL = 2.3; EXPRESSED IN HEART, SIGNAL = 2.1; EXPRESSED IN FETAL LIVER, SIGNAL =   2
agagaagggaagcacacgaggagagtcctacattcaacccagatttcttccttaggccacttccaaaccactgcaaaggaaacaagtccaaactgaagtggcaacaatctcagtgggcagaagaaacagagctcagcattgagggctgtcaaggtgactaggatttgaaggaaagagtactggagacaaaggaactctagagtcccccaaatctgtacaaagatacccacttgggtccttggctgactgctaggcatatgaacagggtgcaactataggagtctatcaaagaacagctgcttggagtcaaatcgctgctgagcagcttcttgggctctcagctgcagcttttgggctagacaatccacctgaggagaaaagtggcatcaaatgctgagctcacaccccctacctttctccctttcctctggatcttggctccacaaatt

SEQ ID NO: 5511 - DNA, 481 bp, Homo sapiens
  MAP TO AC004863.1; EXPRESSED IN BONE MARROW, SIGNAL = 7.7; EXPRESSED IN PLACENTA, SIGNAL = 8.6; EXPRESSED IN LUNG, SIGNAL = 8.5; EXPRESSED IN HELA, SIGNAL = 7.7; EXPRESSED IN HEART, SIGNAL = 7.3; EXPRESSED IN FETAL LIVER, SIGNAL = 6.8; EXPRESSED IN ADULT LIVER, SIGNAL = 6.3; EXPRESSED IN BRAIN, SIGNAL = 8.6
ctcagaaaagagcaccctggacgtggctctacattcccctggaagttttgtaaatgctagaatgttctttgtttccactcaaaagtagtcatctatttactgggaataccaaagacatattcatgtaaaataaattatatacagaatatacatagtctatatacataaatatacttgcacacaaatgtagaattatccaccttatgtcttttaaatctgggtcattacagaaacgcggtcctctcagccacacccgctacttgtgcagttttccctctggccacagggcttcctgcaaaagcagacgcagcctgttgcactcgtccacctccggggccgcccaccgcctcttcaggtgctggatgtcgatggagccagacgccctggccagcaccagggccaggaagctgccaccagccttctcaggctcacccaccgcagccatggccaccagcctgcagggagaggggcagaagcagag

SEQ ID NO: 5512 - DNA, 347 bp, Homo sapiens
  MAP TO AC004241.1; EXPRESSED IN PLACENTA, SIGNAL = 0.87; EXPRESSED IN HEART, SIGNAL = 1.8; EXPRESSED IN FETAL LIVER, SIGNAL = 0.9; EXPRESSED IN BRAIN, SIGNAL = 1.1; EXPRESSED IN LUNG, SIGNAL =   1; EXPRESSED IN BONE MARROW, SIGNAL = 0.78; EXPRESSED IN ADULT LIVER, SIGNAL = 0.77
aatggaataatagtgaatgctgcaaagtaatgtagtatacatgtttttcctttttagtactgaaaagagaataatgccattaaaaaagaaacaacccaaaccaacagattttaaaacgtgtctcatgggccagatttttaacaatattctttcttgaaatactgttggtgaatatccttgcagtgtttcataagatttgaattcatttattttttttgaaattttttttttattctccatatctctctacaaaataacaggggaatggatttttcaaagaggggaaatatgaaagagcaattgaatgctatactcgagggatagcagcagatggtgctaatgccctt

SEQ ID NO: 5513 - DNA, 470 bp, Homo sapiens
  MAP TO AC004061.1; EXPRESSED IN PLACENTA, SIGNAL = 1.9; EXPRESSED IN LUNG, SIGNAL = 1.5; EXPRESSED IN HEART, SIGNAL = 1.7; EXPRESSED IN BONE MARROW, SIGNAL = 2.2; EXPRESSED IN ADULT LIVER, SIGNAL = 1.8; EXPRESSED IN HELA, SIGNAL =   2; EXPRESSED IN FETAL LIVER, SIGNAL = 2.5; EXPRESSED IN BRAIN, SIGNAL = 2.1
tcaaatgtgggaattcatggtttacaacattatcattgctctgatttggttggcagtgcaaactgaatcaccttcagaatgcttagaggtaggatcagaactagccccaggctgaattatcaaaaagggtgaccttttctttcctgtgtgtgtgtgcgtgtgtgtgtatgtgtgtgtgtgtgtgtgtgtgtgtgtgtttccttccctgaattcccttgtgtttttagcctgcacccaattctcagtgcagggttctttctactcatctgcctttgcaggtgtcatcccagagagccttgaaaatagacttcgaaaagtgactgagctcacctcccttcttccactgatgagagaactgtatcagctggattctagtccagagctgtttgtttattataaagtgatgtgcatctgagggagagagtgtctgtgaactctctgaaactacatgccggatttctgtgtgtgta

SEQ ID NO: 5514 - DNA, 487 bp, Homo sapiens
  MAP TO AC004520.1; EXPRESSED IN PLACENTA, SIGNAL = 1.8; EXPRESSED IN HEART, SIGNAL = 1.5; EXPRESSED IN BONE MARROW, SIGNAL = 1.3; EXPRESSED IN ADULT LIVER, SIGNAL = 1.4; EXPRESSED IN FETAL LIVER, SIGNAL = 1.4; EXPRESSED IN LUNG, SIGNAL =   2; EXPRESSED IN BRAIN, SIGNAL = 1.3
tgctagcaaggtcctggaagggggtgtgtgcacatacacacaaaatcttgagtttaaccagagaaaacaattgtatgggctaattcatttataaatcaaattactactcccataacttaaagacataggtattttcatatatcatatttgttaatagtagagcatactgttttacatgctcattcttgacacaaactgtcaatgccacaaaatctacattaaaaccaaaacggcaaggcttgaatattctgacaggcttacctcatttctagattcagtggtcttttctgcctcccagtcaggtttctctgctattttgttttcatcatcatcattctgctgaagtgagttctccttctgggctgacaccctttcttcattttcctcatgctgggaactatgatccacagcttcgtgcttttctcttagtaccccattctcctataaaagtacgaaatttcatcaaataagcaaacagtctttaaaa

SEQ ID NO: 5515 - DNA, 471 bp, Homo sapiens
  MAP TO AC004957.1; EXPRESSED IN PLACENTA, SIGNAL = 6.9; EXPRESSED IN HELA, SIGNAL = 5.8; EXPRESSED IN HEART, SIGNAL = 7.3; EXPRESSED IN FETAL LIVER, SIGNAL = 4.5; EXPRESSED IN BRAIN, SIGNAL = 9.2; EXPRESSED IN ADULT LIVER, SIGNAL = 5.1; EXPRESSED IN LUNG, SIGNAL = 4.4; EXPRESSED IN BONE MARROW, SIGNAL = 3.3
tctcattgaacacagcagcagcttttggggttctgtgtctcactttgaaatctgagctgaccatgcacacaaacatctgtgtctaagtgacctgcaattggtattgatcttggcaccacctactattatatgggtgttttccagcaaggaaaagtagagataattgccaatgatcagggaaaccgaaccatgccaaactatgtcacctttacggataccaaacaattgattagtgatactccaaataatcaagttccaatgaaccgtgccagcatggcttttgatgccaaatgtctgactggatgcagatttgatgatgccattgtccagtttgatatgacatattggcctttcacggtggtaaatgatgctggcaggcccaaggtccaagtagagtatgagagagacaaaaagctgctacccataggaggtgtcttctatggttctgacaaagatgaaggaaattgcaaa

SEQ ID NO: 5516 - DNA, 472 bp, Homo sapiens
  MAP TO AC004613.1; EXPRESSED IN LUNG, SIGNAL = 2.2; EXPRESSED IN BRAIN, SIGNAL = 1.7; EXPRESSED IN ADULT LIVER, SIGNAL =   2; EXPRESSED IN PLACENTA, SIGNAL = 1.8; EXPRESSED IN HELA, SIGNAL =   2; EXPRESSED IN HEART, SIGNAL =   2; EXPRESSED IN BONE MARROW, SIGNAL = 1.7; EXPRESSED IN FETAL LIVER, SIGNAL = 1.8
catttcttcagtgttaacagtcatatctaaattttgattccataatatacaatgtatggtgaaatgaaatcttaattattatactgcattacaaagtttatgtttattagtacagtgtggctgtttttcttgacaaacatcaggcctgtgtcaggctgcatctgagatgattgggagacattggcctatctggcctaccacatctatatttttccagtctttctctactattgggaggttgtagaaacttgtccagcccatatgtgcgtcatttactgcagtgaaactgagctttgccccttttctagaaatctgaaagttgagatccagaaccagaagtcctcagggcaattatcaggagcaaaagcaaggaggcaagggaggagaaaaacaggaggaggaagagaagtgaagggtgagcatgccagtggaagggtctgaatgggtgctggggtgaggggtgattgatcac

SEQ ID NO: 5517 - DNA, 496 bp, Homo sapiens
  MAP TO AC004929.2; EXPRESSED IN LUNG, SIGNAL = 4.1; EXPRESSED IN HELA, SIGNAL = 3.5; EXPRESSED IN FETAL LIVER, SIGNAL = 3.9; EXPRESSED IN BRAIN, SIGNAL = 3.8; EXPRESSED IN BONE MARROW, SIGNAL = 3.8; EXPRESSED IN ADULT LIVER, SIGNAL = 3.5; EXPRESSED IN PLACENTA, SIGNAL = 3.5; EXPRESSED IN HEART, SIGNAL = 3.5
aagttaggctctgccagcacagggcaatgcagggaggttggaaatctgcagaaggaaggatgaggaccgtttactcttccttgttttcctgttgtgcttgttaatgtcatggctttcttccttttttggtcctccagtagaaactagaggagtcctcctgaaagttggcatcaatacatgaaccctaagagacagcatttgtgctcattgggaatatggaagtggacacttggatgtcttagtacttcttccaatgcagtgccgtctctaccattcctggatctcaaactctttcatatggaccatgaatacacgcaggatgctgaggtcaactggcacttttcaggggtccttggcagtgctagtggcataaatctgataaagctgtctaccccggtccttcccttgttggtaagtggcaccaccatcacctaggtataaaaggcagtaacttggagtttaattttaactcttctcttttctattgttccatcca

SEQ ID NO: 5518 - DNA, 491 bp, Homo sapiens
  MAP TO AC004869.1; EXPRESSED IN PLACENTA, SIGNAL = 3.8; EXPRESSED IN LUNG, SIGNAL = 4.2; EXPRESSED IN HELA, SIGNAL =   4; EXPRESSED IN FETAL LIVER, SIGNAL = 3.5; EXPRESSED IN BONE MARROW, SIGNAL = 3.6; EXPRESSED IN ADULT LIVER, SIGNAL = 3.5; EXPRESSED IN HEART, SIGNAL =   4; EXPRESSED IN BRAIN, SIGNAL = 4.5
ctcccaacaaactcaggtcctagctgaaataatggctgccattcacaaactacaacaacaattagattcacttgcaggtgttaccttacaaaattgtagaggattagatctccttacagcaaatcaaggaggaatatgtgtttttctcaaagaagaacattgtttttgcattaactcctctggcagggtacagcaacatctagtacaagcaaccaatattataactcatctacagaaatccaacccatcagaatggctggcagctaccaaacaaaccttactgtcatggctatggccaacaatacctccattaatagcgatgatcttaatactcatattcaggccctatgttctaaatcttcttacaaaacttacgtcttcctgcctagagactatgaaactccagatgcttctacaaatgaagcccaaaatggagacacctttcatccaaagactcttcaatcgatcccaggaggaaccctggctacttt

SEQ ID NO: 5519 - DNA, 446 bp, Homo sapiens
  MAP TO AC004263.1; EXPRESSED IN BONE MARROW, SIGNAL =  12; EXPRESSED IN PLACENTA, SIGNAL =  12; EXPRESSED IN LUNG, SIGNAL =  12; EXPRESSED IN HELA, SIGNAL =  17; EXPRESSED IN HEART, SIGNAL =  10; EXPRESSED IN FETAL LIVER, SIGNAL =  13; EXPRESSED IN ADULT LIVER, SIGNAL =  20; EXPRESSED IN BRAIN, SIGNAL = 7.8
gcctctccactcacacaacctgagaatggtccattttgctttaaggagcaacaacaaagtctctttagccaacccaattgtccccttaccttattggccagcaacatgtccctgatctcagtgaggtcctccttggtgaacacaaagcccacattcccccggatatgaggcagcagtctgcaaagagaagtttatgggagacaatcacctttcagcaccattctccaggaagagggagacgggcactggggagaaaggacaaaactgccaggggaactgacttctccagagctgggttgttttccaggtgccctcggatggccttgcgcatcatggtgttcttgcccatcagcaccacagccttcccgcgaagggacatgcggatctgctgcatctgcttggagcccacattgtctgctcccacaatgaaacatttcggataatca

SEQ ID NO: 5520 - DNA, 476 bp, Homo sapiens
  MAP TO AC004847.1; EXPRESSED IN FETAL LIVER, SIGNAL = 1.6; EXPRESSED IN BRAIN, SIGNAL = 1.9; EXPRESSED IN BONE MARROW, SIGNAL = 1.6; EXPRESSED IN PLACENTA, SIGNAL = 1.8; EXPRESSED IN HELA, SIGNAL = 1.7; EXPRESSED IN HEART, SIGNAL = 1.4; EXPRESSED IN ADULT LIVER, SIGNAL =   2; EXPRESSED IN LUNG, SIGNAL =   2
aggcatgttctttgcattccatgttcactttgaggtggagacaacattatattcaggccccatacctcaaaaggtgaagcaaggagacagggcactcaagtgcacagcctctataaactggctagaaccagtctgtggctggtggtcttcttgtcaggagagagttactgaagtcagtctcttatacagtcacagctatagttttggcttgtggaacaggaggtcagttggcatctggtggtgagttgcagttgttttcctattgcttatccaggacagtgcttgtttggctgctagagaaaaagaagaaccctgtggcagttagaacagagttgatcttgaagagtcagactgtgtggctgaatccttacctggcacggtcgtaggtcttgtttataatttggtgtctttttttccccatgatcttcatgaacgcatgtaatttggtattttattgccacagagtccattctgtc

SEQ ID NO: 5521 - DNA, 471 bp, Homo sapiens
  MAP TO AC005726.1; EXPRESSED IN BONE MARROW, SIGNAL = 3.9; EXPRESSED IN ADULT LIVER, SIGNAL = 3.7; EXPRESSED IN PLACENTA, SIGNAL =   4; EXPRESSED IN LUNG, SIGNAL = 4.4; EXPRESSED IN HELA, SIGNAL = 4.6; EXPRESSED IN HEART, SIGNAL = 3.6; EXPRESSED IN FETAL LIVER, SIGNAL = 3.7; EXPRESSED IN BRAIN, SIGNAL =   5
gtggagccacctgtcttttcattggaaacctggtcagtttgtgttcaagggtgacttggatatcaacgtgagaacagcctctaagtgagtggagtgaagggagggtcctccatgggatgaggggctcaggttggagggagggggaagagccaaggggaagtgagtgaccagggcactgagggctggggttccattgtgaggcaggtatgacgactgctgcttccttcacctgcctgacctctgcatgacactggacctgcagtggctgtgccatgggaacccccatgatcaccatagtgtcactctgcgggccccagagttcctgcctgaggtgcccttgggccagcttcatgactcctaccgggcctttcgctcggagaacctcaatctctccatcaagatggatctgactcggcacagtggaagtgaggcttgggcctggggcagtggggaggaagggcttgggaggac

SEQ ID NO: 5522 - DNA, 380 bp, Homo sapiens
  MAP TO AC004752.1; EXPRESSED IN PLACENTA, SIGNAL = 5.3; EXPRESSED IN LUNG, SIGNAL = 5.8; EXPRESSED IN FETAL LIVER, SIGNAL = 5.1; EXPRESSED IN HELA, SIGNAL = 5.1; EXPRESSED IN BRAIN, SIGNAL = 5.2; EXPRESSED IN BONE MARROW, SIGNAL = 5.1; EXPRESSED IN ADULT LIVER, SIGNAL = 5.3; EXPRESSED IN HEART, SIGNAL = 4.4
aacaaagagccatcacctgggctagagcagtcagggaggacttcccagaggaggcaccagaggagcctctgctcaaagctggaccacactctgtagggcaaaggcctccaccctgcgcaagaggttctggagtgtccaaacagaagacagaggcaaggcaaacaggccaagcaccctgctaatgtggttagtttgggccttatctctgaaaggagctgggtctcagacagcttgtcggggctgaccacagggcctgccgagaaaccagattcagaacatgcgcttgctgctgccaccaccgggagggcggtgcgggtgggggtgcaggaaggcctgggggagcgccgggttatttgttatggggtgaagaggaagctgta

SEQ ID NO: 5523 - DNA, 455 bp, Homo sapiens; identical to SEQ ID NO: 5433
  MAP TO AC005848.1; EXPRESSED IN BONE MARROW, SIGNAL = 2.2; EXPRESSED IN ADULT LIVER, SIGNAL = 2.1; EXPRESSED IN LUNG, SIGNAL = 2.4; EXPRESSED IN PLACENTA, SIGNAL = 1.9; EXPRESSED IN HELA, SIGNAL = 2.5; EXPRESSED IN HEART, SIGNAL = 2.1; EXPRESSED IN FETAL LIVER, SIGNAL = 2.2; EXPRESSED IN BRAIN, SIGNAL = 2.4

SEQ ID NO: 5524 - DNA, 466 bp, Homo sapiens
  MAP TO AC004850.2; EXPRESSED IN PLACENTA, SIGNAL = 3.5; EXPRESSED IN LUNG, SIGNAL = 4.4; EXPRESSED IN FETAL LIVER, SIGNAL =   4; EXPRESSED IN BONE MARROW, SIGNAL = 3.8; EXPRESSED IN HELA, SIGNAL =   4; EXPRESSED IN BRAIN, SIGNAL = 3.6; EXPRESSED IN ADULT LIVER, SIGNAL = 3.8; EXPRESSED IN HEART, SIGNAL = 3.1
tctcagagagattagtgacttgcctaaggtcacagttggtacgtggcagagtcaggttttggggcccttctagagaaattatcggaatcctttgctctcccaaagggttttcctttccacttctccatcacctagaggttttccctgaagactgcttctcccccaacctgtccatgggaggtgtttagagctaaaaatagcaatgttagccaggtattgcttttctcattttaatgggtcacggcttatcttttgttccttttagtatttgcataagcttttcaagagagaccaccataaggggcagcgttaccatgaaaaacagatcagtctttatgctgaatatgatcgaccaaacttacttccctttctccgagacagtacccattgcccacttgaaaaggtaaggcacagactccccgacttgtacactttggatgaagaggttgtcattgatggtaagttg

SEQ ID NO: 5525 - DNA, 466 bp, Homo sapiens
  MAP TO AC005695.1; EXPRESSED IN HELA, SIGNAL = 3.5; EXPRESSED IN FETAL LIVER, SIGNAL = 3.6; EXPRESSED IN BRAIN, SIGNAL = 3.6; EXPRESSED IN BONE MARROW, SIGNAL =   4; EXPRESSED IN ADULT LIVER, SIGNAL = 3.8; EXPRESSED IN PLACENTA, SIGNAL = 3.9; EXPRESSED IN HEART, SIGNAL = 3.5; EXPRESSED IN LUNG, SIGNAL =   4
tgcatttcactttcctgctgccaaagcagtctcttcaggtcggtccattttggtttttattctccgtttccaggtaggtgggtggccagtgtcagagcttccggagtgcgtttgggcttggctgggcctgctccccatcgctgctcttcctccagggcagggtccatggaggcagccctgggtagggaaggctctgcggggatgcactggccgcttcccccttgtctgaccctcccattttgtgttctctgcagcctgtgattgccaccctgtgggtgctgctggcaaaacctgcaaccaaaccaccggccagtgtccctgcaaggacggcgtgacgggtatcacctgcaaccgctgcgccaaaggctaccagcagagccgctctcccatcgccccctgcataagtatgtgtggggcaccctgcttttcaagtctctggctttgtgggggacagtgagcttttgag

SEQ ID NO: 5526 - DNA, 447 bp, Homo sapiens
  MAP TO AC003108.1; EXPRESSED IN LUNG, SIGNAL = 1.4; EXPRESSED IN PLACENTA, SIGNAL = 1.4; EXPRESSED IN HEART, SIGNAL = 1.4; EXPRESSED IN FETAL LIVER, SIGNAL = 1.4; EXPRESSED IN BRAIN, SIGNAL = 1.4; EXPRESSED IN BONE MARROW, SIGNAL =  98; EXPRESSED IN ADULT LIVER, SIGNAL = 1.2
gatcagccttgcttctgagcatctgctggctccatttttatcaggttcctgctttccacagcgctcattcccaaaacagctcggcttggtgacatgagaaactttctgtgtttttttttggtttaaaaaaaaaaaacaaccgagaaaccaggctatttctctcagggctgtccacatgcttacaagtatgcacagtctgtgagttgtgtatgttttgtttgttgtttggtttttcccctccttttctaagtgtttgtttggcctcctgtagattcatggggatacggtccagaaccagctggtggtccaaggagtggagctcccatcttacctccccttgtacccgcctgccatggactggatcttccagtgcatctcctaccatgcccccgaggtaactgccaggtggcttcagtgtgacgctcacctcctgtatggtgacagccc

SEQ ID NO: 5527 - DNA, 471 bp, Homo sapiens
  MAP TO AC005868.1; EXPRESSED IN LUNG, SIGNAL = 2.5; EXPRESSED IN HELA, SIGNAL = 2.1; EXPRESSED IN PLACENTA, SIGNAL = 2.7; EXPRESSED IN HEART, SIGNAL = 1.9; EXPRESSED IN FETAL LIVER, SIGNAL = 2.2; EXPRESSED IN BRAIN, SIGNAL = 2.1; EXPRESSED IN ADULT LIVER, SIGNAL = 2.3; EXPRESSED IN BONE MARROW, SIGNAL = 2.3
catttccatcacctgtctggatattgaagtatttaagttcatggttcctggtgtatataaaacatagctcatttatataatgtaatattagccagccactaaaaagaaggtactgctgaaaaatactaatagaaaaagatatgcatgatattaaaaaacaaacatgttatcaactattgtttacaacagaattattttcttgactccaaaatgcaaagagtaaaagactagaagatttgaatccaaatcgtaacagaggctgtctctgactgttagaacagctggcagtttttattttcttccttctccttatctgtgatttccaaatgttccacaatgtgcacctttgccttcatctcattttcctcctcgtctcctgcctctacgcactcaccccagggccttggctgctccctggagtgctctgctacaggtctctgtcttgacctttcttggctccagtgacatcct

SEQ ID NO: 5528 - DNA, 468 bp, Homo sapiens
  MAP TO AC005529.7; EXPRESSED IN LUNG, SIGNAL = 1.9; EXPRESSED IN HELA, SIGNAL = 2.1; EXPRESSED IN ADULT LIVER, SIGNAL = 2.6; EXPRESSED IN PLACENTA, SIGNAL = 1.7; EXPRESSED IN HEART, SIGNAL = 1.6; EXPRESSED IN FETAL LIVER, SIGNAL = 2.1; EXPRESSED IN BRAIN, SIGNAL = 1.9; EXPRESSED IN BONE MARROW, SIGNAL = 1.5
tcacgtgaggctgttgtaggcatccaggtattcaggctttacattgtgaactgcaacagaggacagagaacaagaagtgaggtagggtgtgtacacagggaagaacttggggtgaggggagcccatcaaggccaggggtcccaggacagctgaggacattccagaccctcccatctccttcctggagcctcacaggcccccagagcccctgaaagggcagaaattggtcagctcagcagccactcacactggatcttatagaggttgctggtttccttcttggacagcagggtggagtgggcatccttccggggatccactttgtgaacaaagagggagcggaaccagctgccttcattgtccttggaatagaaactgcaggacagaggagttgagggggacgcgcggaggttgggggagccccagcaattccatccacttggatgtcctgctcccctagaccagtga

SEQ ID NO: 5529 - DNA, 465 bp, Homo sapiens
  MAP TO AC004962.1; EXPRESSED IN BONE MARROW, SIGNAL = 6.1; EXPRESSED IN PLACENTA, SIGNAL = 5.5; EXPRESSED IN LUNG, SIGNAL = 5.7; EXPRESSED IN HELA, SIGNAL = 6.3; EXPRESSED IN FETAL LIVER, SIGNAL = 6.1; EXPRESSED IN ADULT LIVER, SIGNAL = 4.9; EXPRESSED IN HEART, SIGNAL = 5.8; EXPRESSED IN BRAIN, SIGNAL = 6.4
gggtctcctcaaacatctgctcttttgacagctgaaggaaatgaggctcagcgaagttacgcagcatgccccacctcacacttacagtaagtggcagagccaggatctgaacgtgaacgtccctccactgcctctgctgtttggctggcattaggggcagaagctgtgttcccatgggaaccaaacatggggaaccaccagcccaccccagagtaagaccccccaccgccctcgccccttcgcctgcagctccagctgcactcactgcatgagcatgtcccgggccaggtctgagaggtagcgtttggatccactcaggaatagggatcgatatcgctgccgcctgtcctttgtctccatcagccaggtgttgaggtagcggcccacacctactgggttctgcaacagggagaggatggcaggacattagcaagcctggcttggagactgtgtctcggcttcctc

SEQ ID NO: 5530 - DNA, 464 bp, Homo sapiens
  MAP TO AC004082.1; EXPRESSED IN PLACENTA, SIGNAL = 1.7; EXPRESSED IN HELA, SIGNAL = 1.8; EXPRESSED IN HEART, SIGNAL =   3; EXPRESSED IN FETAL LIVER, SIGNAL = 1.7; EXPRESSED IN BRAIN, SIGNAL =   2; EXPRESSED IN ADULT LIVER, SIGNAL = 2.1; EXPRESSED IN LUNG, SIGNAL = 1.6; EXPRESSED IN BONE MARROW, SIGNAL = 1.7
gagggactacaggcaggagcgaccacacctaactgatatatctatttttcttaacaatttaaaattgtccttctgttggctaatgaatataacactataatgtatatgttaaaatatctagctaaaaactgaaagaaaacaacttgttacatatgttaatcagttattttttctgacatatttggtgtacagttcaaattttagttaacattttccagaatatgtaagacacatccctaaaaaaatctagatatattgatgattataatagaattagatacctggtagatgatcaggagacttaaatttgtatgtaatatttctgcattggagaatttcaactattagttgttcaccatctgtcttcatttccttcttcaatgcaatcttgatttctcccattacctgagttttagctgggagaatttaataaaaatgcaaagaagtatgtaatgccatatatg

SEQ ID NO: 5531 - DNA, 495 bp, Homo sapiens
  MAP TO AC005323.1; EXPRESSED IN HEART, SIGNAL = 3.3; EXPRESSED IN BONE MARROW, SIGNAL = 2.4; EXPRESSED IN LUNG, SIGNAL = 4.6; EXPRESSED IN ADULT LIVER, SIGNAL = 0.47
tctgtctgttccagagtggcccgcagctcctcgatctcagcctgcagcaggttggctctgcgctccaccatagccagctgttccttcaggtcctcctggctccggagagcatcatccaggtggagctgggtatcctgtggaacaaaccgtcattgagacaccatgtattcagggttgcaggcaccccaattgtcctgggatcatctgttggacatatttaccttgaggatggcttgggtgttcctatagttcctcagggcctcagcagccatgcggttggcatggttcagctggatttccatttcattgaggtctccctccatcttcttcttgagcctaatggcatcattcctgctcctgatctcagcatccagtgtgctctgcatggactccacgattctaatgtggtttctcttcatctggtcaatttcctcatctttttcagcaattttcctatcaacctcagacttgacttggttcaactcaagctggatg

SEQ ID NO: 5532 - DNA, 448 bp, Homo sapiens
  MAP TO AC005950.1; EXPRESSED IN LUNG, SIGNAL = 1.7; EXPRESSED IN FETAL LIVER, SIGNAL = 1.5; EXPRESSED IN BRAIN, SIGNAL = 1.6; EXPRESSED IN BONE MARROW, SIGNAL = 1.2; EXPRESSED IN ADULT LIVER, SIGNAL = 1.5; EXPRESSED IN HELA, SIGNAL = 1.7; EXPRESSED IN PLACENTA, SIGNAL = 1.5; EXPRESSED IN HEART, SIGNAL = 1.5
aacccaaatatttcaggtccgggtccctggtgcagaccctgccatgcggggatgtggcacagaaggccggccagcctggggagcagagaaggaggagaggagagctcctggccctgagcctgaatgcctgtggacacatatagggactcccagcacgcacgggatggactccaatcggcacacatgcacattccttgcacacacacaggcgcgaccgagggccttgcagacatagggtgcacacgtgcgtgccgcctgcatacagcatgcacttgcagagacggttggcaccttcccttctctggccccaaacctgggccctgaggctgtctgcacacctgggtgcttcccaccactgactctctcgtctgcctttgtccccgcaggtgacgcagctggaccagaggctggcactcatcaccgacatgcttcaccagctgctctcctt

SEQ ID NO: 5533 - DNA, 459 bp, Homo sapiens
  MAP TO AC004242.1; EXPRESSED IN PLACENTA, SIGNAL = 1.6; EXPRESSED IN HEART, SIGNAL = 1.6; EXPRESSED IN FETAL LIVER, SIGNAL = 2.2; EXPRESSED IN BRAIN, SIGNAL = 1.5; EXPRESSED IN ADULT LIVER, SIGNAL = 1.7; EXPRESSED IN LUNG, SIGNAL = 2.9; EXPRESSED IN BONE MARROW, SIGNAL = 1.2
ttcccacatttgttccttccatctccatccttccaacttgatttatataagggagtatttcttcaggcacagaacacatcctcctgacctatgaaagagaaaaagaatggaaagacagctcatgttttttgggggattagtagacttttttccaaagacctttatcagtagtttcaacacataatgtcatggtaacctggtttggtatgtggcagatgctcagatgtgtccatctgtcgtgacctctagagtactccgcctctacttctactctctgaagtgattcttcttttgtgtgtgtgctggtgtcatgcaaagctgtggtatctgacaccgtcattttacagatgtactgtattttccagctgctaatcttagatgtggaaataatgatcttcagcttcatttcccccctctattagagttgaatcctgtaattttgctcattagatttgcaaa

SEQ ID NO: 5534 - DNA, 465 bp, Homo sapiens
  MAP TO AC004382.1; EXPRESSED IN PLACENTA, SIGNAL = 3.9; EXPRESSED IN LUNG, SIGNAL =   4; EXPRESSED IN HELA, SIGNAL =   5; EXPRESSED IN FETAL LIVER, SIGNAL = 4.8; EXPRESSED IN BRAIN, SIGNAL = 4.9; EXPRESSED IN BONE MARROW, SIGNAL = 4.7; EXPRESSED IN ADULT LIVER, SIGNAL = 3.9; EXPRESSED IN HEART, SIGNAL = 4.3
attggggtgaaattgtttgccagttacccaggtaacaagtggtagaaacaggtcaagatgctaggtagatcatttttcctggcttaccacttttgctaccacttcgtgtcccaaagttcccagtttacccaatatttttgtgtgggacccaacacttggataagtggttctacaggagtctctggcctgcttttcctcctccttatctgtgttaccactctgggtctgaaagggtcttctctattgaatgtccctgactgaccagtttctgtttcagtggcccgttgccgacaagccctggtgccacgtgccttccatgcttcagctgtggggctaaggtcttcagatgagcagaagcagcagcctcccaactcattttctcagcagcattctgagacacagggggcagaaaaacctgatccagagtcttctcattcaccccccaggtaggcaccaatccaccta

SEQ ID NO: 5535 - DNA, 485 bp, Homo sapiens
  MAP TO AC004031.1; EXPRESSED IN LUNG, SIGNAL = 0.54; EXPRESSED IN BRAIN, SIGNAL = 0.79; EXPRESSED IN HEART, SIGNAL = 1.6; EXPRESSED IN BONE MARROW, SIGNAL = 0.56
tgaatccccttaggacaaaatacatgatttttttccatcatggcaacattgagttgattccatcgatttttgctgtatataaacaaaccagaatttgaagttccttgttaatgaagggaatcatcattatcagaaaatcattttgtgtttgattgcacatggcagtatcctaagttgtagggaaagagctgcaccagcatgttttatgcccctttgaacctcacatgagagtttcctgagtgtcggtcagttacgtttatctagtgtaatccatgaccctttgtcaggagcgaagagaagtgcctggtacgcagtggccttgtgcagctcatggatcgactgtgtagcttgagcaatcagaccgagtccagctccagtgagaaacagaccaagaagcagaaggtggccaccatggcctgggctgccttccaggtgcttgccaaccgctgtgttgagtgggaaaaagaggaaggtgagatgccaga

SEQ ID NO: 5536 - DNA, 480 bp, Homo sapiens
  MAP TO AC004466.1; EXPRESSED IN LUNG, SIGNAL = 3.4; EXPRESSED IN BRAIN, SIGNAL = 2.8; EXPRESSED IN ADULT LIVER, SIGNAL = 3.4; EXPRESSED IN PLACENTA, SIGNAL = 3.2; EXPRESSED IN HELA, SIGNAL = 3.2; EXPRESSED IN HEART, SIGNAL = 3.5; EXPRESSED IN FETAL LIVER, SIGNAL = 2.4; EXPRESSED IN BONE MARROW, SIGNAL = 3.4
aggagcactgtggtggagtcggaagactccgttcaaacaccaccagtgatacagtgttactgtgcacagttcatgtgacttttttctcacgagtaaaatggaattgataatacctaccttgcaggaccacgacaggattaagtgaggaaaaacccccatgagagtgttttgccattgtcaagtgagcctgagggaggctgaggggggatcaggctgtatcatgcccccgaggacaaactttccagtttaccctgctccctctctctgtccctaggctgccccaggccctgtgcagacacaccaggccctcagccgcagcccatggacctgcgggtgggccagcggcccccagtggagcccccaccagagcccacattgctggccctgcagcgtccccagcgcctgcaccaccacctcttcctagcaggcctgcagcagcagcgctcggtggagcccatgagggtaaagatggagctccct

SEQ ID NO: 5537 - DNA, 490 bp, Homo sapiens
  MAP TO AC005840.1; EXPRESSED IN BRAIN, SIGNAL = 1.2; EXPRESSED IN ADULT LIVER, SIGNAL = 1.2; EXPRESSED IN PLACENTA, SIGNAL = 1.2; EXPRESSED IN LUNG, SIGNAL = 1.3; EXPRESSED IN HEART, SIGNAL =   2; EXPRESSED IN BONE MARROW, SIGNAL = 1.3; EXPRESSED IN FETAL LIVER, SIGNAL = 1.3
ctggtaatccgcaatggttcctctgacataatggaccagtgagtcaatgagtcggtcacatcttctcattgcttttctcctatcagggccagcagcactcatgtttcttagacatccagtgggttgtagactgtgtcaaaatcgagcaaaccattcgcttttgggtagtctccttcaggccatccagaaaaggagatgattatattctcggtcagcataagcaatgcttctgttatcatgagattcttgagtttgtcattagatgacaaattccacagcaaacctgttagttgttttttagtctccaagactctggtttgcttcagcacctggagcagccgagttaccccatttagttcagccacctccaatttgttgtcattgtcttcaaatagtaagtttctcaaggccccccacacagctcgctgaacatcttcattctgaacttttaggagctgcagaagcttggggatgccacaaaactggttaa

SEQ ID NO: 5538 - DNA, 359 bp, Homo sapiens
  MAP TO AC004098.1; EXPRESSED IN BONE MARROW, SIGNAL = 1.7; EXPRESSED IN PLACENTA, SIGNAL = 1.5; EXPRESSED IN LUNG, SIGNAL = 1.5; EXPRESSED IN FETAL LIVER, SIGNAL = 1.4; EXPRESSED IN ADULT LIVER, SIGNAL = 1.4; EXPRESSED IN HEART, SIGNAL = 1.6; EXPRESSED IN BRAIN, SIGNAL = 1.6
tctagaatgagttttcagtttgcagaattctgagaatctagttccaacacctttgagaggacaacaaccacaattgcacttgccatatttattagtcaaaatgaagcgaagtcaatctgttgaaagctttgttttgtttttctgattagtttgtttaataagacattcaaattatgatctttaatataatttcttcccctaatagcttggtgctaacagtggtttgcacatcatcatctttgatgaaattgatgccatctgcaagcagagagggagcatggctggtagcacgggagttcatgacactgttgtcaaccagttgctgtccaaaattgatggcgtggagcagctaaacaaca

SEQ ID NO: 5539 - DNA, 439 bp, Homo sapiens
  MAP TO AC005962.1; EXPRESSED IN PLACENTA, SIGNAL =  12; EXPRESSED IN ADULT LIVER, SIGNAL =  12; EXPRESSED IN LUNG, SIGNAL =  16; EXPRESSED IN HEART, SIGNAL =  10; EXPRESSED IN FETAL LIVER, SIGNAL =  12; EXPRESSED IN BRAIN, SIGNAL =  13; EXPRESSED IN HELA, SIGNAL =  12; EXPRESSED IN BONE MARROW, SIGNAL =  12
ctcaatcctgactgtccaaggaaaatgattgaattttcattttttttgtttgtttgtttgtttcaatggtttctctgtaggaacgtgggggaagatcctatggaaccacagaacaccacacaggtatcaatgtttgtcctcttagggttttcacagacccaagagctccagaaattcctgttccttctgttcctgttagtctatgttaccaccattgtgggaaacctccttatcatggtcacagtgacttttgactgccggctccacacacccatgtattttctgctccgaaatctagctctcatagacctctgctattccacagtcacctctccaaagatgctggtggacttcctccatgagaccaagacgatctcctaccagggctgcatggcccagatcttcttcttccaccttttgggaggtgggactgtctttt

SEQ ID NO: 5540 - DNA, 478 bp, Homo sapiens
  MAP TO AC003689.1; EXPRESSED IN LUNG, SIGNAL =   3; EXPRESSED IN FETAL LIVER, SIGNAL = 3.3; EXPRESSED IN PLACENTA, SIGNAL = 3.1; EXPRESSED IN HELA, SIGNAL = 2.5; EXPRESSED IN BRAIN, SIGNAL = 2.5; EXPRESSED IN BONE MARROW, SIGNAL = 2.7; EXPRESSED IN ADULT LIVER, SIGNAL = 2.5; EXPRESSED IN HEART, SIGNAL = 4.2
tttgtctgtggcttgtcctgctacaggtctaagtggaatctaagtggaggcatcactgagccagcctctccagcccagggatggggaggccccaggccctagtggacctggaccagtgatcacgtccttgaactacttcctacctgcctggggtggcccagagtacaggaagcccaaggagccaggagctttctcatctgggagcacaaaggatgtgaggaaaaaacggaacccagcccagcccagggaaacacagggactttcccctgccccgggcttcccatcttctttgcagagaccctgcctcttcttcaagggggatgattccagaccctctaagagcaacagggacacggagctcacatacataccccacatcaacatggagatcacacacctcaacacggagatcacacacatcaacatggaaatcacacacacatatcgaatggggattacacacatcaacgtggagctc

SEQ ID NO: 5541 - DNA, 496 bp, Homo sapiens
  MAP TO AC004764.1; EXPRESSED IN PLACENTA, SIGNAL = 5.4; EXPRESSED IN HEART, SIGNAL = 5.3; EXPRESSED IN FETAL LIVER, SIGNAL = 7.7; EXPRESSED IN BRAIN, SIGNAL = 5.5; EXPRESSED IN BONE MARROW, SIGNAL = 5.7; EXPRESSED IN HELA, SIGNAL = 5.7; EXPRESSED IN ADULT LIVER, SIGNAL = 5.6; EXPRESSED IN LUNG, SIGNAL = 5.3
cccaagtacccagggtcagacccagccccaggtgtagggccacggggtagggaggacagagaaggggaagggaatcaggcacactgagcgtgtgctatgtgccagaaactctgcctgggtttctctctcatgtgggtgacttaggagcaccccttccggggctcacgcagggagcaggccagagctctagggctgggcagctcgatctgacttctccaacccttgctacccctgtagttctcggagatcttctttgtgtccatctgcacatctgagttgtccatgaaggtctatgtggaccccatcaactactggaagaacggctacaacctgctggatgtgatcattatcatcgttatgtttttaccctatgccctccgccagctcatgggcaaacagttcacttacctgtatatcgctgatggcatgcagtccctgcgcatcctcaagcttatcggctatagccagggcatccgggtgagtgcactgggggtgt

SEQ ID NO: 5542 - DNA, 457 bp, Homo sapiens
  MAP TO AC002081.1; EXPRESSED IN PLACENTA, SIGNAL = 1.8; EXPRESSED IN BRAIN, SIGNAL = 1.7; EXPRESSED IN ADULT LIVER, SIGNAL = 1.6; EXPRESSED IN LUNG, SIGNAL = 1.8; EXPRESSED IN HEART, SIGNAL = 1.5; EXPRESSED IN FETAL LIVER, SIGNAL = 1.6; EXPRESSED IN BONE MARROW, SIGNAL = 1.6
cactattggtagcatgggggacatagattcaaatccaagtcagtttgccttcagagtcctttttatgctatctctcaaaggctctggatagtaagtatacaacatggctatattcaagccatctatctgcaactaaaatattacagttgactgcaatttttgtctactaaaactaaaagaaattctgtaaccactttccataaaaacaatttagaaaatggtcacagtagtccaacaagatcattttgctaaaggcccagttattggaccaattgacatcctacctttggttccatctgaaaatgttccaggaggacagggatggcaagaagatgatccattgttataaaatccagggttgcaaggcggacaatccttcttctctccagaagggggcaatctaatagcatctgtgagatcctcccggcagattttgggctctatccacttgtacatt

SEQ ID NO: 5543 - DNA, 481 bp, Homo sapiens
  MAP TO AC005747.1; EXPRESSED IN BONE MARROW, SIGNAL =   2; EXPRESSED IN ADULT LIVER, SIGNAL = 1.7; EXPRESSED IN PLACENTA, SIGNAL = 1.9; EXPRESSED IN LUNG, SIGNAL =   2; EXPRESSED IN HELA, SIGNAL = 1.8; EXPRESSED IN FETAL LIVER, SIGNAL = 1.7; EXPRESSED IN HEART, SIGNAL = 1.6; EXPRESSED IN BRAIN, SIGNAL = 2.5
ctaggctcggggtttaactggtcgccaacagccactcgactgcccactgcagctgcagcctctcctcgcacccctggccctctgggtggtcattccagcaccacagggaggcagctcctatctgcccttggatgggtggggtgctctggcgtaggcacgaggcttggacatccccctattcccctacctggggacaaagactcagccttggcgtatggagccactgctggcttcccagtcccccttcttccaggcagtcccccatgcacctgccctggcccagcgtcctgggcctctcaccttctccaccgaggcatagcggctggcgagctgcttgcgaaggtcggcaatgtggtggtcgcacttcttcatgtctttcttgaagttctcacggaagttcatcaggggcttctccacctcgctgtgaagctgttgggagagtagagacgcacactcaggacccagggcatcagctgtaagc

SEQ ID NO: 5544 - DNA, 399 bp, Homo sapiens
  MAP TO AC004856.1; EXPRESSED IN LUNG, SIGNAL = 3.2; EXPRESSED IN ADULT LIVER, SIGNAL = 3.4; EXPRESSED IN PLACENTA, SIGNAL = 3.6; EXPRESSED IN HELA, SIGNAL = 4.3; EXPRESSED IN HEART, SIGNAL = 2.6; EXPRESSED IN FETAL LIVER, SIGNAL = 3.3; EXPRESSED IN BRAIN, SIGNAL = 2.7; EXPRESSED IN BONE MARROW, SIGNAL = 3.5
tgaaacatttttctcaccagtacctagctagatggcttcatagacacattggttatcaaaagaagaaaatcatcctcattaagatgcacattaatgtatagcttttctactatccaaatatacataactctcaatttatgctcatgtataaagcatcttgagcaagaagagtcctaattcttttatgtaatgtcattctgtgattgacaactccaatgattgcttttgtgacattaaccaccaagtcgtcctatactttgaaacacattgttcacaagatactagaaaaaaaattgagtaacagtgaaagtgctatctgcaataacaacaatgtgatgggaccttccaggtgggctgctgagaactctgctaggtgagtcactgccaccaaatctgttc

SEQ ID NO: 5545 - DNA, 467 bp, Homo sapiens
  MAP TO AC005077.1; EXPRESSED IN ADULT LIVER, SIGNAL = 3.3; EXPRESSED IN HEART, SIGNAL =   4; EXPRESSED IN BRAIN, SIGNAL = 1.8; EXPRESSED IN PLACENTA, SIGNAL = 1.5; EXPRESSED IN LUNG, SIGNAL = 1.6; EXPRESSED IN FETAL LIVER, SIGNAL = 2.1; EXPRESSED IN BONE MARROW, SIGNAL = 1.3
aaggaaacacatttggaaggtcagtcattgtccagggtacctgcctagacaatcacagtgctgggacccctgcctggcaccctctggctctgagcctcgcactcctgaccgcagctcagtcccacccacctgctcagcaaggcgtccccagcaaggcacccagaacccgcatgtgtagagagactcctcggcagggctgatggagcgacaggtcggggtttctctaacaagcactttcctggaaacttcattttaacatgttcccatctccctcagaaaaagggcatcgagaagaacctgggcatcggcaaagtctcctcttttgaggagaagatgatctcggatgccatccccgagctgaaggcctccatcaagaagggggaagatttcgtgaagaccctgaagtgagccgctgtgacgggtggccagtttccttaatttatgaaggcatcatgtcactgcaaagc

SEQ ID NO: 5546 - DNA, 483 bp, Homo sapiens
  MAP TO AC005697.1; EXPRESSED IN LUNG, SIGNAL = 4.9; EXPRESSED IN FETAL LIVER, SIGNAL = 4.6; EXPRESSED IN BONE MARROW, SIGNAL = 4.5; EXPRESSED IN PLACENTA, SIGNAL = 4.2; EXPRESSED IN HELA, SIGNAL = 4.3; EXPRESSED IN HEART, SIGNAL = 3.7; EXPRESSED IN BRAIN, SIGNAL = 4.2; EXPRESSED IN ADULT LIVER, SIGNAL = 4.6
aacacatcttgcagcaccacggcctcaagtgtaataaaaacaaggtcgtggtttactctaatgatggcatttagtctcctgaatttaacacaatagagaatgggcagctagaaaccctggtgctgaaacaggattcaaggcttctagagagggaccctaggtgccccatctcaacatttgggaatgtaagagaggatccagggccatggcttcagtcccaggaggcctgggcacagctctgtgtggctgttccaagccatctgctcagggcctggccgcctccagctctctcccgctcaagtctaaggaagttcacctgcaggttggaccactggatcctcccaatgcagcgtggggcattgcgccaggcctgcttggtggcgaagatgagctcatctcccgtcagttggtaggttcctgttgtttctatctcctttgttaccgcttccaccctggccagatgttcctctatttttgccctgg

SEQ ID NO: 5547 - DNA, 498 bp, Homo sapiens
  MAP TO AC005737.1; EXPRESSED IN BONE MARROW, SIGNAL = 3.1; EXPRESSED IN ADULT LIVER, SIGNAL = 2.9; EXPRESSED IN LUNG, SIGNAL = 2.4; EXPRESSED IN PLACENTA, SIGNAL = 2.3; EXPRESSED IN HELA, SIGNAL = 2.8; EXPRESSED IN HEART, SIGNAL = 2.4; EXPRESSED IN FETAL LIVER, SIGNAL = 7.2; EXPRESSED IN BRAIN, SIGNAL = 2.5
ggatttgaaaccagacagacttgaattcagattctggttagtgaccctgggtggattacagatctccttttcccagctcagccaccttatctttgtaagctttccaggtcaccagctaactgccaggactcaggggtcactgtaggtagcatgatgtgtatagtacatatgtggttggcatcttacccttcctttctcatatcaggggtgactgggtctctgctgcaccctgtgcacactcaacctgctgagctgctgtgcagaaggtggggtgctgagccgtgtgctgggcttctgtgcggaaagtggggtgctgagctgtgtgctgggcctgtgtgagcaaggtggggtgctgagttgtgtgctgggcctttgtgtggaaggtggggtgctgagccgtgtgctggccttctgtgcggaaggtggggtgcggaaccgtgtgctgcacttttgtgcggaaggtggggtgcttagccatgtgctgggtttctgtgagga

SEQ ID NO: 5548 - DNA, 460 bp, Homo sapiens
  MAP TO AC005754.1; EXPRESSED IN LUNG, SIGNAL =   5; EXPRESSED IN HELA, SIGNAL = 5.1; EXPRESSED IN PLACENTA, SIGNAL = 4.6; EXPRESSED IN HEART, SIGNAL =   4; EXPRESSED IN FETAL LIVER, SIGNAL = 4.9; EXPRESSED IN BRAIN, SIGNAL = 5.2; EXPRESSED IN ADULT LIVER, SIGNAL = 4.2; EXPRESSED IN BONE MARROW, SIGNAL = 5.1
atccagggctctgttcagcaccagctgtggtaatattatgccatcgagactgtcttgtaaattaagatgaaagtggaaattgggactgattgtgtaattttggagactgttggttcctacatccaagtcctgggcacgttctattaagaaagtagttccaggagtgatactttctggaattttcaaaagtatttctttgtctaggaaaactggggaatgatcatttacgtccctaatccgtagctccgcctgaaaaaactgcaagggattttctagtaacacctggaaaggtaggacacagggctctgtggggccgcacagctcctcccggtccaatttctcatttaacaacaaatccccggtctgcctatcgaactgcaaatgcattttttttcctttggaaacgaccctggcccccctcacagcaagttctcctatctccagccccaggtcttttaac

SEQ ID NO: 5549 - DNA, 383 bp, Homo sapiens
  MAP TO AC004861.1; EXPRESSED IN PLACENTA, SIGNAL = 1.2; EXPRESSED IN LUNG, SIGNAL = 1.1; EXPRESSED IN HEART, SIGNAL = 1.4; EXPRESSED IN FETAL LIVER, SIGNAL =   1; EXPRESSED IN BONE MARROW, SIGNAL = 1.9; EXPRESSED IN ADULT LIVER, SIGNAL =   1; EXPRESSED IN BRAIN, SIGNAL = 0.82
cagagggttcctgtggaaagaacttaagtatgagcactggatttataggggcttaagagggactaggtggtagctagtttgaatgaagttatatcaaatgagtggcagcattaggattctccaaacagcacactaaaagcccactggagagtcagcttcaaaatctgccagacctggagagtgcaaagattattacaatagtaccatttcatgtcgggcctttctttaccccttacctctcttcacacacacaagaccccttcaccaatctcagaggagctggtgtgtgaagggtgagcacaaggtagacaaatccagaagccaggcatgttcctctttccttcctcattgttttccatccagctggaggagaaagaaggcag

SEQ ID NO: 5550 - DNA, 463 bp, Homo sapiens
  MAP TO AC004381.1; EXPRESSED IN BONE MARROW, SIGNAL = 2.1; EXPRESSED IN PLACENTA, SIGNAL =   2; EXPRESSED IN LUNG, SIGNAL =   2; EXPRESSED IN HELA, SIGNAL = 2.3; EXPRESSED IN FETAL LIVER, SIGNAL =   2; EXPRESSED IN ADULT LIVER, SIGNAL =   2; EXPRESSED IN HEART, SIGNAL =   2; EXPRESSED IN BRAIN, SIGNAL = 2.4
tacaggtctgaaggatcgcccagtaatacacattttcttcaaggtcacattttgatgtgactcaggtatagtgactcagactcagtgcatcacactttgagaagcccaggctcaggatcatcttaggctcatgggcttctttgcttaataaaatatttttttagcaaggtccaggaaacatggatttttttctggaattttgctgataggggaaggtgagtcttcttacctgtatgatgaccttggtgtcaaactgtggcagatggtggataaagactgtacaacccgctgtccatggttctaccagggtccaaatggtagccacaatccatcctgagtccgacaggcaccaggagacatcagatgtcttcaggctccgtaatttcctactaactccaaaatgcagtggcctcagctgtgtgatcatggctgatgtgatgaagggctgtgcactctggttttt

SEQ ID NO: 5551 - DNA, 473 bp, Homo sapiens
  MAP TO AC004387.1; EXPRESSED IN PLACENTA, SIGNAL = 4.9; EXPRESSED IN HELA, SIGNAL = 5.9; EXPRESSED IN HEART, SIGNAL = 4.7; EXPRESSED IN FETAL LIVER, SIGNAL = 5.7; EXPRESSED IN ADULT LIVER, SIGNAL = 4.4; EXPRESSED IN LUNG, SIGNAL = 5.2; EXPRESSED IN BRAIN, SIGNAL = 6.1; EXPRESSED IN BONE MARROW, SIGNAL = 5.1
acctggtggcaggaacacgcgtccggcagaccccaccttctaccttccccacgagggggtatagcagcgcctcacgttttgaaccatttagaacacttcaaaacatgaattgctgctgtatcccctcggagtcaatgaagggggatcgatctgggggtacctgcgggtgaataaagactggatgactgaaggaagccccgccccaccccctggcaaggaatagggcaaaacttatgactaggccacttcactccaagttaaggtacttcttataacttcaccatttgatttccaggagctgcaggtggagccgaaagtgtggctctcaattttttcccctgaggatgaatcttggaacaacgtagtgggtgaaaagcagagcgatgggggatacgaattagtgtggaagagaatctaattacttctgaaggtagacgaataaggttaagtagaggcaattggacatctggatc

SEQ ID NO: 5552 - DNA, 491 bp, Homo sapiens
  MAP TO AC004470.1; EXPRESSED IN PLACENTA, SIGNAL = 2.2; EXPRESSED IN LUNG, SIGNAL = 2.4; EXPRESSED IN HEART, SIGNAL = 2.3; EXPRESSED IN FETAL LIVER, SIGNAL = 1.7; EXPRESSED IN BRAIN, SIGNAL = 2.2; EXPRESSED IN BONE MARROW, SIGNAL = 2.3; EXPRESSED IN ADULT LIVER, SIGNAL =   2; EXPRESSED IN HELA, SIGNAL = 2.1
caatatgagatgtggcgaggacaaaccatattcaaagcatagcaccctagtaaaattattgaacttcaactataaataaagaattccccccaaatatccatcaaaagcaagtcatctacagggaagaaaacaagctattctcagatttctccacaacagtctttaatgccaaaaaacaatgaggacaatagctacatatttctagtgaatgaaattatatcccgagaacattataataagttatgatgttttaaaaatatatagggaacaaaccttaattttcaaataggaaagatctagggaaaacagtattataagcccttcttgaaagaactagttgacaacaaaatccagataattaagagattaatcagaacaaagtactcagtaatggccatggcaaaagcccaggtgatgagcattaaatttaggtaagtatagaataacactgagtatatgccaaaattaatggcacagaacaaaatcgaatt

SEQ ID NO: 5553 - DNA, 474 bp, Homo sapiens
  MAP TO AC006515.7; EXPRESSED IN PLACENTA, SIGNAL = 0.64; EXPRESSED IN LUNG, SIGNAL = 0.79; EXPRESSED IN HEART, SIGNAL =  72; EXPRESSED IN BRAIN, SIGNAL = 0.61; EXPRESSED IN ADULT LIVER, SIGNAL = 0.69; EXPRESSED IN BONE MARROW, SIGNAL = 0.63
aaccagctcgagagaacagcttctgtgccttctgcacctccacaggaagcactttacagaggggaggacaacccccaggtgggagtcggggcctaactccagcctcaggacaaggaggagagatgacatttccagccatggtcggctctcatgtaggaagggctctgggaaggctgagctctggccacactgccagccttggccagggccactcgtcatcagcaccacagctgagtgttacctgggatgggctgtggtgccactccggtgcctccctccttcttctatcctacagggactaccatgaatcctacttaccgcactggagagctgtgcagatggaaggaagtgggagatgtggaaacactttcaacaactgaagcagcaggccaagaaaaggtgtcaatagctgtgcttttgcccacaaaaaagtgagtcttcttcattaatgtatgtcttgaacatggaacccgt

SEQ ID NO: 5554 - DNA, 472 bp, Homo sapiens
  MAP TO AC005971.5; EXPRESSED IN PLACENTA, SIGNAL = 1.8; EXPRESSED IN LUNG, SIGNAL = 2.2; EXPRESSED IN HEART, SIGNAL =   2; EXPRESSED IN BRAIN, SIGNAL = 2.7; EXPRESSED IN ADULT LIVER, SIGNAL = 1.9; EXPRESSED IN FETAL LIVER, SIGNAL =   2; EXPRESSED IN BONE MARROW, SIGNAL =   2; EXPRESSED IN HELA, SIGNAL =   2
ggtgggactgcaggtaattgttcttatttttattttctttttgatgcttttatgtttttcaagattttctgcaatgagcatgtgttatttacttttagaaaaagcatatattatttttataattagaaaaaaaaggctaaagtcattgaaaaatctatgcctcccaagatctagctggcctagccctaattctcagggacaggtgctgaaccactgtgaaaaaccttcagttagggcttctgcagaggtggggctttgaggagacaggggtctggggcagggatctgagttggggtgtccaggaatttacaatcctcaccttggcctgtgccacttctttgctgttgagcacgaagaggacatcctgcgtatgaagcagagacaagggcagatccagaagggagatgtacttgcgcagcacattcacagactgaagcgtgagcacagagcaccctggatggagaggagacag

SEQ ID NO: 5555 - DNA, 375 bp, Homo sapiens
  MAP TO AC004586.1; EXPRESSED IN LUNG, SIGNAL = 8.2; EXPRESSED IN BRAIN, SIGNAL = 6.6; EXPRESSED IN PLACENTA, SIGNAL = 7.2; EXPRESSED IN HEART, SIGNAL = 6.8; EXPRESSED IN FETAL LIVER, SIGNAL = 6.4; EXPRESSED IN BONE MARROW, SIGNAL = 7.7; EXPRESSED IN ADULT LIVER, SIGNAL = 7.1; EXPRESSED IN HELA, SIGNAL = 7.3
cacttttcctcactgggaccttccttaggagaccctctttgtgccatattctgttgaccatgagttgacttacttgttagtttaactgaaagtctgtcatccacgccttcttatgttgtccttctcttcctctgaaggaattcacttggaatcttataacagtggtacgttgtcttattcaggaagaaggagagacgaccatcttgcaactagaaaaagatttgcgcacccaagtggaattgatgcgaaaacagaaaaaggagagaaaacaggaactgaagctacttcaagagcaagatcaagaactgtgcgaaattctttgtatgccccactatgatattgacagtgcctcagtgcccagcttagaagagctga

SEQ ID NO: 5556 - DNA, 454 bp, Homo sapiens
  MAP TO AC004886.1; EXPRESSED IN LUNG, SIGNAL = 1.7; EXPRESSED IN BRAIN, SIGNAL = 1.7; EXPRESSED IN BONE MARROW, SIGNAL = 1.3; EXPRESSED IN ADULT LIVER, SIGNAL = 1.3; EXPRESSED IN PLACENTA, SIGNAL = 2.5; EXPRESSED IN HEART, SIGNAL = 1.6; EXPRESSED IN FETAL LIVER, SIGNAL = 1.5
ggttgggctagatccaggtgttaattgcatctgttgcctcttcataagttcttcataggcagcatcagcatctagtagtttcctttcttcttctgtagaagttaccatagtacccaggtccactatctcatggctttctgggatgataaaagagcttgaaacaatatcttcctgaggcacaacagaatgtaagctttctaactcataaaactctttctggaggtctgtaattttctgcataggatcttcataaatctgttctgaaagtcttatcttttgctctcttcctttctgctgcataaatccattttcttcttcttgccttgttagcagactgccatctaccgatccattgtacgtgtcttctactaaagattcataaatataatcctctattagcatcccaccatacaaaggctctttttcaaacacttcatctcgttcatttgcagct

SEQ ID NO: 5557 - DNA, 488 bp, Homo sapiens
  MAP TO AC004408.1; EXPRESSED IN BONE MARROW, SIGNAL = 3.1; EXPRESSED IN PLACENTA, SIGNAL = 3.1; EXPRESSED IN LUNG, SIGNAL = 3.1; EXPRESSED IN HELA, SIGNAL = 3.3; EXPRESSED IN FETAL LIVER, SIGNAL = 3.3; EXPRESSED IN BRAIN, SIGNAL = 4.1; EXPRESSED IN ADULT LIVER, SIGNAL = 2.6; EXPRESSED IN HEART, SIGNAL =   3
tggaggcgaatacatgtcaggtgtgagcccctcgctccctcccctcccctgggctcagagcccttcctcccgccgtgtggcccctgcctctcagcgaatgtagacgcctcgtccccagccctccagctcattcttgttgcgccccaaaactggacccccaccctcagcgcagtagcgggccttattccggccccggttccggttgtcggtcagctcttcctcatagtcttcttcctcgtcctcccaggatccctgtcgggctgggggcgtgccgccccctgcagggtctccaagccctggcccctctgaggggtcagtctccatgtccacacatgagtctcccagctccgtgtaggcagagtttcggctgccgggggtgtcggcatcaaaagtgtcttggcgggacagtgcccgtagcgtgcctgcccggcctggtgggtggctgctggggtaaaggcctgggggctggcccagctcccctgggtact

SEQ ID NO: 5558 - DNA, 480 bp, Homo sapiens
  MAP TO AC004485.1; EXPRESSED IN PLACENTA, SIGNAL = 2.4; EXPRESSED IN HELA, SIGNAL = 2.4; EXPRESSED IN HEART, SIGNAL = 2.2; EXPRESSED IN BONE MARROW, SIGNAL = 2.2; EXPRESSED IN ADULT LIVER, SIGNAL = 2.3; EXPRESSED IN BRAIN, SIGNAL = 2.2; EXPRESSED IN FETAL LIVER, SIGNAL =   2; EXPRESSED IN LUNG, SIGNAL = 2.6
cctggctgtatcactcagtctcaaattataaattctccgttttgtccctgttgattaggagagaagcaaaaccaaagcatactgtcccaccagttctgtgtattcctctgtccccctgtccagctatctctgagcatgtactgtggatccccatgcagaggctgactctttgctgtgaaacccaatgacaaatatgcagggctttctttatcattgtctcccactctgtgttgatttttcaccatagaaagaacagagcaaggcctctagcaacaactcaactgctgggatcacaaagaggaaagtagaaagaagcaaaaatataaactatactattaccaaaaaaggcaacattaggacaggaggcaacctgctcagtattatggggacaactttactggaacctaagactttggagaagagatcttttctgcttgagcattaaaatatgtgtacctgagtcaatcccagcaaatggtc

SEQ ID NO: 5559 - DNA, 429 bp, Homo sapiens
  MAP TO AC005040.2; EXPRESSED IN LUNG, SIGNAL = 3.4; EXPRESSED IN ADULT LIVER, SIGNAL =   4; EXPRESSED IN PLACENTA, SIGNAL = 3.5; EXPRESSED IN HELA, SIGNAL = 3.8; EXPRESSED IN HEART, SIGNAL = 4.1; EXPRESSED IN FETAL LIVER, SIGNAL =   4; EXPRESSED IN BRAIN, SIGNAL = 3.8; EXPRESSED IN BONE MARROW, SIGNAL = 3.7
tggttttctttcttcaataataaatcttagcttaagattagtaatttagcttagtaactttttaactgtataaactttttattttcttagaactttggactcttttgtaacacttagcttaaaacacaaacacattgtacagctgtacaaaatatctttatatttattctataagcatttttctatgcttaaattattttatttttcattttttaaatttttttgttaaaagctaagacacaaacccacaaattagcctaggcctacacagggtcatggtcatcaacatcactgtcttccacctcccacatcttgtcccactggaaggtcttcaggggcagtaacacgcatggaactgccatcacctatgaaagcaacgccttcttctggaatcctcctgaaggacctgcctggggctgttttacaggt

SEQ ID NO: 5560 - DNA, 450 bp, Homo sapiens
  MAP TO AC004988.2; EXPRESSED IN PLACENTA, SIGNAL = 1.3; EXPRESSED IN LUNG, SIGNAL = 1.3; EXPRESSED IN FETAL LIVER, SIGNAL = 1.5; EXPRESSED IN BRAIN, SIGNAL = 1.9; EXPRESSED IN BONE MARROW, SIGNAL = 1.3; EXPRESSED IN ADULT LIVER, SIGNAL = 1.4; EXPRESSED IN HEART, SIGNAL = 1.4
gcatatgaagaaccagaacttgcatgagaacaggccatcaatgccaacgcgaagatgacacagatgttggaattaacttacaaagatgtttacatagctattataacaacgctctaacaagcatcacaaacactgtttaataaatgggatatagaaatatttagcaaagaaatataagatatgaagaagaaccaaaaggaaaattaaaaacttaaaagtataataaccaagaaaaaaattacacctcactcgttgagctcaatagtgcaatgaagatgacaaggaacttaaagatagatcaatagaaattattcaatctgaagaagagagagaacaaaagatagctccttcctactcaaaacaagaaataacagatcctcaggaacctattcaacaataacaaaaagtccaatatttatgtcattgtagtcccagaatgaggggagaaag

SEQ ID NO: 5561 - DNA, 471 bp, Homo sapiens
  MAP TO AC005740.1; EXPRESSED IN BONE MARROW, SIGNAL = 9.7; EXPRESSED IN ADULT LIVER, SIGNAL =   9; EXPRESSED IN PLACENTA, SIGNAL = 9.3; EXPRESSED IN LUNG, SIGNAL =  10; EXPRESSED IN HELA, SIGNAL = 9.3; EXPRESSED IN FETAL LIVER, SIGNAL =  10; EXPRESSED IN HEART, SIGNAL = 9.2; EXPRESSED IN BRAIN, SIGNAL =  10
tcaagaacatgaactttggggtcataaatgaccctgggcaagttatttaaccccctggggctctgttttcttataagatggagataatgatgctgcctgcctcgggttatttgtgtgataaagcacagggagcactgagcaaaagtatgttgcatggtaaccacttacaatgtgatatgaaaaacaatcatccttacaactgtttagggtgtctggaatgctcccctccatcacagacttgttttctgatccccaggtgatgatccttatcacaggtgctcacaaggcatttgctctgtacaaggccatcgaggagggagtgaaccacatgtggaccgtgtctgccttccagcagcatccccgcaccgtgtttgtgtgtgacgaggatgccaccttggagctgaaagtgaagactgtcaagtatttcaaaggtgagggaggtgtgggtccaggaggaggtggtcaagctta

SEQ ID NO: 5562 - DNA, 495 bp, Homo sapiens
  MAP TO AC004912.1; EXPRESSED IN LUNG, SIGNAL = 1.9; EXPRESSED IN ADULT LIVER, SIGNAL =   2; EXPRESSED IN PLACENTA, SIGNAL = 1.8; EXPRESSED IN HELA, SIGNAL = 1.8; EXPRESSED IN HEART, SIGNAL = 1.5; EXPRESSED IN FETAL LIVER, SIGNAL =   2; EXPRESSED IN BRAIN, SIGNAL = 1.8; EXPRESSED IN BONE MARROW, SIGNAL = 1.7
ccattgtctttatggcagggatgatgttgaagacttaggtctctatggcaacagtgagtgcattgaacacctgccaggagaaagttatcccaggtttcaggaccaggaaaagctgtgtaaccaatctgtttttatctcatggtcactgtggatcaggtaactatttatgttttcttttttgttttggctgctgggaagctctggcaaatttttactcccacctctggaaactatccacaacttatgatctattctggttctgtaaattacctctgattttatctcactttctaacccgtgtgttccctttacctcagtttcattatctattaattttatgttgtttgctatttttgtaaactccttgaacactttatggaacacggaacatttaaggcaaacaatttttaaaagcatcagatcatcatcatcatcatcatcatcatcatcatcatcataatggctaattgactgaacattgctatgaatgaggca

SEQ ID NO: 5563 - DNA, 454 bp, Homo sapiens
  MAP TO AC006238.1; EXPRESSED IN LUNG, SIGNAL = 7.4; EXPRESSED IN FETAL LIVER, SIGNAL =   9; EXPRESSED IN BONE MARROW, SIGNAL = 7.2; EXPRESSED IN PLACENTA, SIGNAL = 8.1; EXPRESSED IN HELA, SIGNAL = 7.5; EXPRESSED IN BRAIN, SIGNAL = 7.4; EXPRESSED IN ADULT LIVER, SIGNAL =  10; EXPRESSED IN HEART, SIGNAL = 6.7
gaatttcataaaggactcaatgtgcaactgacatctgctagtgatgatctggtaatatacaacctgtccagtagccgaacagtttgtttttattgtgttttctaaccgtaagagatcattaaaggcaaagcctatatgacgctgtacacacaaaaaaatggtcaccgtgggccatactaccaatgaaatggtaggtaaacaaatctttttctggtcaagagaaaaaaaaaaaaagaaacagcactctgcatgcttcactctacaagatgaatttccctagaaagaatccaatgaaaatggctgcaattacaacaagaagtgaaggaagaggactggtgacattatctctgaaggatgcagttgaggttgatccaggtttatccgaatgtgctacctttctgagccttaaaccttcatcctagaaaaaaaacacacacacaaaaggtttttaaaa

SEQ ID NO: 5564 - DNA, 468 bp, Homo sapiens
  MAP TO AC004456.1; EXPRESSED IN PLACENTA, SIGNAL =   3; EXPRESSED IN LUNG, SIGNAL = 2.5; EXPRESSED IN HELA, SIGNAL =   2; EXPRESSED IN HEART, SIGNAL = 2.1; EXPRESSED IN BRAIN, SIGNAL = 2.3; EXPRESSED IN FETAL LIVER, SIGNAL = 2.2; EXPRESSED IN ADULT LIVER, SIGNAL = 2.6; EXPRESSED IN BONE MARROW, SIGNAL = 1.8
agggcatcaattattgtccaggtggtgacttatgacatgaaacttttccatcctcattttaaagcatagaatagtatatgcttaggtgttattttatggcaacatttttatttctacatatttctgaaacacatagtatgtactcaaaaattcacaagtccagtaaaacaagtttgtggttttcttctgtgacatttctttttataactcctccatctcaaagtgtgtattaaagctgtttgccatggatgtgtgttcaaagattcttgacaggcttggtttcaacagttctactgagggacatgacaggtgctgagagttgtcattcttcaaggacatcatttggtctgtccccggctcccttctatcataatacagagcccagagcagagtaatggtgagaatcatggccaggatttgtgtcaccccaatggagattcccagaaacctcagcacctgcagttgttt

SEQ ID NO: 5565 - DNA, 480 bp, Homo sapiens
  MAP TO AC005225.2; EXPRESSED IN ADULT LIVER, SIGNAL = 5.9; EXPRESSED IN PLACENTA, SIGNAL = 4.6; EXPRESSED IN HEART, SIGNAL = 4.1; EXPRESSED IN FETAL LIVER, SIGNAL = 4.7; EXPRESSED IN BRAIN, SIGNAL = 5.3; EXPRESSED IN BONE MARROW, SIGNAL =   5; EXPRESSED IN LUNG, SIGNAL =   5; EXPRESSED IN HELA, SIGNAL = 4.7
tgggagaaaatggaaataataatcctagtacaaaaactttttttgagacaggggtctcactaaatgttgcccaggctggtcttgaactcctggggtcaagcaatcccccggcctcagcctcccaggtagctgggactacaggtgcacatcaccatgcccagcttccaccctagtaacctttgaaggagacttggtatctcctggcatgtttctagttctcagtgttctggcagggcttttggattcagccctgcatcagctctatcccctctcttctgcactcaggtgatcaccagaacgcacctttggatgctgcagcataaagtccacggcttcttcaaagtactccagatgtacatcattcagatcttcggggaggtcttcaaatctgaaataagccagggcaagcacagcaaaaccatgtccggccaggaggctggccctgtattcacaaaggcccctgctgctcccaaacagatc

SEQ ID NO: 5566 - DNA, 469 bp, Homo sapiens
  MAP TO AC004150.8; EXPRESSED IN PLACENTA, SIGNAL = 3.1; EXPRESSED IN LUNG, SIGNAL = 3.2; EXPRESSED IN FETAL LIVER, SIGNAL = 3.2; EXPRESSED IN BRAIN, SIGNAL = 3.1; EXPRESSED IN BONE MARROW, SIGNAL = 2.8; EXPRESSED IN ADULT LIVER, SIGNAL = 3.6; EXPRESSED IN HELA, SIGNAL = 3.2; EXPRESSED IN HEART, SIGNAL = 2.9
ctcattcgggaaggaggagcagggagccgggcccagagctgtcacccagggttgggagggaacacagagcccgcctgcccgctgagctccccttcctgtcccaagtgctcagccataccccagctcccaggaaccagggagaggctggtggtcggatgcccctctagagcagagctgggcctgcagctctagggcctccctgcccctcctgccgccaggagtgcccaggccggatgaggcacttccctacagtgtgggtcccgtcggcagtggcctgagggaacctgtgctctgcgggctgcccgaccaccttcccttcggtctgctccccgcctctggcggccccctccctggcatgctgctggtgcccaaggctcaggggctcgtggagatgctgcagaccatctatgagacagaatcctgtttctcagcagatgggatgtcaggtcgggaaccatccttggaaatc

SEQ ID NO: 5567 - DNA, 468 bp, Homo sapiens
  MAP TO AC004953.1; EXPRESSED IN HELA, SIGNAL = 3.5; EXPRESSED IN HEART, SIGNAL =   4; EXPRESSED IN BRAIN, SIGNAL =   4; EXPRESSED IN PLACENTA, SIGNAL = 3.8; EXPRESSED IN LUNG, SIGNAL = 3.9; EXPRESSED IN FETAL LIVER, SIGNAL = 4.2; EXPRESSED IN BONE MARROW, SIGNAL = 3.9; EXPRESSED IN ADULT LIVER, SIGNAL = 4.8
tggtggaaggaaaagctcaggctggaggctgacaggtgtggatctgcagtctggatcggccgctttgccaggctgtgtggccgtggggaggttgcctgccctctctgtgtttcaagctctttgtctgtgaacagggtttgaagccctgtctggcacatagttgatgatgttcagtctatgcttatttgcagtggtgagggtgtcgggtgggaagaggcaggggtggggggctttgaggacacatacactgtcactgtatcaggatggccctgaccccttcctcatggccggccctgaccctgcctgtttcctccccgccagggcgagggggtgcagcagctgagagaggccctgaagatcctggcagagcgagtcctcatcctggagcacatgattgggatccacggtgagcagtgaccaggatcagcgggctgggaatctctctcccctccttcctctcccaatgct

SEQ ID NO: 5568 - DNA, 486 bp, Homo sapiens
  MAP TO AC004387.1; EXPRESSED IN PLACENTA, SIGNAL = 4.4; EXPRESSED IN LUNG, SIGNAL = 5.9; EXPRESSED IN HELA, SIGNAL = 4.5; EXPRESSED IN HEART, SIGNAL = 4.3; EXPRESSED IN FETAL LIVER, SIGNAL = 4.5; EXPRESSED IN ADULT LIVER, SIGNAL = 4.8; EXPRESSED IN BRAIN, SIGNAL =   5; EXPRESSED IN BONE MARROW, SIGNAL = 5.1
aatggccagctcacacttgtctataggaattccacacaggtgaagctttcacacaaaggtttcaaggctgaagacagaaaattctaggaccgggaaagacttccttctggcctccccaaatttccctgagattggggcaggatgggctaagtgtgaacactccacacaaagaggagccaagccctctcccaccctacccacctcccccagtgagcaagtacattgtggtctttaaccaaaaccaaatgagaagtagtggctacactgggtggcaacagagcaggcaggcccagcgaaaatgggtctggcctttgaaaatggcctcccagaggctgcctcccaacgtggggccttcggcattgttctggcctttgtggttcctggaaatcacccacagcaggatctgttaggcctgaatacccatccacaagggcaggagggagaggtgtgtgagttattaggggttacctctttttctggcccatc

SEQ ID NO: 5569 - DNA, 471 bp, Homo sapiens
  MAP TO AC003954.1; EXPRESSED IN PLACENTA, SIGNAL = 2.7; EXPRESSED IN HELA, SIGNAL = 2.6; EXPRESSED IN BRAIN, SIGNAL = 3.2; EXPRESSED IN ADULT LIVER, SIGNAL = 3.2; EXPRESSED IN HEART, SIGNAL = 3.3; EXPRESSED IN LUNG, SIGNAL = 2.4; EXPRESSED IN FETAL LIVER, SIGNAL = 3.3; EXPRESSED IN BONE MARROW, SIGNAL = 2.6
atacatggctgctctctgcccaggattccgggaagacccatcctgccaggtcaccaacaccaacacggttgaggagaaaggcagcaggtgaaatggggctcaggaatgcctccacttcccttccactgcacctcacaggcaggaattccagttgttcccagaggtctctgaagaagggcccagagtgtcggggacttggaagaggatctcgggactggaagtcagagaaagtgcaaagcttgtcactgagccttggaaaaaccttgtccctgagcaccctgagcagccgtactgaggctggggagcctgcacaggcctataagatcctagccctgtttcctgctgctgccccaaatcctgctcagggaggaggaggagggacaggaagaaatctgaacaacaactcttcttgtgacggagttgaaaagcagacctatctgtacaagtcaactctaactggaatgtcactgg

SEQ ID NO: 5570 - DNA, 476 bp, Homo sapiens
  MAP TO AC005549.1; EXPRESSED IN BONE MARROW, SIGNAL = 1.3; EXPRESSED IN PLACENTA, SIGNAL = 1.5; EXPRESSED IN LUNG, SIGNAL = 1.1; EXPRESSED IN FETAL LIVER, SIGNAL = 1.9; EXPRESSED IN ADULT LIVER, SIGNAL = 1.4; EXPRESSED IN HEART, SIGNAL = 1.4; EXPRESSED IN BRAIN, SIGNAL = 1.2
tgagatgacatatacatccaaggctttatgttcaaaacccaccaaaatccatggaagattaaattaaaatattaataacttttaaaatctactaagaaaaaccatgattcacattattacataaagctcatattccttagaattagattaaaataatctcagaaccactctgagaaaggacagggtatacaaattatttgtttctcaagtcatggcttgttttcagttcagtcatgaatgttcaaagctttggagtttgggttttcttgtccaggtgcttcataaagtcctggacccacttctgtgtggggtcagcacagatctccttgtccagtttggtcttgaagctgtggagcagaaaggagacagtcagatggaacaccttgagggttcagcctgggagtgtgaccaagtctatgggaaatctgtctagcccatcagcctagctgatggggatgcctcagggatgaaggaag

SEQ ID NO: 5571 - DNA, 469 bp, Homo sapiens
  MAP TO AC004126.1; EXPRESSED IN PLACENTA, SIGNAL = 5.2; EXPRESSED IN LUNG, SIGNAL = 4.7; EXPRESSED IN HELA, SIGNAL = 5.3; EXPRESSED IN FETAL LIVER, SIGNAL = 5.3; EXPRESSED IN BRAIN, SIGNAL = 5.4; EXPRESSED IN BONE MARROW, SIGNAL = 4.9; EXPRESSED IN ADULT LIVER, SIGNAL = 6.3; EXPRESSED IN HEART, SIGNAL = 5.2
cttaacagatgggaccaggcatgcggcagccggggcttcttaccagtcctctgagggctctctgggagcctgagtccaggagggcgaaggtagcaacagtgaatcgctggtagtgcgactggaaaggtgtggccccgtccaaggctaccatttgggttctgtagctgtcgcccttgaaagggcatctgagaagagaagtcagagaggctgtttacaggaggcagagcaggtggggggagtgtgggggcactcacccgtctgacaggatgggccactggggctgctggaaggggttggcactgggagcgccccagcactggtgcagcagcaggaccaggttggggtctgtcctctgcagaagccggacctccacatggactggttctcggagcagcctcacgatgggatagtcatcctccccatagtacgagctgaaggtctcgtctgcagggagagtgactcatgagcc

SEQ ID NO: 5572 - DNA, 494 bp, Homo sapiens
  MAP TO AC006007.1; EXPRESSED IN ADULT LIVER, SIGNAL = 1.7; EXPRESSED IN PLACENTA, SIGNAL = 1.3; EXPRESSED IN LUNG, SIGNAL = 1.7; EXPRESSED IN HEART, SIGNAL = 1.4; EXPRESSED IN BRAIN, SIGNAL = 1.5; EXPRESSED IN FETAL LIVER, SIGNAL = 1.5; EXPRESSED IN BONE MARROW, SIGNAL = 1.2
caaatggggctacttcaacacttcaaactaaaaagcttctgtacaccatagaaagcaatcaacaaagtgaaaaggcaacctacagaatggaagaaaatgtttgtaaacaaatatttggatatttgtgttaatatccaaaatacactacaaatttctgcaactcaataacaaaataacttgatttaaaaattggcaaaatatttgaatagacatttctctgaagaatacatacaaataaccaaaagatatgaaaaaaatgctctacatcactaattatcagggaaatgcaaatcaaaaccacagtaagattacacttttcatgtgttataatggctactgttttaaaaagataccaagttttaatgaggatgaggagaaattggaatccttatacactgttgataggaatgacaaattgtacagctgctatggaaaatattatgcagtttcctaaaaaattttaaataaaattactgtgggatccagtaatccaa

SEQ ID NO: 5573 - DNA, 454 bp, Homo sapiens
  MAP TO AC004594.1; EXPRESSED IN ADULT LIVER, SIGNAL =  15; EXPRESSED IN PLACENTA, SIGNAL =  11; EXPRESSED IN LUNG, SIGNAL =  11; EXPRESSED IN HEART, SIGNAL =  18; EXPRESSED IN BRAIN, SIGNAL =  14; EXPRESSED IN HELA, SIGNAL =  12; EXPRESSED IN FETAL LIVER, SIGNAL =  12; EXPRESSED IN BONE MARROW, SIGNAL =  10
cacactgaatggtgacctggtctaggggaggttttgatatgcataaattaggcttaggaggagctaaggtgggaggattacattctcagttgggaagtgcattgcagacccattacatccccccaggttacctaggacccctctccctaataatagtcagatcaaggacaatttgtgtaatttgtctttagtatttattttatgcaacatctgtcttttttcttccatctgtctatccccaaccctgcccctcacccttccacttcctctctctgtaggttttaatgaaagatattgccactcccataccagcagaagaggtgaagaaagtggtcagaaaatgtctcgagaaagctgccttgatcaattacactagactcacagaatatgccaaaatagaaggtcagtgcagtgagcaattgtcgaagtggcagtgagagccaacaatgcctag

SEQ ID NO: 5574 - DNA, 482 bp, Homo sapiens
  MAP TO AC003958.1; EXPRESSED IN LUNG, SIGNAL = 1.7; EXPRESSED IN HELA, SIGNAL = 2.2; EXPRESSED IN FETAL LIVER, SIGNAL = 2.3; EXPRESSED IN BRAIN, SIGNAL = 1.9; EXPRESSED IN BONE MARROW, SIGNAL = 1.8; EXPRESSED IN ADULT LIVER, SIGNAL = 2.4; EXPRESSED IN PLACENTA, SIGNAL = 2.1; EXPRESSED IN HEART, SIGNAL = 1.7
cacaacaaatggagggaagggcttttgacaatcaccaaatgagcaaaaaaaaaaaaaaaaaaaaggggttgtcttacgtgtccacaccctccatggacgaggtataaatgctccctggaggaaggagacccaccgctctacaacctggagattttggactctgtcttcagctggacactccctccctgcaccatgtcttacagttgtggcctgcccagcctgagctgccgcaccagctgctcctcccggccctgtgtgccccccagctgccacggctgcaccctgcccggggcctgcaacatccccgccaatgtgagcaactgcaactggttctgtgagggctccttcaatggcagtgagaaggagaccatgcagttcctgaacgaccgcctggccagctacctggagaaggtgcgtcagctggagcgggacaacgcggagctggagaacctcatccgggagcggtcacagcagcaggagcc

SEQ ID NO: 5575 - DNA, 351 bp, Homo sapiens
  MAP TO AC005230.1; EXPRESSED IN HELA, SIGNAL = 2.7; EXPRESSED IN HEART, SIGNAL = 3.3; EXPRESSED IN BRAIN, SIGNAL = 3.2; EXPRESSED IN BONE MARROW, SIGNAL = 3.4; EXPRESSED IN PLACENTA, SIGNAL = 2.7; EXPRESSED IN LUNG, SIGNAL =   2; EXPRESSED IN FETAL LIVER, SIGNAL = 4.7; EXPRESSED IN ADULT LIVER, SIGNAL = 3.3
ggaatatggaatgtggggtgaaaaaatctaatacttactctttaacaacttttctcattccacaatcccaaatatctaattctatgacaacttctggtttgagatagaaacatgtaaaactaaggtgccacaggagtatgctacagaaataaaaggtgaatgaatgtcttacctctgaattcaagtccccgcagctgaaaagtgaccagaccattgcctatctctataaggtgtactaatgcattgagatagtcagaggcaaggatgaaacagtcccctgtactgtagtttccccaccgtcctagtagcaaatcaccacagaggctgtgctgtagggatctagttaaatgc

SEQ ID NO: 5576 - DNA, 442 bp, Homo sapiens
  MAP TO AC005871.2; EXPRESSED IN BRAIN, SIGNAL = 3.4; EXPRESSED IN ADULT LIVER, SIGNAL = 3.4; EXPRESSED IN BONE MARROW, SIGNAL = 3.5; EXPRESSED IN PLACENTA, SIGNAL = 3.3; EXPRESSED IN LUNG, SIGNAL = 3.4; EXPRESSED IN HELA, SIGNAL = 3.1; EXPRESSED IN FETAL LIVER, SIGNAL = 3.2; EXPRESSED IN HEART, SIGNAL = 3.1
gtgtgatgggcagagtcaggcaaggtggtgatggggcagctaggggcagaataagccctaaaccccattggctcaggaaacacaggagggatgggcaggctggacgggagtctcccttcccccaggaagccctgcagacgaccaggagtttcctctgcagacacattgtcccagcccatcctcctgttctccctccctctcacctcctccctctcttctttccaaactcctggatcagggggaatcttatgattccaacaaacctgcctcgacgatgtcatatcaggctgccctgccccagggaagaaagggccgtgaccaggaccgccatcggtgagggaggaaccagaatgcagctgctgatggaaaaacacagaacttctgggaagaggaggccagagggcggtcctgtgagtgaggcttctcctctccaagaggccat

SEQ ID NO: 5577 - DNA, 473 bp, Homo sapiens
  MAP TO AC005725.1; EXPRESSED IN BRAIN, SIGNAL = 1.9; EXPRESSED IN ADULT LIVER, SIGNAL = 1.7; EXPRESSED IN BONE MARROW, SIGNAL = 1.8; EXPRESSED IN PLACENTA, SIGNAL = 1.6; EXPRESSED IN LUNG, SIGNAL = 1.8; EXPRESSED IN HELA, SIGNAL = 1.8; EXPRESSED IN FETAL LIVER, SIGNAL =   2; EXPRESSED IN HEART, SIGNAL = 2.2
tgaacactagattggcagggactgcccttcctgggagaaagctcagccccttcagatagattttcagaatctgtctaaatgaatacccctatggaaaccctattcgactttggcaatttggttaaaaactcagtccggctggttgatttttgagcctggttgaaaaagccagagaattctttccagaacccccacatttcaatattgtcaattccagtcgtttccactgggatatccctggccacaccagggtaagtaaggggtccttacagtggtggcagcggcagtggcagatgtgctccctgcagctgcagagtgaatgtgacatacaggtccccatggaggtgatgatgcgagttactgcctgccctcctctgatatttctcaccactcaccaggtcctttctgccatgctgggagccagatagacgagggtgggagttagagagagagagaggaagaaagaccaaggg

SEQ ID NO: 5578 - DNA, 412 bp, Homo sapiens
  MAP TO AC003670.1; EXPRESSED IN FETAL LIVER, SIGNAL =   2; EXPRESSED IN BONE MARROW, SIGNAL = 2.4; EXPRESSED IN LUNG, SIGNAL = 2.1; EXPRESSED IN BRAIN, SIGNAL = 2.3; EXPRESSED IN ADULT LIVER, SIGNAL = 2.1; EXPRESSED IN PLACENTA, SIGNAL = 2.2; EXPRESSED IN HELA, SIGNAL = 1.9; EXPRESSED IN HEART, SIGNAL = 2.1
caccaaaggtttcatccaaatcatttaaaacaagggtggtaatagtcacattaaagaaatgtaactttctatgttggctttgaatgctctaatatccataatgagattttaaaaaaataatacacgcacttggattctttgctttgcaggtctcttggacatttaagtagaagtgacatttattacccaatgcttactaatactgtagttcggggatgggcaaactacagccccctttccccacctctgtcattttctaaataaagttttattggaacacagccactctctttctttcacatattgtctcaggctacatttatgctacagaagggttgccaacctctgctgtagacagttacttggaacactttgcagagaaatgtggcaaggagaaatgtaatctctttcc

SEQ ID NO: 5579 - DNA, 474 bp, Homo sapiens
  MAP TO AC005753.1; EXPRESSED IN BRAIN, SIGNAL = 5.3; EXPRESSED IN BONE MARROW, SIGNAL =   5; EXPRESSED IN ADULT LIVER, SIGNAL = 4.5; EXPRESSED IN PLACENTA, SIGNAL = 5.1; EXPRESSED IN LUNG, SIGNAL = 4.8; EXPRESSED IN HELA, SIGNAL = 4.7; EXPRESSED IN HEART, SIGNAL = 4.7; EXPRESSED IN FETAL LIVER, SIGNAL =   5
ccttcagggaggacaggtgtttagaagaaaccctactgccagcatctatattctcttcttctcatcttcagcttcatggctggctgtgccaggcactgcaccaagcactttatacacatcctctcagttcatccttacagcatcctcaggtcatcatgatcattattcttgaacagacaaggaaactgagggtccaagtggttgtgttatttgctcaaggtcaccatgtttgtctgatctcagataccagctcttaaccataatgccatacttggttcccaaaaggctactgcctggaaccatcaaaatccctaatcccaaaaggacagcttcaaataaggcggtgtcttgcacaccttcttctcaagaaaataatggcaatgcagttgagcccttctgtcactttgatagtagctttcccttcacgcttagtaaaggtgctgcaattactatgggcacctctggtaagaggaa

SEQ ID NO: 5580 - DNA, 485 bp, Homo sapiens
  MAP TO AC005848.1; EXPRESSED IN BRAIN, SIGNAL = 1.5; EXPRESSED IN BONE MARROW, SIGNAL = 1.5; EXPRESSED IN ADULT LIVER, SIGNAL = 1.4; EXPRESSED IN PLACENTA, SIGNAL = 1.3; EXPRESSED IN LUNG, SIGNAL = 2.1e+02; EXPRESSED IN FETAL LIVER, SIGNAL = 1.6; EXPRESSED IN HEART, SIGNAL = 1.5
aagagcggatatgagcttggggttgtgacctcagctcctgcctcggagacagggtaggctgtgtccactcctcgcaggggacacaagacgtctagctgacaccccccaacccccatctcaccttctcaccctggtctcttaccctaaggagggcagggagactgacgctcggacaggcaggtcctgggggacccatggcaccccccactttctgatccccagtcgccaacggtgtgcctggttcctgttctcccacctgagagtcggggcggtctgggctggatctgcctgtgcctgggcgggtgcaggggccaggctcaccttggggaagtcgaagggctcttcgtcccacacggggttgaacgagttcccctgagaggtccgggtgcggtacttgcgccgcgtatcaacagggaggccaaacatgtccacctccacgtagatgcccaccttcctgtcggacaggaactgccctgagatcacct

SEQ ID NO: 5581 - DNA, 492 bp, Homo sapiens
  MAP TO AC004465.1; EXPRESSED IN BONE MARROW, SIGNAL = 1.5; EXPRESSED IN ADULT LIVER, SIGNAL = 1.5; EXPRESSED IN PLACENTA, SIGNAL = 1.4; EXPRESSED IN HEART, SIGNAL = 1.4; EXPRESSED IN LUNG, SIGNAL = 1.6; EXPRESSED IN FETAL LIVER, SIGNAL = 1.5; EXPRESSED IN BRAIN, SIGNAL = 3.2
ccattgatgttatttgtattttaccacaataaaaaatatatgtagcacttactctttaggaagctgatattttgtgaatttagaaacacaaatctgtacttctatcacttggttaatatgtttattaggtctggtatattaggggtctggggatagacagggctgttcctgagccgttcctgttttcctgggcttggctcctgaagtgatttttccaagatacctctcccttaggcaccacctacttgcttcatccgaatcgtagctgttggcttcctcttcctcctcctctgggggtggtggctggcgggctgcagcaggctggggggcagctgcagatgcttgggaatagggtccggaggggtggctcattcggtcctctctggctccaactgctgggtagcccccgactccccctgttctctcctctcggggtggggcagtggtcccagggtcgctcggagccacctctgcagggagataaggacagga

SEQ ID NO: 5582 - DNA, 348 bp, Homo sapiens
  MAP TO AC005873.2; EXPRESSED IN LUNG, SIGNAL = 2.1; EXPRESSED IN PLACENTA, SIGNAL = 2.3; EXPRESSED IN HELA, SIGNAL = 2.1; EXPRESSED IN HEART, SIGNAL = 2.4; EXPRESSED IN FETAL LIVER, SIGNAL = 2.2; EXPRESSED IN BRAIN, SIGNAL = 2.5; EXPRESSED IN BONE MARROW, SIGNAL = 2.3; EXPRESSED IN ADULT LIVER, SIGNAL = 1.9
tgagaaaagtttttgattgtttccccatcccccttttacagaagatgaactcgactctctgagagaatacgtaacttgcttaaagttacatagctagaaaaggcagaaccagaattcaaatccaagtaatctcagtctagattctgtgcctttaatctctttcctaatactgcttctgttgtgatacttaaaaatgtagtttcttgatgaaactttgacttagaggtctacagcttctaagagctagcagttgtcaactgttttgttcctttagagggagatttccactggtgggagcacaagagcataaaggtagggaactggctggctcttctatcatcatcatca

SEQ ID NO: 5583 - DNA, 477 bp, Homo sapiens
  MAP TO AC005729.1; EXPRESSED IN LUNG, SIGNAL = 5.2; EXPRESSED IN PLACENTA, SIGNAL =   4; EXPRESSED IN HELA, SIGNAL = 5.3; EXPRESSED IN HEART, SIGNAL = 3.7; EXPRESSED IN FETAL LIVER, SIGNAL = 7.8; EXPRESSED IN BRAIN, SIGNAL = 2.6; EXPRESSED IN BONE MARROW, SIGNAL = 4.5; EXPRESSED IN ADULT LIVER, SIGNAL =   8
tggtcatctgtattccagcaagctcactgtgatgatggttttccaacattcgcagtttccaccagaaaggttttccttagtgttgggtaaaccttccttggatgtctgagtgagctttatgtgcattctcacgttggtttctgtgatgtataaaagtatacccccatcttacagataggaaactatgccctgatttctgagccttgacatcatcacattctccagtttgtgtttcgtgttgaaagttaaaacgtgattcccttttcaggtgtaatcctgagagattcacatggtgttgcacaagtacgttttgtgacaggcaataaaattttaagaattcttaagtctaagggacttgctcctgatcttcctgaagatctctaccatttaattaagaaagcagttgctgttcgaaagcatcttgagaggaacagaaaggtaagctaataaataaaacctggtgctaagtaggactgc

SEQ ID NO: 5584 - DNA, 489 bp, Homo sapiens
  MAP TO AC004582.1; EXPRESSED IN PLACENTA, SIGNAL = 7.1; EXPRESSED IN LUNG, SIGNAL = 8.6; EXPRESSED IN HEART, SIGNAL = 5.6; EXPRESSED IN BRAIN, SIGNAL = 8.2; EXPRESSED IN HELA, SIGNAL =   5; EXPRESSED IN FETAL LIVER, SIGNAL = 6.7; EXPRESSED IN BONE MARROW, SIGNAL =   6; EXPRESSED IN ADULT LIVER, SIGNAL = 5.9
tcaaaatgggagaaattggccaaaacaaaggggccacaggccccatgcaagtccaaaatccagtagcgtagtcaaatcttaaagttccaaaatgatctccattgcctccatgtctcacagccaggtcatgctgatgttaacaggtgggttcccatggtcttgggcagctctgcccctgtggttttgcagggtacagcctccttcctagctgctttcatgggttggcactgagtgtctgtggcttttgcaggtgcacagctgtcagtggatctaccattctggggcctggaggatagtggccctcttctcaccgctccactaggcagtgccccagtagggagtctgtgtcggggctctgaccccacatttcccttccacactgctctagcagaagttctccatgaaggccccaccactgtagcaaaattttgtctgggcatccaggaatttccatacatcttctgaaacctaggcagaggttcccaaacc

SEQ ID NO: 5585 - DNA, 436 bp, Homo sapiens
  MAP TO AC004071.1; EXPRESSED IN LUNG, SIGNAL = 1.8; EXPRESSED IN FETAL LIVER, SIGNAL =   2; EXPRESSED IN BRAIN, SIGNAL = 1.7; EXPRESSED IN BONE MARROW, SIGNAL = 1.7; EXPRESSED IN ADULT LIVER, SIGNAL = 1.9; EXPRESSED IN PLACENTA, SIGNAL = 1.6; EXPRESSED IN HEART, SIGNAL = 1.7
attgacaatgcaactggtcgcccaacacttctgaaaaagatataaaaggaaattaatgttgttttcatgactgctaacaaaacattcatcctgcagtccatgaatcaggagtaatttcaactctcaagtattatcatttaagaactacatttcataaggttatagctgccatagttagtgatttgtctgatgaatctgagaaacgcaaatggaaatggttctgaaaaagattcatcattctaaatcccatgaagaacattcatgattcatgggaggaggtcaaaatatcaatattgacaagaacttggaagaaggtgattcccccgctcatggatgactttgaggggttcaagacttcattgaaggaagccactgtagatgttatggaagtagcaaaagaactagacttacaagtggagcttgaggatgtgactga

SEQ ID NO: 5586 - DNA, 455 bp, Homo sapiens
  MAP TO AC000065.1; EXPRESSED IN HEART, SIGNAL = 2.1; EXPRESSED IN BRAIN, SIGNAL = 2.2; EXPRESSED IN PLACENTA, SIGNAL = 1.6; EXPRESSED IN LUNG, SIGNAL = 1.6; EXPRESSED IN HELA, SIGNAL = 1.8; EXPRESSED IN FETAL LIVER, SIGNAL = 1.7; EXPRESSED IN BONE MARROW, SIGNAL =   2; EXPRESSED IN ADULT LIVER, SIGNAL = 1.6
tgtcaaagtgaatcgagaggcttctaaacctgcattgaaataaacattcaaagatggcagatttaaaaaaatgtggatcagaaagacattccagaatcaaaagccaccagctgctacaagtgtgaaaatgaaacctctggagggactgttgcctcctgctccatgtggctgtggcatgtgatgcctatagcagctactgaactgatatttgtgcccaccacccagtctgggtagagcaggtgtctcactggcacagtgcagacgagcttgacatcagaaaaacttaccagaagtaggtctttgcctagttcatcgatatctgttacaaacttctcaattggttgggcagattttgaatgaaaagcctgcctgggaagggcaacatctctaggccagtcttcttctcctgggagtccaatcacgctacaaaagaaccacacatggacataagcatt

SEQ ID NO: 5587 - DNA, 480 bp, Homo sapiens
  MAP TO AC003665.1; EXPRESSED IN BONE MARROW, SIGNAL = 2.5; EXPRESSED IN PLACENTA, SIGNAL = 2.4; EXPRESSED IN LUNG, SIGNAL = 3.3; EXPRESSED IN HELA, SIGNAL = 2.7; EXPRESSED IN FETAL LIVER, SIGNAL = 2.5; EXPRESSED IN ADULT LIVER, SIGNAL = 2.9; EXPRESSED IN HEART, SIGNAL = 2.5; EXPRESSED IN BRAIN, SIGNAL =   3
ctgacagcagagctgaaacggtcgctgccttccaccgacacgagactccggccagaccagaggtcagtgccggatgggtgccggcctagaaccatctagttcactccctccacagagtacagagctggggctttgtccttccttcactgagtggcctcagagaagtggggcttgtctagaggacagagttgggcagagacagaggccttgggtttgggggcccctgcagatgggcagttcccctgagtttgatctggatcctcaggtacctggaggaggggaacatacaggccgctgaggcccagaagagaaggatcgagcagctgcagcgagacaggcgcaaagtcatggaggaaaacaacatcgtacaccaggctcgcttcttcaggtgcctcggcctcgccctccgccctgggtctccccatgagccctgcttggagcagggcaggtgtgggaggcagcaccttaggaccctagcct

SEQ ID NO: 5588 - DNA, 478 bp, Homo sapiens
  MAP TO AC006013.2; EXPRESSED IN PLACENTA, SIGNAL = 2.4; EXPRESSED IN HEART, SIGNAL = 2.3; EXPRESSED IN BONE MARROW, SIGNAL = 2.2; EXPRESSED IN ADULT LIVER, SIGNAL = 2.8; EXPRESSED IN LUNG, SIGNAL =   3; EXPRESSED IN HELA, SIGNAL = 2.3; EXPRESSED IN FETAL LIVER, SIGNAL = 2.5; EXPRESSED IN BRAIN, SIGNAL = 2.6
aaatgcagaacacctggaccgttcttagactatttgtttcttagtgattgatgtatcaatctagcagcaactcacatgtccccaggccagtcacacctgccttgaagctggaatggtggcgataccagctcaggctctggaaacccaagagagccctcccgtcctaccacctcccccaagcggtgcgatcagtgcacaagtggctgtctcacatgagctggtgggtgaccatcctcttggtgactacagagtgttctttaccagactattctcagcaataactgggttgcagcctgttcgccatggggctcccactgccactccagagtcagctgcgtgactcagcaccgggcttgccattggacgaacatgccactcactctcagaagccattacagcaagggctgcttctgctttctctgccttgcatgcgaagtcaagggtatctgctccatatggcactgcataatttacagca

SEQ ID NO: 5589 - DNA, 416 bp, Homo sapiens
  MAP TO AC005908.1; EXPRESSED IN LUNG, SIGNAL = 9.8; EXPRESSED IN BRAIN, SIGNAL = 9.4; EXPRESSED IN PLACENTA, SIGNAL = 8.2; EXPRESSED IN HEART, SIGNAL = 7.5; EXPRESSED IN FETAL LIVER, SIGNAL = 7.5; EXPRESSED IN BONE MARROW, SIGNAL = 8.6; EXPRESSED IN ADULT LIVER, SIGNAL = 7.7; EXPRESSED IN HELA, SIGNAL = 8.5
gtggtcctacctaaatacgggagtccatataacaacttgtaaggggacaatttccagttttttgtgggggctgtcttaatcctaaggagtgctattgggagacatttggtcaaaggcattttagtttctaagattagtttagtaatatactttctgagactttgatttattctttttactttttcaaaggaagagggatgccaaggggtgtggtaatcccatttaatgtgtaaactttccgtaattccccttagtgctcttgaggttaaagtcgctcccattgtttgaattaataccttctaccaggccaaatttaggtataatttgttttaagattattttgaccgcattcagggcagtggcagttgggagggagaaggcctccatccagctgaagaggtggcctaccattacca

SEQ ID NO: 5590 - DNA, 443 bp, Homo sapiens
  MAP TO AC004447.1; EXPRESSED IN LUNG, SIGNAL = 6.7; EXPRESSED IN BRAIN, SIGNAL = 6.9; EXPRESSED IN BONE MARROW, SIGNAL = 6.6; EXPRESSED IN PLACENTA, SIGNAL = 6.9; EXPRESSED IN HELA, SIGNAL = 6.9; EXPRESSED IN HEART, SIGNAL = 6.4; EXPRESSED IN FETAL LIVER, SIGNAL = 6.6; EXPRESSED IN ADULT LIVER, SIGNAL = 6.7
gctcacattttggagtggtgcacaaaactcttttggattaaaatgtctccacctgtctcttctaactctcacagcccaccaaccaagaactgtgctagaggcaactgtgccgacaggcgggcactcaccttttggctcctggatgagacacactctcttgggagctggaatcatgccaaccttcaatgacttgctgctgatcctcttccgagggaagcaggtacctgaggaggcctgtgacaaggcaggtgctccagccaggtcgtcctcggcagcctcgccgggaaggccgtcggcaggggtgctgccctcagacttgcccgcccctccaggagcgggggcctcctctcccccatcctcatcgtcctcgtcctcctcctcaggcatcacctctgggctctccagctcagcctcccgcggagggggctcgtcttcaaactctg

SEQ ID NO: 5591 - DNA, 473 bp, Homo sapiens
  MAP TO AC004514.1; EXPRESSED IN ADULT LIVER, SIGNAL = 3.2; EXPRESSED IN PLACENTA, SIGNAL = 3.6; EXPRESSED IN LUNG, SIGNAL = 4.1; EXPRESSED IN HEART, SIGNAL = 3.4; EXPRESSED IN BRAIN, SIGNAL = 3.2; EXPRESSED IN HELA, SIGNAL = 3.5; EXPRESSED IN FETAL LIVER, SIGNAL = 3.1; EXPRESSED IN BONE MARROW, SIGNAL = 3.3
aaagagtgtttctgcagggcttattagaacacactgattgtttttcctcgcaacatggatgactaagaatgatatttcactaaaacacctggattgctagggttttgttgctaagttcttaaattggtagagaaaacaagctaagcatcaggatcatggtgattaatgcttccctcttgggcaatcaagctccatgcattccgcaacaccttggttttgctggaatgcattgaatgattttaaaaaggaggcagacactagatttaagtaaaaaaaaaaaaaaaaaaaaaaaaaaatcagtgggctaattgggtccaggaccaccttgtgctggggttcatatttggagcattttacatggggatttttgactctgtcctgttgtgtgatctggccagcgtaataatctgcagaacagtgattagattgctcagaataataattaatggcctaaaacaaaacatctgtgtccc

SEQ ID NO: 5592 - DNA, 573 bp, Homo sapiens
  MAP TO AC004217.1; EXPRESSED IN LUNG, SIGNAL =   2; EXPRESSED IN HEART, SIGNAL = 2.4; EXPRESSED IN FETAL LIVER, SIGNAL =   3; EXPRESSED IN BRAIN, SIGNAL = 2.5; EXPRESSED IN HELA, SIGNAL = 2.4; EXPRESSED IN BONE MARROW, SIGNAL = 2.4; EXPRESSED IN PLACENTA, SIGNAL = 2.1; EXPRESSED IN ADULT LIVER, SIGNAL = 2.3
acaccctctgcacctacaccatctgcacctacatccactgcacctccaccttctgcacctacaccatctgcacctacatccactgcacctccaccttctgcacctacatccactgcacctacaccctctgcacctacaccatctgcacctacaccatctgcacctacatccactgcatctataccctctgcacctacaccatctgcacctagatccactgcacctacaccctctgtagttaccacttgctgcacctacaccctctgcacctacatccactgtactcacaccctttgcacctacatccaatgcacctacttcctctgcacctacaccatctgcacctacatccactgtacttacaccctttgcacctacgtccaatgcacctacatccactgcacctacaccctctgcacctatatctactgcacctacaccttgtgtgcctacatcctctgcacctacaccatctgcatctacatccactgcacctacaccctctgcacctacatcctctgcacccacatccactccacctacaccttctgtacttaccacttgctgcgccta

SEQ ID NO: 5593 - DNA, 478 bp, Homo sapiens
  MAP TO AC004605.1; EXPRESSED IN LUNG, SIGNAL = 2.6; EXPRESSED IN HEART, SIGNAL = 2.1; EXPRESSED IN FETAL LIVER, SIGNAL = 2.4; EXPRESSED IN BRAIN, SIGNAL = 2.2; EXPRESSED IN HELA, SIGNAL = 2.4; EXPRESSED IN BONE MARROW, SIGNAL = 2.1; EXPRESSED IN PLACENTA, SIGNAL = 2.5; EXPRESSED IN ADULT LIVER, SIGNAL = 2.7
actggcacataattggctcccactcgatatttaatgaaagtttctcttaagtttttttttttaatttttggtctctatattttaaaaatcaagcccctttctttcattctctttggaagatgtgtgtgaaaataagtgccactttgaatgtaaaaacaggtcatcgtgagatcaaaagttaagtcttcctggcctggctattagaaactgctatttaaaatttgcttaatttggaacttattttattttatgaagataaatgatggagtaaaaggaataaaccagtaaataactgtcttgaaattgtagagagtgaaagccgcggtggcttcattgaaggctattaagagcaaggtcacaggcagcaaatcagagaaatatttccacctaattgatggaggtgagttcatgttattaaagacctgaaaagcttttatgcccagaattattcttcataccatctcctgccacagtgtgt

SEQ ID NO: 5594 - DNA, 440 bp, Homo sapiens
  MAP TO AC005137.1; EXPRESSED IN HEART, SIGNAL =   2; EXPRESSED IN BRAIN, SIGNAL = 1.9; EXPRESSED IN BONE MARROW, SIGNAL = 1.9; EXPRESSED IN PLACENTA, SIGNAL = 1.8; EXPRESSED IN LUNG, SIGNAL = 2.1; EXPRESSED IN HELA, SIGNAL = 2.2; EXPRESSED IN FETAL LIVER, SIGNAL =   2; EXPRESSED IN ADULT LIVER, SIGNAL =   2
cggactctgtttgctcacctggagcccgacgctgtctgcctgaccgcctttgatgaggtgggagatgaagagcccacagccaaactccaggccaccacgcacactcaggccgaggccttcggggtgcagacggtccagacgcacctccttcagcttcctgccacacaggagaggtcggtgatggtgcagcttggctgccagcactgccccgcccagggtgatctctccaccccctgcctccagcctggtggcttcctctgcacctggagcgccggggggtcagctgatcatattccacctggtgcttcagtgggatcagcggccgaatggcatcaaacagaggcagacggctgggttcattgatgaccagcttcaggtctcccacgagcacggccacgtccatggtcctgtggagatgccgggaatgcctggagcctcac

SEQ ID NO: 5595 - DNA, 491 bp, Homo sapiens
  MAP TO AC005703.1; EXPRESSED IN BRAIN, SIGNAL =  11; EXPRESSED IN ADULT LIVER, SIGNAL = 8.3; EXPRESSED IN BONE MARROW, SIGNAL = 7.8; EXPRESSED IN PLACENTA, SIGNAL =  10; EXPRESSED IN LUNG, SIGNAL = 8.1; EXPRESSED IN HELA, SIGNAL = 7.9; EXPRESSED IN FETAL LIVER, SIGNAL = 9.1; EXPRESSED IN HEART, SIGNAL =  12
tccctgctcacaaagtcctctcttgtctcagaagaaaaggtagttgataaactttttcatgctgaggtgttaggcacaaaaaatgtgcccctttttgaatcacttttgtttttaaaaaggaggccagtgctcaacaccaaagcatgaagggaattgttgagctttcctgtaatctgtccccaaacgtccttggccacctccattgtctaagggcagtacctgcagcccctcatttcccagtgacaacaggtgggtctgctctgccacagtgtgtgggcgggaccagcaccagacgctgagaagatgaccacttactactcttcttttccatttaaacagcagcagcagcagcagcagcagcagcagcagcagcaacagcaaactcatgactatcaataggttgtgtgaggaattagatcaatgctttgggttgaaaattagagaaactaaatcttgccagtctcagcagcccccaacctgagcccttggtg

SEQ ID NO: 5596 - DNA, 477 bp, Homo sapiens
  MAP TO AC006203.1; EXPRESSED IN ADULT LIVER, SIGNAL = 2.4; EXPRESSED IN PLACENTA, SIGNAL = 2.1; EXPRESSED IN LUNG, SIGNAL = 1.6; EXPRESSED IN FETAL LIVER, SIGNAL = 3.1; EXPRESSED IN HELA, SIGNAL = 2.1; EXPRESSED IN HEART, SIGNAL = 2.5; EXPRESSED IN BRAIN, SIGNAL = 2.4; EXPRESSED IN BONE MARROW, SIGNAL = 2.3
tctgcagtgactgatatcttatcttctttacccaaagtgttgaaactgacattaagaccaagaactacagaacaagacaaagatttcccttctttcccgtttacctttttcccacttaatgaattggagaatcttcccaccagccatcaatattgggcatccttttgaacgttgacatattttgaatcttgaacctcagtggcgaatcaattttcctgtcattgcttttcagcccctgagttttgaaagcaagaaaagctacaccttaaaggtggagggagccaatcctcacctagagatgcgttttctgaacttgggcccatttcaggacacaacaacagtgcacatcagtgtggaagacgtggacgagccccctgtgtttgaacctggcttttactttgtggaggtgcctgaggatgtggcgattggaacaaccatacagatcatttctgccaaggacccagatgtgaccaacaa

SEQ ID NO: 5597 - DNA, 462 bp, Homo sapiens
  MAP TO AC004587.1; EXPRESSED IN BRAIN, SIGNAL = 1.8; EXPRESSED IN ADULT LIVER, SIGNAL = 2.1; EXPRESSED IN BONE MARROW, SIGNAL = 2.4; EXPRESSED IN PLACENTA, SIGNAL = 4.7; EXPRESSED IN LUNG, SIGNAL = 5.2; EXPRESSED IN HELA, SIGNAL = 2.4; EXPRESSED IN HEART, SIGNAL = 1.9; EXPRESSED IN FETAL LIVER, SIGNAL = 2.3
ggagagggtgtgacctgtgacataagcccctttgctaacatgtggctaggtgtcttgttggcttgttgcattaacctttatcataacatagcaatagcctgacacagaagactgcacctgatagttgtcttagcacatctcaaaattaaatgtttatgaatagactactttttcaagacaatgctatttcctgagacgtagtactttttctgctaactccattctttgatgcatactttctgtcagtcaatgctgaggatcctcctatggttgtggtccgaaaatttgtccacctgctggaccaaagtgaccaggattttcaggaggagcttgaccttatgaagatgcgggaagaggttatcaccctcattcgttctaaccagcagctggagaatgacctcaatctcatggatatcaaaattggactgctagtgaaaaataagattacgttgcaggtatggc

SEQ ID NO: 5598 - DNA, 462 bp, Homo sapiens
  MAP TO AC003669.1; EXPRESSED IN PLACENTA, SIGNAL = 1.4; EXPRESSED IN HEART, SIGNAL = 1.5; EXPRESSED IN FETAL LIVER, SIGNAL = 1.4; EXPRESSED IN BRAIN, SIGNAL = 1.7; EXPRESSED IN LUNG, SIGNAL = 1.7; EXPRESSED IN BONE MARROW, SIGNAL = 1.5; EXPRESSED IN ADULT LIVER, SIGNAL = 1.4
cttgccattcacccactttccagcaagcacagatgtacaggtatcagggaacatggggaagaaaccccaggctccagaagcaatggcacaggctcaccttccaagctctgctcatttcgctgggactcatttcccagggatccctcactctgacccatagccttcctgacctgttgtgtgaaactcactccacaaaccctgtactttctgataacagctctcttccttttttatctgggccacctcttggtgtggtgcagggatcctgatgtgggaggtgttcagcctggggaagcagccctatgacttgtatgacaactcccaggtggttctgaaggtctcccagggccacaggctttaccggccccacctggcatcggacaccatctaccagatcatgtacagctgctggcacgaggcaagtgtattctctgggtgggctggaaggggtctcaggcacat

SEQ ID NO: 5599 - DNA, 431 bp, Homo sapiens
  MAP TO AC004945.1; EXPRESSED IN LUNG, SIGNAL =   3; EXPRESSED IN HEART, SIGNAL = 2.6; EXPRESSED IN FETAL LIVER, SIGNAL = 2.2; EXPRESSED IN BRAIN, SIGNAL = 2.6; EXPRESSED IN HELA, SIGNAL = 2.5; EXPRESSED IN BONE MARROW, SIGNAL = 2.3; EXPRESSED IN PLACENTA, SIGNAL = 2.5; EXPRESSED IN ADULT LIVER, SIGNAL = 2.6
aaagaatagagatttggttgcattgtaaattgtcagacacatttagaaaagaatctcttcaaaggttgggaggctgaaccaggaaactttgagtttatgtcaataaacaggttctgtgattcatagctaatgagttcctgtaaaaaggcaatataatcattttttcatcttccagggtctgaattttctacttttgagttacataaggatctcctatattcgtctttatcttcccttgttcaacaaatatttattgagtgccaactatttgtaaagctctgcgtaaaaggctgtgaagaaaacagaaatgaaccttatttagactttttaataaagatgccccaaagaaagctgaaaaggaagttaaaatttaaatcagttaatgcaattttccagaagtgtctattaaaggcaggactgaggtgaggatt

SEQ ID NO: 5600 - DNA, 463 bp, Homo sapiens
  MAP TO AC005912.1; EXPRESSED IN PLACENTA, SIGNAL =   2; EXPRESSED IN LUNG, SIGNAL = 1.8; EXPRESSED IN FETAL LIVER, SIGNAL = 2.1; EXPRESSED IN BRAIN, SIGNAL =   2; EXPRESSED IN BONE MARROW, SIGNAL = 1.9; EXPRESSED IN ADULT LIVER, SIGNAL = 2.1; EXPRESSED IN HELA, SIGNAL =   2; EXPRESSED IN HEART, SIGNAL =   3
gatcctggcagagaggactgctgggaagctctggacacctggtccctgttcttctgccctcactgtgtatgtgctattagaattcagggtgacgagtgagtttctcttcacctgggactcagtttccccatatgcacttgagtcttctgccccaaactcagcaagatgtactgaggtgggtgctcctctgcccacgggtatcaaaaaggaggaaatccacagcaaaccctagctgaacacctcctagggacgggaggaccctggccctggaggagctcttcatcaagctggcacgtcaaaacaagttcacacaaaaaggtcatttcccaaacaagagcactgccaaggaagaacaagagcaccatggactggcagtcagggaggacacaacgggagagagccttgagctggcactgagagctgtgcacgtgctcaagagtctagaggtgaatgcaagggcagt

SEQ ID NO: 5601 - DNA, 481 bp, Homo sapiens
  MAP TO AC005042.1; EXPRESSED IN PLACENTA, SIGNAL = 1.2; EXPRESSED IN HELA, SIGNAL = 2.9; EXPRESSED IN BRAIN, SIGNAL = 2.3; EXPRESSED IN ADULT LIVER, SIGNAL = 1.1; EXPRESSED IN HEART, SIGNAL = 1.4; EXPRESSED IN LUNG, SIGNAL = 1.3; EXPRESSED IN FETAL LIVER, SIGNAL = 1.2; EXPRESSED IN BONE MARROW, SIGNAL = 0.91
aggacaggaaactcagcagcctgcctgagaatgcagcttaaaatccttagagtccaatagtaaacgcatagtgtgcaccagaaacagcttttaaccttaaactgcaaatattgaatattgctttaaaaatatgaagcaggaagcccacattaattttcctaacacatgtatttttaaaaaattgcttttatttatttgccttttcattttgtcaacagcatcaacagctgtattatagtcaagatgactccaacagaaagaactttgatgcatacagattgtatttgcagtctcctcatagctatgaagatccttattttgatgaccgagttcactttccagcttctactgattactcaacacagtatggactgaaatcgaccacaaattatgtagacttttattccactaaacgaccttcttatagagcagaacagtacccagggtccccagactcatgggtgtagcatcaagatgccca

SEQ ID NO: 5602 - DNA, 462 bp, Homo sapiens
  MAP TO AC004525.1; EXPRESSED IN PLACENTA, SIGNAL = 2.9; EXPRESSED IN HEART, SIGNAL = 1.9; EXPRESSED IN ADULT LIVER, SIGNAL = 2.3; EXPRESSED IN LUNG, SIGNAL =   2; EXPRESSED IN FETAL LIVER, SIGNAL = 2.3; EXPRESSED IN BRAIN, SIGNAL = 1.8; EXPRESSED IN BONE MARROW, SIGNAL = 2.7; EXPRESSED IN HELA, SIGNAL = 1.9
gcccacagccctacctttacagaggaggagcggcatgcagagataactccccttctctgatgtgaggggtggggggccaggaagcaaagggacttgcctagggcagagccaggtgagaagccaggtctctagctcctgggatttgctatccagccccagggcttgcctcccaggctcctggctccagggactgggcctctgctggtcacccaccctgttccccagaggtcacagaaaaacgtcaaagcatgcccactcacatctgccgggtcgttttcactccaaatgttgactgcataggtgagatgattatacaggtaattgtcagggggatacgggttgctccaggtcagcagcagagtgtcggagacattggtgtgaactgtcaggtttcctggggccctgggtttcactgcgggagaagcggcctctatgtgaggatctatgcagtgactcccccat

SEQ ID NO: 5603 - DNA, 469 bp, Homo sapiens
  MAP TO AC003042.1; EXPRESSED IN PLACENTA, SIGNAL = 1.1; EXPRESSED IN LUNG, SIGNAL = 1.1; EXPRESSED IN HEART, SIGNAL = 1.3; EXPRESSED IN FETAL LIVER, SIGNAL = 1.2; EXPRESSED IN BONE MARROW, SIGNAL = 1.1; EXPRESSED IN ADULT LIVER, SIGNAL = 1.1; EXPRESSED IN BRAIN, SIGNAL = 1.2
atgggccaagactaccagacattaggggacacaggggtggccacggaaacccaggtatccgtgtctgtggcccagtgtgcctggtgctgcccagatggagcggccccaggtggcagggtagctacagcagcagcaaatctccgcactcaggtactaatgcagtaagtcctatcaagacacagtgaaatggggcataatttttgcggaaaacaatgtgggtgatgtatgcccacgactggcacacaataaaactgtagtagaacgcagaaaaaatgcacccagtcaatacaataaaatcagcacaaatacactcgtgtaaggcaaataaatctcccaatccaaatattttacagcatgcgtacaaggaggaagtggagaagtatgtgtctgcaccattcaagttttcctcagaaatctctaggggaaataaacaaaacgaccaatgagcccctcctgaccctccaaataa

SEQ ID NO: 5604 - DNA, 479 bp, Homo sapiens
  MAP TO AC005180.1; EXPRESSED IN LUNG, SIGNAL = 5.5; EXPRESSED IN FETAL LIVER, SIGNAL = 5.1; EXPRESSED IN BONE MARROW, SIGNAL = 5.2; EXPRESSED IN PLACENTA, SIGNAL =   5; EXPRESSED IN HELA, SIGNAL = 5.3; EXPRESSED IN HEART, SIGNAL =   5; EXPRESSED IN BRAIN, SIGNAL = 5.6; EXPRESSED IN ADULT LIVER, SIGNAL = 4.8
gtaccctccccagagaatccaaggatggagagccaagcccacgatcagctgcccacaccatgcccaggaggaagaaaggctactgcgagtgctgtcaggaggccttcgaggagctccatgtggtgagccccttccccattaagcagctgctcccagagtgccctgagggagcctgctcactggggatgagtccttcctatgcgatctctatgctgctatggctgtcctccagggccagagcatgggctgggaggtcagcttccgtgtccccctccccccaggcctcatctaatgccctgtgctcctctcccccgccggcagcatcttcagagtgcccagcaccggagctttgccctggaagcccatctatatgcagaagtggacaggatcattgctcagctcagccacagctttgcagacatccctttccaggctggcctccccaggtgagtgccacgctggcaggcacaactgtgtct

SEQ ID NO: 5605 - DNA, 492 bp, Homo sapiens
  MAP TO AC004952.1; EXPRESSED IN PLACENTA, SIGNAL = 3.3; EXPRESSED IN LUNG, SIGNAL = 3.5; EXPRESSED IN HEART, SIGNAL = 3.3; EXPRESSED IN BRAIN, SIGNAL = 3.6; EXPRESSED IN ADULT LIVER, SIGNAL = 3.9; EXPRESSED IN FETAL LIVER, SIGNAL = 3.1; EXPRESSED IN BONE MARROW, SIGNAL = 3.1; EXPRESSED IN HELA, SIGNAL = 3.4
ttcctcccctctgaatctccagggctctgggaaaaagcatgcattgctccaacccacctaacatttatttagcgccactgtgtaccagtctgaggccaggcacagggagaacaaatgagccaaacccagtcctgcccatccagaaactcccagctactcaaaaggtgttgccttccgcctgggcgggccgggaaccactgtgtgaggggacctgagctggcgctctcaaaacacgtgtccaaggaggcctgcccaaaggaaacccgccttcctcctaccggcctggtgggtgcgcccctgctgggggtcactcttaggtccatctccggcggcgttgaaggctgatatgctgaccaggtacttggtatggctggtcaggttcttcagcctcaccacgggctcggggaggaagaggaccttcattttctccgtttcgttctggctgtctgcctcccagtagtaaatctgttaggaacagcaagaggttggggt

SEQ ID NO: 5606 - DNA, 469 bp, Homo sapiens
  MAP TO AC005940.3; EXPRESSED IN PLACENTA, SIGNAL = 1.7; EXPRESSED IN LUNG, SIGNAL =   2; EXPRESSED IN HEART, SIGNAL = 1.8; EXPRESSED IN BRAIN, SIGNAL = 2.2; EXPRESSED IN BONE MARROW, SIGNAL = 1.8; EXPRESSED IN ADULT LIVER, SIGNAL =   2; EXPRESSED IN HELA, SIGNAL =   2; EXPRESSED IN FETAL LIVER, SIGNAL = 1.9
gtttgtcatggagagggtgctggacttggagtccaaagactcctaagattccagtcctggctctgctgctcacagcctgggctcagtgtctgcacctgcgtggagcagatggccctgacgtcctcctcccaggtcgtcaccagacgaaagtgtgcatgggctgggatgtcccggccggcgtccctggctgtgcaaggacgggtgtggggtcctggccagcggtgcccaggccagcgctcagctcaagctccccttctctgcagtgcactgccagaagatcgtccacagggacatcaagccatccaacctgctcctgggggatgatgggcacgtgaagatcgccgactttggcgtcagcaaccagtttgaggggaacgacgctcagctgtccagcacggcgggaaccccagcattcatggcccccgaggccatttctgattccggccagagcttcagtgggaaggtgact

SEQ ID NO: 5607 - DNA, 351 bp, Homo sapiens
  MAP TO AC004222.1; EXPRESSED IN PLACENTA, SIGNAL =  11; EXPRESSED IN LUNG, SIGNAL =  12; EXPRESSED IN HEART, SIGNAL = 9.1; EXPRESSED IN BRAIN, SIGNAL =  10; EXPRESSED IN ADULT LIVER, SIGNAL = 8.8; EXPRESSED IN FETAL LIVER, SIGNAL = 9.3; EXPRESSED IN BONE MARROW, SIGNAL =  11; EXPRESSED IN HELA, SIGNAL =  10
catttctctggaggctgaggtaggaggatcacctaagcctgggaggtcaaagctgctgtgaggggcaaaagaacttgtctcaaaaacaaaaaaacctcatttccattaactttttatttttatgtagacaaaaaacaaaacttctaatattcatattacttcagtagtcccatgtggatttacacactaacctggtagaaatgcgactaaagactgcattgaagttgttgcagctgagagaaaataaaaccccagaggcagaattccgaagttcagctgcatgctggtttccttcacgacaggtgtgaagaaaatggcagatttctggcagcaactgtttgaccagcatcg

SEQ ID NO: 5608 - DNA, 483 bp, Homo sapiens
  MAP TO AC006208.3; EXPRESSED IN LUNG, SIGNAL = 4.4; EXPRESSED IN ADULT LIVER, SIGNAL = 3.6; EXPRESSED IN PLACENTA, SIGNAL = 3.5; EXPRESSED IN HEART, SIGNAL = 3.9; EXPRESSED IN FETAL LIVER, SIGNAL = 3.9; EXPRESSED IN BRAIN, SIGNAL = 4.2; EXPRESSED IN BONE MARROW, SIGNAL = 4.2; EXPRESSED IN HELA, SIGNAL = 4.1
aggaggccaagaaccagctgattatcagtaatgccaagatgcgccaggagctgaaggacattgaggaccagatcctgtaccggctcagctcctccgagggcaaccctgtagatgacatggaactcatcaaggtgctggaagcctccaagatgaaggctgctgagatccaggtcagctgctgcctgcccacccacctgccccgggagtgccccgggcctgccccccacctctccctgcctgccctaggcctgccccccaaaccccctaccttctgctctttgacccctccccccacccactacacccacaggccaaagtcaggattgcagagcagacggagaaggacattgacctgacgcgcatggagtacatacccgtggccatccgcacccagatcctcttcttctgtgtgtccgacctggccaacgtggaccccatgtaccagtactcccttgagtggtttctcaacatcttcctctcggg

SEQ ID NO: 5609 - DNA, 479 bp, Homo sapiens
  MAP TO AC005726.1; EXPRESSED IN FETAL LIVER, SIGNAL = 1.8; EXPRESSED IN BRAIN, SIGNAL = 1.8; EXPRESSED IN BONE MARROW, SIGNAL = 1.6; EXPRESSED IN ADULT LIVER, SIGNAL = 1.6; EXPRESSED IN LUNG, SIGNAL = 1.8; EXPRESSED IN PLACENTA, SIGNAL = 1.7; EXPRESSED IN HELA, SIGNAL = 1.6; EXPRESSED IN HEART, SIGNAL = 1.7
ggtgggcacacagtaggtagatcagctccatctgccccccttgcatcttgttgatggaactggtttcctgtttcctagggcagtaggttgcaaacccacctaagtaattcacgctgggctcctacaactgggtgccaagcaaaagcccctttgacctcctagccctcagtcctcaggaggagcagggggcgatagcctcacttccagggcaggggcagtgaggaagttatgctggatcctaaggatgcccaaccccggcccagacagtccctcctctgccccctggagttatctgtgctcagaacaccaagtccttaccttactggggacgaggatgggcagaggcagcaggagaatgggcacgaagaacacgatcaggtaggagcgataggcccacagggcctgccagcaggtggccatggtgtggagcagcaagggctgctacagccactgcctccaggagctgggtaacagaagga

SEQ ID NO: 5610 - DNA, 466 bp, Homo sapiens
  MAP TO AC005041.2; EXPRESSED IN PLACENTA, SIGNAL = 1.5; EXPRESSED IN LUNG, SIGNAL = 1.6; EXPRESSED IN HEART, SIGNAL = 1.9; EXPRESSED IN BRAIN, SIGNAL = 2.4; EXPRESSED IN HELA, SIGNAL = 1.9; EXPRESSED IN FETAL LIVER, SIGNAL = 1.5; EXPRESSED IN BONE MARROW, SIGNAL = 1.6; EXPRESSED IN ADULT LIVER, SIGNAL = 1.3
ctctggtgtgtccccgtaacccccaaatcacctaactcctctctcctcttttcctgctcccccatgggctatcccgagcacagaagaacagcagcgaggtagagacccactctggccgggggttaccaggctggtgggagttggagctaagggagcagggtggagggggaagccaggactggagatgggtgatggggggatgaggaaaggggaagagtaggaatggagcccaattttcaaccctttccacttggggctgatgagattttttatggtccccacaggagccatccctgggcaggctccagggtctgtgccaggcccagggctggtgaaggactcaccactgctgcttcagcagatctctgccatgaggctgcacatctcccagctccagcatgagaacagcatcctcaaggtgagggagccacggggaggactgggatgggagatggagcatatttgc

SEQ ID NO: 5611 - DNA, 461 bp, Homo sapiens
  MAP TO AB019440.1; EXPRESSED IN PLACENTA, SIGNAL = 2.8; EXPRESSED IN HEART, SIGNAL = 3.1; EXPRESSED IN FETAL LIVER, SIGNAL = 3.2; EXPRESSED IN LUNG, SIGNAL = 2.9; EXPRESSED IN HELA, SIGNAL = 3.4; EXPRESSED IN BRAIN, SIGNAL = 3.8; EXPRESSED IN BONE MARROW, SIGNAL = 3.6; EXPRESSED IN ADULT LIVER, SIGNAL = 3.1
gttgtttggcagccatagtggctacagcaagcctagtccaagaaactgataaattaactctaggccagaatttaacccttacagttcctcatgctgtagagacttgactacgaagtgcttcaggtaaatggatgtcaaatgctcgtattttacaatatcagagtttactgttggatcagccttgtttgactttctctcccacaaggtgtttaaatcctgctactttactcccagatccagattctaatactcctgtccatgactgtcaggagctgttagaagctaccgaaactggcaggccagatcttcaagatgtgctcctgagaaaggcggacgccaccgtgttcaccgacggcagcagttttctcgaacaggggatacgcaaagctggtgcagctgttaccacagagacagatgtgttgtgggttcaggctttaccggcaagcacctcagcacaaaaa

SEQ ID NO: 5612 - DNA, 476 bp, Homo sapiens
  MAP TO AC003098.1; EXPRESSED IN PLACENTA, SIGNAL = 3.5; EXPRESSED IN LUNG, SIGNAL = 3.5; EXPRESSED IN HELA, SIGNAL = 3.4; EXPRESSED IN FETAL LIVER, SIGNAL = 3.2; EXPRESSED IN BONE MARROW, SIGNAL = 3.6; EXPRESSED IN ADULT LIVER, SIGNAL = 3.8; EXPRESSED IN HEART, SIGNAL = 3.4; EXPRESSED IN BRAIN, SIGNAL = 3.8
cagccaaagtgcagtcaaacgcgaggaccctggggctgccatggtgtgaatgagttgcacatcctgtgacacacggggccacttgacagccagccaggtgagcagagagagacctacagctctgtcgttcaccccagaagatgggaaacaagggagtttctaagaagagacctgttgtgggcctgttttccagagggacagtccagtcagagctgcctcccatcttttcctggtgggaggtcccttaccattcttttgagccaaagcctggtcaatgaagtcggcagccctttcaaagtaagcgctgaggttgaactcctgtgtgtcgttggccttgatgcccaggtatgtgatgccggagtccttgtagaagttggcattggtgttgacgtgcatgaaggacctgccctcagccgcgttcagcacatgggtgatgcctagtttctgcagcttggggatgtcctgagccacagacc

SEQ ID NO: 5613 - DNA, 477 bp, Homo sapiens
  MAP TO AC005088.2; EXPRESSED IN PLACENTA, SIGNAL = 4.6; EXPRESSED IN ADULT LIVER, SIGNAL = 4.8; EXPRESSED IN LUNG, SIGNAL = 2.3; EXPRESSED IN HEART, SIGNAL = 3.5; EXPRESSED IN FETAL LIVER, SIGNAL = 6.4; EXPRESSED IN BRAIN, SIGNAL = 3.9; EXPRESSED IN BONE MARROW, SIGNAL = 5.9; EXPRESSED IN HELA, SIGNAL =   4
ccacacacacacacacattctctctccctcacacacacattctctcacacacacattatctcacacacacacacacacacacatttgcagtgattaatctttgattacagcaaagcaatttaactagaggctttgttttttcccgtcttagtaatatatatttagactgtttgtatgacatacattttgtcttaatgcacagggacgcattgataagtgttcgtacacacagctggcttggtaataaggttattgaaggtaatttgaaagcatcatttctaaatcagtatggatctgcagaaaagccggaacaaggcgagcctgtgcccctgaagcagggccatctgtgtcacccagtgtcccttcagcaatctggccagactgagttcactaccaaaatcgaattgtaatttaagcagggtttttaatttttaatatcttcaagctctgcttttgatatgcttatttccttaagag

SEQ ID NO: 5614 - DNA, 457 bp, Homo sapiens
  MAP TO AC005922.1; EXPRESSED IN PLACENTA, SIGNAL =  23; EXPRESSED IN HEART, SIGNAL =  21; EXPRESSED IN LUNG, SIGNAL =  26; EXPRESSED IN FETAL LIVER, SIGNAL =  20; EXPRESSED IN BRAIN, SIGNAL =  27; EXPRESSED IN BONE MARROW, SIGNAL =  23; EXPRESSED IN ADULT LIVER, SIGNAL =  21; EXPRESSED IN HELA, SIGNAL =  22
ctacatggcagaggctgaggcggtgtgtgaccgagtggccatcatggtgtcaggaaggctgaggtgagtgcctgtccaagccggcgctcagcccctaggttgtgtgctgtgagcaaagtttatttccctgcaccaggctacccatcgtgaggagctagcatggttgcttccaactctatgtggccttactctggcctccagaggctgaacatcacaagccatacatttttctcttttcttgcttgactttatccttctgttaccttcagatgtattggttccatccaacacctgaaaagcaaatttggcaaagactacctgctggagatgaagctgaagaacctggcacaaatggagcccctccatgcagagatcctgaggcttttcccccaggctgctcagcaggaaaggtagacacaggtgttttgttttatcacagtccttggtttttgtttcc

SEQ ID NO: 5615 - DNA, 466 bp, Homo sapiens
  MAP TO AC005058.1; EXPRESSED IN LUNG, SIGNAL = 0.91; EXPRESSED IN FETAL LIVER, SIGNAL = 0.96; EXPRESSED IN BONE MARROW, SIGNAL = 0.67; EXPRESSED IN PLACENTA, SIGNAL = 0.96; EXPRESSED IN HEART, SIGNAL = 1.7; EXPRESSED IN BRAIN, SIGNAL = 1.2; EXPRESSED IN ADULT LIVER, SIGNAL = 2.2
tctgatgcgaaattcttccctaaaataatagtattcagttcacttgcttgaagagatttgaatatatgtaattttgaatattttaccttcagttactaaaaatatttttgtcactttcagcatatgaaacactctcagatgctaatagacgaaaagagtatgatacacttggacacagtgcttttactagtggtaaaggacaaagaggtagtggaagttcttttgagcagtcatttaacttcaattttgatgacttatttaaagactttggcttttttggtcaaaaccaaaacactggatccaagaagcgttttgaaaatcatttccagacacgccaggatggtggttccagtagacaaaggcatcatttccaagaattttcttttggaggtggattatttgatgacatgtttgaagatatggagaaaatgttttcttttagtggttttgactctaccaatcagca

SEQ ID NO: 5616 - DNA, 496 bp, Homo sapiens
  MAP TO AC005230.1; EXPRESSED IN PLACENTA, SIGNAL = 1.8; EXPRESSED IN HEART, SIGNAL = 2.1; EXPRESSED IN ADULT LIVER, SIGNAL =   2; EXPRESSED IN LUNG, SIGNAL = 2.3; EXPRESSED IN FETAL LIVER, SIGNAL = 2.1; EXPRESSED IN BRAIN, SIGNAL = 2.2; EXPRESSED IN BONE MARROW, SIGNAL =   2; EXPRESSED IN HELA, SIGNAL = 2.1
gacttcctctggataccccctgaaggacctgcctgaggctcttcttgaggaggtatcactctttgaaaaattatgtccacaatagtttgcttggtttgtttctttcattcatcatagatttgcttgttgtatgcagataatgcagcaagaacattcctctctattaatgaaaaccttttggtgttatggtccatgttttcaaactttttaaggagcttgttgagctccttaaaaagcttctgctaaagcttctgctaaaacccttcactgtgaattttcttggggtttcttctttttcttctctagctgtttccctttctctggcctgttcttcagctatgtgttcctgttccagttccaacaacccctcattagtcagttcctcaggaaccacctctaggtgctcatcaatgtcatccttgtccacaccatggttaaagttgcttgccatcccaaccacagccatgttgatttttgcaatctcttcatccttggc

SEQ ID NO: 5617 - DNA, 465 bp, Homo sapiens
  MAP TO AC000001.1; EXPRESSED IN BONE MARROW, SIGNAL = 1.4; EXPRESSED IN PLACENTA, SIGNAL = 1.1; EXPRESSED IN LUNG, SIGNAL = 1.3; EXPRESSED IN HEART, SIGNAL = 1.3; EXPRESSED IN FETAL LIVER, SIGNAL = 1.2; EXPRESSED IN BRAIN, SIGNAL = 1.3; EXPRESSED IN ADULT LIVER, SIGNAL = 0.92
taagtccaagccacagaggggagagcaatttcccacctgtgggagggctttccctaaactaaattttctacttcttaaccatctatcccagagcctcttcaaacaccaaagaaaacgacaacaaaacaaacctaaaaacaaacagaaacacagaaaaagaacaaagacttaacaaatgaattggaggaaaagaaaattcacctacaactctaaattagatttccagatgcatgggcacggacaggcagccgcgtctcggggacgcccggcattaccgccgtttggggaggatgaggtttctcagcatgtcgaaggagttgccgtccgggtgcacagtcacaacctcgccgccctcctggtgaacctggaggaagccagaatcgtccaggccaacgatggacacctttggtccctctgcgctgcccagatggacttgctgaccactgaaaaggaagaacagcgtgc

SEQ ID NO: 5618 - DNA, 466 bp, Homo sapiens
  MAP TO AC004691.1; EXPRESSED IN PLACENTA, SIGNAL =   2; EXPRESSED IN LUNG, SIGNAL = 2.2; EXPRESSED IN HEART, SIGNAL = 1.9; EXPRESSED IN BRAIN, SIGNAL = 1.6; EXPRESSED IN BONE MARROW, SIGNAL =   2; EXPRESSED IN ADULT LIVER, SIGNAL = 1.9; EXPRESSED IN HELA, SIGNAL = 2.3; EXPRESSED IN FETAL LIVER, SIGNAL = 2.3
ctagcccaaaacacgctgagggagcagctgatgaatttcttgttacatgggcatccgcaagctcttgcactccaaggaatcagtggttacagaaacaacagcttgcacatgttttccaggtgcatagaaaacaggctttttcatgtaggtctgctgagccctgggaagctgattcccaccccccttttccagaccagtcttaccccctctaaccagctggggctggaatcctcacccagccttctggttgttttgtcaaaacttctggacctttgattccacccccatcgtgaggctcaacatgacatttccaacaggagattgcccagaatgggtccagctgcttccgatggttttccatttgttctggaaaaagctccagatacctttggtcagcgctcttcctggcgtctgccttgcttgggccatttctcgcccacaccatccagaaggggttgctgtctgt

SEQ ID NO: 5619 - DNA, 478 bp, Homo sapiens
  MAP TO AC004775.1; EXPRESSED IN LUNG, SIGNAL = 2.1; EXPRESSED IN FETAL LIVER, SIGNAL = 1.8; EXPRESSED IN BRAIN, SIGNAL = 2.6; EXPRESSED IN BONE MARROW, SIGNAL = 1.7; EXPRESSED IN PLACENTA, SIGNAL = 1.7; EXPRESSED IN HEART, SIGNAL = 1.7; EXPRESSED IN ADULT LIVER, SIGNAL = 1.7
ggcccctataacagtagcccagccctcacactgcagggggccagggagggcctcttggggaatatctgaggctctgtggtcaccaacagaccagttactcctttaggtgtctggagaaggggtcagctgcctgtatccagtcagggatctcaggcagaagctgttcccagaaagaaaaggccagggggcagcctggcttggccccgagccctgagccccccaagccccaagcccctgatctcagctggcagcctcctgggtgatggagctgtctgtagttacaggcccatagttgactacatcgatgcgcagtttgaaaattatctgcaggaggagctgaagatccgccgctcgctcttcgactaccatgacacaaggatccacgtttgcctctacttcatcacgcccacagggcactccctgaagtctctagatctagtgaccatgaagaaactagacagcaaggtatccctgtccc

SEQ ID NO: 5620 - DNA, 446 bp, Homo sapiens
  MAP TO AC005191.1; EXPRESSED IN LUNG, SIGNAL = 1.5; EXPRESSED IN FETAL LIVER, SIGNAL = 1.4; EXPRESSED IN BRAIN, SIGNAL = 1.5; EXPRESSED IN BONE MARROW, SIGNAL = 1.8; EXPRESSED IN PLACENTA, SIGNAL = 1.9; EXPRESSED IN HELA, SIGNAL = 1.6; EXPRESSED IN HEART, SIGNAL = 1.9; EXPRESSED IN ADULT LIVER, SIGNAL = 1.5
gcaagccctaggtgtactgccaatctcaccatggaccagtgcccgggacagaaggaactacatttctgagactctcaacaaaggactaccacactgcatgggggtggggtgggggtgccctagttcagagctagtctgactgcctgttctagtagtttatttaaacaggaccatcaggcagtctggccataggtcctggtccctttgacttacctagaacccaaggcaatatcatccattccacgacagttgggggaggcccctgtacatgaaggtctgtcctgacaatgtgctgagaagccaggagaagcataaagaggaaggtcaaataggatgctgtgtggcagataaacttgataaagggtttcttgatgaacagcccaaggttgctcctgggtgagatcaggtaggctatagacagcatgggaaacaggaacccaatggtc

SEQ ID NO: 5621 - DNA, 458 bp, Homo sapiens
  MAP TO AC005848.1; EXPRESSED IN PLACENTA, SIGNAL =   6; EXPRESSED IN ADULT LIVER, SIGNAL = 7.7; EXPRESSED IN LUNG, SIGNAL = 5.8; EXPRESSED IN HEART, SIGNAL =   6; EXPRESSED IN FETAL LIVER, SIGNAL = 9.2; EXPRESSED IN BRAIN, SIGNAL = 7.1; EXPRESSED IN HELA, SIGNAL = 7.2; EXPRESSED IN BONE MARROW, SIGNAL = 7.1
cagctggtggtgtgagtgtgcactccgggccagcgctatgctgggcactcacctccctgcccctccgtgaggcagatcctctttttatgtaagttgaaaaaactgcggcccagaaaggggagactttctaaaggtcccacagaggatgcccaagcgatctccaagcccagactttgtttcggttgcctgtggctccctgttaaccctggcccagtccagagcaaggttagctcctgagcaccctgcctgcccacagatggcttcgtgcccctgggcaccctcctgcagttgccccagttccgcggcttctctgctgaagatgtgcagcgcgtggtggacaccaataggaagcagcggttcgccctgcagctgggggatcccagcactggccttctcatccgggccaaccagggccattccctgcaggtcggggtgaggggacaagtgcgagacgagat

SEQ ID NO: 5622 - DNA, 486 bp, Homo sapiens
  MAP TO AC002064.1; EXPRESSED IN PLACENTA, SIGNAL = 1.4; EXPRESSED IN HELA, SIGNAL = 1.8; EXPRESSED IN HEART, SIGNAL = 2.7; EXPRESSED IN FETAL LIVER, SIGNAL = 1.7; EXPRESSED IN ADULT LIVER, SIGNAL = 1.4; EXPRESSED IN LUNG, SIGNAL = 1.6; EXPRESSED IN BRAIN, SIGNAL = 1.9; EXPRESSED IN BONE MARROW, SIGNAL = 1.8
cacactcacacacatgagcagtgcttctcaaattttgatgtgaggctgaggatcttgagagatcagaatctcagaatggagattctgagtcagtaggtccaccaggcggcaagagagtctccattcctaacagagtccctagtaatgccagtgcaagtagcccaaggaccccattttgagtagcaaggacctggagtatttaccttactttggataacttacaaaatgctttaatttggcttcaaatcaaaataaaaagtaatttataatccttgaaatcttttaatgaacattttttgagtgactagtatgatatggaccaggaagtcccaaagtatgttctccagaccaatagcatcaacattgtttgggaactggttaaaagcacatatccttgggcctcacccagacttactgaagcagagactctgcaggtagggcttgagattctgttttaactatttctccagacgattctgatacaca

SEQ ID NO: 5623 - DNA, 497 bp, Homo sapiens
  MAP TO AC004828.2; EXPRESSED IN PLACENTA, SIGNAL = 1.7; EXPRESSED IN LUNG, SIGNAL = 1.8; EXPRESSED IN HEART, SIGNAL = 1.6; EXPRESSED IN BRAIN, SIGNAL = 1.6; EXPRESSED IN BONE MARROW, SIGNAL = 1.5; EXPRESSED IN FETAL LIVER, SIGNAL = 1.8; EXPRESSED IN ADULT LIVER, SIGNAL = 1.7
gacaagccaagaaatgtgggcagcttctagaaaatggaaaaggcaagaaagtggattttccctagagcctgaaaggaatgcagccctcctgataccttgactttaggggcttcggaacctcagaaccgaaagataataaatttgtgttgttttaagccactacatttgttgctgcagcaatagaaaaatgactacagggttattctaagcaaatcagaacactggtattctgttcccctgagtgtcttcttaggctatacaaccctggttccttcaagtgctcctcacatgaatgttttaaagagctcaagccctatcagaatcaggagtttggcaatgagtgggggcacctgtggctttccgtggaggtacgtgatttaagcagcgcgaatgggcggagtctagaccataggggtttgcaaccgtatgatggtggtgtggaaaagggtaaatgtaagtataatttatcacttctcaggctctctcaacaccatgct

SEQ ID NO: 5624 - DNA, 448 bp, Homo sapiens
  MAP TO AC005738.1; EXPRESSED IN LUNG, SIGNAL = 1.2; EXPRESSED IN PLACENTA, SIGNAL = 1.1; EXPRESSED IN HEART, SIGNAL = 1.6; EXPRESSED IN FETAL LIVER, SIGNAL = 1.5; EXPRESSED IN BRAIN, SIGNAL = 1.5; EXPRESSED IN BONE MARROW, SIGNAL = 1.4; EXPRESSED IN ADULT LIVER, SIGNAL = 1.1
agaaacacttcaacctggggttaagagatgctgtaacaggaactggactggaaggttagtgtcctgtaataacaagtactgagatgataatctgaaggggctgaggggaaggggacactatcacatttcatactttccttgctaaattgttttagctcagattgattattctccatcccctccagttggttagatagaatattaatttcaagagtgctgtggcacttccatgtagacctgagttttgtggggtttcaaagcaaagttgttttgttttttacagtacacatgaacttgcagatgcagcttatgacaggagacgggaatgttgtgggcaccttactcagccactcacgtattggggacagggcagtcaatgcactgcaccgagtttgtaaggccactgggcaatgctgatatctacagcggcatccttgttggggaattt

SEQ ID NO: 5625 - DNA, 460 bp, Homo sapiens
  MAP TO AC004506.1; EXPRESSED IN PLACENTA, SIGNAL = 2.1; EXPRESSED IN HEART, SIGNAL = 1.8; EXPRESSED IN LUNG, SIGNAL = 2.2; EXPRESSED IN HELA, SIGNAL =   2; EXPRESSED IN FETAL LIVER, SIGNAL = 1.8; EXPRESSED IN BRAIN, SIGNAL = 1.9; EXPRESSED IN BONE MARROW, SIGNAL = 2.1; EXPRESSED IN ADULT LIVER, SIGNAL = 1.9
ggattgtcacatgagactgagtagagagactgtgggactggatgagtctcaagatggacaaccgggacgttgcaggaaaggctaaccggtggtttggggtttctccccctaaatctggaaaaatgaacatgaacatccttcaccaggaacagctcatcgctcagaagaaaggggaaattggatccaaaatgcaacagaaagccaagcagaatgaggtggccagcccacagcccccatatcccggcgaaatcacaaatgcacacaactcttcctccgtttcaaacaagtttgccaacgacggtagcttcttgcagcagtttctgaagttgcagatggcacagacgagcacagatgcccctcacccccaacgccagggcgcccagtgcccctcccggcacgcctacctcctgcgccgggaagaggtccctcctcatcagcaggcggataggcctagggctgg

SEQ ID NO: 5626 - DNA, 478 bp, Homo sapiens
  MAP TO AC005865.1; EXPRESSED IN BRAIN, SIGNAL = 0.85; EXPRESSED IN LUNG, SIGNAL = 0.91; EXPRESSED IN FETAL LIVER, SIGNAL = 0.8; EXPRESSED IN BONE MARROW, SIGNAL = 0.53; EXPRESSED IN ADULT LIVER, SIGNAL = 0.86; EXPRESSED IN PLACENTA, SIGNAL = 1.4; EXPRESSED IN HEART, SIGNAL =   2
cagcgtctgctgcacttgatcaggtggggccttggtgggcggctgcctttcctatacagtttgtcttgtcaccctggtttcccactggggccaggtctcttctccagcctccacctgcctgtctgatccaagagctgagacacggccacccagcaccagtcactcctctgttcaccttaagtaacacacaaaccgggaacaggaggacagaaccgttggcattatcaggattcgtgttttgtgggggtgggagtggagagtagggtggtcttgtgagttgtgcagggtgaagaccgcttccctgagacaggggcagtggtgctgatggaatgtgggggaggcccacatttgagcaaagctgccctgcccttgtcccctggcctggcttcctggtaaggagtttcagccgcctccgcaggaacccccaaagtgcagattccggagcagacacatccgggcggagagactcagcagacaa

SEQ ID NO: 5627 - DNA, 474 bp, Homo sapiens
  MAP TO AC004787.1; EXPRESSED IN LUNG, SIGNAL = 0.93; EXPRESSED IN FETAL LIVER, SIGNAL = 0.83; EXPRESSED IN BONE MARROW, SIGNAL = 0.93; EXPRESSED IN PLACENTA, SIGNAL = 0.79; EXPRESSED IN ADULT LIVER, SIGNAL = 0.89; EXPRESSED IN HEART, SIGNAL = 1.6
ccccaaaactccagtgacagaggcttttaggaaccctatgtgagagacgaggagactgtggcatggagacattaaggaatttattcaaagagcgaagttgcagaggcagaagcaaacccatgtctatgtgaccacacacgactcccaggtgccaaacaggcagtgtccactcttctacctccaacctcaccagccttgcccctggttcatcccaaagccgctcaccacagccaatgcacaaccacatctgttcccatcagacatgggtcccacttgttgccatccgaagggcacaatgtctctctccatgaagctcaccagtttgccccgtgcagatggtgattgtgatcgtgactatgactgtgttcttactcatggccggtgatctctcagcagctgccctgggtgagggaggagatgcagacagaacctctttgccgtaccctctgcctgccttgggtaaggactggacca

SEQ ID NO: 5628 - DNA, 480 bp, Homo sapiens
  MAP TO AC005201.1; EXPRESSED IN PLACENTA, SIGNAL = 1.4; EXPRESSED IN LUNG, SIGNAL = 1.4; EXPRESSED IN FETAL LIVER, SIGNAL = 1.5; EXPRESSED IN BONE MARROW, SIGNAL = 1.6; EXPRESSED IN BRAIN, SIGNAL = 1.8; EXPRESSED IN ADULT LIVER, SIGNAL = 1.5; EXPRESSED IN HEART, SIGNAL = 1.5
ttccagccccatagaaattgaattgttaccgttgtacaagtcctgtgtaagggtggcttccctcatagagcttgcagatgtgaggaggaatgttcctgagagataagaagctgttgaatggtttatgtttgtcatttgtgccaaccaagaaaaggacttttgtttcagttctgaggggtgaaggaggtgggcataaggagtggggctagtgcctacagccagaggagactggtacttaagcgagagcctgttgctctgtgctccccaggcaccacagaagcagcagaggcttttctgtaggtactaccatggcaagagggctccacagcttctcatcactcacttggaagaggatgatgagtgggacatcatcaggtattataatgtcatgtctgaggaggaaatcaaaaggatgaaggagattgtgaagcccaaagtaagtttctcagttggttctcaccacattttccctctgccact

SEQ ID NO: 5629 - DNA, 456 bp, Homo sapiens
  MAP TO AC005137.1; EXPRESSED IN PLACENTA, SIGNAL = 2.8; EXPRESSED IN HEART, SIGNAL = 2.6; EXPRESSED IN BONE MARROW, SIGNAL = 2.6; EXPRESSED IN ADULT LIVER, SIGNAL = 2.9; EXPRESSED IN LUNG, SIGNAL = 2.9; EXPRESSED IN HELA, SIGNAL = 2.9; EXPRESSED IN FETAL LIVER, SIGNAL = 2.7; EXPRESSED IN BRAIN, SIGNAL = 2.8
tctcttggggagtaggggaggtggggggaagtgcagcggcagcagctggaaggaggcagcagttggaagcaggcagcagccaggttaccagcttcactcaagaaaacaggcaattgcctgcggcctgatttctatgagcctaagaacacccatcaggatgcgccagcctcttcttcacccgaaggctcagaaaagtgggtgaccatgttgtgccacacagcctagtggatgaatgagggggaggcaggaggtccgaggccctcgctccccctcccccggactctgtttgctcacctggagcccgacgctgtctgcctgaccgcctttgatgaggtgggagatgaagagcccacagccaaactccaggccaccacgcacactcaggccgaggccttcggggtgcagacggtccagacgcacctccttcagcttcctgccacacaggagaggtcggtg

SEQ ID NO: 5630 - DNA, 464 bp, Homo sapiens
  MAP TO AC002067.1; EXPRESSED IN BONE MARROW, SIGNAL = 2.1; EXPRESSED IN PLACENTA, SIGNAL = 1.6; EXPRESSED IN LUNG, SIGNAL = 1.8; EXPRESSED IN HELA, SIGNAL = 1.9; EXPRESSED IN FETAL LIVER, SIGNAL = 1.9; EXPRESSED IN BRAIN, SIGNAL = 2.3; EXPRESSED IN ADULT LIVER, SIGNAL = 1.6; EXPRESSED IN HEART, SIGNAL = 1.7
tctttattcatgaacaccctttgaaactcagttttgcatgtatttaatgtaatttttcttcaaaatgaatgaagttatttaaaaatgacaataaataccccatatttagtcgtttggaacaattaaaatagttaaaagtgattgtccttgaaaaacttcttcgcttagaaaagcttattgactattacctaaaagccactctttgtaagttaaaaaaaaattaaacacaatccctatcaaaatcctagctatctgttttgcaggaattgataagctgatcttaaaattcatatggaaatacacggaacctagaatagcaaaaacaatcttgaaaaagaagagcgaagttggagaacacatacttaccaatttcaaaacttactgcaaagctacagtaatcaagactagcataaatatagcacaaggttagacatatggatcagtggaatagaaatgagatccca

SEQ ID NO: 5631 - DNA, 466 bp, Homo sapiens
  MAP TO AC005070.1; EXPRESSED IN LUNG, SIGNAL = 1.7; EXPRESSED IN PLACENTA, SIGNAL = 1.7; EXPRESSED IN HEART, SIGNAL = 1.5; EXPRESSED IN FETAL LIVER, SIGNAL = 1.4; EXPRESSED IN BRAIN, SIGNAL = 3.2; EXPRESSED IN BONE MARROW, SIGNAL = 1.4; EXPRESSED IN ADULT LIVER, SIGNAL = 1.3
tacacacacacagggcttggccacttccagccaattccttcacagcatttgttaaaggcacgtccctggagtcagcgatggcagacagttgatgggaagaaacacttaccttttggcaaatccccagtactggaggctgaaaccgttctgcttctgtcatgggatggactgctctcctcttgctcagtaagtggtgatccctcagaaagcacagagccgcaggccacaggttctaaggatccagagaacaacgaggtggaaaactctgggaactgtgactcgggaattttatgtcgtccatttggcaattcaccattgaattgttcataggagctgctatatgtgtaatcactttctgcatttggctcatcaagattatattcctcaggatttgggcagtcttcttcatcatcatcttcatcgtccagttgctgctccagtgagaatgggccattctcaatatggc

SEQ ID NO: 5632 - DNA, 382 bp, Homo sapiens
  MAP TO AC005731.2; EXPRESSED IN PLACENTA, SIGNAL = 2.3; EXPRESSED IN ADULT LIVER, SIGNAL = 2.2; EXPRESSED IN LUNG, SIGNAL = 2.8; EXPRESSED IN HEART, SIGNAL = 2.2; EXPRESSED IN FETAL LIVER, SIGNAL = 2.2; EXPRESSED IN BRAIN, SIGNAL = 2.5; EXPRESSED IN HELA, SIGNAL = 2.3; EXPRESSED IN BONE MARROW, SIGNAL = 2.3
tctcgttgtccatgcatctcttcctttctccctccctcctcctctctcctctctatattcttccttccctttcccctcacatttatcactagatttagacctttgctgtggctgtcttaatgggatggtggagctatgtaatggcagcacccaattagcttgatgtttggtgtcataatagaacaaaagctggtgattcatggcgttcataaaatatccagggtcacctatttatcctcaagctgtgtgcattgttttctttctttttttttttttgccttctttcgtaacgtgcttgacattcaaagcatttatgacaaggtgttttaaaaagctggacctaatggaaactatttgtcctcctttttcccaggagggagac

SEQ ID NO: 5633 - DNA, 463 bp, Homo sapiens
  MAP TO AC004801.1; EXPRESSED IN HELA, SIGNAL = 5.7; EXPRESSED IN FETAL LIVER, SIGNAL = 5.9; EXPRESSED IN BRAIN, SIGNAL = 6.6; EXPRESSED IN BONE MARROW, SIGNAL = 6.2; EXPRESSED IN ADULT LIVER, SIGNAL = 6.2; EXPRESSED IN PLACENTA, SIGNAL = 6.1; EXPRESSED IN HEART, SIGNAL = 6.4; EXPRESSED IN LUNG, SIGNAL = 6.5
agggggtagatggtaggcactggggccagatgtaacctgtgcagtagctgtgagcactgaaaatgccaccccagtatgcattcggggcttatccttgggggaatgatgacatcgtgtgtgcactttctggggcagctttctaagctcagcggtgtcttgttgtagatgggcccatgggtgtgatgtggtcaatcctagatgctgagcatgtgtggctggtgcctagtcctgggcctgccatgtaggcccttagtggatgttgggtggatggatgtggtcagagtgtctatgttctgagaatggtgttctgtctttcagggagcccctggtgaagatggtcgtcctggacctccaggtcctcagggggctcgtgggcagcctggtgtcatgggtttccctggccccaaaggtgccaacgtaagtaataatttgctcttctatttccttccatgtggtgctacct

SEQ ID NO: 5634 - DNA, 478 bp, Homo sapiens
  MAP TO AC005209.1; EXPRESSED IN PLACENTA, SIGNAL = 3.4; EXPRESSED IN HELA, SIGNAL = 3.3; EXPRESSED IN HEART, SIGNAL = 3.6; EXPRESSED IN FETAL LIVER, SIGNAL = 3.1; EXPRESSED IN BRAIN, SIGNAL = 3.3; EXPRESSED IN BONE MARROW, SIGNAL = 2.8; EXPRESSED IN LUNG, SIGNAL = 3.2; EXPRESSED IN ADULT LIVER, SIGNAL = 2.8
tttaaaattcagagggctgctgcaggcttcaaagcagccctttcaaaccgatcgctccacaacctaactccatcagtggcagaggacaaagaaagcccattcatgttcccctaaccacctccttctcttttcccagaccaacctgacagagctgaagtcatttggctctccgcctctggccgtcagcaatgtcagcgctgcggtgatggtactgatggctcccaggggtagggtgcccaaggaccggagctggaaggctgctaaggtcaccatggccaaagtggatggcttcctggactcgctaataaacttcaacaaagagaacattcacgagaactgcctcaaagccatcaggccgtatctgcaagaccccgagttcaatcctgagtttgtggccaccaaatcctatgcggctgcaggcctctgctcctgggtcatcaatattgtgagattttatgaggtgttctgtgatgtggaa

SEQ ID NO: 5635 - DNA, 469 bp, Homo sapiens
  MAP TO AC005899.1; EXPRESSED IN PLACENTA, SIGNAL = 1.3; EXPRESSED IN ADULT LIVER, SIGNAL = 1.4; EXPRESSED IN LUNG, SIGNAL = 1.6; EXPRESSED IN HEART, SIGNAL = 1.6; EXPRESSED IN FETAL LIVER, SIGNAL = 1.5; EXPRESSED IN BRAIN, SIGNAL = 1.2; EXPRESSED IN BONE MARROW, SIGNAL = 1.3
cactgtgccaagtgaaatgctgccagtcacgcccaggccttgcacatctgttcctgtcccatctggaaggaacactctttccaagatggtctgtctgaattgtcattccttcccctagaccatgagctcctcgcaggcagaggtggtcttgttcattgctggatccctggcatcttgggggatgcaggtgtttgttgaatgaatgaatgaatgaatgaatgaatagatgaatgagtgagtgtggtctctctgtcacaggatagaacacctgggactcaatgtggtgctgcagctgctggtgggggtgcccctggagatggtgcatggagccacccgaattgggcttgtctacgtggccggtgttgtggcaggtaggcaggtaggccccgtgtccacaaaggcacactgccccagggtggggtgggagaccctgtggggcggggcaagccccaggtttccaggacacaca

SEQ ID NO: 5636 - DNA, 478 bp, Homo sapiens
  MAP TO AC004666.7; EXPRESSED IN PLACENTA, SIGNAL = 5.3; EXPRESSED IN LUNG, SIGNAL =   6; EXPRESSED IN FETAL LIVER, SIGNAL = 4.8; EXPRESSED IN BONE MARROW, SIGNAL = 5.6; EXPRESSED IN HELA, SIGNAL = 5.1; EXPRESSED IN BRAIN, SIGNAL = 6.1; EXPRESSED IN ADULT LIVER, SIGNAL = 5.2; EXPRESSED IN HEART, SIGNAL = 5.7
ttggagtcaggtctgggttcaaatcccagttctccacttatagctgtgtttccttgaacaagtaacctaacccgtctgagcctcagttgactcatctgtaaaatgagtacagtgatatgaaaatggctgagaggacccagtgagctgatgtgtgagcactgtggagtcctgtgcccatatgaggcatggttatatctgcccatgattgttacaggctggggcttcccagcagtatggatgaccaagcccggtgggacatctccttcttggaggcagtttcttctgactcagcctaagtcagtggcctcatagtttcatttcacgttttttcaagttctaatattacctcaggttgctgttgtcttgcagtttatgatccacaatggaaacctccgtgtgaaggccaagttcgaagccagagtcccagctttctactacatcccccaggccaacgactgcctgtgagtgggtgattcct

SEQ ID NO: 5637 - DNA, 467 bp, Homo sapiens
  MAP TO AC005077.1; EXPRESSED IN PLACENTA, SIGNAL = 2.3; EXPRESSED IN LUNG, SIGNAL = 2.5; EXPRESSED IN FETAL LIVER, SIGNAL = 2.1; EXPRESSED IN BONE MARROW, SIGNAL = 2.2; EXPRESSED IN ADULT LIVER, SIGNAL =   4; EXPRESSED IN HELA, SIGNAL = 2.8; EXPRESSED IN HEART, SIGNAL = 5.9; EXPRESSED IN BRAIN, SIGNAL = 4.4
tcatctttcaggagggttttgaagtaccctgagtatcacagactctacagacataaattctccccatttgaaagtggacctttggaatgaaggtcctgaattcttccagaatgagactgttacaaatacaatgattgtatcttgctttggcaactgcagtaaaaagaggcccagtgcaacattataggataccatgtgaatccttttcatgctcatttcctcctaagagtcctttctctgtgcctctttttagaacaatgctaaagtagctgtgctaggggcctctggaggcatcgggcagccactttcacttctcctgaagaacagccccttggtgagccgcctgaccctctatgatatcgcgcacacacccggagtggccgcagatctgagccacatcgagaccaaagccgctgtgaaaggtactgggcgcgctgaccctggagacttgcttcctgtccccagta

SEQ ID NO: 5638 - DNA, 460 bp, Homo sapiens
  MAP TO AC005214.1; EXPRESSED IN PLACENTA, SIGNAL = 2.4; EXPRESSED IN LUNG, SIGNAL = 2.4; EXPRESSED IN HEART, SIGNAL = 2.7; EXPRESSED IN FETAL LIVER, SIGNAL = 1.9; EXPRESSED IN BONE MARROW, SIGNAL = 2.3; EXPRESSED IN ADULT LIVER, SIGNAL = 2.4; EXPRESSED IN HELA, SIGNAL = 2.7; EXPRESSED IN BRAIN, SIGNAL = 2.6
ttgttacagggctgctgatgggagagggaggaaggcctgggagggggatctggtggtggcgcccaatctacagggtccggaatcagggtggaagttgtcagggactagcggctgccatagtacaggcgcatggccaggccaatgagcaatgtggccaggaagaaggcggctgtgagctgcagccgtagcaggactgctgagagcacggcgttgaccaccagcgagcaggacaccacaaagaggcgtgtgatgctgctgccatgcttcatgacagcagacatgagcagtccatttagtgcctggctcagcaccacgagtgctgcccatcctgagaaaccttccaggaggcctgggccagagccgccgccagcatgcagacctagattcagaagcacaccaaaagtgtagaggaagaggttctgaagtgccaggggcagccgctgtcgcttcatgagcagct

SEQ ID NO: 5639 - DNA, 470 bp, Homo sapiens
  MAP TO AC005153.1; EXPRESSED IN PLACENTA, SIGNAL = 1.9; EXPRESSED IN LUNG, SIGNAL = 1.9; EXPRESSED IN HEART, SIGNAL = 2.4; EXPRESSED IN BRAIN, SIGNAL = 2.1; EXPRESSED IN BONE MARROW, SIGNAL = 1.9; EXPRESSED IN ADULT LIVER, SIGNAL =   2; EXPRESSED IN HELA, SIGNAL = 1.8; EXPRESSED IN FETAL LIVER, SIGNAL =   2
tgttcccatgagttgtcctgggcattttaagagtatcatgttgtaatcctacctgctctgcccccaggaggtgggaaaggggagatagggaggaagagtcacatccctgcagctggtggggacctgttggctgcctggaaaaacagttgcccatgtgttggagcactactatttttactttacctgttttcttttgtttcagtttttatttcttgaaagcccgaagttgtttatctgtaactatcccctttgtgtgttgcaggatgttaaagtctttagtgaagatgggacaagcaaagtggtggagattctagcagacatgacagccagagacctgtgccaattgctggtttacaaaagtcactgtgtggatgacaacagctggacactagtggagcaccacccgcacctaggattaggtagggaaccatcagaacaggattggcacctggggatgcttatgtgcaatt

SEQ ID NO: 5640 - DNA, 455 bp, Homo sapiens
  MAP TO AC004672.1; EXPRESSED IN PLACENTA, SIGNAL = 1.2; EXPRESSED IN HEART, SIGNAL = 1.4; EXPRESSED IN FETAL LIVER, SIGNAL =   1; EXPRESSED IN BRAIN, SIGNAL = 1.1; EXPRESSED IN BONE MARROW, SIGNAL = 0.94; EXPRESSED IN LUNG, SIGNAL = 1.1; EXPRESSED IN ADULT LIVER, SIGNAL = 1.1
ccttttcatgtcaaatgggctaatttcaataatttctacaatccattgtacaaagttaaaaaacattctcatagaagacctgtgacattgtccaaaacagccctcttaccacgaatgctctgcatttcctagacacagatttgcggagataaaaagtctctaatgatggaaactaactagctccaatgatcagatgtctaatatgaaacatgagaccttaaagtacaagctggcaaagacctgtgtggagaatggtgtgaaagctggccccactgaccctcctgctggcatttaataatacctgctgcttaagctgctgtaccagacgatccttctcccgcttcagggcagccacttcctcttgggtcttcttcttagaggacgaaagctccaagagagctatattggcgtctttttcactaatggcagccagaagagcttcttgcctgcaaaag

SEQ ID NO: 5641 - DNA, 462 bp, Homo sapiens
  MAP TO AC004812.1; EXPRESSED IN PLACENTA, SIGNAL = 2.8; EXPRESSED IN LUNG, SIGNAL = 3.4; EXPRESSED IN FETAL LIVER, SIGNAL = 3.1; EXPRESSED IN ADULT LIVER, SIGNAL = 3.3; EXPRESSED IN HELA, SIGNAL = 3.6; EXPRESSED IN HEART, SIGNAL = 3.5; EXPRESSED IN BRAIN, SIGNAL = 3.3; EXPRESSED IN BONE MARROW, SIGNAL = 3.1
atcctgagcaacctccacagttgtaagagagcgatcatctccagtttccaaaggccactcaaggaggcatccaaatcacttagctcttagcctgcaaaactgacaggaaagctgagaagacggagcctcaagtccatgtggcccagccagcacctccccagagtgagactggctcatccctgagggcagcacaaaccccctagaggtgaacctccttcagtagccctcccccgccctctgagtcaggtcgtctgcagtgcacagctggcgggatccttggaagatactcacggcatcccggctggtggacttcatgatctcacttaggccaatgcacacaccctgcctctcatcgctcttctgagacctcaggccttcctcaaggatggggatgatctcggggaggattttctcccctaacttccgcacaagatctcccaatgttctcgctgcaatctgtca

SEQ ID NO: 5642 - DNA, 472 bp, Homo sapiens
  MAP TO AC005218.1; EXPRESSED IN PLACENTA, SIGNAL = 2.5; EXPRESSED IN LUNG, SIGNAL = 2.5; EXPRESSED IN FETAL LIVER, SIGNAL = 2.5; EXPRESSED IN ADULT LIVER, SIGNAL = 2.4; EXPRESSED IN HELA, SIGNAL = 2.6; EXPRESSED IN HEART, SIGNAL = 2.7; EXPRESSED IN BRAIN, SIGNAL =   3; EXPRESSED IN BONE MARROW, SIGNAL = 2.1
ccactatgcattttgttttctcctcacataatcagctctgcaggtctcagtggcttatatgttggtatgactcaagccttctttcctgaaatgtctgaacccttggtaatcattcttctcaggctaatgctgggatatatatccgtttacagttacagtgaggtaaaggaataaccaagcgagtcatgtggattccacacattcctctctgttcacattacataaaagcagccctgcgtccacctactgctcaggatcagttatccctgccaaaatggcaactcttcttacctgctgattcttgggccctggtgtttaaagtgccctggtggcagctgtaaacttgttcactgagactcttgtactgttgcctggcaagagtataggcctttggaaccaggacctgcaaacatgcagagtccatagctgtaggaatgggaagtacaaaatccctttgtggctcattgggaat

SEQ ID NO: 5643 - DNA, 490 bp, Homo sapiens
  MAP TO AC005911.6; EXPRESSED IN PLACENTA, SIGNAL =   5; EXPRESSED IN HEART, SIGNAL = 4.2; EXPRESSED IN BONE MARROW, SIGNAL =   4; EXPRESSED IN ADULT LIVER, SIGNAL = 4.9; EXPRESSED IN LUNG, SIGNAL = 4.9; EXPRESSED IN HELA, SIGNAL = 4.5; EXPRESSED IN FETAL LIVER, SIGNAL = 4.4; EXPRESSED IN BRAIN, SIGNAL = 7.4
tgtgtggaaagaaggtaaactatctcattgatactttttactattgattacgttaaaatgataatattgtagtcataggttaaagaatatattattacaatgcattttaccagttaagttttcctttcttttttttagaggcagggttctcgctatgttgcccaggctggtctcaaacccctgggctcaagcaactctcccgcctcagcctcctgagtaactgggaccatgggcaaaagccaccacacccagctctttttactttttaaatgtaactcctaggcttacatagtatttctattggacagcaccactctggagtctgcactgatagccactgctctctggggttgtggggggtcatcttccccaccctccagcctcagggcaagacccagattccgcctgttcctaacaccgtgcttgtttggacaaagacgatggcagccacgcaataattccctcatctccccattctgcttcctctgac

SEQ ID NO: 5644 - DNA, 490 bp, Homo sapiens
  MAP TO AC005274.1; EXPRESSED IN PLACENTA, SIGNAL = 4.8; EXPRESSED IN HEART, SIGNAL = 4.1; EXPRESSED IN BONE MARROW, SIGNAL = 4.6; EXPRESSED IN ADULT LIVER, SIGNAL = 4.2; EXPRESSED IN LUNG, SIGNAL = 5.2; EXPRESSED IN HELA, SIGNAL = 4.5; EXPRESSED IN FETAL LIVER, SIGNAL =   4; EXPRESSED IN BRAIN, SIGNAL = 4.7
cactcataatcctgcccagagataacattttatgcttaatcttctagtctttcctgatttccttccagacttttctatgcattttttaaaatactgtacaatcttaaccctgtatgcactcatatatcctgttccctatcataaacatgtctctcggcccttagacattttttgaatgtcataaaaacactaatagttacaattgtgcaaatgtaccagaatttacttaatcattccattaatattagacatttcattgtttatgcttctttccctactgcagagtcattaaagtacagtgatgaaaaatatcaatgtcagagccagcatttctggaagcaaatctcaaaccacttccctcaccagctatgcaaccagcagcaacaaggcactcacctgctctgagacttgtgtagaaaatgggggagacaccagaacctactcttaagagttgttgggaggataaaacaggaaggtctgtgccgttact

SEQ ID NO: 5645 - DNA, 475 bp, Homo sapiens
  MAP TO AC004682.1; EXPRESSED IN PLACENTA, SIGNAL = 1.5; EXPRESSED IN LUNG, SIGNAL = 1.3; EXPRESSED IN FETAL LIVER, SIGNAL =  57; EXPRESSED IN ADULT LIVER, SIGNAL = 1.2e+02; EXPRESSED IN HEART, SIGNAL = 2.3; EXPRESSED IN BRAIN, SIGNAL = 1.6; EXPRESSED IN BONE MARROW, SIGNAL = 2.8
gagggtgacatcatcatcagcattccttcttttcccacatctgctggagatgtaaatctgactctgagatttacatgaggtaggctgcatggcatcacctccccttaacaaaacagaaaacctgaggctgacaaaagttagtctgcccaaagggccatggctactggcgacaaaacgcttatcagaatctaaatctcctggctccaaggagagcaacgaactttctggcaaatcacctcagcaccacccatcatggaaatgtcagagcaggggttgtaggtagagcacagagatagttgtccaggtcttaccatctccttctgtgcgcagtctgtagtagttcttacactggtagcgaaacaagtgctccacatagccatttgcaatctcagggggcttcgggaagcggtcatctgcaaagagagagaagccagagagtttaccatttggaaattgttcccagagacccatgaaa

SEQ ID NO: 5646 - DNA, 464 bp, Homo sapiens
  MAP TO AC005165.1; EXPRESSED IN PLACENTA, SIGNAL = 3.6; EXPRESSED IN HEART, SIGNAL = 3.5; EXPRESSED IN BRAIN, SIGNAL = 3.7; EXPRESSED IN BONE MARROW, SIGNAL = 3.2; EXPRESSED IN ADULT LIVER, SIGNAL = 3.3; EXPRESSED IN LUNG, SIGNAL = 4.2; EXPRESSED IN HELA, SIGNAL =   3; EXPRESSED IN FETAL LIVER, SIGNAL =   3
aacagataagctgcaaatggccaccaaaaaaatctctttcaagttaccattccctaaagatgactaaatgaactgctggaattttcaaggagaattaatatttaatgggaggtgtcttagtctgctcaggctgccataacaaagtaccatggactggggggcttgaacaacagaaatttgtttttccactgttctgaaagctgggaagtccaagatcaagatgccagcagagttggtgtctgataagagctctcttcttgggttgcagatggccaatttttcactgtttcttcacatggtgaagagagagagcaagaggaagaaaagagagaatgagtgctctgatgtctctcccaataaggacactaattctatcaatcagagccccacccacatgacctcatctagcctgaattacttctgtaatggccttgtcaccaaatacagtcacatacttagtggtt

SEQ ID NO: 5647 - DNA, 474 bp, Homo sapiens
  MAP TO AC005291.1; EXPRESSED IN BRAIN, SIGNAL = 5.2; EXPRESSED IN PLACENTA, SIGNAL = 7.2; EXPRESSED IN LUNG, SIGNAL =  11; EXPRESSED IN HEART, SIGNAL =   8; EXPRESSED IN BONE MARROW, SIGNAL =  14; EXPRESSED IN ADULT LIVER, SIGNAL =  13; EXPRESSED IN HELA, SIGNAL =  12; EXPRESSED IN FETAL LIVER, SIGNAL =  18
actgcgtggtggtgctaagtaaaggaagaagaagtcttacaccactcccaagaagaataagcacaagagaaagaaggttaagctggctgtcctgaaatatcataaggtggttgagaatggaaaaattagttgccttcgtcgtgggtgcccttctgatgaatgtggtgttggagtgtttacagcaagccactttgacggacattattgtggcaaatgttgtctgacttactgcgtcaacaaaccagaagacaagtaattgtatgagttaataaaagacatgaactaaaaaaacaaaaaaaacaaaaatcaggctcacctgggattctattgctccatgatgtagcatcttcttgcagccaccagttaagatcataggctttgggggaagggtcagatttaactgactcagcaccacgtctgcctgcattaatagtggggtgggagtaagttaaagaatcaggggtgttttctgaa

SEQ ID NO: 5648 - DNA, 474 bp, Homo sapiens
  MAP TO AC004773.1; EXPRESSED IN LUNG, SIGNAL = 1.6; EXPRESSED IN ADULT LIVER, SIGNAL = 1.4; EXPRESSED IN PLACENTA, SIGNAL = 1.4; EXPRESSED IN HEART, SIGNAL = 1.5; EXPRESSED IN FETAL LIVER, SIGNAL = 1.3; EXPRESSED IN BRAIN, SIGNAL = 1.6; EXPRESSED IN BONE MARROW, SIGNAL = 1.3
gttcctcagattcatggcgcacctcctgccctgcacccccagccattcttcctttctactgtggtgatcctgcaggtcttaagtgggagccacaccataaccagtgttgacatcatctgcctctgttctgccccatgccatttctccagggggctcccaacaggagccattgagactctaattgccctcgcacctgcttggccctgttgcagttaagactgttaggcttccccttttggactgagattgtctggtgtttatcgccaactttaacaccatcctccaagacttctgctctgtcggagcctgggtccctgtcagcctcctctgtgaagaaacctcttgcctgtgcccccctcgaagccccagagctaaccagggctgctttcatgtgttgcttggaggattcgcattcgaatctgaattgctaatggtggaaaagatgccactcagtgtcctgggataccttcagca

SEQ ID NO: 5649 - DNA, 413 bp, Homo sapiens
  MAP TO AC002426.1; EXPRESSED IN PLACENTA, SIGNAL = 1.7; EXPRESSED IN LUNG, SIGNAL = 1.3; EXPRESSED IN FETAL LIVER, SIGNAL = 1.5; EXPRESSED IN BONE MARROW, SIGNAL = 1.5; EXPRESSED IN ADULT LIVER, SIGNAL = 1.5; EXPRESSED IN HEART, SIGNAL = 1.6; EXPRESSED IN BRAIN, SIGNAL = 1.1
ttcattggagggatcattggaaatttccacttacctagcattccttttttggaactggacagacacatgtccttctctgcactgggcagggcaaaactcaccacgaacacttccaccccatcggccatcagggccaaacccaagacgaaaaagaggatccactggaagcggccatggccacactcatccatgatggtctcgtactggtgggccaactgctcctcatcttccagcctctcagccatcaggtctgtctggccccgaaggctgtccattctggagggcgccatcttggcctgcttggccttgacatcatctgggtgagggataccctggtactcgccctcatagatctcgtcttcctcatcatggccttcggtgacatcactctgtgcatcttcttctgggttgga

SEQ ID NO: 5650 - DNA, 393 bp, Homo sapiens
  MAP TO AC005244.1; EXPRESSED IN PLACENTA, SIGNAL = 8.2; EXPRESSED IN LUNG, SIGNAL = 6.1; EXPRESSED IN HEART, SIGNAL = 6.7; EXPRESSED IN FETAL LIVER, SIGNAL =  12; EXPRESSED IN BRAIN, SIGNAL = 9.9; EXPRESSED IN BONE MARROW, SIGNAL = 8.3; EXPRESSED IN ADULT LIVER, SIGNAL = 9.7; EXPRESSED IN HELA, SIGNAL = 6.4
gagatttacaaatgacagccaccaatactaaaatacacacacacacacacacacacacacacacacaaacacacgtgtgattcaccccttacccaccaccgcaaaaagagtcagaagttaatatgtaaattaccatggttaaacactaagatactgagatattaacttattactaatgtatggcatttaagaatagaatcgaatcctgccatcttcatttgtcccaattagatattcattagtcagctaaaacccagtttattcctacctctctgaagagtgcaccataaaactgaacaatgtatgggcaatcactactccgcattactacatccaaatccataagaagttgtttttgttctttttcatccactgttgaccgaattctctgga

SEQ ID NO: 5651 - DNA, 476 bp, Homo sapiens
  MAP TO AC005015.2; EXPRESSED IN PLACENTA, SIGNAL = 4.1; EXPRESSED IN HEART, SIGNAL = 3.7; EXPRESSED IN BRAIN, SIGNAL = 3.7; EXPRESSED IN BONE MARROW, SIGNAL = 3.6; EXPRESSED IN ADULT LIVER, SIGNAL = 4.3; EXPRESSED IN LUNG, SIGNAL = 5.1; EXPRESSED IN HELA, SIGNAL = 4.3; EXPRESSED IN FETAL LIVER, SIGNAL = 3.5
ctacctccccattcagacccgggttcctgagacagggctgcctcccccttcagactggggttcccaggacagagctgcctccttcttcaaaccagggtttctgggacagggctacctcccccttcagaccaggttcctgggacgagctccctacctcctcagactggggttttaaagacaaggctgcctcccgcatcagacgggggctccgaggacactgccccgtggcttgcctcctggtgggccctgtcagccgcggctcacctgggccttgtcagggcagctcctcatggcctccatcagcttctccacctgctgagcctggtccagcgcatcccgcagggcgtcctccgtgctcatcagctggtgctgcagccgcagaagctcgggcgccgaggaccggtcgatgagggagtagcgcctctgatccgacagggatttctctttgtcctggaagtggcaggagagtggaagag

SEQ ID NO: 5652 - DNA, 485 bp, Homo sapiens
  MAP TO AC005252.1; EXPRESSED IN PLACENTA, SIGNAL = 1.7; EXPRESSED IN LUNG, SIGNAL = 1.8; EXPRESSED IN FETAL LIVER, SIGNAL = 1.4; EXPRESSED IN BRAIN, SIGNAL = 3.1; EXPRESSED IN ADULT LIVER, SIGNAL = 1.7; EXPRESSED IN HELA, SIGNAL = 1.9; EXPRESSED IN HEART, SIGNAL = 1.9; EXPRESSED IN BONE MARROW, SIGNAL = 1.7
catggaagtttcaagggcagtacaaagaattcctgaataagatctctcagacttattaacattttttctcatatgttttatctctctttctccatataggtaggtgtgtgcacatgtgtatgtttatatatgtatattctgacccatttagtagcaagttgcaaaaagcatacttcagtatgtgttttctaagcacaagggtataattttccctaaccacactgtaacaatcaaaatcaggaagaatacgcatattaccaaattagacactgactttaggctgataggatggtgttaccatggataagtgttttgtaaatgtctcacctcacttttcttctctctacggccagtggggagcctgctggtgggagaggtggcgattcttagggcctcagattccatctgcacatcctctgcagcctgagcctgcctcttatgcttgtctgcaatgggctgttaccaggtggaatacatcccttccc

SEQ ID NO: 5653 - DNA, 448 bp, Homo sapiens
  MAP TO AC005154.1; EXPRESSED IN PLACENTA, SIGNAL = 2.3; EXPRESSED IN LUNG, SIGNAL = 2.4; EXPRESSED IN HEART, SIGNAL = 2.6; EXPRESSED IN FETAL LIVER, SIGNAL = 2.3; EXPRESSED IN BRAIN, SIGNAL = 2.8; EXPRESSED IN BONE MARROW, SIGNAL = 2.2; EXPRESSED IN ADULT LIVER, SIGNAL = 2.1; EXPRESSED IN HELA, SIGNAL = 2.7
ttcattctgttctctaagggggaacttttgttgtagattttgggctagtcctacttgaaattacaaatatagaattagtaaatggcgtaagagcttttttattttacttccatcagctagctgaaagtaaggttcttcagtattgagggatttgcattgttgacttgaatacacttttagggagtataggtatcagtttctcatgtctccttgccttcatttgttcagagtaacaaggtaaagtatgtgttttcctctcatattctataggtgttagtggtctgtatgactttgggccagttggctgtgctttgaagaacaatattattcagacctggaggcagcactttatccaagaggaacagatcctggagatcgattgcaccatgctcacccctgagccagttttaaagtgagatcttactttggagtgggggtatcctacttt

SEQ ID NO: 5654 - DNA, 479 bp, Homo sapiens
  MAP TO AC005273.1; EXPRESSED IN LUNG, SIGNAL = 1.8; EXPRESSED IN BRAIN, SIGNAL =   2; EXPRESSED IN PLACENTA, SIGNAL = 2.2; EXPRESSED IN HEART, SIGNAL = 2.1; EXPRESSED IN FETAL LIVER, SIGNAL = 2.4; EXPRESSED IN BONE MARROW, SIGNAL = 1.7; EXPRESSED IN ADULT LIVER, SIGNAL = 2.3; EXPRESSED IN HELA, SIGNAL = 1.9
agaacaccatttgcttacaaaactaaattgtaaatgtattctcaacttattcactcttactgtacttaatatcctacttcaaatgtgcaatacaggatcatttttttacttcttctgatagcatcattccaagtggctaggatatttccttcagcaacatcttggtctcttcttcgtattgatagaacagagctgttggattttctgcatatcctgaatcagacgcctcccattcatctctggtccataaccaggctcttctgccttcactgcctttgccgtctaactctggagcacaaatgagatgattccaccaaggttggtttcactggcaatgataatctgggtgtcatggcccagctttcccgccagcttttgggccttctccaattcactaaatacttcctcataattttcttccaattcaagaataagggggaaaactatagcacttgatctgcacctgtgtgttgtgggta

SEQ ID NO: 5655 - DNA, 460 bp, Homo sapiens
  MAP TO AC005164.1; EXPRESSED IN PLACENTA, SIGNAL = 2.7; EXPRESSED IN LUNG, SIGNAL =   3; EXPRESSED IN HEART, SIGNAL = 3.3; EXPRESSED IN BRAIN, SIGNAL = 3.5; EXPRESSED IN FETAL LIVER, SIGNAL = 3.4; EXPRESSED IN BONE MARROW, SIGNAL =   3; EXPRESSED IN ADULT LIVER, SIGNAL = 3.1; EXPRESSED IN HELA, SIGNAL = 3.5
cagctcatccgagagcaaccaggagcggggcccagaagcagggcacccctttcccattctccccattcctcttcagaaggagaaaaacaggctttgaccgaaggcttccagtgcatctgcgcgcctccacacatatatttttgctccacttctcaccaccctcccgaattaaaaaaaaaaaaaaaaaaaatctccccgcgcactcgggaaatggggatgcccccttttcaatacgcctgagggctccaaagattcccgggaaatggtatggcccaaaggcacagaggacggctaacttacctgcctggccgcagcgcgccggagggcaggtccccaggacacagagcagcaagaagggcacggacacagccactgccgcctgcatggtgctgccgtcagcccgcctcgcccgagacgctcagctcctcatgccggcgccgccgagtccgtttccctcgct

SEQ ID NO: 5656 - DNA, 456 bp, Homo sapiens
  MAP TO AC004930.1; EXPRESSED IN HELA, SIGNAL = 7.4; EXPRESSED IN HEART, SIGNAL = 6.7; EXPRESSED IN BONE MARROW, SIGNAL = 5.9; EXPRESSED IN PLACENTA, SIGNAL = 7.1; EXPRESSED IN LUNG, SIGNAL = 8.4; EXPRESSED IN FETAL LIVER, SIGNAL = 6.5; EXPRESSED IN BRAIN, SIGNAL = 7.9; EXPRESSED IN ADULT LIVER, SIGNAL = 7.8
tctatcaaagcccttgggtgactaggcacatcatcaacgaccagtaatattttgaaaggaatcttctgagaagtaggtctcatcagtgggcttaaaatatacaataagccatgctgtaaacaaatgtgctgtcatccaggctttgttgttccatttatagagcccagagttgattctgcataattctgaagggacctgggattttcaggatggcaaatgagaattggcttcggcttaaagtcaccagctgcattagccccttacaagagagtcagcctgtccttggaagctttgaagccagtcattggcttctctctagcgagaaaagtcctagatggcatcttcttccaatagaaggctatatggtctacattgaaaatctgttgtttagtgtagctaccttcatcaatgatcttagttagagcttctgaataacttgctgcagcttctacgtaa

SEQ ID NO: 5657 - DNA, 449 bp, Homo sapiens
  MAP TO AC003684.1; EXPRESSED IN LUNG, SIGNAL = 4.8; EXPRESSED IN HELA, SIGNAL = 4.2; EXPRESSED IN HEART, SIGNAL = 4.2; EXPRESSED IN FETAL LIVER, SIGNAL =   4; EXPRESSED IN BONE MARROW, SIGNAL = 3.6; EXPRESSED IN PLACENTA, SIGNAL = 4.1; EXPRESSED IN BRAIN, SIGNAL = 4.2; EXPRESSED IN ADULT LIVER, SIGNAL = 4.3
aaatgagggctgatttgcagtggatttgcacaggcgtcagttgccttagcttatgtggagcggtgttggtcctatcccttggtcactgcctcctgcacagctaatcccgcttaccccacatctaaaccatgtgtcctgtgatgctccagtctggccccacattgggggcactctgggagcttcaaacactcccaccacccaggtcccactggcagagactggggtttcattggtctggggtgtggcctgcacatccaaattcttgaaagctgcctggcagctttcaatttttttgcctttttgtactggcaaggttggagcttcgtgatacactccttccaacactcccaaggcagggctgcatgcctccactttgctcccattgtgaacattctcagactgcacattcctctgtattttatgatagagacaaacccacaatcgccttt

SEQ ID NO: 5658 - DNA, 490 bp, Homo sapiens
  MAP TO AC005533.2; EXPRESSED IN FETAL LIVER, SIGNAL = 5.6; EXPRESSED IN BONE MARROW, SIGNAL = 6.3; EXPRESSED IN HELA, SIGNAL = 6.7; EXPRESSED IN PLACENTA, SIGNAL = 6.6; EXPRESSED IN LUNG, SIGNAL = 7.3; EXPRESSED IN HEART, SIGNAL = 5.3; EXPRESSED IN BRAIN, SIGNAL =   7; EXPRESSED IN ADULT LIVER, SIGNAL = 5.4
agtccccatctagcctttgcctaagctaaggatccctttaccgcttggtcttcactgacttccaggtggtcttttccaatgccctttgttcttttcacctgctcccacctctgccacctaaattggggttggaagggaaaatgagcatctttcttgctttttgatgcccttcacgacattcctcctttctctcatgtaaaaattcctgattattttggcttgtatattccactagagtcctctctactactccaagcaattttaaaacaaaaagagtaagatactttgaatttgaaggactttggggtagaagacagggaactgagaagctaacatatcaaatgggtccccttcatggataatggtgtcaccaaggataatggcaggtttggggtggagaataaggttgtgatccaggtgccaaagtctaccctgaacgaggaggagttaacaaaaatagagagatgataagcaagactcctccatccct

SEQ ID NO: 5659 - DNA, 474 bp, Homo sapiens
  MAP TO AC005538.2; EXPRESSED IN PLACENTA, SIGNAL = 4.7; EXPRESSED IN BONE MARROW, SIGNAL = 4.8; EXPRESSED IN ADULT LIVER, SIGNAL = 4.6; EXPRESSED IN LUNG, SIGNAL = 4.8; EXPRESSED IN HELA, SIGNAL = 4.5; EXPRESSED IN HEART, SIGNAL = 4.3; EXPRESSED IN FETAL LIVER, SIGNAL = 4.8; EXPRESSED IN BRAIN, SIGNAL = 5.4
tttgtacaactaccaccggccgtggcggccggagaccctccctcccttccgccggacattggggcgtggctggaaactcgggagtggattggccggaaggtgggacgcaaatttgtttgaaaggcccaatcagtgcccggcttctccgctctagccaatagaaaaccgagaggaaggcagggagggcggagtctcctatttgagtttgtggcgcgcgaggccctgcagtccgggttggcgcttgggtactggctgggtccgatgctgggtacgctgcgcgccatggagggcgaggacgtggaagacgaccagctgctgcagaagctcagggccagtcgccgccgcttccagaggcgcatgcagcggctgatagagaaggtgcggcccccgccggtccgccgggaggggaggcctgcgtgtcggagtgaggctgggaggggacgtaggacgggaagggaaggggctctgaggact

SEQ ID NO: 5660 - DNA, 494 bp, Homo sapiens
  MAP TO AC004946.1; EXPRESSED IN PLACENTA, SIGNAL =  10; EXPRESSED IN HELA, SIGNAL =  10; EXPRESSED IN HEART, SIGNAL =  11; EXPRESSED IN FETAL LIVER, SIGNAL =  10; EXPRESSED IN BONE MARROW, SIGNAL =  10; EXPRESSED IN LUNG, SIGNAL =  12; EXPRESSED IN BRAIN, SIGNAL =  11; EXPRESSED IN ADULT LIVER, SIGNAL =  11
acctgcaggaagagatttggctgggttctgttgagggtgattgttaggacgttgtattttgttgccattattccaaatacctgtcttggagggaaagttgcccttctgagaactgtgactttaccaggagccctatcttggaataagagttacacctctggaccacgtttctcactagtactttgcttgactggaggaagtgggtgacttttggctgcttcggtgacccattgtagacgcctcgttacccttcttccttccgcttcaagtaatcatggcggcgggggtggcagcgtggctgccttttgcaagggcagcggctatcgggtggatgcctgtggcctcggggcctatgccggctcccccgaggcaggagaggaaaaggacccaagatgctctcattgtgctgaatgtgagtggcacccgcttccagacgtggcaggacaccctggaacgttacccagacactctactgggcagttctgagagggact

SEQ ID NO: 5661 - DNA, 476 bp, Homo sapiens
  MAP TO AC005342.1; EXPRESSED IN FETAL LIVER, SIGNAL = 1.3; EXPRESSED IN PLACENTA, SIGNAL = 1.4; EXPRESSED IN LUNG, SIGNAL = 1.9; EXPRESSED IN HEART, SIGNAL = 1.4; EXPRESSED IN BRAIN, SIGNAL = 1.4; EXPRESSED IN BONE MARROW, SIGNAL = 1.5; EXPRESSED IN ADULT LIVER, SIGNAL = 1.4
cccaaatttctttcactggccgagcagagccattaccaatctctattgttcagtatttaacttcacatatttttgtcctcttctcaggttttaaactcctgacttgttttattcatgcatttatcagttatttactaggatttgctaggcacagagcagacaaagacaaataattcccctgtgtagcacttcgctagggtaaccaaggggggaagacatttactggaaacaataacagaacaaattattaccttactagtagacatatgtgcaaaagcctttgaaagaccagaagaaagccaactgcctggcaatgtcggaaagtttcatgggggagctggcattcttattggcctattcagtggtggatggatggaaacagttgctggctggaagaagtatgagtataaatgatcaacaatttgaagaaggtgagagttggaggtctatttatttgggtgggagaaaaggataca

SEQ ID NO: 5662 - DNA, 454 bp, Homo sapiens
  MAP TO AC006529.1; EXPRESSED IN PLACENTA, SIGNAL = 3.5; EXPRESSED IN BRAIN, SIGNAL = 3.7; EXPRESSED IN BONE MARROW, SIGNAL = 4.2; EXPRESSED IN ADULT LIVER, SIGNAL = 3.2; EXPRESSED IN LUNG, SIGNAL = 3.8; EXPRESSED IN HELA, SIGNAL = 3.7; EXPRESSED IN HEART, SIGNAL =   3; EXPRESSED IN FETAL LIVER, SIGNAL = 3.3
aatagcctggtgcaatgtgggctttttacagatttttttttttttgctagtttttaatatttggattgatatagcatctgactgtactaaccagaaaaatgctgagctagggaactttgttatttaaccttttatttggatttctagcttagcaactcataggtcttgaaaccttggcttctctctccctctgccagaatgcgttaagacctccaggtgctaactgttattatttctgttgactgagccccatatgcacttctagtgctcactgacctatcttttctgttgcagaaacattgctgaggctcttgtcagcaaaggtctagccacagtgatcagataccggcaggatgatgaccagagatcatcacactacgatgaactgcttgctgcagaggccaggtaagaccaaacattactaaacacatggggaacccacaccctcactttt

SEQ ID NO: 5663 - DNA, 374 bp, Homo sapiens
  MAP TO AC005544.1; EXPRESSED IN ADULT LIVER, SIGNAL = 1.3; EXPRESSED IN PLACENTA, SIGNAL = 1.3; EXPRESSED IN LUNG, SIGNAL = 1.4; EXPRESSED IN HEART, SIGNAL = 1.3; EXPRESSED IN BRAIN, SIGNAL = 1.2; EXPRESSED IN BONE MARROW, SIGNAL = 1.4; EXPRESSED IN FETAL LIVER, SIGNAL = 1.4
tggagccttttgttttctcctcatattttattgttttcatgtaggtttcaagacttaatcagagaactgtctcatcgtgatcaaagtgaaacacgggaactagctgaaatgccaccacctcaatcaagacttttgcaatatagacaagtacagagtagaagcccaccagcagtcccatctcccccatccagtacagaccacagtagccacttttctaactttaatgataacagcagagacattgaagtagccagcaacccagcatttccacagcgcctcccaccccagatattcaactcacctttctcgttgccatctgaacaccttgcccctcctcccttgaaatacctggcacctgatggagcatggacttt

SEQ ID NO: 5664 - DNA, 473 bp, Homo sapiens
  MAP TO AC003957.1; EXPRESSED IN PLACENTA, SIGNAL =   3; EXPRESSED IN LUNG, SIGNAL = 3.9; EXPRESSED IN HEART, SIGNAL = 3.6; EXPRESSED IN FETAL LIVER, SIGNAL = 3.4; EXPRESSED IN BRAIN, SIGNAL = 3.3; EXPRESSED IN BONE MARROW, SIGNAL = 3.1; EXPRESSED IN ADULT LIVER, SIGNAL = 3.4; EXPRESSED IN HELA, SIGNAL = 3.5
gaggaggtgctcatcgggcggggcgctggagggcttgtgcatatggacacccctggacagacatgccggaggtgtttgggcaccaggagcccccagggagaggcctgggctggggcaggcgcaggctcgctgttggctcactggaggagtgcccacatccctgctggtgtttccctccagtgcagcctgcctgcctctgccccccaggcatggccatcctcccacaccctgccatcttgggccatcctcccacaccctggcaggagtcagatggttgtcttgggcattgggcctcctgggttctgcagctgcatcttcgaggcctcaaggccgcccagcagaggcctgtccatcagtaagatgcacagggaccactgggctccctccttcacttgggagctgggctgtgtggcctgcgcagattccaggctgctgggctgggagctgcccgtcggctttgacaacggtacctg

SEQ ID NO: 5665 - DNA, 367 bp, Homo sapiens
  MAP TO AC004993.1; EXPRESSED IN PLACENTA, SIGNAL = 7.6; EXPRESSED IN LUNG, SIGNAL = 8.2; EXPRESSED IN HELA, SIGNAL = 9.7; EXPRESSED IN HEART, SIGNAL = 7.8; EXPRESSED IN BONE MARROW, SIGNAL = 8.3; EXPRESSED IN FETAL LIVER, SIGNAL = 7.5; EXPRESSED IN BRAIN, SIGNAL = 7.6; EXPRESSED IN ADULT LIVER, SIGNAL = 8.5
tgtctcttggagtgtagctggatattaactcatggaggaattacagtgtgggaaatgacatgtcaaatgaaggggcagtggagatagcaaggaagacaaagctggggagagaaaaccagtatgtggcctactgcagtgcaggtcaagctagggagggtaaagcgtcaggagaaacacatggaaactcccagatctgtggcttggatgccataaaagtaccggacacatgttgagacacaagccttacttttttcttccacaatcaggacaagtgaattatatgaagccatgcacttattccttagaagtatcaactgtagagacatgaatttgtcaatctccagagctgagaattgttctagaagca

SEQ ID NO: 5666 - DNA, 482 bp, Homo sapiens
  MAP TO AC000057.1; EXPRESSED IN FETAL LIVER, SIGNAL = 2.6; EXPRESSED IN BONE MARROW, SIGNAL = 2.6; EXPRESSED IN HELA, SIGNAL = 2.5; EXPRESSED IN PLACENTA, SIGNAL = 2.8; EXPRESSED IN LUNG, SIGNAL = 2.8; EXPRESSED IN HEART, SIGNAL = 4.1; EXPRESSED IN BRAIN, SIGNAL = 2.7; EXPRESSED IN ADULT LIVER, SIGNAL = 3.2
aagcagctatcatttccatattttgtgcattacatgtctctaggaattaaattccatccttgtgacttaggtatcttaagtgctcagagagatttcaaacagggaaacgtggaaaaagagttgggaatttggctctgaattaggatgcaaaataaagttcatcagagaggttgctgaatcacacgtttcatattttctctttctctatgagaagaaagaatgtgtgtatgaaaagcaatttcttgctaaaattacgtcatgtctccttagattttggaacatgagcacctaaactcgggccgcaatcagcttatccatgaagagcaagaggctcactgtggcttgatcctcaaaggccccatagtgcttctagtcatacttcagattcatgtagacctgggttcaaatcccagcacatcacttcttgctaactgtgtgtccatggacaagtgactgaatctctccaaggctcattttcttca

SEQ ID NO: 5667 - DNA, 457 bp, Homo sapiens
  MAP TO AC004901.1; EXPRESSED IN PLACENTA, SIGNAL = 6.1; EXPRESSED IN BRAIN, SIGNAL = 6.4; EXPRESSED IN BONE MARROW, SIGNAL =   5; EXPRESSED IN ADULT LIVER, SIGNAL = 5.7; EXPRESSED IN LUNG, SIGNAL = 6.4; EXPRESSED IN HELA, SIGNAL = 5.1; EXPRESSED IN HEART, SIGNAL = 4.7; EXPRESSED IN FETAL LIVER, SIGNAL = 5.6
tgcctgtcaggattgaagacatgctatagcatgcatgcagagcctctcaacaaaggctattcaggagacattggttcgagctatttaagaaaatctttgttcaatcatgagattgcatctaagctaattgagcagaaacttcagtgaccacacatgacaaagaatacaaatgatacagtttggctctctgtcaccacccagatctcatgttaaattgtaatacccatgtgttaaaggagtggcctggtgggaggtgattgaatcttgggagtggacttaccccttgctgttctcatgatggagttctcccaagatctggttgtttaaaagtgtgtggcacttcccccttctctttatctttcctgctccccaatagtaaagtgtgcttgcttccccttcatcttctgccatgattgtaagtttcctgaggcttcccagccatgcttcctgtatagcc

SEQ ID NO: 5668 - DNA, 466 bp, Homo sapiens
  MAP TO AC005553.1; EXPRESSED IN PLACENTA, SIGNAL = 1.6; EXPRESSED IN ADULT LIVER, SIGNAL = 1.6; EXPRESSED IN LUNG, SIGNAL = 1.5; EXPRESSED IN HELA, SIGNAL = 1.7; EXPRESSED IN HEART, SIGNAL = 1.6; EXPRESSED IN FETAL LIVER, SIGNAL = 1.4; EXPRESSED IN BRAIN, SIGNAL = 1.6; EXPRESSED IN BONE MARROW, SIGNAL = 1.6
caggagagctggattcaaccttgagctcttagagtgacttgctccatagctttgagcaaattatttatcctctctggactggaggtagcttgttgatccagttggcaggagcctctcagattgaattctttcattttatatccaagaaatattggatattaaatattgttaagtacctactgtatgtgagatatgattaagtaccaaggaatcaaaagagcttgttaccattaggggtggctagaacttaatcccatggtggagagagagagagagagagaaggaagaagaggaagaagaagaagagaagaagaagaggaggaggaggaggaagaagaagaagaagaggaggaggaggagaacaagaatgagaacaagaacaagaacaagaagaacaagaacgagaacaagaacaagaacaggaacaacaagaagaggagaaagttagaattgcctgtctctgggc

SEQ ID NO: 5669 - DNA, 389 bp, Homo sapiens
  MAP TO AC000066.1; EXPRESSED IN PLACENTA, SIGNAL = 1.3; EXPRESSED IN BONE MARROW, SIGNAL = 1.3; EXPRESSED IN ADULT LIVER, SIGNAL = 1.1; EXPRESSED IN LUNG, SIGNAL = 1.4; EXPRESSED IN HEART, SIGNAL = 2.1; EXPRESSED IN FETAL LIVER, SIGNAL = 1.2; EXPRESSED IN BRAIN, SIGNAL = 1.5
agttttgtgcaatgaagtttattatcttcctgatataagaagatttcatgccagagagatagatttagacttgtttcttttgcagattgataagggtatggagagaatgttttcttaattatttttgtgtgccattttgaccgccttgcatctaggagaattatgtttaatctttagaagcagaaatcaaaatttaaattccttaaaatacacaattttgttgttaacagactttatgcagtgtccttggtgaatattatactcctgctttaaaatgtgaagtaaatgcagaagacaaagagaattctggtgattacatttctgaaaatgaagatccagaattacaagattatagatatgaagttcaaggtaataaaagcttaccatac

SEQ ID NO: 5670 - DNA, 470 bp, Homo sapiens
  MAP TO AC003678.1; EXPRESSED IN PLACENTA, SIGNAL =  13; EXPRESSED IN HEART, SIGNAL =  11; EXPRESSED IN FETAL LIVER, SIGNAL =  11; EXPRESSED IN BONE MARROW, SIGNAL =  12; EXPRESSED IN ADULT LIVER, SIGNAL =  12; EXPRESSED IN HELA, SIGNAL =  12; EXPRESSED IN LUNG, SIGNAL =  14; EXPRESSED IN BRAIN, SIGNAL =  14
ttccctttgatcaggattgcacaccagggtggtgcaggaatcaatgaaacctggggcaggccatcatgggcttcctgctggagggaagggaggcagtttgggcctcactggcaaaagctcaagactcagtgccaggcggctaggtttgagttcgggccccagcactcattagctgcttggacaagtcatttaacccctctcaagtttcctggtctgtaaaatcgggaccaaaataatagcacctacttcatagcactgtggtgaggactgggagagttaatgtgtaaaaggcccggaagagtgaaaacttttaaagtgttggtgatggtgacagtgatggtgatgatgatggtgacggtgatggtgatgatgatggtgacggtgatagagatggaaggagaggagaggaactgctgctcatctggggaccagacaggcacccagaggaaggttccagggcgacactctag

SEQ ID NO: 5671 - DNA, 452 bp, Homo sapiens; identical to SEQ ID NO: 5472
  MAP TO AC004906.1; EXPRESSED IN PLACENTA, SIGNAL = 4.3; EXPRESSED IN LUNG, SIGNAL = 4.2; EXPRESSED IN HELA, SIGNAL = 4.1; EXPRESSED IN HEART, SIGNAL = 4.3; EXPRESSED IN BONE MARROW, SIGNAL = 3.8; EXPRESSED IN FETAL LIVER, SIGNAL = 3.9; EXPRESSED IN BRAIN, SIGNAL = 3.6; EXPRESSED IN ADULT LIVER, SIGNAL =   4

SEQ ID NO: 5672 - DNA, 464 bp, Homo sapiens
  MAP TO AC005773.1; EXPRESSED IN BRAIN, SIGNAL = 1.7; EXPRESSED IN PLACENTA, SIGNAL = 1.7; EXPRESSED IN LUNG, SIGNAL = 1.5; EXPRESSED IN HEART, SIGNAL = 1.5; EXPRESSED IN BONE MARROW, SIGNAL = 1.6; EXPRESSED IN ADULT LIVER, SIGNAL = 1.6; EXPRESSED IN FETAL LIVER, SIGNAL = 1.8
atgggcatggtatttgctggtcttaccacatattataccatgtagaagctaccagcctggtagaacagtagaatgtcctttggaaagtgcagctgaggcctcagctttgagatgacaccctctaagaatggagatttaaaaatgtttggagtgcgtctccaatatagctattggaagcagtattattctagcgaacacatgggtccaggaaccaagcagtagacttaggagagcctcctatgactttcattccaacaggccctcttaaggaacttgtgcttcctgcccctgagtgtgagtctcaagttctggttctcagaaggcctgtgcttccatcaaaggacccagtaaacatcatgctgaactttaaattgcatttaccacatggtcactttgggtttctcatgccaatagaccagcaattaaagaaagtagttaccatgtgtcttgtgaggggctatagc

SEQ ID NO: 5673 - DNA, 495 bp, Homo sapiens
  MAP TO AC005137.1; EXPRESSED IN PLACENTA, SIGNAL = 4.6; EXPRESSED IN ADULT LIVER, SIGNAL = 4.5; EXPRESSED IN LUNG, SIGNAL = 5.3; EXPRESSED IN HEART, SIGNAL = 3.6; EXPRESSED IN FETAL LIVER, SIGNAL = 4.3; EXPRESSED IN BRAIN, SIGNAL = 4.7; EXPRESSED IN BONE MARROW, SIGNAL = 6.6; EXPRESSED IN HELA, SIGNAL =   4
ctgaaggatggctcagtggtgggtggggctgaggaccctgctccctttctggacagctggcaggtgcccagctccctgacctcagtgggccagacccgcttccgcccagacagctgcgccacaactgactgctcgccctgccttcgcatggtgtccaaccgcaccttcagtgcctgccaccgctttgtatgtgccaactgggtccagcactggggacacctcctgggctggctggggatggcagcacctacctgcagaggctcattgttccttttgggcagggaggggaggagctgggcactgggatatgtgccatccgagtaaccagcactgcctgatgcatatgtccaggtgcctccggagtcattctgtgagctgtggatccgggacaccaagtacgtgcagcagccctgcgtggccctgactgtgtacgtggccatgtgccacaaatttcatgtgtgcatcgagtggcggcgctctgactactgccgtgag

SEQ ID NO: 5674 - DNA, 482 bp, Homo sapiens
  MAP TO AC005803.1; EXPRESSED IN LUNG, SIGNAL = 3.3; EXPRESSED IN HELA, SIGNAL = 3.2; EXPRESSED IN HEART, SIGNAL = 2.9; EXPRESSED IN FETAL LIVER, SIGNAL = 3.1; EXPRESSED IN PLACENTA, SIGNAL =   3; EXPRESSED IN BRAIN, SIGNAL = 3.4; EXPRESSED IN BONE MARROW, SIGNAL = 3.1; EXPRESSED IN ADULT LIVER, SIGNAL = 3.2
cagccttgctgtcatcctgggggcggagagggatggagatcagagtgttagtgtcccccagccccatcccctgctgggccaggctggggagggccagggagaggggtgaggggtcaggagtgaggtgcattctgcaagaacagctgaatgaaggaaggaaggaaggaatgattgaattggtgagccagtggggacaggctggaccaagaaggccacaacgagagctggggagatggagaccctgcatatgcctggcctatgcggtggcctcctctgcggtcccccaaggcttcccccgtcccctgatcaccttgtccagcagcaggaagataggcacgatgatgaagaggatgatcagcagcgtctggatcatgatgataccatccttcagcgtgttcctctgcttcagctgtgccaaggtgctgaatcctgcggggacaggggtggggttgtgagcctgggccacagtccaccttttaggc

SEQ ID NO: 5675 - DNA, 471 bp, Homo sapiens
  MAP TO AC004837.1; EXPRESSED IN PLACENTA, SIGNAL = 2.1; EXPRESSED IN HEART, SIGNAL = 1.7; EXPRESSED IN BONE MARROW, SIGNAL = 1.5; EXPRESSED IN LUNG, SIGNAL = 1.9; EXPRESSED IN FETAL LIVER, SIGNAL = 1.6; EXPRESSED IN BRAIN, SIGNAL =   2; EXPRESSED IN ADULT LIVER, SIGNAL = 1.8
gagactctgggtaactgaagctgtcacaaaatcaaactccaatacaggtgacaccgggagagctgtaagactatgcaaagtatcctaactgtgtgtacataacacagtagagagagtcatatactgatatcaaaaagggaataaacacaattagagacagagtaaaagactaacaagttagaacctctagttgtctacttgtttctggggaagaaattgttgtatagtatgtcacaagcaacaacattactctaggacatacctgaagtcagctgtagctgcaaaggattccatttctgtaatagagaaaacacagaggaacccctccccacttcggaagtagttgtctctaattgcagcgtagtcctcctgcccagctgtatctaagatatcgatctggacttcctccccatctagcactaccttcttccgatagctgtctgctttggtaggctcatagtcctccacaaa

SEQ ID NO: 5676 - DNA, 459 bp, Homo sapiens
  MAP TO AC002041.1; EXPRESSED IN PLACENTA, SIGNAL =  31; EXPRESSED IN LUNG, SIGNAL =  37; EXPRESSED IN HEART, SIGNAL =  28; EXPRESSED IN BRAIN, SIGNAL =  34; EXPRESSED IN BONE MARROW, SIGNAL =  32; EXPRESSED IN ADULT LIVER, SIGNAL =  30; EXPRESSED IN HELA, SIGNAL =  32; EXPRESSED IN FETAL LIVER, SIGNAL =  30
atcccagttcccaccacacacccgctccacaaatcctgcccaaggtgagggctggtcccgggtcctctggctgctgcatcagcgagtgcaggagggaggggaagcctccaagggggtgacgtgggctcaagggtgcaactcggccaggagtgaactggggccccgaaggaggtgtccgggctgctcctggagcccagcccgggtccccgaaccccttacctccagggtctgtatctcctgctgggtgaggtcactggacacagcgcacttggtgcacagcccgcacaggctgccaatgaagatgacgatgagcttctggagctgcccgcactgctgcagcgcccggctggccgcagcccctgtgccaccctccgtggccgccgcatcacccccaccaccaccatccttcttctcccccatcgcctccgcaggcagcgccgctctatgcaggccacaggg

SEQ ID NO: 5677 - DNA, 444 bp, Homo sapiens
  MAP TO AC004736.1; EXPRESSED IN LUNG, SIGNAL =  12; EXPRESSED IN HEART, SIGNAL =  10; EXPRESSED IN FETAL LIVER, SIGNAL =  11; EXPRESSED IN BRAIN, SIGNAL =  12; EXPRESSED IN BONE MARROW, SIGNAL =  11; EXPRESSED IN ADULT LIVER, SIGNAL =  11; EXPRESSED IN PLACENTA, SIGNAL =  12; EXPRESSED IN HELA, SIGNAL =  12
ctgtccaggcacctgctatgggtcctggcatcccgaggcagggccagggaagggccagggtgaggccaagagggcgggtgaggacagcccagcccagctcctcactgctggggagcctggtgtgggggcaggactgctcttggcagctatgttctccctggatggagagaaggcctgtgtgtctatggggtgagtagaggcagaggcagccagaccctcctaccccttagaaagcaaggttctagcagcatctctgtaggggttcatggtaggggcgagggcaatggctctgcctgcccagtgcctcagctcagtgcccagatccctgccgcttatccctccagacctcgtctgggccctgcctttgttctcatgcagcaactgtctccaggagatggagatgacatcagaatagccggagcaggtgtgatccaaggttctgca

SEQ ID NO: 5678 - DNA, 466 bp, Homo sapiens
  MAP TO AC003049.1; EXPRESSED IN PLACENTA, SIGNAL = 5.2; EXPRESSED IN ADULT LIVER, SIGNAL = 5.2; EXPRESSED IN LUNG, SIGNAL = 6.2; EXPRESSED IN HEART, SIGNAL = 5.5; EXPRESSED IN FETAL LIVER, SIGNAL = 5.1; EXPRESSED IN BRAIN, SIGNAL = 5.5; EXPRESSED IN BONE MARROW, SIGNAL = 5.6; EXPRESSED IN HELA, SIGNAL = 5.5
tcttctgggatccagttaagttagggaaaacagtttggtccttttgagtcttgcttttaaactttctttggcaggactgctgagtactccttctagaactctacccagtgtccaaggattattgtaaggttttccactctggctggtgggaacaggaactattctcagccctgtggaagctccctcattgttcttctaatcctctcaagtggtttttccttgatctctgatggtttccttttcctgacatgcatgggctgatcatgactcaactgaagacaagaagggtcctttactaaactccagatctctttcctcctcctcctcctcctcttccttctcctcctccttctcgtattcctcttcctcctcctcctcttcctcctcgtcttcctccttctcctcctcctcctccctactctctgacctgtgaactctagtactttgccctgagaactttagctgc

SEQ ID NO: 5679 - DNA, 471 bp, Homo sapiens
  MAP TO AC005809.1; EXPRESSED IN BRAIN, SIGNAL = 3.1; EXPRESSED IN ADULT LIVER, SIGNAL = 2.6; EXPRESSED IN PLACENTA, SIGNAL = 2.7; EXPRESSED IN LUNG, SIGNAL = 2.8; EXPRESSED IN HELA, SIGNAL = 3.1; EXPRESSED IN HEART, SIGNAL = 2.5; EXPRESSED IN BONE MARROW, SIGNAL = 2.7; EXPRESSED IN FETAL LIVER, SIGNAL = 2.3
gtacgtccctctgttcccaggagccccactttagggccgtttcctgggctgactccctggcctgcaagcccccaggttgcttactaagcccaaacccccacccatgccactgaccgcccctgctctctgttatccaaagccctcagctccctgtgccctctgggacacggggcctcctccctacaaggaaagctgggtcccaagcgcgaccctggcctctccatcctgccccctggccacccaccccctcgccctgtttctctgtcctgcaggacttcctctggctttattgttttaagttggtggttgggccaacagccagcttcaattacactcctcgcctcctcctcctcctcctcctcctcctcctcctcctcctccacctcttccagcccttctctgccctaggcccaggggtgggccttgggctacagctgactgtggtacccaggcaaaacagccctaggaaaa

SEQ ID NO: 5680 - DNA, 442 bp, Homo sapiens
  MAP TO AC003689.1; EXPRESSED IN LUNG, SIGNAL =  10; EXPRESSED IN FETAL LIVER, SIGNAL =  13; EXPRESSED IN BRAIN, SIGNAL =  17; EXPRESSED IN BONE MARROW, SIGNAL =  12; EXPRESSED IN HELA, SIGNAL = 9.4; EXPRESSED IN PLACENTA, SIGNAL =  10; EXPRESSED IN HEART, SIGNAL =  13; EXPRESSED IN ADULT LIVER, SIGNAL =  13
cggctgactctaaggagaaccacagggtcaggcctcaaggtgggctcagggatgagccagcccggctccattttgcagactggaaagctgagacccctagccaggcagggcgttgtcaaagttcacgcacagagtcagtggcagagcctgggcaaccctctgcccaggccccaccggtcttagctctctggtctgacacttccaggggagcggcttccggtccgtctgacaaacgggagcagcagctgcagcgggacggtggaggtgcggctcgaggcgtcctgggagcccgcgtgcggggcgctctgggacagccgcgccgccgaggccgtgtgccgagcactgggctgcggcggggcggaggccgcctctcagctcgccccgccgacccctgagctgccgcccccgcctgcagccgggaacaccagcgtagcagctaatg

SEQ ID NO: 5681 - DNA, 465 bp, Homo sapiens
  MAP TO AC005410.1; EXPRESSED IN LUNG, SIGNAL = 4.4; EXPRESSED IN BRAIN, SIGNAL = 4.2; EXPRESSED IN BONE MARROW, SIGNAL = 3.8; EXPRESSED IN PLACENTA, SIGNAL =   4; EXPRESSED IN HELA, SIGNAL =   4; EXPRESSED IN HEART, SIGNAL = 4.3; EXPRESSED IN FETAL LIVER, SIGNAL = 4.3; EXPRESSED IN ADULT LIVER, SIGNAL = 4.4
gtcagaagtacaggtggcccctgggacttgtgactggcatctgagaacaggagcagtcttggattgagccctgaacctccagagttagcttcagaactgaattgctggacactgtactggtgttagagaatcacagaattggccattggtgtgaaaagccccacccattttgtgtcataagtggtatcagaaaaaagacaacacacctgatgggaccagagaggagccctgtgtttcactcgcagatcataataccctctgcttacccattgccacagtctctgggggtcccccttcaagctttccacaagggtcactgcctcttctccacttcctggacactgtttccgcacccacatctggatctccccaggcaggatggtcagaaactgctccaacatgaggatctctaggatctgctctttggtgtgaacctctggctgtagccactggaaacagagcttc

SEQ ID NO: 5682 - DNA, 480 bp, Homo sapiens
  MAP TO AC005609.1; EXPRESSED IN LUNG, SIGNAL = 1.7; EXPRESSED IN HELA, SIGNAL = 1.8; EXPRESSED IN BRAIN, SIGNAL = 1.9; EXPRESSED IN BONE MARROW, SIGNAL = 1.7; EXPRESSED IN ADULT LIVER, SIGNAL =   2; EXPRESSED IN PLACENTA, SIGNAL = 1.6; EXPRESSED IN HEART, SIGNAL = 1.8; EXPRESSED IN FETAL LIVER, SIGNAL =   2
catatggcacagtttccacgtttgactatatgctaggccataaagcaagcctcaacaaatgtaaaagcattgaactcataaaagaataaacaatcacaatgaaaactggaaattaataacagaaagaaatgtgggaaatgcatccagaacatatatccagaacatatctatatatacatatattctgatatatatatctgatatatatatctgtaaaggctttattgtacttcttatatccataaagattcttaccagtatgaattctctaatatgtagtaaggcagaattaactttatatattttcctacatttcttacattcatcaagtttctcatcagtttgaattctctgatattgagcaatgtgtccagacacaataaaggctttactacattctttacattcataaagtttgtcaccagtatgaattatctgtttctcagaagaactcaaatcagattaaagaccttatgttcc

SEQ ID NO: 5683 - DNA, 399 bp, Homo sapiens
  MAP TO AC005722.1; EXPRESSED IN LUNG, SIGNAL =   4; EXPRESSED IN FETAL LIVER, SIGNAL = 3.7; EXPRESSED IN BRAIN, SIGNAL =   4; EXPRESSED IN BONE MARROW, SIGNAL = 3.9; EXPRESSED IN HELA, SIGNAL = 3.9; EXPRESSED IN PLACENTA, SIGNAL =   4; EXPRESSED IN HEART, SIGNAL =   4; EXPRESSED IN ADULT LIVER, SIGNAL =   5
tgtcctggctccacttaacctgccgctgacatgtgatgaagccccatgtgccttcgtcctccttggagctttggaagaacagtggagacagtggtaggcccaggctcaggaaggccgctgtgccattacaggctgcgggcgccaggctgtggtcaccagaggccgccgggtccgccacacaccgctggcgccgctgacagcccgctccccgcgcgggatttaggaatgtcccgggcagtggaaacggctgacgcggggcgggctgttttgcagagcttcggcagccccaacaagaagcacgtgggcgtgatcctgcagcggggcgcgctggtcctgctcctctgctgcctcccttgctgggcgctcttcctcaacacccagcacatcctgctgctcttc

SEQ ID NO: 5684 - DNA, 490 bp, Homo sapiens
  MAP TO AC004741.1; EXPRESSED IN PLACENTA, SIGNAL = 2.2; EXPRESSED IN HELA, SIGNAL = 2.1; EXPRESSED IN HEART, SIGNAL = 1.9; EXPRESSED IN BONE MARROW, SIGNAL =   2; EXPRESSED IN LUNG, SIGNAL = 2.4; EXPRESSED IN FETAL LIVER, SIGNAL =   2; EXPRESSED IN BRAIN, SIGNAL = 1.9; EXPRESSED IN ADULT LIVER, SIGNAL = 2.2
tccatttctttgggttctattactggagctttatttgtgtactttgatggcatgatatttccctgatttttcataattctcatgcctttacattgatgcctatgtgtttgaggagatagccatttatttcaggtgttcttttgtaatagacctttagtatttaggaatttggatggggccactgatgacaacacaggagaggcagaccttggtgtcagcttctctaattgggctcggttgcttcctgtgctctgaggttaaatagtattgctgactgtgctctggtaagatcactggctcaactttgtcgtcagttgaggctgtcacctgagttctgcaatcatctgtgatttggcagagttgtggattgtcgtctttttctgggcagtaccagaatctgtagttaggcaggattgtgtgaaggactccaaggctgagtgaggtcttatgggattgccgcataggatgggcaggaccagaggctatgctt

SEQ ID NO: 5685 - DNA, 471 bp, Homo sapiens
  MAP TO AC006504.1; EXPRESSED IN ADULT LIVER, SIGNAL = 2.4; EXPRESSED IN PLACENTA, SIGNAL = 2.8; EXPRESSED IN LUNG, SIGNAL = 2.9; EXPRESSED IN HEART, SIGNAL = 2.4; EXPRESSED IN BRAIN, SIGNAL =   3; EXPRESSED IN HELA, SIGNAL = 2.6; EXPRESSED IN FETAL LIVER, SIGNAL = 2.3; EXPRESSED IN BONE MARROW, SIGNAL =   3
ggagtgcagaagagaggtggtaggagaatgagatttgctacagtacacatccatattgagggtatcatggcaagttcctgttccctatgccacagtggtacagttgacaaattcttcaatagaatgcactctcaaacatcaactttataaattatctgaaaatataaaattataaaagaaaaaaaatcccaaagcatttatttcaaagacaggctaaataaaatttgctaatgacttacttcaaatcttgcatagcaatgagtaactttctttccttagatattcatcctctttaagctaggatttagattaccataactatattttatgattaactgaatagcttcattagcaatttcttcatcaggtaatttcatggttattttccaaatgaaatctattcccatcaacttcagcttttctacattctgttcaaaagaaaaaaacaaattatatagcacaccaggatca

SEQ ID NO: 5686 - DNA, 471 bp, Homo sapiens
  MAP TO AC003070.1; EXPRESSED IN ADULT LIVER, SIGNAL = 4.5; EXPRESSED IN PLACENTA, SIGNAL = 4.3; EXPRESSED IN LUNG, SIGNAL = 4.3; EXPRESSED IN HEART, SIGNAL = 4.4; EXPRESSED IN BRAIN, SIGNAL = 4.5; EXPRESSED IN HELA, SIGNAL = 4.8; EXPRESSED IN FETAL LIVER, SIGNAL = 4.4; EXPRESSED IN BONE MARROW, SIGNAL = 4.5
gtctgtgggagcaggagaaggggtcaaaggctctcagaggtagccccgcccacccatcaccaccccctcacccgtgtgtccctgggcctctgggagcaggaggcgggatcagaggcgctcagaggtagaaccgcccactctggccctgcccctcacccgcgggtcccctgggctgccagggctcaggcccggctgcatctccaactcctcctcgggctcgttctcggcctcgtcctcccaggccgtctcgcccgtcagcgggttgtagaagaacaccctgcggctctcctcatcccagtactggccccactcggtctcaaggctcacgtggctgtccaccgaggcaggggaggtggctgggctggcggcaccctcggcagcctcaaagggcgactcccaggtggtaactcccgtgtctgggttgtagtagtaggggcgcccggtgcccgcgtccgtgtgcgtctcccacac

SEQ ID NO: 5687 - DNA, 472 bp, Homo sapiens
  MAP TO AC000002.1; EXPRESSED IN BRAIN, SIGNAL = 1.8; EXPRESSED IN PLACENTA, SIGNAL = 1.4; EXPRESSED IN LUNG, SIGNAL = 1.5; EXPRESSED IN HEART, SIGNAL = 1.8; EXPRESSED IN BONE MARROW, SIGNAL = 1.5; EXPRESSED IN ADULT LIVER, SIGNAL = 1.8; EXPRESSED IN HELA, SIGNAL = 1.7; EXPRESSED IN FETAL LIVER, SIGNAL = 1.6
aggcagcaataaggaactgggttagggtctcttcccccgtccacagatattggggtatgtgggtccctgagtcttcggtccatgcaaggggcatctgttgctctcctgcagacagtgatgcaccctgggccgcaggctggctgctcgcaagttgcttttcctcagtgaaagaatctgcttgttggaggcaccagaaggttcttgaagctgcagaaaattctacaagtggtggaaggttctggaaacagcttcctccctcttcctctcccccttctccaccacaggcagcatctgctgtagtgtgagccgcaaccctgcctggccctccaccaagcctgaggaggacgcgagctcggctgcggctgacagcattcagcagcagaactccaagcaagggggtcacctgcccaggagactacccccttagtaactcaagcttttatgcactcattggtattcatccagatggctg

SEQ ID NO: 5688 - DNA, 492 bp, Homo sapiens
  MAP TO AC005846.1; EXPRESSED IN PLACENTA, SIGNAL = 1.7; EXPRESSED IN LUNG, SIGNAL = 1.6; EXPRESSED IN HEART, SIGNAL = 1.6; EXPRESSED IN BRAIN, SIGNAL = 1.4; EXPRESSED IN ADULT LIVER, SIGNAL = 1.6; EXPRESSED IN FETAL LIVER, SIGNAL = 1.4; EXPRESSED IN BONE MARROW, SIGNAL = 1.4
cctcaggctttcaacatcagtgtgtctgttttacagacaccctgtggccaatctcaggtagatgtggctttcagggtgaggctgagcgaattcataacaggaggcctaaagagcatccgggcctcctccctggctgcctggctcactttggacaaccccttcccttctttgcctcagtttcccccttttagggacagccactaggcttccctgtctcctgctgggcaccatactgggcctatgaagtccacactccacgctacaggtcctcaacttccttgggcttcctggagggttgggaggcacccagagtattctgtgttccttcattgcctccatggcccagatgggcccctcaaacccaaggtgcccaacttgtcatctctgccatgactgctcctagtgtctgtcaggaccggaagtggaactgcacagaccatgtgtgtgatgccacgtgctccacgatcggcatggcccactacctcaccttcg

SEQ ID NO: 5689 - DNA, 472 bp, Homo sapiens
  MAP TO AC004650.1; EXPRESSED IN PLACENTA, SIGNAL = 2.2; EXPRESSED IN LUNG, SIGNAL = 4.4; EXPRESSED IN FETAL LIVER, SIGNAL = 6.6; EXPRESSED IN BRAIN, SIGNAL = 4.2; EXPRESSED IN BONE MARROW, SIGNAL = 3.1; EXPRESSED IN ADULT LIVER, SIGNAL =  18; EXPRESSED IN HELA, SIGNAL = 4.9; EXPRESSED IN HEART, SIGNAL = 1.7
cctccttgggaagaaaaagcaagaaacatccaaaattataaacccaccttcacatattccaacaaatatgtttttaaaataacaaatcaaacgcaacactcagagagactataagccatgcaacaatgtcttttattatgtatgcggttttaaaattatttcttgaatctctccatacacaggcaaaaataagtgtgttacttaacatactggaaattgcctaacttaatcattgcctaaagaagagaaaattatccccaaaacgtgcttaaccaggaggccaatgcatttgccgacctccaagaacatggagatgaacgtgatagacagactgtccaccatctgaaccttcattcaccaccattcgataacccttattcaggcccagatcagcagcacatttcttgccaacaatcattaagtgtccaagaagctggaaaaggaaaaaaagtttcttaggcacaggcaattt

SEQ ID NO: 5690 - DNA, 484 bp, Homo sapiens
  MAP TO AC005690.7; EXPRESSED IN LUNG, SIGNAL = 1.9; EXPRESSED IN BRAIN, SIGNAL = 1.8; EXPRESSED IN ADULT LIVER, SIGNAL = 1.8; EXPRESSED IN PLACENTA, SIGNAL = 1.9; EXPRESSED IN HELA, SIGNAL = 1.9; EXPRESSED IN HEART, SIGNAL = 1.4; EXPRESSED IN BONE MARROW, SIGNAL = 2.1; EXPRESSED IN FETAL LIVER, SIGNAL = 1.6
ggcagaatcttaaggcaaagcaaaacgaatattcactcaggcagatgggaaaagttgcagattgtgtgaatggatttgtctctcctcctctttcacccacacttctcctttcaaaggatgaagactgaagtgattgcaaccatgcagagtataacacagaagcacttgttattcacataggacaccaattgccaaagacctttatctcagtgcctttcgttagcccagtcttttaactgtttttaggatctgtttcttctcataggatgatgatgacgataatggtggtcatggtgttggtaatgatgttggtgataacgatgatgatgctgttgacaatgattttggtgatgatgatgatgttgatgaagatgataatgaagaggaagacgttactggtgatgatgatgccggtgatgagaatgattttaatgaagattatgatgaagatgatgacattattggtgatgatgatgctggtaga

SEQ ID NO: 5691 - DNA, 478 bp, Homo sapiens
  MAP TO AC004752.1; EXPRESSED IN LUNG, SIGNAL =  21; EXPRESSED IN BRAIN, SIGNAL =  18; EXPRESSED IN HEART, SIGNAL =  13; EXPRESSED IN FETAL LIVER, SIGNAL =  14; EXPRESSED IN BONE MARROW, SIGNAL =  15; EXPRESSED IN ADULT LIVER, SIGNAL =  15; EXPRESSED IN PLACENTA, SIGNAL =  17; EXPRESSED IN HELA, SIGNAL =  16
gctcacttcatgctcactgctaagtttcttctgtttgtcctgactttatagctttccctaattgcaattccctgctacaaacatcacagatggagaacacatggagggaacaaatgttaggtagcctgctgaaccctagggccaagttcaccagtaatcctactagattttagcatcataattcctctatctggcatggctccaccatcagggcccagatgaccaaagacacccaggaagggaatgaagacttcctgttgtttaaaactgtccttctgtctgtacttcactgccctcagcaaactgccactccacagccatatgatcctgattcacttcctctgcttccacagccaacatcttctcagcaccagagagaaacctaattcgcccttactcctgggttgctttccatgttgtcctcaaggtgcctcgggcatgggccaccagtaaggattcacccagtgaggattcagct

SEQ ID NO: 5692 - DNA, 469 bp, Homo sapiens
  MAP TO AC005826.1; EXPRESSED IN HELA, SIGNAL =   3; EXPRESSED IN HEART, SIGNAL = 2.9; EXPRESSED IN BONE MARROW, SIGNAL =   3; EXPRESSED IN PLACENTA, SIGNAL = 3.1; EXPRESSED IN LUNG, SIGNAL = 3.6; EXPRESSED IN FETAL LIVER, SIGNAL = 3.4; EXPRESSED IN BRAIN, SIGNAL = 3.4; EXPRESSED IN ADULT LIVER, SIGNAL = 3.4
ttcggggttagtgtgtctccctggtccctgtgcccttctcaacaaagccagggtggggcttcccatgaccaaatcctgagaacgcaaatgactagacatcctgtagctcctaatgcaagctggtggaaagcagctgccctggagccaagctgtctctccgctccatgaccagccagctctcatctagttcctggaagcaccctcaactacccagggagtgtcctgactctccacccccaacccccaacccccaagtcccaactacctgcccgacttggtgatgatcatctcggtgcccagctcatggaatttgtcccaaagctccttggtctccaggctgcaggcaattttggccatttcctcactggggatgatgggggtggtggggatcagtggctcagtgcacagagaggaggaggacgggctgctgccactgcctccaccaaactccccatgagcatccaggctg

SEQ ID NO: 5693 - DNA, 388 bp, Homo sapiens
  MAP TO AC005164.1; EXPRESSED IN PLACENTA, SIGNAL = 2.5; EXPRESSED IN LUNG, SIGNAL = 2.9; EXPRESSED IN HEART, SIGNAL = 2.2; EXPRESSED IN BRAIN, SIGNAL = 2.3; EXPRESSED IN BONE MARROW, SIGNAL = 2.5; EXPRESSED IN ADULT LIVER, SIGNAL = 2.5; EXPRESSED IN HELA, SIGNAL = 2.6; EXPRESSED IN FETAL LIVER, SIGNAL = 2.2
aaaatattggggtaactcttgcctttcattttacattcttaactctattataggtgctcaatttcaaatgaatatatatttcttgttatctgccagactttataacctacagtaaataagtatagtttaaaatgtagtatttaaccggtataggaagacaaagtaaaatatagtaagaaaaaactttacaagtggaaaataaagtggattcaatgtgtatctgacaaaagcaagtgcaactcaacacttactgatttagcacgacatcgagaatgaatgacgttccaaaggcatcaacctggaagcttgcttggtcaacatgagtcaactacaatatcaaaaagaaaaaaggttatttattactcagccatactaatcagacaattag

SEQ ID NO: 5694 - DNA, 442 bp, Homo sapiens
  MAP TO AC005730.1; EXPRESSED IN PLACENTA, SIGNAL =   6; EXPRESSED IN LUNG, SIGNAL = 6.5; EXPRESSED IN HEART, SIGNAL = 5.3; EXPRESSED IN BRAIN, SIGNAL = 6.3; EXPRESSED IN BONE MARROW, SIGNAL = 5.5; EXPRESSED IN ADULT LIVER, SIGNAL = 6.2; EXPRESSED IN HELA, SIGNAL = 5.9; EXPRESSED IN FETAL LIVER, SIGNAL = 6.5
aactaccgatgcagaggctggcagcaaggactgaaggactgtacagtacttgcctggagcaggcggatggccacacccctgcgaagcctgctcagctggctgggggacgctccagtgtgtgagtggcaggatgcagggtacttcctctgccagggagttgcactggggagatcctcccccactcacactttggcagctggggctttggaatgtgacttagcttctgtcaaagggtcaatccaccctttgatatatgatgcaaaggcgaacatatgatgcaaaggtgagagaacagcccaaattaggacttttaccacagctgtggaggtggacagcgacagtggtgggccctggccagacttttcatgctcaaaggtggtggttgttcttcctacttcttgtccctccagggcttcctttgcctgtgtgctgaacctgcttc

SEQ ID NO: 5695 - DNA, 459 bp, Homo sapiens
  MAP TO AC002536.1; EXPRESSED IN LUNG, SIGNAL = 2.2; EXPRESSED IN FETAL LIVER, SIGNAL = 3.7; EXPRESSED IN BRAIN, SIGNAL = 3.3; EXPRESSED IN BONE MARROW, SIGNAL = 3.9; EXPRESSED IN ADULT LIVER, SIGNAL = 4.5; EXPRESSED IN PLACENTA, SIGNAL = 3.7; EXPRESSED IN HELA, SIGNAL = 4.1; EXPRESSED IN HEART, SIGNAL = 3.6
gacaagggccaccaagttaccacgtgacttgaatggctcatcatgatctggggactttctgacccacgtagccataaagtcgtgtgcacagcagtgctgcatcagccagtggaagcaggggataggtgatcaggcccaagcaggtcctgaaggcacaaggaagttacgtgaagtagtggcccaaagcctgtggccccactgctgctcccctgccttctccctccctgtctgcacctgtggctgcatggggagttcctctgattagttgacggaggaagagaagactcaggccggacttacaaatggttctgctcagtatgcagacactaccggaaagtggacagctgcagccctgtagcccctgggggatatccctcagacagtggtgaagaggaatcttccccgtgggtagaacttccggcatgcacctgtgtgtgctccgcttagaaggagcagatg

SEQ ID NO: 5696 - DNA, 481 bp, Homo sapiens
  MAP TO AC000055.1; EXPRESSED IN BRAIN, SIGNAL = 9.8; EXPRESSED IN ADULT LIVER, SIGNAL = 7.5; EXPRESSED IN PLACENTA, SIGNAL = 9.4; EXPRESSED IN LUNG, SIGNAL = 9.4; EXPRESSED IN HELA, SIGNAL = 9.2; EXPRESSED IN HEART, SIGNAL = 9.1; EXPRESSED IN BONE MARROW, SIGNAL = 8.8; EXPRESSED IN FETAL LIVER, SIGNAL = 9.1
tcagtcttgaaatatgcacgctttcatcttcaagagatagattacatattccataagcaaaagttcatattgcagatcatgtttggtgaatcgcccacaacattggaagggaaaccggaaaactgtctgattaagtgacatatcttaccagattagcaatcaggagagaggagattcagtcctggttctacgactatcagagtaatcttgtacaatctctcttgatgcctacccatcaatttccccttcttaaactagctgacccccaaggtttcttacagttttggcatcccaagattctgtagtgttgtctgtagaataagatgctttattcttgtcttttgtatgtgcagagaaggtattagtacctatacttggggtagaactttcctcatatacattatcagagctaccacatttctagccaaaataagaatgaaactagtcagtgtgtgaagagttggttgtgttgagagatgga

SEQ ID NO: 5697 - DNA, 494 bp, Homo sapiens
  MAP TO AC003661.1; EXPRESSED IN LUNG, SIGNAL = 9.4; EXPRESSED IN HELA, SIGNAL = 7.9; EXPRESSED IN HEART, SIGNAL =   7; EXPRESSED IN FETAL LIVER, SIGNAL = 7.8; EXPRESSED IN BONE MARROW, SIGNAL =   8; EXPRESSED IN PLACENTA, SIGNAL = 7.7; EXPRESSED IN BRAIN, SIGNAL = 9.4; EXPRESSED IN ADULT LIVER, SIGNAL = 8.2
gagcaattgtctctgaaaccatacttcacttatgtattccacaaatatttattgagcacttactatgtgccaagcaccatcctagatgcctgaaagatagcaagtgaatagagtcttataatatattaaatggaccaagctgagagagaacctgccgtcagtgagcttacattctagcacagcagagtacaaacaatacacacaacaaataaacaaattatatggtacatcagcagaaggtgataagtggtattaaattaaaaagtggagcatgtaattgccagagatggacaatggagatggagaggagtcacagtattcaatagggaggtcaaagtgggcatcactgagaatgggatttttgaccagatacttaaagaacatgtgggacttaaagaaacagatattttggggaaaggtgttccaggctagaaagaacaggaggagcaaagtctatgagattggagtgagcccacggtgcaaggagacaatgt

SEQ ID NO: 5698 - DNA, 475 bp, Homo sapiens
  MAP TO AC006538.1; EXPRESSED IN PLACENTA, SIGNAL = 2.3; EXPRESSED IN LUNG, SIGNAL = 2.3; EXPRESSED IN HEART, SIGNAL = 2.3; EXPRESSED IN BRAIN, SIGNAL = 2.3; EXPRESSED IN ADULT LIVER, SIGNAL = 2.1; EXPRESSED IN FETAL LIVER, SIGNAL = 2.3; EXPRESSED IN BONE MARROW, SIGNAL = 2.5; EXPRESSED IN HELA, SIGNAL = 2.4
atgacaggcctatcctccaccgccccccaggcccggctgcacttcctcctctgggaactgagtgggcaggacgggctgtcagagcccccttcccttcccacgctgacattctgccagcacgtggcaggggcgtcttgtctcgttggaggctggatatagaaacacagccctgtcctttgtgccatcgctgaagttgtcaacctcagccttcactcatcaccacagcaaccatctaaatatgtcaccagcaaagtgctgattgcaaaggaagggggcagagaggcctggacgggctctcacccaggtgcaggcgcaggggaggtgccgggactgggggagtgacgtggctgcttcagagccacgagactgatgacggccaggccgggcgtgacctggaacaggctccactgcaccctggggcacacagaacaaaggggcaggcctgcttgaccctgagggttcaaggtctctgtga

SEQ ID NO: 5699 - DNA, 479 bp, Homo sapiens
  MAP TO AC005833.1; EXPRESSED IN PLACENTA, SIGNAL = 2.6; EXPRESSED IN LUNG, SIGNAL =   3; EXPRESSED IN FETAL LIVER, SIGNAL = 2.4; EXPRESSED IN BRAIN, SIGNAL = 2.6; EXPRESSED IN BONE MARROW, SIGNAL = 2.4; EXPRESSED IN ADULT LIVER, SIGNAL = 2.4; EXPRESSED IN HELA, SIGNAL = 2.4; EXPRESSED IN HEART, SIGNAL = 2.1
cctgagcaacctgtggaaagccgctgagcaacctgtggaaagccgctgagcggttatcctctcggggcataaagacaaagaaggcaataaggagactttgctcctcagaggccacccgtggcttcccatgggtgtctcacacaggggagaccaactcaactggcacctagaactctctttcccacaaaagctaggctggttctgattcttaacctgctccagcagtgacacactcagtcccacagggagtggacgacccccaggaagaagatgatgttttggaggaaactccccaaagccctcttcattgggctgactctggccattgctgtcaatctccttctggtattttctagcaaggggactttacaaaacctgtttacgggtggtctccacagggagcttcctttacatctgaataaacgctacggggcagtgataaagagactctcccacttggaggtggaattgcaggatct

SEQ ID NO: 5700 - DNA, 485 bp, Homo sapiens
  MAP TO AC005250.1; EXPRESSED IN BONE MARROW, SIGNAL = 2.6; EXPRESSED IN PLACENTA, SIGNAL = 2.6; EXPRESSED IN LUNG, SIGNAL = 2.6; EXPRESSED IN HELA, SIGNAL = 2.3; EXPRESSED IN HEART, SIGNAL =   2; EXPRESSED IN FETAL LIVER, SIGNAL = 2.4; EXPRESSED IN ADULT LIVER, SIGNAL = 2.3; EXPRESSED IN BRAIN, SIGNAL = 2.4
agattctaatcgtggcctggcctttctcatgaccagcccccaaccaagaactcaccaagagtcacctcattagaacagaagatacacccaggaaactccaaggaattaggagttctgcatcaggaaccatggtcaaagaccaaatattagaacaaaagatacctattacccctattgctcagaaagttacaagccctttaaggagctctgtgccaggactgtggataaagaccaagatatatatatttcctataaatcacatactcacaagaagagaaattttgacaacagtaagtgccaaaatactgaatagatcttggtagttcatagggcttgaaagcggggacaccaccaacattcctggcagccaagtcagatgcatggacatcgtctttaaccacatcttcacactcatccctcatctgaactatcaacaatttcatggattttgctatctaaatgttcatgttctctaatccatttcc

SEQ ID NO: 5701 - DNA, 465 bp, Homo sapiens
  MAP TO AC004706.1; EXPRESSED IN BONE MARROW, SIGNAL = 2.7; EXPRESSED IN ADULT LIVER, SIGNAL =   5; EXPRESSED IN PLACENTA, SIGNAL = 2.6; EXPRESSED IN HELA, SIGNAL = 2.4; EXPRESSED IN HEART, SIGNAL = 2.4; EXPRESSED IN FETAL LIVER, SIGNAL = 3.5; EXPRESSED IN BRAIN, SIGNAL = 2.4; EXPRESSED IN LUNG, SIGNAL = 2.9
tgatttctgcaactgatgggaactgagggtgagactttgttcaaagctctattaaaggatctaagttgtgtgcaataatcccctcctaaaacttaggacaacagtattttctatttttttttctctatgcgtgtttaaaggagggctccgggaagcagacagggagaaggaggtggccaaagcatttgccagcagagggaggggaaggctgctgttgtggcctggcagtgccctggccaggggctcacctggcagctccttggccttgcccttgtccaccagctccaggccggcctcggtggctgcgcttgtggcttccatctgctgcaatatggcctccacgatgggcaccatcatggccgtggttgccgtgttactgatccacatggacaggagggctgtgacgcccatgaagcccagcatcagcctgcagaggaggggcagggaggaaagccagagaatccc

SEQ ID NO: 5702 - DNA, 468 bp, Homo sapiens
  MAP TO AC005701.1; EXPRESSED IN LUNG, SIGNAL = 3.6; EXPRESSED IN BRAIN, SIGNAL = 3.4; EXPRESSED IN PLACENTA, SIGNAL = 3.4; EXPRESSED IN HEART, SIGNAL = 2.6; EXPRESSED IN FETAL LIVER, SIGNAL = 3.2; EXPRESSED IN BONE MARROW, SIGNAL = 3.1; EXPRESSED IN ADULT LIVER, SIGNAL = 2.9; EXPRESSED IN HELA, SIGNAL = 3.2
tgatcaagggtcaactcatccataatgccaaggtctcagctgaacagaagcagtgaagactgtaccacgctgggtcagcctgccaatctcagccccagaaacagggaaagccgtagttcagagagctccccagtcacccaaggtggtctggaatttcaagcaagaaggttgtgcttgctcttttttgagaatgtatggatccatacatggacatttaacaaatacaagaggaatgagttgcttctttccagtaacagaatgtccccatcaaaatcccctttaacaagcctaccaagttctgcttcctcctggacgtgctgactgtagatcatcctcactgcatccagatctttgttgaacatttggatgaggaccaggtatttatcagatgtatccctcgctaccagcggtctttcaaggaggtttcctgctatgtctagcagctgtagggaaggtggaggaaaaaga

SEQ ID NO: 5703 - DNA, 485 bp, Homo sapiens
  MAP TO AC005866.3; EXPRESSED IN LUNG, SIGNAL = 1.4; EXPRESSED IN HEART, SIGNAL = 1.3; EXPRESSED IN FETAL LIVER, SIGNAL = 1.5; EXPRESSED IN BRAIN, SIGNAL = 1.2; EXPRESSED IN BONE MARROW, SIGNAL = 1.4; EXPRESSED IN PLACENTA, SIGNAL = 1.3; EXPRESSED IN ADULT LIVER, SIGNAL = 1.4
tcacagtttcaaaacaccttcctatacattattctaactaccctgcaaggtaggaaagtcaggaattattgtctccaatttacagatgaagaatctgagtctcagagaggttaaacgctttgcccaaggtcacacagccagtaagaggccgagctgggactccagcccagagctgtctcctgcaccctgatccctgggatccctggagcagtggtgccgtccttccgcagaggggaccctgcttctccagttccctctgtgggacctgtctcctcctgcaggctgctgtaccgctccatcgactcccacacggaagacaagggccccatctacaactaccgtgtggagatctccatcttcttcatcatctacatcatcatcatcgccttcttcatgatgaacatcttcgtgggcttcgtcatcgtcacctttcaggagcagggggagcaggagtacaagaactgtgagctggacaagaaccaggt

SEQ ID NO: 5704 - DNA, 490 bp, Homo sapiens
  MAP TO AC003668.1; EXPRESSED IN PLACENTA, SIGNAL = 4.2; EXPRESSED IN BRAIN, SIGNAL = 4.1; EXPRESSED IN BONE MARROW, SIGNAL = 3.6; EXPRESSED IN ADULT LIVER, SIGNAL = 3.6; EXPRESSED IN LUNG, SIGNAL = 4.1; EXPRESSED IN HELA, SIGNAL = 3.8; EXPRESSED IN HEART, SIGNAL = 3.2; EXPRESSED IN FETAL LIVER, SIGNAL = 3.4
tggctacaatcagtgaaagggaccttgatctctccaactctgtaatctttgtatgtgtctgagaccttaggaaatgaaggttgatagaagaaagaacttcatgtgtaactagctaagctgttaaatggaagaaaccagacacctcctagcaatggtcactcgttggttttagaaaatcaatgtataattctgagaaacctatactacacaagatacttaacaaagaaaatgagtgttccaatgaccatctgtgtatatactaaatgaggagagctagacattggaagggcagttctctaatgtatggtgtcagtgggtccggggattgaggtgtagagggtggtggtgcagtggccataaatgagcattgtgcttgcttcagagtctctcttagaagctggtgtcttcattcccttggggctaatcatctctgggaaactgaggcagcatattgcatttggttgttattcccctgagctttgtccttcag

SEQ ID NO: 5705 - DNA, 482 bp, Homo sapiens
  MAP TO AC004228.2; EXPRESSED IN LUNG, SIGNAL = 2.5; EXPRESSED IN BRAIN, SIGNAL = 2.5; EXPRESSED IN PLACENTA, SIGNAL = 2.5; EXPRESSED IN HEART, SIGNAL = 2.1; EXPRESSED IN FETAL LIVER, SIGNAL = 2.3; EXPRESSED IN BONE MARROW, SIGNAL =   2; EXPRESSED IN ADULT LIVER, SIGNAL = 2.1; EXPRESSED IN HELA, SIGNAL = 2.5
caccaccctctctggttttctcagctgagtaaaggaacagggtccttgccctgccagctcacgaggctgattttagtgacgaaggtgtcatgcagggtgtgttggggaagaccctgccagggacacagatgcctggcagagtcggcccagcaactcctcctgggaagacaccctcaccgagagagacccacaccccccctgttcctcaacccccccccaccacacgtacagtcacgggcacactcgctctcctgctgcgcgcacacatgtgagccacactgttgcacgcatacatgtgagccacactgttgcacgcacatgtgcaccctgtttgccttcatgggcaggtactgtcccccgaggcaccacctcctgccacggcagccgtatgcccggggtcctgggcaaccccactcaccgcccactgcatgcacaccagcatgtacgccagattttccacttcaaagttcaccagggtgagc

SEQ ID NO: 5706 - DNA, 489 bp, Homo sapiens
  MAP TO AC001228.1; EXPRESSED IN PLACENTA, SIGNAL = 3.8; EXPRESSED IN LUNG, SIGNAL = 4.9; EXPRESSED IN HEART, SIGNAL = 2.9; EXPRESSED IN FETAL LIVER, SIGNAL = 4.8; EXPRESSED IN BONE MARROW, SIGNAL = 4.3; EXPRESSED IN ADULT LIVER, SIGNAL = 4.8; EXPRESSED IN HELA, SIGNAL = 4.4; EXPRESSED IN BRAIN, SIGNAL = 3.7
agcctccgttcccagacacgcccgggcctgagcccccaggctgcactgtgccacagaacagactccccggcccctccctgctcgagaggtgaccaaggcccagggtctcccagcgagcaagaggccattgaactgttgttggctgtgcagtgccctgccctcggggaggcggcctctaagaagcacacaccaccagcaggaaccgggcagacagaggtgggggatggaaagcaggggaagtggccacagccaaaccaggagggggaagggagggggcctcaccaaggagaccctcacctggggcctggagaatgagaagggtctggaggctaaggagaggggtggatgctccaggaggcagggccagcccatgtgagggtcctgaggtaggaaccagaggaaaccggctctggggcgagaagggcagcgcccagggggccacaggggccggcggcgagggaccctcagccgaggctggtatctcgagaa

SEQ ID NO: 5707 - DNA, 461 bp, Homo sapiens
  MAP TO AC004685.1; EXPRESSED IN LUNG, SIGNAL = 3.4; EXPRESSED IN HEART, SIGNAL = 3.4; EXPRESSED IN FETAL LIVER, SIGNAL = 4.9; EXPRESSED IN BRAIN, SIGNAL = 3.9; EXPRESSED IN BONE MARROW, SIGNAL = 4.3; EXPRESSED IN HELA, SIGNAL = 4.3; EXPRESSED IN PLACENTA, SIGNAL = 4.3; EXPRESSED IN ADULT LIVER, SIGNAL = 5.5
tcaactgcactcccactccccaccaaagacccagcttgcctcttcttagcatctggaaagctcgcctgtcttcgtctgcatcctgctgatcttcctgtgcccaggacgctccttggcttatgggtgaaacaggcatgcgttgctcaacctgaagtaacagcgagagctccttccagacatcactcagcttcctgttcacgtccttgaagagtattttgtcctggcttgctgttagaaacctgcagatattggatctattgctgaacttttctatctccccattagcctcctccagggcagccttgaagcggttcatggctgtggttaacttctcagagggcacgctcctctttccttggtcctggagcatctccagaggcttgatcaggccgaggacgcggtggcccaggcgccggcactgtttcttgcagtatttcatctcttcacaccgtttgtggatg

SEQ ID NO: 5708 - DNA, 463 bp, Homo sapiens
  MAP TO AC004743.1; EXPRESSED IN PLACENTA, SIGNAL = 4.7; EXPRESSED IN HELA, SIGNAL = 4.1; EXPRESSED IN FETAL LIVER, SIGNAL = 5.8; EXPRESSED IN LUNG, SIGNAL = 4.8; EXPRESSED IN HEART, SIGNAL = 4.4; EXPRESSED IN BRAIN, SIGNAL = 4.7; EXPRESSED IN BONE MARROW, SIGNAL = 4.2; EXPRESSED IN ADULT LIVER, SIGNAL = 4.7
actgaaaccactgcacaggctgctggcactaagtctgaggtcctgggcattaccaacaccttgtttttcatcccacaggtacctgaggaccaaaatccattttcatttacatgcaaggcctccaggtacttccaaacgggaagctacactctttggggctatatgccaagagggagtagagtcaggatttcgtgccttgtgacatctaaagttttcactacagaggagagcccgttggtaaacaagtcagaagcctcactttcaacagtcctgactgtggtgttaccatacctctgcctgaaaaggaggctgagaaactctcacagtgtacaagaatcttcccaagtaaaagttcttgggactatgaagacagttttctgctcaattcctctggcagttaaggaattctgctgtcttattagtctctttgggtacaggaaacagtatgtacctcaccttggca

SEQ ID NO: 5709 - DNA, 485 bp, Homo sapiens
  MAP TO AC005669.1; EXPRESSED IN FETAL LIVER, SIGNAL = 1.7; EXPRESSED IN BONE MARROW, SIGNAL = 1.6; EXPRESSED IN ADULT LIVER, SIGNAL = 1.5; EXPRESSED IN PLACENTA, SIGNAL = 1.8; EXPRESSED IN LUNG, SIGNAL = 1.6; EXPRESSED IN HEART, SIGNAL = 1.4; EXPRESSED IN BRAIN, SIGNAL = 1.9
caatgtacctgtccacgctgatgcacatgatcagcaacacacagctgtagaagttcatcttgtacatgctgttgaccaccttgcacatgaaggtctggaacttccactggtcagcagcagcaatggcccagaagggaagagtgacaagaaagaggaggtcagcaattgccaaattcaaaaggaacatgtcggtcatggtcttcactcttgtgcagtaccagtagacaaggataacaagactgttgcccaaggcacccacgatgaacacgagccagtacaagggtgggaggaaatggctcgcaaactgcctgacattgtttttctcacagtagaagtcagtgaagttgaagttaacgtagtcttccatggaagatgtggattcagagccatagtcatcagccatgttaggaatagggctctgcaaggggacacaagatggcattaggtcaaggaaaatattttgaaggtcctgtctgatggcagag

SEQ ID NO: 5710 - DNA, 479 bp, Homo sapiens
  MAP TO AC005753.1; EXPRESSED IN LUNG, SIGNAL = 4.6; EXPRESSED IN HELA, SIGNAL =   4; EXPRESSED IN HEART, SIGNAL =   4; EXPRESSED IN FETAL LIVER, SIGNAL = 4.8; EXPRESSED IN BONE MARROW, SIGNAL = 4.5; EXPRESSED IN PLACENTA, SIGNAL = 5.3; EXPRESSED IN BRAIN, SIGNAL = 4.9; EXPRESSED IN ADULT LIVER, SIGNAL =   4
gaggttctcggactccacactcagcccggctggacttcaagtcgggctgggtcttacccttcaggtgagtggctaagggcaggggtgggctctgcaggcagacaggactgggtttaagttctgactctggtcaccaccagccctgtgaccttgggcaaagctctgtgcttctctaagcctcagtttccctgtgtacacaatctgcattatgatagcacaattcataatgctggctgtcgtaatgagaaacatgagatgagctatctttttattttttgttcacctccacaggccagcatggccacggagataaaggaaagccaggtttatctcttctcccctggagtatctgttcccttaagagccaagaagagacaaggaaggtgggaacctgcagaaaacataaccacagttctagtcctgacgatgcttctgcctggctatgtgatctcaaacaagccacttaacctctctgagcc

SEQ ID NO: 5711 - DNA, 482 bp, Homo sapiens
  MAP TO AC004924.2; EXPRESSED IN FETAL LIVER, SIGNAL =  13; EXPRESSED IN BONE MARROW, SIGNAL =  19; EXPRESSED IN HELA, SIGNAL =  15; EXPRESSED IN PLACENTA, SIGNAL = 8.4; EXPRESSED IN LUNG, SIGNAL = 7.5; EXPRESSED IN HEART, SIGNAL = 6.8; EXPRESSED IN BRAIN, SIGNAL = 4.9; EXPRESSED IN ADULT LIVER, SIGNAL =  20
caccatggcggttgttaagaacaagtgccttatgaaaggtggcaaaaagggagttaagaagaaagtaattggtccattctctaagaaagatcagtatgatgtgaaagcacctgctatgttcaatataagaaatattggaaagacttggtcaccaggacccaaggaacccaaattgcatctgatggtctcaagggtcttgtgtttgaaatgagtcttgcagatttgcagaatgatgaagttgcatttagaaaattcaagctgattactgaagatgttcagggcaaaaattgcctgactaacttctatggcatgggtcttacctgtgacaaaatatgttccaaggttgaaaaatgttcaacaatgatcgaagctcatgttgatgtcaagactaccgatggttacttctttcttatgttttgtgttggttttactaaaaaacacaacaatctgatactgaagacctcttatgcttagcaccaaca

SEQ ID NO: 5712 - DNA, 446 bp, Homo sapiens
  MAP TO AC005874.2; EXPRESSED IN PLACENTA, SIGNAL =   2; EXPRESSED IN BRAIN, SIGNAL = 1.3; EXPRESSED IN BONE MARROW, SIGNAL = 2.2; EXPRESSED IN ADULT LIVER, SIGNAL = 1.9; EXPRESSED IN LUNG, SIGNAL = 1.9; EXPRESSED IN HELA, SIGNAL = 1.9; EXPRESSED IN HEART, SIGNAL = 1.9; EXPRESSED IN FETAL LIVER, SIGNAL =   2
tttaacctcaatgctgcctggactgaatcccttggattgtagctttataagcatcatagctacaagttagaatccccactcaattaactcagagaatagcaatgagaaaagctgtgagaaatgatgtgctgcttgggagtaactgaaatgtgaatatcttgcagggtttcagaagcagcaacagcactctaatcctgaaattagagtgagggccaaattttcaaaatatatttgccacatttttgcagctggtctctggttacccatcatagttaaaatcaccatcttggaaacttgcaaatcacatttcgtgctttgttcaccgtccccctgccccccgcctctatacccccatgcctttgcttctgtagtcagaagctgtccaaacaccccatctgcaacacacatcccctcactgtacttctcagtctcgttgaaggattgct

SEQ ID NO: 5713 - DNA, 465 bp, Homo sapiens
  MAP TO AC005022.1; EXPRESSED IN ADULT LIVER, SIGNAL = 2.9; EXPRESSED IN PLACENTA, SIGNAL = 2.7; EXPRESSED IN LUNG, SIGNAL = 3.2; EXPRESSED IN HELA, SIGNAL = 3.1; EXPRESSED IN HEART, SIGNAL = 2.7; EXPRESSED IN BRAIN, SIGNAL = 3.1; EXPRESSED IN FETAL LIVER, SIGNAL = 2.7; EXPRESSED IN BONE MARROW, SIGNAL = 2.6
acacctagtggtagggccagggccgaggtctcgccactactgggcccgttttttcctcactgctgctttggggacacagtcccacgacagccgcgtgacatcgtccaagatgagaatttgctgttagcgaaggtcttccagaagagaccagaaatactgaaaatgatttttccacagccccacggaccagagcaggatcagtacctgcttcaacgttccaccccgcaatcacctgcaccagggactcagagacccggcagcagcatggttcgcaccacagtccccaactcggtctgggccctgggaagtcctcttcacaaagccaatacacttggcctgcgtgtgaggcctctcctcacagtcagggcgaagccgcggctgctccaggccccctggtgccacctgaggcggaggcccgggccccacctgcgcaatcgcctagatcctcctgtctcgttaggccct

SEQ ID NO: 5714 - DNA, 369 bp, Homo sapiens
  MAP TO AC006197.1; EXPRESSED IN PLACENTA, SIGNAL = 0.94; EXPRESSED IN LUNG, SIGNAL = 0.94; EXPRESSED IN FETAL LIVER, SIGNAL = 1.4; EXPRESSED IN BRAIN, SIGNAL = 0.96; EXPRESSED IN ADULT LIVER, SIGNAL = 1.2; EXPRESSED IN HEART, SIGNAL = 1.7; EXPRESSED IN BONE MARROW, SIGNAL = 1.2
caattattccttctttccctgccatactctcacagatggtgaatcccagttcctccacctcctcccaagcaccgagacagccctgaacagattgcgaagcctgctttggggaaggaaaccagcaagtcccagccttgtggcttaagcagggattcaggcactcctgcaggaagccgtgattgccagcaaaccaccaggcacgctgctggtggctctgcgacagaagcgacacagcacacctccagcgtccaacacgtggcattccctcaggccggcctgcttgcccccacactcctcatcctccttccccatctggttgctcttcacaacagctctgctgacttcatgctcaatgtcttgggccttcct

SEQ ID NO: 5715 - DNA, 467 bp, Homo sapiens
  MAP TO AC004626.1; EXPRESSED IN ADULT LIVER, SIGNAL = 2.3; EXPRESSED IN PLACENTA, SIGNAL = 1.8; EXPRESSED IN LUNG, SIGNAL = 1.8; EXPRESSED IN HEART, SIGNAL = 2.6; EXPRESSED IN BRAIN, SIGNAL = 2.4; EXPRESSED IN HELA, SIGNAL =   2; EXPRESSED IN FETAL LIVER, SIGNAL = 2.5; EXPRESSED IN BONE MARROW, SIGNAL = 1.9
cgaaagcaacggatgctaccatggtaactcaggattgtacacaatccttgagaaaccatatccttcctcagataaatgtcaagggactttcctaagaaatagatacagtagagatttatttaggaaaaaacaatagcttccaaatgtgctgtccccttaccctgggagtagcagaatagccttcgagtatcacatcaattgcctggcctgggtacagctccatgctggcggggtggagatgaaacacggggctctgtggatccctgggctcctgagagccactgggctggggttggacatgagcatgtcccttcttaacccggcccttcttactcagcttggcctggggtcggaagctatcattcatccagaacaactgttggatccgacgtcccttgttgatcaacttaaagtggtaatagtgggtatccaggctggaaaagacgaggcaggtgttgagaggattc

SEQ ID NO: 5716 - DNA, 405 bp, Homo sapiens
  MAP TO AC004757.1; EXPRESSED IN BRAIN, SIGNAL = 3.6; EXPRESSED IN ADULT LIVER, SIGNAL = 4.9; EXPRESSED IN PLACENTA, SIGNAL = 3.9; EXPRESSED IN HELA, SIGNAL = 3.7; EXPRESSED IN HEART, SIGNAL = 3.2; EXPRESSED IN FETAL LIVER, SIGNAL = 4.1; EXPRESSED IN BONE MARROW, SIGNAL = 3.8; EXPRESSED IN LUNG, SIGNAL = 3.7
acctcagaggaccacattgctgccatattgctgcccagcaatcctacactgttttccccaggcaagtcgcctctcctactccctctggcagatgactgcatcacgcctcctttcttttcaggcctgcacgcagttctccttgcttctcactttcagctgatgacatcatttttcccccactgaaaaaaaaaatcagaaaagaaaaaaaaatcacatcctcccacaaccaaaaataccagcctccagaagttgtgcccacgtgccccacctttcctcctctcatgatgaatgaatcgtccatgtgtctgtctgaggccagcccctcctctcgcacactggatcccttcttctcttgcttgttaaaaagcatcactccagcaattatccactctctcatctgcagca

SEQ ID NO: 5717 - DNA, 477 bp, Homo sapiens
  MAP TO AC005189.1; EXPRESSED IN LUNG, SIGNAL =   4; EXPRESSED IN HELA, SIGNAL =   5; EXPRESSED IN HEART, SIGNAL = 5.1; EXPRESSED IN FETAL LIVER, SIGNAL = 5.3; EXPRESSED IN BRAIN, SIGNAL = 4.9; EXPRESSED IN BONE MARROW, SIGNAL = 5.1; EXPRESSED IN PLACENTA, SIGNAL = 4.4; EXPRESSED IN ADULT LIVER, SIGNAL = 5.2
ggtagttctcaatgaggcagcatttgagaaaatatcaggaagagtgagaagtagtcgagcattccaaacagacaggagcctgtgcaaagaccctgcagcagagccctgtctgccttgcataagaaatagcagggaggccagagtgactggagcagagtgagccagtggggaggcagtagcagatgaggttgtaggggtaacagaggagcagatcaggcagggctttgggttttactctgagtttgggaaaccactgggaaggttttgggcagaggaggaatttgatctggctttctttttttaaggtcactctggctgctttatggggacaggctgcagggatatcagggaagagaccactgtcatgacccaggtagcagatgatggaggcagaggtaagaagtggtcaggctctgggtatgctagggagatccaaccaacagaatttttgggccctggaggtgggatgtgagagaa

SEQ ID NO: 5718 - DNA, 492 bp, Homo sapiens
  MAP TO AC005815.1; EXPRESSED IN FETAL LIVER, SIGNAL = 5.4; EXPRESSED IN BONE MARROW, SIGNAL = 4.2; EXPRESSED IN HELA, SIGNAL = 3.4; EXPRESSED IN PLACENTA, SIGNAL = 2.6; EXPRESSED IN LUNG, SIGNAL = 2.8; EXPRESSED IN HEART, SIGNAL = 7.6; EXPRESSED IN BRAIN, SIGNAL = 4.2; EXPRESSED IN ADULT LIVER, SIGNAL = 5.3
ccatggtctttttcttccctctaggacaattcacctttaaaataagaggactgggcaagaaatctacaaagatttttctaaaatgaactcaggcctagaggcatattagttctctatcttgttgctcccttctagaagtgcacagttcagagggatgcccagccacagaggtgccgaaacgcagaactggaaccaatcacctgctccaacagagagaaggcgaaagcactgggcagcgtgctcagaatgtgctcttgcttctttgtaacgaaatatcagaagacagattgtaacgttgttcagcaagctattttttgtactgaaacatcagaaggcattatgaaactgttcagcaaatcatctctaaacaatgtcataaagggttacctagtttggggtaagcccggaatgaatatctgcaccatcattcctcacactaacaaacatgtccatctatgtgaagcagaattcccaacacaccaccatctccaa

SEQ ID NO: 5719 - DNA, 464 bp, Homo sapiens
  MAP TO AC004254.1; EXPRESSED IN PLACENTA, SIGNAL = 4.8; EXPRESSED IN HELA, SIGNAL = 4.7; EXPRESSED IN HEART, SIGNAL = 4.8; EXPRESSED IN FETAL LIVER, SIGNAL = 4.4; EXPRESSED IN BONE MARROW, SIGNAL = 4.5; EXPRESSED IN LUNG, SIGNAL = 4.7; EXPRESSED IN BRAIN, SIGNAL = 4.7; EXPRESSED IN ADULT LIVER, SIGNAL = 5.2
tggaagcataggtgcttgtggtcagaaagtagactatctgaattagtgattttagaagtagagagaattttaggtcatgatgacaagatccagggggtgactgtgaaggcgggtggttgaatagcaatgtaggaggacatgggagatactctgggtctctcttgaggattctgaagtcacttaggatgatggcagtactcatggcacaagagaagacagtaagccaagtgccactgtcttctgtgaggtggggagattacagttaccaatcacggagagagtagtaggggttttcacaaaagggtggaaaagcagtggactctgagtagcactgggaagcatcctcatctcctgacagtacataggtgtaagaatatgagcggatctctcttgagggagctgcagggtaagtggtgtagagagagccaggtttagataaggcatgaggtggcaggaacattcag

SEQ ID NO: 5720 - DNA, 477 bp, Homo sapiens
  MAP TO AC005725.1; EXPRESSED IN PLACENTA, SIGNAL = 1.7; EXPRESSED IN BRAIN, SIGNAL = 1.5; EXPRESSED IN BONE MARROW, SIGNAL = 1.8; EXPRESSED IN ADULT LIVER, SIGNAL = 1.9; EXPRESSED IN LUNG, SIGNAL = 1.3; EXPRESSED IN HELA, SIGNAL = 1.6; EXPRESSED IN HEART, SIGNAL = 1.4; EXPRESSED IN FETAL LIVER, SIGNAL = 1.6
ggaaactattgcatcacccgggtgatgggagggagatgggacttggactggaatgtcagtgatggaagatgtgagaaagactttcttcagggtttatttttcttaacttgttattttgaacaatttcaaaccaatggaatatttgcaagaatgatacagtgaacacccatacccccttactagttgttaacgttgtaacatatttgcttctctttatctctctgtcttcctccctctccttttccttaacatcatcatcatcgttgtcaccaccaccaccaccatcatcatcctcaccatcaccaataccatcatcatcctcaccatgaccatcaccactgccattgacatcaccaccaccatcatcaccatcaccaccattatcatcatcaccactgctgtcaacaccatcatcaccacgaccatcatcaccatcatcatcatcatcatttttgaaccatgtgagaacaagttgcc

SEQ ID NO: 5721 - DNA, 483 bp, Homo sapiens
  MAP TO AC003962.1; EXPRESSED IN PLACENTA, SIGNAL = 2.2; EXPRESSED IN BONE MARROW, SIGNAL = 1.9; EXPRESSED IN ADULT LIVER, SIGNAL =   2; EXPRESSED IN LUNG, SIGNAL = 1.6; EXPRESSED IN HELA, SIGNAL = 1.8; EXPRESSED IN HEART, SIGNAL = 1.7; EXPRESSED IN FETAL LIVER, SIGNAL = 2.1; EXPRESSED IN BRAIN, SIGNAL = 1.9
tgcaccttactggaacacagtatcacaaccactgccttggtcaaacacattttatacatgagcatgctcgggtgcagagagctaaactgatttatgcaaggttataacaggtagaatatcaggctcaagactataataataattcccatttgtttttccccactccattaaacctgcaaacatatgagaagatggtttcttagagttaaaatgtattggttacaaatatgagatgggctcaggtatgtttaccagtgaacatatgtagaaaatggaatgatccctaccttcacttagagatggacgaataggtggtgaaaccaatgggccaaatgtctctaaatcaaatcgtccagtccgggattgagccttcaataaccaatagcgtttctcaagatcaatgatgtctgattcctccactaagggtcaaatcaaaaaagattataaaacctcagaattctcttctcaggagttcagttcatc

SEQ ID NO: 5722 - DNA, 445 bp, Homo sapiens
  MAP TO AC004578.3; EXPRESSED IN LUNG, SIGNAL = 4.7; EXPRESSED IN HELA, SIGNAL = 4.5; EXPRESSED IN ADULT LIVER, SIGNAL = 4.8; EXPRESSED IN PLACENTA, SIGNAL = 4.3; EXPRESSED IN HEART, SIGNAL = 3.9; EXPRESSED IN FETAL LIVER, SIGNAL = 5.3; EXPRESSED IN BRAIN, SIGNAL = 4.7; EXPRESSED IN BONE MARROW, SIGNAL = 4.7
gacgaccacgtgaggacacagggagatagcggccatctgcaagccggggagggaggcctcaggagaaaccaaccctgcctacaccttggtctcaagctttcagcctccagaactgtgagaaaaggaattactcttgtttaagcccctagtcccaggtattttgttttggcagcctgagtggactaacacagcatctgatgctaacccggcgcctgataccagcacagcatgtgacgctaacacagaatctgaacccagtacagagcatgaccccaacacagagcctgaccctaacactgcgtctgaccctaaagtggctcatgacactaacacggagcctgaccccaagacggagcctgaccccaagatggtgcctgaccccaacaaagctcctgacccaaacacagcacctgaccccaacacggagcctgaccccaacacgaag

SEQ ID NO: 5723 - DNA, 456 bp, Homo sapiens
  MAP TO AC002527.1; EXPRESSED IN ADULT LIVER, SIGNAL = 3.4; EXPRESSED IN PLACENTA, SIGNAL = 3.2; EXPRESSED IN LUNG, SIGNAL = 3.5; EXPRESSED IN HEART, SIGNAL = 3.3; EXPRESSED IN BRAIN, SIGNAL = 3.2; EXPRESSED IN HELA, SIGNAL = 3.4; EXPRESSED IN FETAL LIVER, SIGNAL = 3.2; EXPRESSED IN BONE MARROW, SIGNAL = 3.5
agaggtgaaggctatccccccagtcactatccaaggaaaccgaaatatccaccatagattgctcaggctatcaggtctgtacacacacacacacacacacacacacacacacacacacacacgtcacttgggcaaaactttgtctctgaactctttcccattatgccatggctacacttggccacaactgccaaggagtggccaaagtccagggctttcaattgagcttcacaatagccagaaacacctccctgggaggggggccatccccccaaacagggtaggctccttaccatcgagctcctccacggagatattagccagctgttcgctgtcactgccagcagagagcgatcggttgaggtaattccccttgtacaacaagccggcggtcacatggtggaacggcatcttttccctgcccaagagagaacaggggaggggaaaagaaagaca

SEQ ID NO: 5724 - DNA, 480 bp, Homo sapiens
  MAP TO AC004783.1; EXPRESSED IN PLACENTA, SIGNAL = 4.9; EXPRESSED IN LUNG, SIGNAL =   5; EXPRESSED IN HEART, SIGNAL = 4.2; EXPRESSED IN BRAIN, SIGNAL = 5.5; EXPRESSED IN ADULT LIVER, SIGNAL =   5; EXPRESSED IN FETAL LIVER, SIGNAL = 5.2; EXPRESSED IN BONE MARROW, SIGNAL = 4.9; EXPRESSED IN HELA, SIGNAL = 4.8
aagaaaaggaaggcaggagacttaaggcctaggaaagcaatttgcttcacatcagagagactccaaaaccagactgaaaactggtttttagtttgccatctttttatgaaaagaaggtatagaaattgatattaagtataaagagttagctaaaggaaagagagaaaaataattattttatagtgagagaaacaaaaactcatacgaaactaggaagagttgggagaaagggatggaaattacagaaaataacagtttatcttgtttcagaataagaaacaaggcaactcactttttaaatccaaagtttttccagagctcattgagtttgatctgtaaccccggcttgttctcggcattatgatgctttctcttctggatgcttgccggcttcttgctcagcccactggctctggcaggtcctagaggtttgatcttggttgtagaaagagagtctgcagaactggacttatatagccc

SEQ ID NO: 5725 - DNA, 474 bp, Homo sapiens
  MAP TO AC005823.1; EXPRESSED IN PLACENTA, SIGNAL = 1.7; EXPRESSED IN ADULT LIVER, SIGNAL = 1.7; EXPRESSED IN LUNG, SIGNAL = 1.8; EXPRESSED IN HEART, SIGNAL = 1.5; EXPRESSED IN FETAL LIVER, SIGNAL = 1.8; EXPRESSED IN BRAIN, SIGNAL = 2.1; EXPRESSED IN BONE MARROW, SIGNAL = 1.6; EXPRESSED IN HELA, SIGNAL = 1.6
tggttgtaacacgcttggacgctgctgtggggcccacacagagcctgctcccaccagagaggagtgaccagccagttccagttccagtgttcgttcgctcaggttcctgcattcgctcactcacactctccctcctgcgaggagtggccagtggtgggctgagtgaaacgagacactccagttcctgcccgcaaagggggtcaagtgaactatcccctctcagcattttaccaaaactgtttatgagaccctgtggtggtagtagtttagagcagcagtggttgtgggggacattttacacctgtgttttagttttcttacctgtaaaatggagctaatggtagcatctgtctcatagcactgtgagtgtgtgggatgaattgaatgggatgatttttgcaaagcattttcgggcagtgcctgcacgtgaaatgtgtcttcaaggcaccggccagccacaacctgggtgagatg

SEQ ID NO: 5726 - DNA, 466 bp, Homo sapiens
  MAP TO AC005919.1; EXPRESSED IN PLACENTA, SIGNAL = 6.7; EXPRESSED IN HELA, SIGNAL = 6.8; EXPRESSED IN HEART, SIGNAL = 7.2; EXPRESSED IN BRAIN, SIGNAL = 7.7; EXPRESSED IN ADULT LIVER, SIGNAL = 6.6; EXPRESSED IN LUNG, SIGNAL = 7.3; EXPRESSED IN FETAL LIVER, SIGNAL = 5.8; EXPRESSED IN BONE MARROW, SIGNAL = 7.4
aaactccatttagcctcccgtttgttcttttcactctagaagtgatattttcaatgttcatatcttgaactcggtgcctgctgcatattggtttaagatattaatttgtattttggcagttgagtatgtattatatttaatatttagtattcatgataataaatgcatgcagccaaattatgtccgctttccagtggaaagtgggatctaagttgcaagcagatttcagtatattacgccatctatgcagattattttacctacccatcatctcctcctataaggagacagtaggtctcaatttctttttccaggtggagcttgatgtccaggagctgctcatactccagcttctggccctcggtctcggttctgacctggtgcagctgctcctccagggccccgatctgagcctggatctgcgccagctgcgcacagtagttgctctcggtctctgtcaaggagc

SEQ ID NO: 5727 - DNA, 415 bp, Homo sapiens
  MAP TO AC004381.1; EXPRESSED IN PLACENTA, SIGNAL =  12; EXPRESSED IN HEART, SIGNAL = 8.9; EXPRESSED IN LUNG, SIGNAL =  12; EXPRESSED IN FETAL LIVER, SIGNAL = 9.3; EXPRESSED IN BRAIN, SIGNAL =  11; EXPRESSED IN BONE MARROW, SIGNAL =  10; EXPRESSED IN ADULT LIVER, SIGNAL =  11; EXPRESSED IN HELA, SIGNAL = 9.6
ggaagctgaggtgtgaggactgtttgagaccagaagtttgacgctgcagtgagctatgagctatgattgcaccactgcactccagcctgggtgacaaagtgagaccttgtctcacacacacaaaattttttttaagtcttcatttttaaatggcaaaagccaaaataaaacttgcaaagttaatatttaagctgcgacattaaacaaaaatttccttaaataaattgttctattttatcctagattgtagatgtaaatggcaatgttctacctcctggacaagaaggagatattggcattcaagttctacccaaccgaccatttggcctttttactcattacgtagtaagtgacttactaaataatctcattttctatttatttctcaagtgcttggtaacaatccctgtttgcc

SEQ ID NO: 5728 - DNA, 461 bp, Homo sapiens
  MAP TO AC004087.1; EXPRESSED IN PLACENTA, SIGNAL = 2.6; EXPRESSED IN HEART, SIGNAL = 1.9; EXPRESSED IN FETAL LIVER, SIGNAL = 1.8; EXPRESSED IN BONE MARROW, SIGNAL = 2.3; EXPRESSED IN ADULT LIVER, SIGNAL = 2.2; EXPRESSED IN HELA, SIGNAL = 2.1; EXPRESSED IN LUNG, SIGNAL =   2; EXPRESSED IN BRAIN, SIGNAL = 2.2
gcaaatgccctttctttttggagctgagaaaactcagtctctcatttatctatgaaaacaatagctcagttcctcacgcaaatgagcacagacaagctgaattgagattaattttgggagaaaaagcaatagagaagaccccttagaatgcatgcctgaactagaattaagatccttaacaagttcctaggagagaaaaaacaacagcagccgccaagaccatttcctgtaaactgtgctcagccacccctactttgtagctcttgtccgccattacacacaccaaggtcaaatcttctcacagtacatggtaatctctggtacctccaaagccaaagaggtcaggtcaggcaatacaggaaaacagagctttcatcctaagaagaatctgtccatgactcttgaaactccacaaagaaaacagaacaccccctacaaagaggtaagtggcacctttgttc

SEQ ID NO: 5729 - DNA, 454 bp, Homo sapiens
  MAP TO AC005104.1; EXPRESSED IN LUNG, SIGNAL =   6; EXPRESSED IN HELA, SIGNAL = 5.2; EXPRESSED IN BRAIN, SIGNAL = 5.7; EXPRESSED IN BONE MARROW, SIGNAL = 5.7; EXPRESSED IN ADULT LIVER, SIGNAL = 6.5; EXPRESSED IN PLACENTA, SIGNAL = 4.9; EXPRESSED IN HEART, SIGNAL = 6.9; EXPRESSED IN FETAL LIVER, SIGNAL = 6.5
ctcttagccagcctctcacgaaagaagatgagtagaaagaccaaattgtactacaattttaaacaaaagatacaataccactttccaaataaaaggagaaattcagatttactgtttctaaggattttctcatgtgttaccaaagctactcttgatcaacttaatatgcaaagtctaaccagcaaaatggaatttggtacataatttgactgttagaagatataaggaaatatgcctccaaaaatcatgcttcttacctcaatgtcaaatatttccatggtgttgtccagcagctttactctgaggtgcaggtgcttctcttgcattctgggcaagagagtctgcccaggctcaagggtgctaactcccacaggggtctgggcacccaagcgcatccctgcagtctgcaggactctgtatgttccttctatctcccccattcttcaccatgagt

SEQ ID NO: 5730 - DNA, 454 bp, Homo sapiens
  MAP TO AC004130.1; EXPRESSED IN PLACENTA, SIGNAL = 1.3; EXPRESSED IN LUNG, SIGNAL = 1.5; EXPRESSED IN HEART, SIGNAL = 1.4; EXPRESSED IN BRAIN, SIGNAL = 1.4; EXPRESSED IN BONE MARROW, SIGNAL = 1.2; EXPRESSED IN FETAL LIVER, SIGNAL = 1.2; EXPRESSED IN ADULT LIVER, SIGNAL = 1.3
ttacatgtgtttcttttacaaatatcgttaatttctctaagatggtttcttatcaattcagttattaacagatataatattggtaataaaaataattaaggtatataaatatatttcctttttcctcctaaatttaggttcttttcaatgtaacagttacaatgaaaaaatgtgatgtcacaggaggaaaaaactatgcaataatcaaacctattggttttaatgaaaccgctaaaattcatatacacagaaactgcagctgtcagtgtgaggacaacagaggacctaaaggaaagtgtgtagatgaaacttttctagattccaagtgtttccagtgtgatgagaataaatgtcattttgatgaagatcagttttcttctgagagttgcaagtcacacaaggatcagcctgtttgcagtggtcgaggagtttgtgtttgtgggaaatgttcatg

SEQ ID NO: 5731 - DNA, 476 bp, Homo sapiens
  MAP TO AC004583.1; EXPRESSED IN PLACENTA, SIGNAL = 2.3; EXPRESSED IN LUNG, SIGNAL = 2.2; EXPRESSED IN HELA, SIGNAL = 2.3; EXPRESSED IN HEART, SIGNAL =   2; EXPRESSED IN FETAL LIVER, SIGNAL = 2.7; EXPRESSED IN ADULT LIVER, SIGNAL = 2.3; EXPRESSED IN BRAIN, SIGNAL = 2.1; EXPRESSED IN BONE MARROW, SIGNAL =   2
ttgtgacttggcttcctgtgaccgtccattctcaaggtctcgtcagcgtggtgcagaaactcggcacaccctgcctaccttggaaggaggctttcccttccccacctccctctccctccatctcttccctctttccctctctccctttctctcccctccaccagctcttctctcccccctttctgttctctctctcttttttcttttctggctttcgggagtgtctttgtaaactattaaaaagcgttaggtcttcagcgtatgtgtttacttgcaggcctgagacctgggaggaagctggagaaaagatgccctctgaatctttctgtttggctgcccaggctcgcctcgactccaaatggttgaaaacagatatacaggtggggtttgacatgtctttttcttggtgtgtttctgcttccatgtttaaatttctcgtgtaaggcttttttttagggtatgtaaggggaagtcag

SEQ ID NO: 5732 - DNA, 363 bp, Homo sapiens
  MAP TO AC005666.1; EXPRESSED IN PLACENTA, SIGNAL = 6.1; EXPRESSED IN HEART, SIGNAL = 5.1; EXPRESSED IN FETAL LIVER, SIGNAL = 5.8; EXPRESSED IN BRAIN, SIGNAL = 6.1; EXPRESSED IN BONE MARROW, SIGNAL = 6.3; EXPRESSED IN HELA, SIGNAL = 5.8; EXPRESSED IN ADULT LIVER, SIGNAL = 5.9; EXPRESSED IN LUNG, SIGNAL = 7.2
aaggagtccctgagtcagccagccacccaacctcttgctggccctctggcactccctctcagaaggcagaacatgcaactagagacccctcataccccacagcttctgacaaggcagggaccccagcaccccgtgtgttgtcatcttcccagactctcactggggactccctgggagccaatgaagccaaggagggggcctgctccctggggggttagcatcatccacaccttaccaaagtcagcatcacacgcctcgctggtatcattattcccggtgctgagggagcccccagtggcccttgtccccgggtccagggcacaggctttagcaatggacgtgaccaggtactcatcatcagca

SEQ ID NO: 5733 - DNA, 473 bp, Homo sapiens
  MAP TO AC004940.1; EXPRESSED IN LUNG, SIGNAL = 3.3; EXPRESSED IN HELA, SIGNAL = 3.6; EXPRESSED IN FETAL LIVER, SIGNAL = 3.2; EXPRESSED IN BRAIN, SIGNAL = 3.9; EXPRESSED IN PLACENTA, SIGNAL = 3.5; EXPRESSED IN HEART, SIGNAL = 3.2; EXPRESSED IN BONE MARROW, SIGNAL = 3.2; EXPRESSED IN ADULT LIVER, SIGNAL =   4
gtgggttgagggataacaggatagaatatttggaatttatgccatggttatgtgtcttgtactggagtcattatttagaaaatcttagcctgttgggatatcttgatctcaatttgttctttgttttttgcttattgttctgttaatttttttaactgttaatttatagtttacaattcaagcgctctgaagtttctgaagaagttacagaaaatggcactgaggaagctgctaaaaaacctaaaaagaagaaaaagaagaaagacccagagacatatgaagtggacagtggtaccacaaagctagcagatgatgcagatgacactccaatggaagagtcagccctgcagaatactaataatgcgaatggcatctgggaggaggagccaaagaaaaagaagaagaagaaaaagcaccaggaagttcaggaccaggaccctgttttccaaggcagtgactccagtggttaccaa

SEQ ID NO: 5734 - DNA, 491 bp, Homo sapiens
  MAP TO AC004801.1; EXPRESSED IN PLACENTA, SIGNAL = 3.9; EXPRESSED IN BONE MARROW, SIGNAL = 3.7; EXPRESSED IN ADULT LIVER, SIGNAL = 3.7; EXPRESSED IN LUNG, SIGNAL = 4.2; EXPRESSED IN HELA, SIGNAL = 4.3; EXPRESSED IN HEART, SIGNAL = 4.5; EXPRESSED IN FETAL LIVER, SIGNAL = 3.3; EXPRESSED IN BRAIN, SIGNAL =   5
gctccctagatttgcccagtctgaagaataaccatttaccccaatgatatgaaagacctcagagctgcatatttggacagtgggccagacagtggcaaaagacaaatcatatatcattaagggaacagtgcaatttcagtgctctagataatttttcgttaaaaatagtgttctagccccagaaaactggccattatagtcaccatagctcaaacgctttagtcttcaggagcttctagccctttagcctgtcctagctgccatcttcttacactgcctacctcccaagtccccttacctctgggcagtggtagtgatggcatctacaatttccatgatccgatgcagggcagagtcagtgccaatggtcatatcggtgccacagaagtcattgtcaattgacccaaccaggcccacaatgttcaggtagctggacttcgtagcctcctcatctgtgatcttacctgacaatgagaagcaaaccaggagcc

SEQ ID NO: 5735 - DNA, 472 bp, Homo sapiens
  MAP TO AC005243.1; EXPRESSED IN PLACENTA, SIGNAL = 5.6; EXPRESSED IN LUNG, SIGNAL = 7.6; EXPRESSED IN HELA, SIGNAL = 5.4; EXPRESSED IN FETAL LIVER, SIGNAL = 5.9; EXPRESSED IN BRAIN, SIGNAL = 7.9; EXPRESSED IN BONE MARROW, SIGNAL = 5.7; EXPRESSED IN ADULT LIVER, SIGNAL = 5.5; EXPRESSED IN HEART, SIGNAL = 4.8
gcttgcacatgtctgtgtcctaatctcttcttcttcttgttattttttctctttgttttctgttttttgtttgtttgtttgttttttgttttttttttcgttccagctggtctcttttttttctttttttaaaagtcaatttaatttaattaaaaaaaatcaacaaatagtaactgtgcatattcatggggtacatagcgatgttttgatccacagactgtatagtgatcagatcagagtgatcagcatagccatcatctgaaacattgatctaatctcctccttttataaggacatcagtcgtattggaaatgggctcacccatatcaccttgttttaccttaattacctctttgaaggccttttctagaaatacagctgtgctttcaaaatatcgaggcttcttctggtcactgggctaagcacaagtggaaaatacattgtctaagttcaatcaatcctcaggttatga

SEQ ID NO: 5736 - DNA, 457 bp, Homo sapiens
  MAP TO AC005849.1; EXPRESSED IN PLACENTA, SIGNAL = 3.3; EXPRESSED IN LUNG, SIGNAL = 3.4; EXPRESSED IN FETAL LIVER, SIGNAL = 3.2; EXPRESSED IN BRAIN, SIGNAL = 3.1; EXPRESSED IN ADULT LIVER, SIGNAL =   3; EXPRESSED IN HELA, SIGNAL = 3.4; EXPRESSED IN HEART, SIGNAL = 3.2; EXPRESSED IN BONE MARROW, SIGNAL = 3.1
attgtttcccctccctcaagtcctccttccaggcctgacggactcagcagggtttttaaggacaaagctgtcggcggctccccacctgtctgactggctggttcctctgtctgccctgggctctttcactgctctggtgggcctgcgtgttcctggaccctcacgtggggcctgcgcccggggccgcctctggcggggtgctgctggggctttctccttcagaggcaggaggtgtggctgggtcctcaagggcccctggggtaggatgcgaggatggggttggggaagcttcatcacagggactgggcacagaactggcagcaggtgcaggggtctggacgttagtgtctgcctgtggctgggccacagaatctgactgtggctgggccatgaggttcagctgtggctgggctgtgggatccgactgtggctgggccgtagggttcagctgtggctg

SEQ ID NO: 5737 - DNA, 462 bp, Homo sapiens
  MAP TO AC005799.1; EXPRESSED IN LUNG, SIGNAL = 1.5; EXPRESSED IN ADULT LIVER, SIGNAL = 1.7; EXPRESSED IN PLACENTA, SIGNAL = 1.8; EXPRESSED IN HEART, SIGNAL = 3.1; EXPRESSED IN FETAL LIVER, SIGNAL = 1.8; EXPRESSED IN BRAIN, SIGNAL = 1.8; EXPRESSED IN BONE MARROW, SIGNAL = 1.5
ttgtactaatggcttttgcccattaataaaggatagcatctgttatcatctgaggtacattctgttgagagtgtttcaagtgttactctctttttttcccctttggaattggtgttttcctcttaacttacattgttaatggaagaagagattggaagtgactgagatagactatcattggaacatgagagtgccagctttacatgccgaaggatctcattttgcaaactcgtaatttctttcaggaggaggcaaaacagattcagaatctgcagaaagcaggcactcgtacagactcaagggaggatgagatttctcctcctccacccaacccagtggttaaaggtaggaggcgacgaggtgctatcagcgctgaggtctacacggaggaagatgcggcatcctatgttagaaaggtagttttgatatttgaatatcggggggatgcttttgggacccact

SEQ ID NO: 5738 - DNA, 487 bp, Homo sapiens
  MAP TO AC004977.1; EXPRESSED IN LUNG, SIGNAL = 1.5; EXPRESSED IN BRAIN, SIGNAL = 1.5; EXPRESSED IN ADULT LIVER, SIGNAL = 1.6; EXPRESSED IN PLACENTA, SIGNAL = 1.4; EXPRESSED IN HEART, SIGNAL = 1.7; EXPRESSED IN FETAL LIVER, SIGNAL = 1.6; EXPRESSED IN BONE MARROW, SIGNAL = 1.4
aagcttgccttcagtgatccttggattaggagtgacaaggtggactggagctccctctgaaggacagtgaacaacactgatctcttgtcctctgctccaaaacaggatgtgtggcaggttcctgcggcggctgctggcggaggagagccggcgctccacccccgtggggcgcctcttgcttcccgtgctcctgggattccgccttgtgctgctggctgccagtgggcctggagtctatggtgatgagcagagtgaattcgtgtgtcacacccagcagccgggctgcaaggctgcctgcttcgatgccttccaccccctctccccgctgcgtttctgggtcttccaggtcatcttggtggctgtacccagcgccctctatatgggtttcactctgtatcacgtgatctggcactgggaattatcaggaaaggggaaggaggaggagaccctgatccagggacgggagggcaacacagatgtcccaggg

SEQ ID NO: 5739 - DNA, 392 bp, Homo sapiens
  MAP TO AC004553.1; EXPRESSED IN LUNG, SIGNAL = 2.2; EXPRESSED IN FETAL LIVER, SIGNAL = 2.2; EXPRESSED IN PLACENTA, SIGNAL = 2.5; EXPRESSED IN HELA, SIGNAL = 2.5; EXPRESSED IN BRAIN, SIGNAL = 2.5; EXPRESSED IN BONE MARROW, SIGNAL = 2.4; EXPRESSED IN ADULT LIVER, SIGNAL = 2.2; EXPRESSED IN HEART, SIGNAL = 2.5
acttcttaagtgggggaggcaagagtaagtaaatatttctgaacaataatataatgtaccacaccctcctttcttctctgcttcctctctcggccacttctttagctctgggagaaaaaaacaattagtaagaaactgactcacaatataagcaacttgatatactatcttttggagacatatgtgtattttgaaaaacaaacataagacaagtgtaatcactgatggtgtcatttcagatctcccaagtgagctgtatttctggaaggaacctttatagaccatagacataccagccccgaacaacaggaaaggcttttcttctccttctcctccttctcctccttctccctcttctcccctttctcccccccccctcctcttcttcctct

SEQ ID NO: 5740 - DNA, 474 bp, Homo sapiens
  MAP TO AC004139.1; EXPRESSED IN PLACENTA, SIGNAL =   5; EXPRESSED IN HEART, SIGNAL = 3.9; EXPRESSED IN BONE MARROW, SIGNAL = 4.2; EXPRESSED IN ADULT LIVER, SIGNAL = 4.3; EXPRESSED IN LUNG, SIGNAL = 4.2; EXPRESSED IN HELA, SIGNAL = 4.4; EXPRESSED IN FETAL LIVER, SIGNAL = 4.4; EXPRESSED IN BRAIN, SIGNAL = 4.6
ttgtcccagagaaattaaagggatttcagagaaactgtgtgccacaggatcaggatgctagaacgcagttccacttaatttgggaaatacctatttggaagtttatatccatgtgcatcctgatgagcgggaggtgtcttgtctctctcttgggtttttcttgacactagagttagtctctgcaagggcctttaaaagttaaattccactccccaccccccaatctggtatagatattactgctactcttggatttcactcagtttatttccttttaggagacgcaggtcagaatggaaatgggctgcagaccgggcagctattgtcagccgctggaactggcttcaggctcatgtttctgacttggaatatcgaattcgtcagcaaacagacatttacaaacagatacgtgctaataaggtaagggataagtatctgatgtttttaaatgctgccgaaaactatcaatatcgc

SEQ ID NO: 5741 - DNA, 484 bp, Homo sapiens
  MAP TO AC005669.1; EXPRESSED IN PLACENTA, SIGNAL = 3.3; EXPRESSED IN LUNG, SIGNAL =   4; EXPRESSED IN FETAL LIVER, SIGNAL = 3.4; EXPRESSED IN BONE MARROW, SIGNAL = 3.7; EXPRESSED IN ADULT LIVER, SIGNAL = 3.5; EXPRESSED IN HELA, SIGNAL = 3.4; EXPRESSED IN HEART, SIGNAL = 3.4; EXPRESSED IN BRAIN, SIGNAL = 3.8
tggtctgcaccaacaaaatgcagttgtagggaaactgagacaagacaaagacggtcaggacagtgatggtcacttttagggctttgtgcttggaagacttcttggcttgtatcagggtgtgaatgatgatggtatagcagcaagccatgaccacgaagggaaggaagaaccccagaatgaccttcagggtcaagacagctgacttcagtttggtgctctcatcgctagggtaaaccatggtgcagatagcaatgccggattcctccttgatttggctgtataagatttctgggatgcagagagcagctgccaatacccagatggtaaagcaaaccattttgctgtacaaaagccttttctccctccaagtatgtgctctcatggcctgggcaatggcaatgtacctgtccacgctgatgcacatgatcagcaacacacagctgtagaagttcatcttgtacatgctgttgaccaccttgcacat

SEQ ID NO: 5742 - DNA, 485 bp, Homo sapiens
  MAP TO AC004477.1; EXPRESSED IN PLACENTA, SIGNAL = 2.2; EXPRESSED IN LUNG, SIGNAL = 2.4; EXPRESSED IN HELA, SIGNAL = 2.2; EXPRESSED IN HEART, SIGNAL = 2.7; EXPRESSED IN FETAL LIVER, SIGNAL = 2.2; EXPRESSED IN ADULT LIVER, SIGNAL = 2.1; EXPRESSED IN BRAIN, SIGNAL = 2.2; EXPRESSED IN BONE MARROW, SIGNAL = 1.9
cctaatcctttgcacccttatggtgatagtcacactaatggttttgctagtggctctttttttttgtgggaaggggatagtgtctggaagtagatgaatgaacacttgctggtgcagggaccagggggtaaaggctggcaggtgaagagctgggaggggccccacccaggactaactggggtgacactaggagggaactctgaggggcaggacaaggaagggaccttgggatcttagagctaaagtcatgtgatctgtctttcaggacatagatctgattgacatcctttggcgacaggatattgatctgggggctgggcgtgaggtttttgactatagtcaccgccagaaggagcaggatgtggagaaggagctgcgagatggaggcgagcaggacacctgggcaggcgagggcgcggaagctctggcacggaacctgctagtggatggagagactggggagagcttccctgcacaggtaccat

SEQ ID NO: 5743 - DNA, 457 bp, Homo sapiens
  MAP TO AC004671.1; EXPRESSED IN PLACENTA, SIGNAL = 4.5; EXPRESSED IN BONE MARROW, SIGNAL = 4.8; EXPRESSED IN ADULT LIVER, SIGNAL = 4.5; EXPRESSED IN LUNG, SIGNAL = 4.9; EXPRESSED IN HELA, SIGNAL = 4.5; EXPRESSED IN HEART, SIGNAL = 4.4; EXPRESSED IN FETAL LIVER, SIGNAL = 4.5; EXPRESSED IN BRAIN, SIGNAL = 4.8
cctctctcctgctctcatgcacgttcatgagcctgtgacttggtggagagaacattctgtttacagtgagaggccaggactgaagtcacagctctgcaaaaatgatcagctttcggcctagaaccagtgactaactttttgggcctcactttcatgaagacgcatttgatatttgcttttacacttttcttatggttaattttgatgcagagagacttcacatacagagtgcctttgtcatttattgatgaaaaataattcttagctcagtgcaaatgggattgttgtatctgaaatccatctctcctttccctttcagcttcaggatgagttagagaaaggtgaacgggacaatgcagaactgcaggagtttgccaacgccattcttcagcagatagcagaccattgtcccgacatcctagagcaagtggtcaacgccctggaagagtcctcttga

SEQ ID NO: 5744 - DNA, 470 bp, Homo sapiens
  MAP TO AC005057.1; EXPRESSED IN BONE MARROW, SIGNAL = 4.8; EXPRESSED IN ADULT LIVER, SIGNAL = 5.9; EXPRESSED IN PLACENTA, SIGNAL = 5.8; EXPRESSED IN HELA, SIGNAL = 5.1; EXPRESSED IN HEART, SIGNAL = 5.4; EXPRESSED IN FETAL LIVER, SIGNAL = 5.7; EXPRESSED IN BRAIN, SIGNAL = 6.4; EXPRESSED IN LUNG, SIGNAL = 5.7
gtgaaagcacccagctgaaccgaggagcaggctgacttacaagacaggtttctgccgggcagagctgcccgcctccccgctgggagtataagccggagagctcagggggctggtctcaggccccagcccgtggcccagtgtatcgtgagggtcatgctcgagggtcagctggagcaggcggctggtttcctgaatcagcaggtcaatctggggacagcaggcatgtgaatgggggtggagtggggagggggctaggcatgaaggcactacctcccgtcctgccccacagactcaggaccgtacctcgtccaggggcacatttcggatgggcgtgccattgatttccaagatccggtctccgacgtggatggaattcttcacatctgggctcatgcagcccggatccactctgtgggtaaggcaggggtcaggccagtgcccacctgtccctcagagccccaacaggaaac

SEQ ID NO: 5745 - DNA, 489 bp, Homo sapiens
  MAP TO AC004590.1; EXPRESSED IN LUNG, SIGNAL = 1.9; EXPRESSED IN BONE MARROW, SIGNAL = 1.6; EXPRESSED IN PLACENTA, SIGNAL = 1.9; EXPRESSED IN HELA, SIGNAL = 1.7; EXPRESSED IN HEART, SIGNAL = 1.3; EXPRESSED IN FETAL LIVER, SIGNAL = 1.7; EXPRESSED IN BRAIN, SIGNAL = 1.7; EXPRESSED IN ADULT LIVER, SIGNAL = 1.7
caagccgattttcctctcaggtaatgctcccaccttccctgatgtgggggtgtgggcagggagtggcagtggatgggggagggtcctctcggcctggcgggtcttccaggagactagaggccaggacgtcttccatgtagccagggccacttggccagcctccctctgacccgttgctggccccctgacctctccccatggccctgttcagtcgggtactccacctgccactggtgccacatgatggaagaggagtccttccagaatgaggagattggccgcctgctcagtgaggactttgtgagtgtgaaggtagaccgtgaggagcggcctgacgtggacaaggtgtacatgacgttcgtgcaggtgagcagccctcctcgggagtgtatgcgccacatgggctcagagcagctcccctcaccctcgccctctctccgccaggccaccagcagcggcgggggctggcccatgaatgtgtggctgact

SEQ ID NO: 5746 - DNA, 468 bp, Homo sapiens
  MAP TO AC002542.1; EXPRESSED IN PLACENTA, SIGNAL = 4.6; EXPRESSED IN LUNG, SIGNAL = 5.1; EXPRESSED IN HEART, SIGNAL =   5; EXPRESSED IN BRAIN, SIGNAL = 4.7; EXPRESSED IN BONE MARROW, SIGNAL =   5; EXPRESSED IN ADULT LIVER, SIGNAL = 4.5; EXPRESSED IN HELA, SIGNAL = 5.3; EXPRESSED IN FETAL LIVER, SIGNAL = 4.8
aacttgcccaaagtgacacactaatataaagggtgaagtccacatgtgagccccatgctcttaacactacgcatcctacctctcaagctaaaatacagatgtttcttttgtaccattattttgtgtcagcaactacaaacaggagtgcatgaaccagttggccactctgcatgttttggcgtaactccttgcctttctgcatgagctcctacagtctattaccatgtccttggctttgtaattgatggtggctattatctgaatgaacaggtgtgcaactgcttatattctcttggctgaagaggaagcaacaaccattgctgaagcagaaaaattatttaagcaggccctgaaggctggagatggctgttaccgacgctctcagcagctacaacatcatggatcccagtatgaagcccaacatagtaaggtttcctgcaggttgatgcattgggggatcagaattgt

SEQ ID NO: 5747 - DNA, 470 bp, Homo sapiens
  MAP TO AC004812.1; EXPRESSED IN PLACENTA, SIGNAL = 3.6; EXPRESSED IN HEART, SIGNAL = 3.4; EXPRESSED IN BONE MARROW, SIGNAL = 3.6; EXPRESSED IN ADULT LIVER, SIGNAL = 3.6; EXPRESSED IN LUNG, SIGNAL = 4.1; EXPRESSED IN HELA, SIGNAL = 3.5; EXPRESSED IN FETAL LIVER, SIGNAL = 3.3; EXPRESSED IN BRAIN, SIGNAL = 3.6
gcactagccttcccttcctctgcctggcatcccacattccagcttccccagagctcaactcctactccttcccagacaggtttctagaggggaggggttttctcttcagcttagggtttcatagctattctctcagagatgggggtaccgtgacattgggcagaatactgaaagatacttgccttcatgttttggggctagtccctagttcctacttgtcagcccgggtgtaactccacaccacccctgtggctctccaccctttcagatcaagatgctgtcagatcggaaacgggagctggagcatcgtctcagcgctactttagaggaaaatgacctgctccaagggaccgtggaggagctacaggaccgggtgctaatcctggagaggcagggccatgacaaggacctacaggtactggggtagagaagctgtcctgcaggactagagccagataaaaggagcactt

SEQ ID NO: 5748 - DNA, 476 bp, Homo sapiens
  MAP TO AC004836.2; EXPRESSED IN LUNG, SIGNAL = 6.7; EXPRESSED IN BRAIN, SIGNAL = 6.9; EXPRESSED IN HEART, SIGNAL = 5.9; EXPRESSED IN FETAL LIVER, SIGNAL = 5.7; EXPRESSED IN BONE MARROW, SIGNAL =   6; EXPRESSED IN ADULT LIVER, SIGNAL = 6.1; EXPRESSED IN PLACENTA, SIGNAL = 6.5; EXPRESSED IN HELA, SIGNAL =   6
tactcagccttgtttgcagccacactggttgtgagcaagagtttctttgtactaatgccatctctggtgcagttaaagcctgtagcatataactaatccagctctggtgtatcagagacacagtctacacttgaggtgtggacatttgagaaaaagattgaatgcagttttcttctaaacctttatttcttactctcttttcttccttttaccaacacccctgcatcaaatctcatttaggtaacgtcaacaatcatttcaccttctctcccaatgctggttccaatgtcacacgcctgctgcttacatctcgctttgactatgctggtgggtttgataagatctgggactacaagctacttgtctacgtaactgatgacaacttgatgtctgacaggaagaaagcggaggctcttgttgagacaggaacagtgacactgagtattaaagtcattccccacccaaccactatcatc

SEQ ID NO: 5749 - DNA, 481 bp, Homo sapiens
  MAP TO AC005255.1; EXPRESSED IN LUNG, SIGNAL = 2.5; EXPRESSED IN FETAL LIVER, SIGNAL =  60; EXPRESSED IN BONE MARROW, SIGNAL = 1.9; EXPRESSED IN PLACENTA, SIGNAL = 2.7; EXPRESSED IN HELA, SIGNAL =   2; EXPRESSED IN BRAIN, SIGNAL = 2.3; EXPRESSED IN ADULT LIVER, SIGNAL =  28; EXPRESSED IN HEART, SIGNAL = 1.7
aaaaggaggttgaagcagaggacttaatccaaagtatgtgtgaaattgggccatagcaccttacctgcaatgggagttagctgagcatgctctacggatcagaacacctaaattctacagcaaatgagtgtcaaacatttcctggaaattttcttttataatggtgccatgaaaagttatttgtaacaaacatgaaaaagcatttttaagatactcctggctcagtgaatgacagttcaatattgtcctcattttccaggagacaggatcatctggtttagctgctcattataattatcctgtgaaagaagatgtacaaatactactgtataaagaagtacaaggcttgtacattgaaaattatgaaacattgttggaagaagttaaagatctaaagaaatggaaagacatcccatgttcatgaattgggaggcttagtattcataagatagaagtactccccaacatgatgaatttaaca

SEQ ID NO: 5750 - DNA, 493 bp, Homo sapiens
  MAP TO AC004414.1; EXPRESSED IN PLACENTA, SIGNAL = 1.5; EXPRESSED IN ADULT LIVER, SIGNAL = 1.6; EXPRESSED IN LUNG, SIGNAL = 1.5; EXPRESSED IN HEART, SIGNAL = 1.4; EXPRESSED IN FETAL LIVER, SIGNAL = 1.4; EXPRESSED IN BRAIN, SIGNAL = 1.5; EXPRESSED IN BONE MARROW, SIGNAL = 1.2
caggctatggcttctcatctgtaaaacggggataagaataacagtattcattcactcaggagcttcatggagaggcgtgatgaggcagggaaagcctgacagagcatggacagccggagcctctgagcgtgggctgttagagcgagtctgattgctgagattcccatctgttttcagcctacaggctgataatggcaggtcctccaacgactttcgttcagcgtcatcttattatcccaggccggggctactgtctgtgcagattacaccttctcggcaggtctgcatgggttttctctggctgcgctcatgtcctcccatgtccccagactgcacatgttagggtcactggggtgtccgaattgtccccatgtgggtgagtataagtgcacctgcaatgggatgggggccagtccagggctggcttctaccttgccccctgtgctgccacggtaggctgcggccacctgtgaccctgaactggaaaaactgg

SEQ ID NO: 5751 - DNA, 442 bp, Homo sapiens
  MAP TO AC005865.1; EXPRESSED IN PLACENTA, SIGNAL = 2.8; EXPRESSED IN LUNG, SIGNAL =   3; EXPRESSED IN FETAL LIVER, SIGNAL = 2.7; EXPRESSED IN BRAIN, SIGNAL = 2.5; EXPRESSED IN BONE MARROW, SIGNAL = 2.5; EXPRESSED IN ADULT LIVER, SIGNAL = 2.6; EXPRESSED IN HELA, SIGNAL = 2.8; EXPRESSED IN HEART, SIGNAL = 2.7
cgccaccttcttcttcctctcctccctcccactcaaggatgcactgggataatgtcatcatgatcctgataatgatgatgacctgttgtcaggtctcgactctgtctgcaggagaggggcactgggctagagcagccccgtgaatgtcccgtgccacctggggtgacagtagattcccctaagtatagaaacaacaccccgactttccccaatgtttccagctgctgctgccgccctgaccttgcgaatctggatgtagagggcaggctggtggaggtgcctgtgggccgtacccacttgtctctcagcaaggctagtgaagaaggtagcttcttcccctcctctctcctctccatccctccaaacctggagggcagcagggagtgtgaccactgccttcagcttggagactcggtgctgagggctctgttaatccacctcg

SEQ ID NO: 5752 - DNA, 457 bp, Homo sapiens
  MAP TO AC005885.1; EXPRESSED IN HELA, SIGNAL = 5.3; EXPRESSED IN HEART, SIGNAL = 5.9; EXPRESSED IN BRAIN, SIGNAL = 4.2; EXPRESSED IN PLACENTA, SIGNAL = 4.3; EXPRESSED IN LUNG, SIGNAL =  11; EXPRESSED IN FETAL LIVER, SIGNAL =   4; EXPRESSED IN BONE MARROW, SIGNAL = 3.9; EXPRESSED IN ADULT LIVER, SIGNAL =   4
ttccgaactgcaggatgaggtaagtttgacttcccatctctttgggtagccagccattctgctcccatctcactctttttctgttgttggttctcatgagggtggacaaataaaaataaaacatataggagctaaatgacctaattcaagccttgatagatttatttgcctttactcatacagactataaagaatcttaacccaaagtagccagaaaaggaagaggtacatgtgaaagcctccatatattaacaatatagtttggggagcttaaagcaaatggcagcattcacctttccaggaccttggccaacaagcctgtggtgctctaacatcttctcagcaagaacagcaagaatggactccaggcatcgggactgcacctccaagtccagtagctcctccaagccttgatcttcagcaatgatgagccgcctcccaggactcctctctgtcc

SEQ ID NO: 5753 - DNA, 472 bp, Homo sapiens
  MAP TO AC004047.1; EXPRESSED IN PLACENTA, SIGNAL = 1.7; EXPRESSED IN HEART, SIGNAL = 1.3; EXPRESSED IN BRAIN, SIGNAL = 1.1; EXPRESSED IN BONE MARROW, SIGNAL = 1.8; EXPRESSED IN ADULT LIVER, SIGNAL = 2.2; EXPRESSED IN LUNG, SIGNAL = 1.5; EXPRESSED IN FETAL LIVER, SIGNAL = 2.4
ttcaggggttacatgtgcagatgtgtgacatggatatattttgtaatgctggggtttgggcttcaaatgtacccatcacttagatagtgaacattgtacccagtaggtaattttcaaccctcactctcctcccttccttcctctctccttccctttccatttttggagtccccagtgtctattatttttatctttttatccatgtgtacccattgtttagctcctgcttattttaaaactgctgttagatctccaggtggagaagttgaaaagcagctggagagttggagagagagtctctgcctcaaagaaaaaaaaaaggaaagaaagaagaaagaaagaaaagaaagaaagagagaaagaaaggaaggaaagaatggaacacaaaagagggctcagagtgaagatatggattgatcagatgactgagactaggtaagattatttaaagagtgagcttagcatggagtcg

SEQ ID NO: 5754 - DNA, 401 bp, Homo sapiens
  MAP TO AC005189.1; EXPRESSED IN HEART, SIGNAL =   4; EXPRESSED IN BONE MARROW, SIGNAL = 3.7; EXPRESSED IN ADULT LIVER, SIGNAL = 4.3; EXPRESSED IN PLACENTA, SIGNAL = 4.1; EXPRESSED IN HELA, SIGNAL = 3.6; EXPRESSED IN FETAL LIVER, SIGNAL = 5.3; EXPRESSED IN BRAIN, SIGNAL = 4.2; EXPRESSED IN LUNG, SIGNAL = 3.7
gaccacagcacaaacacagggccaatcaacaggaggctggacctgcagaagcaagatgctagcaataaaagctgtacgtgacagagtgaaaacagcacttcagagttaaaaagaaacaatagtacagtaaacttatacatggactttaacaatattgataatacctaatacttctgtctctgactattatgtgtcttgtactattctaagcactttatataattcatttaattctcacaaccctttgaagtaggaactattatcatcacgctcattttgcagatgagtaaactgaggcacagaaaggttaagtaacatgcccaaaggtgcactaataagtgaataagtggtagaactgggattcaaattcatgcagtctggctccagcatctgctctttca

SEQ ID NO: 5755 - DNA, 459 bp, Homo sapiens
  MAP TO AC005815.1; EXPRESSED IN PLACENTA, SIGNAL = 4.3; EXPRESSED IN LUNG, SIGNAL = 4.9; EXPRESSED IN FETAL LIVER, SIGNAL = 4.1; EXPRESSED IN ADULT LIVER, SIGNAL = 4.2; EXPRESSED IN HELA, SIGNAL = 4.1; EXPRESSED IN HEART, SIGNAL = 4.1; EXPRESSED IN BRAIN, SIGNAL = 4.5; EXPRESSED IN BONE MARROW, SIGNAL = 4.5
atgaaaacctgctgtcctggtagaggtgcccaaagaaggagtctccacattctcccagtatctgacagccttcaccaccaagtaaaggacaggacaagaggctcagagggactgaccagttggctggacgttgaccacggctccctcggaacgctttcgggtcatagcataccacgacccatccggatcctggatccactcggcggcctcgcagtagaattcgccctggtcagaaggctgcaggtggaagatggtgaggcggaaggtggtcctccccagcttgtccagccgcacctcccccaggctctgcctctgggcatattcgctgctggagtgaagcatgaaatctcggctcagggagatgacctccacgggcttctcgccaactttctgccggagccaggccacagacaggtggctgtgctgaatggtctctgaggccacctcacaagtgagctc

SEQ ID NO: 5756 - DNA, 499 bp, Homo sapiens
  MAP TO AC004707.1; EXPRESSED IN HELA, SIGNAL = 3.9; EXPRESSED IN HEART, SIGNAL = 3.6; EXPRESSED IN BONE MARROW, SIGNAL =   4; EXPRESSED IN LUNG, SIGNAL = 3.9; EXPRESSED IN FETAL LIVER, SIGNAL = 3.7; EXPRESSED IN BRAIN, SIGNAL =   4; EXPRESSED IN ADULT LIVER, SIGNAL = 3.9; EXPRESSED IN PLACENTA, SIGNAL = 3.9
aaagctcccttttccaccacactgcagtgcaggaccctgcatgctacaggaaagaagatgaaggccccagcccttccatgcttccctgactctagggatgggagtcagctctgatggttggcttcttgaggtcacctctctggcgagtcctattctgtctggcttctgggcctcatttgagaactgcacgcttacctttcctgagaggtagtttgcggttgaaggtcaagggcagcacaaggaagcgggtctcacccagcggttcccagaactgaaggagtcgaacagtccagggccctggccgcaggggccggctcagtgggggcttgtattgcgtgacctcagtctccgtatctactgtgatgtcataagatgtggccaccacataggttgggtcgatccagaccactgtggctgtgaggttggggccccgggcccagcgctgcacggccacaggctcgtccagcggccccagtaaccccccaaagttccggaaaag

SEQ ID NO: 5757 - DNA, 458 bp, Homo sapiens
  MAP TO AC005155.1; EXPRESSED IN FETAL LIVER, SIGNAL = 1.5; EXPRESSED IN BRAIN, SIGNAL = 1.4; EXPRESSED IN BONE MARROW, SIGNAL = 1.4; EXPRESSED IN PLACENTA, SIGNAL = 2.8; EXPRESSED IN HEART, SIGNAL = 1.5; EXPRESSED IN ADULT LIVER, SIGNAL = 1.2; EXPRESSED IN LUNG, SIGNAL = 1.4
gcagtggccttcctcaagaaggggctgctactgcccatgcctgagctgggccccacagaggcaaggagttgaccctaccacgtactctggcctgggccggttctgaggggcaccggaatcatgatgttaggatttggctctcctacctgcctccatcccaggtgggaaaaacctgtccaacggggtggtgggctgtggggtaacctagggaacgcttcccaggggcttttgagtggagccctctgaacacacctgctctgttcctagattttctgggtggggccattcatcgggggagccctggctgtactcatctacgacttcatcctggccccacgcagcagtgacctcacagaccgcgtgaaggtgtggaccagcggccaggtggaggagtatgacctggatgccgacgacatcaactccagggtggagatgaagcccaaatagaaggggtctgg

SEQ ID NO: 5758 - DNA, 414 bp, Homo sapiens
  MAP TO AC005741.1; EXPRESSED IN PLACENTA, SIGNAL = 8.8; EXPRESSED IN HEART, SIGNAL = 8.6; EXPRESSED IN FETAL LIVER, SIGNAL = 8.3; EXPRESSED IN BONE MARROW, SIGNAL = 8.4; EXPRESSED IN ADULT LIVER, SIGNAL = 8.6; EXPRESSED IN HELA, SIGNAL = 9.1; EXPRESSED IN LUNG, SIGNAL = 9.4; EXPRESSED IN BRAIN, SIGNAL = 8.8
aacaaacatgtgcaagaccagtatgtgtaaaactattaaaattttctagaaagaaatcaaaggatattaaatgaatggagggctatcatatgtttatgaatgggaagtcttttgaatgggaagtcttttaaatatatcttttcttttgctaatttgacctacagagtcaaagtaattctgttaaaaagctcatgagttgttttttttttttttttcttggaaatgaggaagacaattctgtcagctatatgaaaaaataaaggccagtaatagcaagacactactaaagaagaatgaagaaggtgaaaaaaagcaggaggggaaggaagtagataaatgggaggaggaggaggaggaagaagaacaaaaccaagactaacaagaagaacaagaaggtggaggaagaggaggaac

SEQ ID NO: 5759 - DNA, 500 bp, Homo sapiens
  MAP TO AC004158.1; EXPRESSED IN PLACENTA, SIGNAL = 4.9; EXPRESSED IN LUNG, SIGNAL = 5.3; EXPRESSED IN HEART, SIGNAL = 4.5; EXPRESSED IN BONE MARROW, SIGNAL = 4.7; EXPRESSED IN ADULT LIVER, SIGNAL = 4.8; EXPRESSED IN HELA, SIGNAL = 4.6; EXPRESSED IN FETAL LIVER, SIGNAL = 4.9; EXPRESSED IN BRAIN, SIGNAL =   5
tgcatgcccctattaaagtattgaacatcattcaagaaaggtttttttggggtcctttttttactcaatcctcctgatacaattttctgatatatttttcaccatagattagttttacctgttttataactttatttaaattgaatcatatagtgtatgtgctctgttgtgtccaactacctctgctcagcataatgtctgtgagatccatttatgttgttttgagtgtcagtagtttattcttcattgctgagtaatacttcattgcatgaatataatatactatgattagtttattcattctcccatttgtgaatatttgagtttccattttgactattttgaacaaagctgttgtgaatattcttgtacaaatcttttgtatctaggtttttatttctctggtaattgctggagaaagggcaggtgaatatctaactatataaaaaactatcaaaaagttttccaaaataattgtgccatcttacatacccaccagc

SEQ ID NO: 5760 - DNA, 470 bp, Homo sapiens
  MAP TO AC004593.1; EXPRESSED IN PLACENTA, SIGNAL = 3.5; EXPRESSED IN LUNG, SIGNAL = 3.1; EXPRESSED IN HELA, SIGNAL =  28; EXPRESSED IN FETAL LIVER, SIGNAL = 3.2; EXPRESSED IN ADULT LIVER, SIGNAL = 3.1; EXPRESSED IN HEART, SIGNAL = 2.4; EXPRESSED IN BRAIN, SIGNAL = 3.1; EXPRESSED IN BONE MARROW, SIGNAL = 3.2
catggtcatctcagcacctggtacacagtacccctgtaatagatctttgttaagtgaattaatggaggagactagtgctaatgctagtctataaagctgatataaaacatattcaaagtaactgagacttgccttttctcaagtgaaatttgaggcatgtatctcaagcacgttctgtaacaatgaggaggagatactacattaaggattaaaaaacctaaggtataaggtaagaagttgttttgattaatgttgttagttgcagacaacagaagccgctctaaggagtttaagcagaaaatgacttatgacagggttttagggaccttagagaaccacgactgctccagtagtaactcccttgtcaccaccactcacacccagcattggttaccggggactggacatgagaatctctgcgagctgccccagaaaaatcacacatactaggtctctaggaggggccaatc

SEQ ID NO: 5761 - DNA, 466 bp, Homo sapiens
  MAP TO AC005160.1; EXPRESSED IN LUNG, SIGNAL = 1.4; EXPRESSED IN FETAL LIVER, SIGNAL = 1.3; EXPRESSED IN BONE MARROW, SIGNAL = 1.4; EXPRESSED IN PLACENTA, SIGNAL = 1.3; EXPRESSED IN BRAIN, SIGNAL = 1.4; EXPRESSED IN ADULT LIVER, SIGNAL = 1.3; EXPRESSED IN HEART, SIGNAL = 1.4
aaatatcattaagcagggtgacgcaaagctggagaggccaggaaattgagtctttaacctgccactccttcccgagcgtatggccatgtatgtcattacacagcactctgctccagagtataaattaagcttcattataaagatgaaggcagcccaggcctggagtttcgcaggatctggctgcggtgggctggggggtagtgggtgggccctggccctctctcttctagaggtcacagtagtagcacaaggacccccacctccttcatcctcgggggctgctgcgaggccttctcagcgaagcattggccaggctctgggaagagccgatgaccggctgtgctttccagatttggaaacttggctcatacttttccttaagcagcctccagcttctctgcgtatttcaaatcatcttgtcattcaatgcccagagcaaacgccgtggtcttgctgaagccacatt

SEQ ID NO: 5762 - DNA, 464 bp, Homo sapiens
  MAP TO AC002525.1; EXPRESSED IN BONE MARROW, SIGNAL = 2.7; EXPRESSED IN HELA, SIGNAL =   2; EXPRESSED IN FETAL LIVER, SIGNAL = 1.8; EXPRESSED IN BRAIN, SIGNAL = 1.9; EXPRESSED IN ADULT LIVER, SIGNAL = 1.9; EXPRESSED IN PLACENTA, SIGNAL = 1.9; EXPRESSED IN LUNG, SIGNAL = 2.1; EXPRESSED IN HEART, SIGNAL = 1.7
tgacaaaaggagctactacgtcacattgcaaagggacacacaaacaggaacaaatttgtgaccatttgtgctgcagcctactacaaccataattgtcatttcatagaaaaagatcatcttaccatggaaagttagaaaaaaagttcttcaaatgtaaaatatttagctttacatatatatatttatatataaatataatatttatataaactcacagcattttccttattttattttatttttcttaataccctggactggtgaaaactttattcttagcagcactgttccagagaatggtgtttggaactatgttaagaaatggaatctggcagcattgcctaggattagagaaaagggtggggagactgaaggagggaagccagataagaatgcagataaagataatgagagcaggaagtaggtgagtggccactggaataaccagaaaggagggaaatgtg

SEQ ID NO: 5763 - DNA, 491 bp, Homo sapiens
  MAP TO AC005751.1; EXPRESSED IN PLACENTA, SIGNAL =   2; EXPRESSED IN HELA, SIGNAL = 2.2; EXPRESSED IN HEART, SIGNAL = 1.9; EXPRESSED IN ADULT LIVER, SIGNAL =   2; EXPRESSED IN BONE MARROW, SIGNAL = 1.8; EXPRESSED IN BRAIN, SIGNAL = 2.3; EXPRESSED IN FETAL LIVER, SIGNAL = 1.9; EXPRESSED IN LUNG, SIGNAL = 2.1
gcttcgtttacccagagtggtaatttgcctaataatgcaaatcatgccccctttctcacctctcttatctgtaatcataccccaaataaactacttgtgcttggatctttgacttagcatctgcttctaggggaacagaaactaaggtactctgtcattggactggcattgatggagggagcctggggtgcttggcagacataggtcctacctgcagacaaatcttgcagcccatttggcttgctggatccaccctgttctctagggcctcccacttgaggtccactgtctgtttttcacccccagaaaaacgtccatcatctgttttgactccacacttattactgatgggaattttcactggatacttgtggaagatccgaagctctgaagttcctgttccccttatcttgtgccacagccgtatcttcagagacctcttgctgttgagataagcacaacttccctgggggcaccatcctagcatttca

SEQ ID NO: 5764 - DNA, 465 bp, Homo sapiens
  MAP TO AC005243.1; EXPRESSED IN BONE MARROW, SIGNAL = 1.7; EXPRESSED IN PLACENTA, SIGNAL = 1.6; EXPRESSED IN LUNG, SIGNAL = 1.6; EXPRESSED IN FETAL LIVER, SIGNAL = 1.8; EXPRESSED IN ADULT LIVER, SIGNAL = 1.8; EXPRESSED IN HEART, SIGNAL = 1.5; EXPRESSED IN BRAIN, SIGNAL = 1.7
tgatatgagggtctttgccacatttgggctcttgatagattttctcattttaggcatatacttttgggccaaccttggagtgacgatgcacttggcatgttcacacgctgagtacactcagcttccttaaacagcctctgcagttgaaaaccagtcattggaataattctgctgcaaaggaccctgatcattttccctctggctttcggatctcagagctggagctgtagaagatggtctaggagttcaggccatgtgttcctccactctctccttcagaaaaaaatagcagagatctgcagatgcaggtgcatctccttgtgattccagttggtgaaaggcatgatgcagaagataatgcagaaaaagcttccctgtgccatgccatgcagaaatgggatcatgcaggcagggatcatgaatgctgacgactgtcagtgaactacccacagattccaggtctga

SEQ ID NO: 5765 - DNA, 476 bp, Homo sapiens
  MAP TO AC005899.1; EXPRESSED IN LUNG, SIGNAL =   5; EXPRESSED IN ADULT LIVER, SIGNAL =   2; EXPRESSED IN PLACENTA, SIGNAL = 2.1; EXPRESSED IN HELA, SIGNAL = 1.9; EXPRESSED IN HEART, SIGNAL = 2.8; EXPRESSED IN FETAL LIVER, SIGNAL = 1.9; EXPRESSED IN BRAIN, SIGNAL = 2.5; EXPRESSED IN BONE MARROW, SIGNAL =   4
tgggagaacagagatttgcctgcctccttcactactgtgtccccagtgcagagaatggtgcttggcctaatagggaatgaattcatgggtgggtgatgaagtgaaggccctcagcccctgctcagggccctcctgtgacatctctctgcttcctccccttgcagtgagcatggagtttgggcgggccgtgtggctccgcttccacccgtcggcctatcccccgtgccctcacccaagctttgtggcgcacttgggtggcgtggccgtgggcatcaccctgggcgtggtggtcctgaggaactacgagcagaggctccaggaccagtcactgtggtggatttttgtggccatgtacaccgtcttcgtgctgttcgctgtcttctggaacatctttgcctacaccctgctggacttaaagctgccgcctcccccctgagggctggaggcccaaggtcggggaggggagggaaaagcag

SEQ ID NO: 5766 - DNA, 473 bp, Homo sapiens
  MAP TO AC001237.1; EXPRESSED IN LUNG, SIGNAL = 1.5; EXPRESSED IN FETAL LIVER, SIGNAL = 1.2; EXPRESSED IN BRAIN, SIGNAL = 1.3; EXPRESSED IN BONE MARROW, SIGNAL = 1.1; EXPRESSED IN ADULT LIVER, SIGNAL = 1.6; EXPRESSED IN PLACENTA, SIGNAL = 1.2; EXPRESSED IN HEART, SIGNAL = 1.4
aggaaaaggaccgtgaattgtattctgagtaatgtgggaaaacattggagggttttaatcaaaaaggatcaaaaaactaactattatgtgtttctatgtctatccccaagtaccatgtgcatttctggggcctgggagggttttctagacctctgcctggcccacaggcctggtgcatagtaggtgattaatggttgcttatgggtgtctgttgaatcaacaggtgagtaacctgaagaccatgggtgtgtgtcttccacaggttggctggctgtggcctcacagctgaggactgcaaggaccttgcctttgggctgagagccaaccagaccctgaccgagctggacctgagcttcaatgtgctcacggatgctggagccaaacacctttgccagagactgagacagccgagctgcaagctacagcgactgcagtaattgttcttggtgggcagggggaggtggagggaactg

SEQ ID NO: 5767 - DNA, 428 bp, Homo sapiens
  MAP TO AC005208.1; EXPRESSED IN PLACENTA, SIGNAL = 3.7; EXPRESSED IN LUNG, SIGNAL = 3.7; EXPRESSED IN HELA, SIGNAL = 4.3; EXPRESSED IN FETAL LIVER, SIGNAL = 4.3; EXPRESSED IN HEART, SIGNAL = 3.9; EXPRESSED IN BRAIN, SIGNAL = 4.1; EXPRESSED IN BONE MARROW, SIGNAL = 4.4; EXPRESSED IN ADULT LIVER, SIGNAL = 4.4
gagctagagacccaggagggaaaatgtatttgaaaaataagagtttctatgtcatttgttaaatcaacagaaacatgacctgaagttccacctaaaaaccttaaagtcccaattattcttaatttacaagctaaatttaattgaatacttgaattaaaagctcaaattttacttcatcaaaagactcttcccataatttttggtaagtttctcatcagtatcaacccttagagtttaccatgaatgctgaagactcactgtgttacacttatccgttctgttacagatgaactttacgggagagattttaaaaagatgaatgtattagcatttaagcagtcagagaataatacaccaacccaagtaagagaggtctatgaagctgttttgtttgtttttgttggtggtggtggtggtggtggtaaatt

SEQ ID NO: 5768 - DNA, 458 bp, Homo sapiens
  MAP TO AC005828.1; EXPRESSED IN PLACENTA, SIGNAL = 2.1; EXPRESSED IN LUNG, SIGNAL = 2.1; EXPRESSED IN HELA, SIGNAL = 1.9; EXPRESSED IN FETAL LIVER, SIGNAL = 1.8; EXPRESSED IN ADULT LIVER, SIGNAL = 1.8; EXPRESSED IN HEART, SIGNAL = 1.7; EXPRESSED IN BRAIN, SIGNAL = 1.8; EXPRESSED IN BONE MARROW, SIGNAL = 1.8
cagtgtttgtgttctgcaatttacagtatcaattagctctagctcgcctgtgttgcttatctgtatagaatcaacattcgcagttgcattatttctgaataagcctaggatgccatcatatgataactcaagtccctaaaccacactgcattttttctctctttgtttctctcaatgttgacagtttgacctaagttctgcattctcttgttcctttcagttcgctttgcaccttataggcctccagatatctccttgaagcctctgctctttgaagtgcccagcatcactacagagtcagtgtttgttggccgagattgggttttccacgaaatagatgctcaacttcaaagttcaaatgccagcgtgaaccaaggagtagtgattgtgggaaacattggattcggcaaaactgccatcatctccagactggtggccctcagctgccatggtacaag

SEQ ID NO: 5769 - DNA, 478 bp, Homo sapiens
  MAP TO AC005165.1; EXPRESSED IN LUNG, SIGNAL = 4.2; EXPRESSED IN HELA, SIGNAL =   4; EXPRESSED IN FETAL LIVER, SIGNAL =   4; EXPRESSED IN BRAIN, SIGNAL = 4.4; EXPRESSED IN BONE MARROW, SIGNAL = 4.1; EXPRESSED IN ADULT LIVER, SIGNAL = 4.2; EXPRESSED IN PLACENTA, SIGNAL = 3.8; EXPRESSED IN HEART, SIGNAL = 3.3
gggccttattaaaagcctggagccccgtttactcactgtggagcctgacttgattattcgataattagaaacaccctgctaatgactggactggagtcttccctgagggagtgcccccttcaggcaacgcattatttgtgattacacttttgtcattaagaaggtaaattactcacttctctttcctcccatattctttccagatttgcctgaaatttgtgggaatccagagaaggctgccctgtctggagatacccacacacaggcacatgtgcatacacatacatgcgtgcttctcctccatcccagttagttggttgctaagggtttgctgaatttcctgtcattctgaggctgtttcacttgctcagtggttctcagctgggtgcgtggcaatgtctggagttgtgtttggttatcaaactgcaaagaggagaggagctactggcatctaactagtggaggtcagggatgctac

SEQ ID NO: 5770 - DNA, 459 bp, Homo sapiens
  MAP TO AC003682.1; EXPRESSED IN PLACENTA, SIGNAL = 1.6; EXPRESSED IN HEART, SIGNAL = 1.4; EXPRESSED IN BONE MARROW, SIGNAL =   2; EXPRESSED IN ADULT LIVER, SIGNAL = 1.5; EXPRESSED IN LUNG, SIGNAL = 1.5; EXPRESSED IN FETAL LIVER, SIGNAL = 1.6; EXPRESSED IN BRAIN, SIGNAL = 1.5
accctctttccccttttgactgggtttcttttttgactggctataggatacatgctgtttgtcggtgaatctctctgctgccttagggctgcctgtttctcagcagcagttagagtttggcttaggagtaacataacatctccccatgcaagatcaaacatttgggttagattttagaaagcttttatgtatctatcagggtcatccaaaaacttgcctaagaccccctttgtttgtctaaggtactgcaatgatatgggaacttgaactctagtggcaccatgtccattgggcatttcctgcagggtcaacagtgaagttgagttttcttgtgtggcacagctggaggagctgatgcttggctattggaggccccagataagggatggggaggtagagcatccagaagttgcatttgagggggttttctgactttgcggtgttgtccactgtgggctt

SEQ ID NO: 5771 - DNA, 481 bp, Homo sapiens
  MAP TO AC005284.1; EXPRESSED IN PLACENTA, SIGNAL = 6.8; EXPRESSED IN LUNG, SIGNAL = 7.2; EXPRESSED IN FETAL LIVER, SIGNAL = 6.3; EXPRESSED IN HELA, SIGNAL = 6.9; EXPRESSED IN BRAIN, SIGNAL = 7.3; EXPRESSED IN BONE MARROW, SIGNAL = 6.4; EXPRESSED IN ADULT LIVER, SIGNAL =   7; EXPRESSED IN HEART, SIGNAL = 6.9
cttctcaacctggcttctgccccatgtaaaccacagaaaatctcaggcacaagacaaagggggttcctaatgggtatgagctgtggacatttcttaccttcaagttctttcacttatgccttatcagcctctttggatatttgcttggaattacaagtattaatgtcacttcttgctgtagttgttgtttatgtgcctacagtggtgctgattgccggctgactctgacctccgctcttcagatctatctgagctattgttcagcctcagcaggaggcaaccccaggagcctggctgtgagcctccagctgatgctgttgtgggcaatctcatggcattaataatattgagtgagaagacctgggattgaatctcagctccaactctctccagcttcatgaccatgggcatgttacttcacttctctgagcctaacatccttattgcaaggagaagaactagtctctccctcccagggtta

SEQ ID NO: 5772 - DNA, 468 bp, Homo sapiens
  MAP TO AC005876.2; EXPRESSED IN PLACENTA, SIGNAL = 2.4; EXPRESSED IN ADULT LIVER, SIGNAL = 1.9; EXPRESSED IN LUNG, SIGNAL = 2.3; EXPRESSED IN HEART, SIGNAL =   2; EXPRESSED IN FETAL LIVER, SIGNAL = 2.1; EXPRESSED IN BRAIN, SIGNAL = 2.1; EXPRESSED IN HELA, SIGNAL = 2.2; EXPRESSED IN BONE MARROW, SIGNAL =   2
ttgtggtgggagattttgtcatgctttctaaaatcaaggtgatgttaatttcacagttttctttctgtgcctaacaatctaatttttattctgcttaattttgatattttataaagttctgttgtctttgaagattttcataaactaaggtcttataaatacttacacagataattgcattctagttcagagtacctttatctcataagtgttttcctgtatgtgtgctttgatgttgttgatatttcatgtgattaaatagtattaacattttctaattgtaaaaaatatatttttaagccttatgattctgcagatgactggtctgagcatattagctcttctgggaaaaagtactactacaattgtcgaacagaagtttcacaatgggaaaaaccaaaagagtggcttgaaaggtaattagcttttaatctaattaaacattatttctctagcttggttctactg

SEQ ID NO: 5773 - DNA, 462 bp, Homo sapiens
  MAP TO AC004060.1; EXPRESSED IN PLACENTA, SIGNAL = 1.8; EXPRESSED IN LUNG, SIGNAL = 1.3; EXPRESSED IN FETAL LIVER, SIGNAL = 2.1; EXPRESSED IN BRAIN, SIGNAL = 1.8; EXPRESSED IN BONE MARROW, SIGNAL = 1.7; EXPRESSED IN ADULT LIVER, SIGNAL = 1.6; EXPRESSED IN HELA, SIGNAL = 1.7; EXPRESSED IN HEART, SIGNAL = 1.9
tacttggttgatggagcagctgaggcccggcaagtggaaggtacctacgcaaagtcacagagcaggctggtagcacagactgggtcaaaccggatgtcttgcttctctgtccaatatatgtcaccctgccatgtagcaagagtcagaacattgtttttcagttagacaatgactagcatgagctcttctgaagtagcttacaggttctattgtctgcaaagggacagaacatcttagccctaagctcgtctccctagaaggcaaacactgcgattggtgggcttctgcttcataagagatcagtgctgttgccaagcccaggcctcacttctgccatgagttctgctgaatcttcagggctaggggaggcctcagaggggagaaacttgaaaagagcccaaggcctttctccctgttctgtttttagtgctcctgctcctggcccaagtccagagcaggata

SEQ ID NO: 5774 - DNA, 470 bp, Homo sapiens
  MAP TO AC005153.1; EXPRESSED IN BONE MARROW, SIGNAL = 1.9; EXPRESSED IN PLACENTA, SIGNAL = 1.6; EXPRESSED IN LUNG, SIGNAL = 7.3; EXPRESSED IN HELA, SIGNAL =   2; EXPRESSED IN FETAL LIVER, SIGNAL = 2.2; EXPRESSED IN ADULT LIVER, SIGNAL = 2.6; EXPRESSED IN HEART, SIGNAL = 3.4; EXPRESSED IN BRAIN, SIGNAL = 1.9
cttgaatatccggtcatggggctttgatttgccagaagtatcaaatacgttccaacagccttgtgtgtctgagaactggggaagtgggtgttttgggtgagactgggtgaatttggttttagtttagcacttattacacctcgcgtaataatcatatgtaatatgtatagtgtcatcggggaaagtgcttgtaagtgtgcagagactgccctctgtctaccagaggtgaacacatttgctctttgctgtgcttgagactttaacctggccagtgttgtcacaggaacccagacacctgcagctgctggccgacctggaggacagcaacatcttctccctgatcgctggcaggaagcagtacaacgcccctacagaccacgggctctgcataaaggtacccacgagctgtccacagacggcgcgcatgctcagcagcccacaggagactgacttcttctcttgcccagcac

SEQ ID NO: 5775 - DNA, 457 bp, Homo sapiens
  MAP TO AC006078.1; EXPRESSED IN PLACENTA, SIGNAL = 3.2; EXPRESSED IN HEART, SIGNAL = 2.8; EXPRESSED IN BONE MARROW, SIGNAL = 3.7; EXPRESSED IN ADULT LIVER, SIGNAL = 3.7; EXPRESSED IN LUNG, SIGNAL =   3; EXPRESSED IN HELA, SIGNAL = 4.7; EXPRESSED IN FETAL LIVER, SIGNAL = 3.6; EXPRESSED IN BRAIN, SIGNAL = 2.9
tccttgtttgacttcccgtcccagtgcacatggaaatgacagctgccatgagaggtgtggagtcggaggagtctctgggagcatcagagggtttgggggctgtattctggcagtttcttgatcttttctttctcagtttcactttcatctcttgctatcaccaaggagtgtgagtagcccatggcgaccggctctgagaaaatgccatgcagagtcttcacctcctgggctgcagtggaagacttgggcttgtgatccctgtagcccagttccccaaaggtcggtgatgggccccagctgatggtgctctcatcggctgccacaatgatgctgctcttcccacaagccaggctccagattctccagctgcagaggtcctgcactgcttttgggtacatggtagattcatgggaggtgttggtggccccccagaaaaacagaccacccacttcactga

SEQ ID NO: 5776 - DNA, 478 bp, Homo sapiens
  MAP TO AC005911.6; EXPRESSED IN HEART, SIGNAL = 3.8; EXPRESSED IN BRAIN, SIGNAL = 4.7; EXPRESSED IN BONE MARROW, SIGNAL = 3.8; EXPRESSED IN PLACENTA, SIGNAL = 4.1; EXPRESSED IN LUNG, SIGNAL = 4.6; EXPRESSED IN HELA, SIGNAL =   4; EXPRESSED IN FETAL LIVER, SIGNAL = 4.1; EXPRESSED IN ADULT LIVER, SIGNAL = 4.1
tcaatcatgggagacaggtgaaaataattacattaacaactacccgtccattttcccacttcgtggataaagctcttatttgtgggagggtagagcttgctgcctattagaccatgagctctttgcagaaaatgagaacacagcatctggggactgaaagatacaatctacttccagctggcttggtctaataccagagttagttccctaaggcccatcaacaatctattcccacaacattcttctctctctcaagagttttcttagaaatcaattctcataccttctgattttcttctttttccaagtacatatagtaggtggggaagagaccccgatccattccccttttatcccggattatccgacatcttactgtgacaccttgaggggcaggactatacacaaagtcctccaggtcgtctatgtctcccaggaggttatcagctggttgggcggcagtagcagaaccggaagt

SEQ ID NO: 5777 - DNA, 479 bp, Homo sapiens
  MAP TO AC002288.1; EXPRESSED IN PLACENTA, SIGNAL = 3.7; EXPRESSED IN LUNG, SIGNAL = 3.2; EXPRESSED IN HEART, SIGNAL = 3.6; EXPRESSED IN FETAL LIVER, SIGNAL = 3.8; EXPRESSED IN BONE MARROW, SIGNAL = 4.5; EXPRESSED IN HELA, SIGNAL = 3.4; EXPRESSED IN BRAIN, SIGNAL = 3.5; EXPRESSED IN ADULT LIVER, SIGNAL = 3.4
cgttgaaggatatttcagcataccttataagactttttatcagataaatgcaactttcaaatctggtgaaggtcagtctgaagtaaatgtgcaggttgattatcatatttttgttcctcattaacttgctgcatttcaatagcactgttctgtatacttcctgttgtcaaatctgggtcttataggtgtacactaaataatctatgactgtgatgaaaacagccaaactgtctcaaagtgaccccagaagttcatgctggattgccttggacaaagagataactaagaccagacacctacctactctaggtgagaacgaagggccatgccacaagaccaacagcgtcttccccaaccttggcagaaaggacttatgacttggagtccccagggtctccaagtgctgagggctggtattgccagacaaactcctgtcaacagctggagcaacttgtgttctgtttattcccccactcaca

SEQ ID NO: 5778 - DNA, 465 bp, Homo sapiens
  MAP TO AC005157.1; EXPRESSED IN PLACENTA, SIGNAL = 1.6; EXPRESSED IN HEART, SIGNAL = 1.5; EXPRESSED IN FETAL LIVER, SIGNAL = 1.7; EXPRESSED IN BRAIN, SIGNAL = 1.6; EXPRESSED IN LUNG, SIGNAL = 1.7; EXPRESSED IN HELA, SIGNAL = 1.6; EXPRESSED IN BONE MARROW, SIGNAL = 1.6; EXPRESSED IN ADULT LIVER, SIGNAL = 1.5
gataccgagtacctccacacctaaacatttcttgttgtctactttccccacaaaagttagtcctccttttcaagtatgtatttttaccatttaaccaaatatgcatgaatcactaaataatacaatgcttacttttgcctgattttaaactttacataattgggatcatgagatatcctgtgcttattctcaggaatattgtttttgaattgtatccttgttaaagcctatagctaattcatttgtataattctaccatatgactataatgtgctttctctttccattctagagccaaacgtcatgcctggattattccagaattttgctgctacgaacaatgctgctaagatgagtgtcttcaatcacttgcacaattgtttctctagtctataatatattccttggagtggagatgccaagtcataaatatgtaagagttcaacttccataggcatcaccaca

SEQ ID NO: 5779 - DNA, 467 bp, Homo sapiens
  MAP TO AC006084.1; EXPRESSED IN PLACENTA, SIGNAL = 2.9; EXPRESSED IN BRAIN, SIGNAL = 3.2; EXPRESSED IN ADULT LIVER, SIGNAL = 3.4; EXPRESSED IN LUNG, SIGNAL = 4.1; EXPRESSED IN HELA, SIGNAL = 4.1; EXPRESSED IN HEART, SIGNAL = 3.7; EXPRESSED IN FETAL LIVER, SIGNAL = 3.5; EXPRESSED IN BONE MARROW, SIGNAL = 3.2
gagttcataaagagactgaggttgcatgtaaaagagttatggtttgagacagtctaaaaatactatgttaatttcaaggatcttatttccaatgttttgtttaaaaaattataaatacttttgagctcttgctttgcatttcaatcgcaaacccactcagatacgggaactgtttaaattcatatatggacaaataggtttcagtgatgcaatactttaaaattctgccatctccttgtgtttttctttctaggtgagtggactgccagctcctgatgtgtcatggtatctaaatggaagaacagttcaatcagatgatttgcacaaaatgatagtgtctgagaagggtcttcattcactcatctttgaagtagtcagagcttcagatgcaggggcttatgcatgtgttgccaagaatagagcaggagaagccaccttcactgtgcagctggatgtccttggtaagc

SEQ ID NO: 5780 - DNA, 448 bp, Homo sapiens
  MAP TO AC005179.1; EXPRESSED IN PLACENTA, SIGNAL = 1.7; EXPRESSED IN LUNG, SIGNAL = 1.6; EXPRESSED IN HEART, SIGNAL = 1.5; EXPRESSED IN FETAL LIVER, SIGNAL = 1.6; EXPRESSED IN BONE MARROW, SIGNAL = 1.8; EXPRESSED IN HELA, SIGNAL = 1.9; EXPRESSED IN BRAIN, SIGNAL = 1.8; EXPRESSED IN ADULT LIVER, SIGNAL = 1.8
actgccctgttctgaaccaccatcctttctcacctggcctaacccaataacctcctccctatctctcttcctctaacttaaactccatagtccattctcaaaacagcagccagagtgagcttcataaatgtaagacagctgctatcattcatctgttcaaagtcctgcaataacttcccattttactcagaacgaaagtcaaaattcttacaagaggctcaacattgcctcttttaagagtgaagcgtgctgaatggccacagagaaaagggtgaccgcagcagatgcaggagccaaagcagaaggtcaggcaagggagtaggacaaggcagcaggacaagcagaagcagcatctgggtagagtgaaggcatcaggccagcagcagcccatgtgggggtgcccagcaggggacctagaggcagaagcagcagactggaagacagggaa

SEQ ID NO: 5781 - DNA, 403 bp, Homo sapiens
  MAP TO AC004853.1; EXPRESSED IN PLACENTA, SIGNAL = 3.7; EXPRESSED IN ADULT LIVER, SIGNAL = 4.2; EXPRESSED IN LUNG, SIGNAL =   5; EXPRESSED IN HEART, SIGNAL = 3.5; EXPRESSED IN FETAL LIVER, SIGNAL = 3.7; EXPRESSED IN BRAIN, SIGNAL = 3.9; EXPRESSED IN HELA, SIGNAL =   4; EXPRESSED IN BONE MARROW, SIGNAL = 3.6
gtggctggcttctcaaattccctgatggaaacaattatcaccttccagcttcctgtgtcacggtgttatcaatcactttgtctgtgagaccttagcagtgctacagctagcctgtgtggatgtccccttcaacaaggtcatggtggccatctcagggtttctggtgatcttgcttccctgttccctggttctattctcctatgcttgcatagttgccaccattttgtgcattcgttctacccaggtacgctgcaaagcctttgggacctgtgcctctcacctcattgtggtttgcatgtgctttggggctaccatctgcacctacctggggccacagttggcctcctcagcagaggaagagaagatgattgctctcttctatggagtggtgtcacccatgttg

SEQ ID NO: 5782 - DNA, 467 bp, Homo sapiens
  MAP TO AC005293.1; EXPRESSED IN LUNG, SIGNAL = 1.9; EXPRESSED IN PLACENTA, SIGNAL = 1.7; EXPRESSED IN HEART, SIGNAL = 1.8; EXPRESSED IN FETAL LIVER, SIGNAL = 1.7; EXPRESSED IN BRAIN, SIGNAL = 1.8; EXPRESSED IN BONE MARROW, SIGNAL = 1.9; EXPRESSED IN HELA, SIGNAL = 1.9; EXPRESSED IN ADULT LIVER, SIGNAL = 1.6
ctcttccagaccctgaggtgtcactaagagccatccagttattctgagaaggctgtgggcaggagctgggagagactgaagggaggaccaagccttggggggcttctaggccgagatggggagggggtctgagggcagtggggagaaggggacttgggagaaggggacttgggagaaaaggctcagaggatgaggatggaggtgcctggcatggggagggcaggagggagatgccactgaagcatcaagtatatttgggggaggaaggaagcagtaacaatagctgtagctgctgtgcctccttccgtggtcaccagtcagcagatcagcattagaggtgtacatctctgcccaggtgtcaggcactgtcagggccgtgcactcagtggtgagcaggccagatggggcccctgagattaggtagcttggaagcagatggataaataagagggaagaatgcttcaagg

SEQ ID NO: 5783 - DNA, 464 bp, Homo sapiens
  MAP TO AC004064.1; EXPRESSED IN LUNG, SIGNAL = 0.82; EXPRESSED IN BRAIN, SIGNAL = 1.5; EXPRESSED IN ADULT LIVER, SIGNAL = 1.1; EXPRESSED IN PLACENTA, SIGNAL = 1.2; EXPRESSED IN HEART, SIGNAL = 1.3; EXPRESSED IN FETAL LIVER, SIGNAL = 1.5; EXPRESSED IN BONE MARROW, SIGNAL = 1.4
ccactctcatttccagcctcagtctagactccaaccctggtttcagtccttccccagcaggggctattcccagctctagtttcagccctaactcccaggatacctccttgccccaatcctaatccaagctcctaggtctggctgcaggccctatcccagacaccagcccacgtccagcttccggtcctggctccagccccagtcctagccctggctctggtgcctgccctaggtcctaaacttgactccagccccagcccctgtcctagtctggtgccaggtgccacacccacctgttttggccctgaagctgctggagcttctgcctctgtagcagcagctggttctccagcttgttggtggacagaaaggtctctggcatctgggcatccattcttgatgtctggttcaggagctgccccagcaagcagaagcaggtagggggctgcgtaagcgctacagga

SEQ ID NO: 5784 - DNA, 493 bp, Homo sapiens
  MAP TO AC003043.1; EXPRESSED IN PLACENTA, SIGNAL = 1.3; EXPRESSED IN HEART, SIGNAL = 1.5; EXPRESSED IN BRAIN, SIGNAL = 1.5; EXPRESSED IN BONE MARROW, SIGNAL = 1.3; EXPRESSED IN ADULT LIVER, SIGNAL = 1.5; EXPRESSED IN LUNG, SIGNAL = 1.4; EXPRESSED IN FETAL LIVER, SIGNAL = 1.4
cctgtacaagcaaagctccctgaagctgaagcttcgttgcctgcgaatcagccttgaatgttgtgaagacatttctgctcttaagagtttggattctcaagatggggcgggagggaggggagcaaggaactcaaagagcgaggggcacagaagacaaaactgagctacaaggacaccaagtatggagaaggaaggagggggtggaggaggcaggggagaaccctgcttacccctcaccttcccctaccgtaggctgattgtcagcaaacctgagcgcaagatggtcaagggctccggcttccacctggacctgctgctggtagtaggcatgggtggggtggccgccctctttgggatgccctggctcagtgccaccaccgtgcgttccgtcacccatgccaacgccctcactgtcatgggcaaagccagcaccccaggggctgcagcccagatccaggaggtcaaagagcagcggatcagtggactcctggtc

SEQ ID NO: 5785 - DNA, 353 bp, Homo sapiens
  MAP TO AC005358.1; EXPRESSED IN PLACENTA, SIGNAL =   2; EXPRESSED IN LUNG, SIGNAL = 2.4; EXPRESSED IN FETAL LIVER, SIGNAL = 1.9; EXPRESSED IN ADULT LIVER, SIGNAL =   2; EXPRESSED IN HELA, SIGNAL = 1.9; EXPRESSED IN HEART, SIGNAL = 1.7; EXPRESSED IN BRAIN, SIGNAL = 1.8; EXPRESSED IN BONE MARROW, SIGNAL = 1.9
tttgttgttcacctccatgctatttttttttctttccgtgtaagatttttagctaaaaaacactacactttcagtaatatgttttaaaaaaaatttgaaaccacctatttctaaccgagtccttcccttcatgagtaaagagtctggagcccagagagatgaatttcttgcattattattattttgatgtgttgctagaaaaagacatgtgggtttactcagtaaaatctggggagttattttcaccttcccacataggcaaggcagagccattcctagagggactagaattcgtggactatttagaagaaatagaggaagatggctttgtgggtgagggatgtatggctggt

SEQ ID NO: 5786 - DNA, 452 bp, Homo sapiens
  MAP TO AC004223.1; EXPRESSED IN PLACENTA, SIGNAL = 1.3; EXPRESSED IN LUNG, SIGNAL = 1.2; EXPRESSED IN FETAL LIVER, SIGNAL = 1.3; EXPRESSED IN BRAIN, SIGNAL = 1.4; EXPRESSED IN ADULT LIVER, SIGNAL = 1.3; EXPRESSED IN HEART, SIGNAL = 1.3; EXPRESSED IN BONE MARROW, SIGNAL = 1.3
ctatatcacactgattggttggtctgtgtctgtttgctcctgagcacagaatcgtgggtcaggaagagattctagtatattttgcaatgcagagcaccatgccaggtactcatcctgtctctgttcctacccttcatgaggtcagtcaccaaaattatgatgtggtgactgctttggggtccttggagaaagagcttggggaggtaagagctgagcacactgatctcatctttgtcattgcagtctattgactcagaggacagctttgtcccaggccgaagggcctctctgtctgacctgactgacctggaggacattgaaggcctgacagtgcggcagctgaaagagatcttggctcgcaactttgtcaactacaagggctgctgtgagaagtgggagctgatggagagagtgacccggctatacaaggatcagaaaggactccagcacct

SEQ ID NO: 5787 - DNA, 472 bp, Homo sapiens
  MAP TO AC003687.1; EXPRESSED IN BRAIN, SIGNAL = 1.4; EXPRESSED IN PLACENTA, SIGNAL = 1.6; EXPRESSED IN LUNG, SIGNAL = 1.7; EXPRESSED IN HEART, SIGNAL = 1.7; EXPRESSED IN BONE MARROW, SIGNAL = 1.5; EXPRESSED IN ADULT LIVER, SIGNAL = 1.5; EXPRESSED IN HELA, SIGNAL = 2.1; EXPRESSED IN FETAL LIVER, SIGNAL = 1.4
ttccctctttcctttgtccccttggcctagaatttctgtttcccatttttggtcagtctctgtgtctgagtttccttgtgtacataacccccctctattggaggtttcttgcacaccccgaaaatcacttcatccatctccggccatttcccttgcaggagaatggaactgcggattgggactctgcactcgcttcgtatctaagatacctctcagtcacacacacttgacctccgaaaatgcccaaccaccaaggcagtacttatagtccaattttctaccttggctcatgcacaagtttgcctggttgccacagtgcctgcttttctccctctgtcacctccactgcctcctgagtaacagtctcgagtttgtctatggcttctgcagggagccggggcgcccggacagagcaggccacctaaatcaggtgggacacatctcccctctcacccagagtcttactccacgc

SEQ ID NO: 5788 - DNA, 490 bp, Homo sapiens
  MAP TO AC005162.1; EXPRESSED IN BONE MARROW, SIGNAL = 5.8; EXPRESSED IN PLACENTA, SIGNAL = 4.9; EXPRESSED IN LUNG, SIGNAL = 6.1; EXPRESSED IN HELA, SIGNAL = 5.5; EXPRESSED IN HEART, SIGNAL = 6.3; EXPRESSED IN FETAL LIVER, SIGNAL = 5.8; EXPRESSED IN ADULT LIVER, SIGNAL = 5.8; EXPRESSED IN BRAIN, SIGNAL =   6
cttgagggcctccacagcatttaaagaaatcaaaacggttaatgaaagacacagttagataaacactccaagatgatctcaggcttaaaatatagccaaagtaaattcaaaggaacacagacagtccttttcttcattatgaggccactcaactcgcctcccgatctccaatggaataacagatataccttcttaacaaaaaaatgcctgagcaccaaggtgttcctgctcacccgccctccctccccagatggttttaattgctcaagggcagcacagggcccccagaactcacttcaaaggcctcaaaccagttctgcttcctgatgtgttctatgcattcatggcactgcttctggaagtactttttttgcttctcatccaacaagccaatttggtacaggaattctgcatagccccctataatctgaggacaaaaaagacacacatcaatgtgacaaagggagagaaagagaccttaaggaagccc

SEQ ID NO: 5789 - DNA, 455 bp, Homo sapiens
  MAP TO AC002066.1; EXPRESSED IN PLACENTA, SIGNAL = 1.2; EXPRESSED IN LUNG, SIGNAL = 1.4; EXPRESSED IN FETAL LIVER, SIGNAL = 1.2; EXPRESSED IN BONE MARROW, SIGNAL = 1.2; EXPRESSED IN ADULT LIVER, SIGNAL = 1.3; EXPRESSED IN HEART, SIGNAL = 1.4; EXPRESSED IN BRAIN, SIGNAL = 1.3
gcctctcctgaactgtgaccaactggcttactcaagggactggatctgctgtcccgacatgatggcaagctgcagcacatcatgcagattaaagttcagcctgcctcagactcaggataaaaacacatttgggacagtctcgctcagcctcattgcagagacaagaaatgtatggtaagatggcatacggagtattaatttgttcaaaatgctaactgatgtgaacttaccattttcctgttgaactgccaccatctccctcatgggtagtggggaagggagcccctgctgctgaggaggagtccactggtgagaacaaggagccgtattcttagcttcctcagtcaaaagacatcttggtacgagaccataacgatttgatgtaggcccactgccaaagagaatatgtgtgtctttctgcacttgctctttagcaaaaggccaagaagcagtaa

SEQ ID NO: 5790 - DNA, 487 bp, Homo sapiens
  MAP TO AC005741.1; EXPRESSED IN FETAL LIVER, SIGNAL = 1.8; EXPRESSED IN BRAIN, SIGNAL =   2; EXPRESSED IN ADULT LIVER, SIGNAL = 1.8; EXPRESSED IN PLACENTA, SIGNAL = 1.9; EXPRESSED IN LUNG, SIGNAL = 1.9; EXPRESSED IN BONE MARROW, SIGNAL =   2; EXPRESSED IN HELA, SIGNAL = 1.8; EXPRESSED IN HEART, SIGNAL = 2.1
ttccacatacttgtttagtgagggtctaaatccctatacacacataattcctaagtattgcatcacacagagcctggggtccccagtgactccctttgtgtaatatagacattagttctctcatcaggggttttatcatttctctcccagcaggaagtacccatttcccatcttcagtttgagtgacccctatcttgtctaattcttccttctcctctttggtaaactggggtcttaatactaccttagagatgtctgggatcaggctaaatagtctaatttcttcctccagggaagcttgcttagcagcttcatctgcaagcctgtttcctatagcttctacagtattccctatctgatgatcatttacatgaactatggctacctctgctggaagtaggaggctttctaaaacctgtttgaccagttccccatgtaccaattcttttcacctgctatttattaggccctgctctgtccagatttt

SEQ ID NO: 5791 - DNA, 475 bp, Homo sapiens
  MAP TO AC005368.1; EXPRESSED IN LUNG, SIGNAL = 2.3; EXPRESSED IN PLACENTA, SIGNAL = 2.1; EXPRESSED IN HEART, SIGNAL = 2.4; EXPRESSED IN FETAL LIVER, SIGNAL = 2.2; EXPRESSED IN BRAIN, SIGNAL = 1.9; EXPRESSED IN BONE MARROW, SIGNAL = 1.9; EXPRESSED IN ADULT LIVER, SIGNAL = 3.2; EXPRESSED IN HELA, SIGNAL =   2
attaacagtggttactcctgtggaataggtctgggattgtgtgaacgccaacaccatattttggtgctgttttaaaattttgcaataaatacgtgttacttttgtcattaaaaataacaaagaaaagagtgaggaaattgtagcagactaaaggaggtaagccagaggcaattaaactaataccttcccatttactttttcccttttaaacctccccagcaagcctattgaaagtaggctgaagtccctgctcccagacctgctatagttctcctcaggacccctctcctctgcatcagcctcatcagtcctgtcataggtcaggaggtctgcaggcacgtcatgaatctggacactaggtgcatggttcagcatcttcaggttttcaaagattgtctggcggatctggtccagatactggttggaaatgaggaatacagagtgagcagtttccagagattcccaggacatggaa

SEQ ID NO: 5792 - DNA, 418 bp, Homo sapiens
  MAP TO AC002544.1; EXPRESSED IN LUNG, SIGNAL = 6.2; EXPRESSED IN HELA, SIGNAL = 5.7; EXPRESSED IN HEART, SIGNAL = 4.3; EXPRESSED IN ADULT LIVER, SIGNAL = 5.3; EXPRESSED IN BONE MARROW, SIGNAL = 6.4; EXPRESSED IN BRAIN, SIGNAL = 5.8; EXPRESSED IN FETAL LIVER, SIGNAL = 5.3; EXPRESSED IN PLACENTA, SIGNAL = 5.2
tcagctcattgatgcagtccaggcacttcccccacatctctggctgccaagatttcaggccacatcagagtcagaggtgtgaaggtagagtaagcggatgcctcccccttcagcaggaatcatggggccttccaccaccaagactgcctccatagcccctgagtcttaagatgctaggtaccttcttcccccaacccaccagcgatgccctgagatgagcctcttcactgctctcaccttcatgtaggttgccaggttggggttgtagtcatagagagaggcgatgatattgaacttgatcttgacaatgacgccctctcccaggttgttttccgctgcaatctgaaccagcagttgcagcagctcaatctgggcagcactagagggccagagagctgggtgaggctttggagacaaa

SEQ ID NO: 5793 - DNA, 473 bp, Homo sapiens
  MAP TO AC004134.1; EXPRESSED IN LUNG, SIGNAL =   2; EXPRESSED IN BRAIN, SIGNAL =   2; EXPRESSED IN PLACENTA, SIGNAL = 1.7; EXPRESSED IN HEART, SIGNAL =   2; EXPRESSED IN FETAL LIVER, SIGNAL = 1.8; EXPRESSED IN BONE MARROW, SIGNAL = 1.9; EXPRESSED IN ADULT LIVER, SIGNAL = 1.8; EXPRESSED IN HELA, SIGNAL = 1.9
tgacttcaatgttgacaaactagacaatatttctaaacatgagaacaaaactcaaataattaatatgtcaaattttaagtctaattataaaaatgtttaacaaggatgctaatggtgcttcctactgctaagtttgaagccacctttcatcttcctctaagtcctccagaacaagggcccaaacctttgatttattaccagtagaagtaacacaaatgttgaaagtgaaacagtttgggtcctgtccattaagaaagtattgctatgttaactctttacttacagccttaggagccacatatccaccaggtgccatgcctatccctgtggagagttcaaacaggtcattcagtccactgctgaccacagcaggtgtaggtgaaggagcaaaggttgcaggcaccgatgatgggatgaaggattgtcccacctgcaggagaaaaaaaaaagggagaggggagattgggaagaac

SEQ ID NO: 5794 - DNA, 486 bp, Homo sapiens
  MAP TO AC004583.1; EXPRESSED IN LUNG, SIGNAL =   8; EXPRESSED IN FETAL LIVER, SIGNAL = 7.2; EXPRESSED IN BONE MARROW, SIGNAL =   7; EXPRESSED IN PLACENTA, SIGNAL = 7.3; EXPRESSED IN HELA, SIGNAL = 6.7; EXPRESSED IN BRAIN, SIGNAL = 6.8; EXPRESSED IN ADULT LIVER, SIGNAL = 6.5; EXPRESSED IN HEART, SIGNAL = 5.8
tatgacatggctaggtgcagttttaagttcaggtttttattggtgaagaggaagatggatcaggtgatttctgttctgtcctagctttcagtgccaatggaaaagatatcattgtcgactttccccagcagtctcactggactgggttgctatcagaaatggagttggtacccagtattcatcctggggttacgtgagttatttttatggttgctagatttgctttgggacgaatggttttctgttgaattaagtttaataaatgacctttcttaactcagttgctattttacaaataggtgtgatggatgtcagatgtttcctatcaatggatccagattcaaatgcagaaactgtgatgactttgatttttgtgaaacgtgtttcaagaccaaaaaacacaataccaggcatacatttggcagaataaatgaaccaggtatggcagaatgtttatattctctcttccaccaaatattaatgaaa

SEQ ID NO: 5795 - DNA, 462 bp, Homo sapiens
  MAP TO AC004126.1; EXPRESSED IN HEART, SIGNAL = 1.4; EXPRESSED IN FETAL LIVER, SIGNAL = 1.5; EXPRESSED IN BONE MARROW, SIGNAL = 1.8; EXPRESSED IN ADULT LIVER, SIGNAL = 1.8; EXPRESSED IN PLACENTA, SIGNAL = 1.3; EXPRESSED IN LUNG, SIGNAL = 1.2; EXPRESSED IN BRAIN, SIGNAL = 1.1; EXPRESSED IN HELA, SIGNAL = 1.7
gcaagtgactcccaagagaaggattcattcattcactcagcaaatatttactgagcatctgtttgtgatcagagactgggaaagtgtcggaacgcccaccacccactgacccaagaagtgtctctgtaggagggaggggtatgggtacagagagtgccccggacccctttggccctcactgtcaccccttcctgaatggcaggtgatggatctcggccgcgacgccacccgccgcttcttcaactggttttactggagcatcaacctgggtgctgtgctgtcgctgctggtggtggcgtttattcagcagaacatcagcttcctgctgggctacagcatccctgtgggctgtgtgggcctggcatttttcatcttcctctttgccacccccgtcttcatcaccaagcccccgatgggcagccaagtgtcctctatgcttaagctcgctctccaaaactgctg

SEQ ID NO: 5796 - DNA, 487 bp, Homo sapiens
  MAP TO AC004472.1; EXPRESSED IN LUNG, SIGNAL = 3.7; EXPRESSED IN FETAL LIVER, SIGNAL = 2.7; EXPRESSED IN BRAIN, SIGNAL = 2.7; EXPRESSED IN BONE MARROW, SIGNAL = 3.1; EXPRESSED IN PLACENTA, SIGNAL = 3.1; EXPRESSED IN HELA, SIGNAL = 2.7; EXPRESSED IN HEART, SIGNAL = 2.4; EXPRESSED IN ADULT LIVER, SIGNAL = 2.6
tctggaaataaatacatcaaattgctatagaaacagcaaatatagaaacttgaggttgatgaaattcttccttctacctttccacattttccaaattcactatataatattataataacggagaaaactttaaaacaaacaacatttcctatcacctctatcaggacatagctagagttcctatcaaacacaggacctgacatacaggagcccctcacaaaacgcagtcatgtgccaatacctagatgtgaaggcagctgctgtagaggctcctgccttctagaagcctgcagtctctcctgtctgccagaagcctcaccatggctcggcctccgagatgccatcctgggccggcagggcaggttcagcttctgcccctcgggactcgatctcacctctggccgctgacactctgacccatgcgacttttcggggctcctacttcccattcccaccagcccaccaggggcactgcggcctcacaact

SEQ ID NO: 5797 - DNA, 460 bp, Homo sapiens
  MAP TO AC005924.2; EXPRESSED IN PLACENTA, SIGNAL = 4.3; EXPRESSED IN HEART, SIGNAL = 3.8; EXPRESSED IN FETAL LIVER, SIGNAL = 4.2; EXPRESSED IN BRAIN, SIGNAL = 4.2; EXPRESSED IN LUNG, SIGNAL = 3.8; EXPRESSED IN HELA, SIGNAL = 3.9; EXPRESSED IN BONE MARROW, SIGNAL = 3.5; EXPRESSED IN ADULT LIVER, SIGNAL = 3.8
ttccctcttttccatacccctcaagtctatgccttccacttgtcagcaatacttctgggcactgctgagtcccagtggggctcttggggccaagaaaattgcttctaattctccataaaccgaatttgaagcaagttactgaagtgttgacttaccacttgcttctcagatgctgctgctgctgctgctgttgctgttgaggtggtggtggcggcagcagcagccaccgtctgtctgcccagtcctgcagtgctggtacaatcaggcggtgcagctttcacactcggcaagtagactgggggagggccagctttaggagctgttctggagtggaacagcgaatgattacagggataagaaaatgaacgtgaagggtgctgactgggaggtctttgcttccagcctgctttgagttggttatggattggggtagctggggggtggtagggaggtggtggag

SEQ ID NO: 5798 - DNA, 479 bp, Homo sapiens
  MAP TO AC002069.1; EXPRESSED IN PLACENTA, SIGNAL = 1.3; EXPRESSED IN HEART, SIGNAL = 1.9; EXPRESSED IN FETAL LIVER, SIGNAL = 1.4; EXPRESSED IN BRAIN, SIGNAL = 1.5; EXPRESSED IN BONE MARROW, SIGNAL = 1.4; EXPRESSED IN LUNG, SIGNAL = 1.6; EXPRESSED IN ADULT LIVER, SIGNAL = 1.6
atctgggggaagaaagttcctgaaagatgtatgaaagacaaaggacagaagcatgcttgacacatttgaagaagcaagggggccggtgtggctgcagtagagtatacatgagggagagtaatgggatatatatagagagagatggggccagactatgaagggctttatagaacagtggaagtactctgagttttagttcaagtgggatatatttctagatttctatcattgaaatgacataatatgacttacacatttaaaaggctcactctgggtgctatattgagagtagagaataaaggagtgggcagtggttgaggggatagggttgcagcagggatccatgttacaaggctggaagtaatcaaggtggaaggtgatggtgccccaggccagtaggagcagtaaaggtgatgagaagtggttgaattctaaagatatattgaagaaagaactaaaagcattttctgatgaaatgg

SEQ ID NO: 5799 - DNA, 442 bp, Homo sapiens
  MAP TO AC004844.1; EXPRESSED IN PLACENTA, SIGNAL = 6.6; EXPRESSED IN LUNG, SIGNAL = 7.2; EXPRESSED IN HEART, SIGNAL = 6.5; EXPRESSED IN BONE MARROW, SIGNAL = 7.3; EXPRESSED IN ADULT LIVER, SIGNAL = 6.2; EXPRESSED IN HELA, SIGNAL = 6.9; EXPRESSED IN FETAL LIVER, SIGNAL = 6.5; EXPRESSED IN BRAIN, SIGNAL = 7.4
ctcgtggtctccctggtctcccgtataagcctcataagcctcagagagggcgattttatggaaatgctaatgtaggctgattctcagccttttctgaagagctctgcactttaataactgctcccaggcataatagagaagaaaactgcaaataaaataacaaatgctataataaatctccaaaagaaaggggatcacttagagttgttatgtctgtaagaaatggcattgccaaaagggacctctgggttgctggattcaatagacgtcttcagcctcaccttacctggcctctgggcagaagcagatgctgttgctgctttagcagctggaactgctctgggttccagggatccatcccccctgggcctcctccacctgccaccctgtcctcctctcttctacctctaaatgccagaaccctacagggcttgatcccatg

SEQ ID NO: 5800 - DNA, 461 bp, Homo sapiens
  MAP TO AC005091.1; EXPRESSED IN PLACENTA, SIGNAL = 2.8; EXPRESSED IN HELA, SIGNAL = 2.8; EXPRESSED IN HEART, SIGNAL = 2.5; EXPRESSED IN FETAL LIVER, SIGNAL = 2.9; EXPRESSED IN ADULT LIVER, SIGNAL = 2.6; EXPRESSED IN LUNG, SIGNAL = 3.4; EXPRESSED IN BRAIN, SIGNAL = 2.9; EXPRESSED IN BONE MARROW, SIGNAL = 2.7
taaatgagtgggttttgccctagtgaagatacaaggggaaaggatattctgggaatataagcttaaacctaagagaagaaaaaatttaactttgagtaggaaggaagaatctagttttgataatttgcgaaaggaggaaggacatatcccagattcttgtcaagaacagtgtggggaatgagacatggcaagtattgttaaattgaaataacatgaattttataataggaagtttaataattttgtttgttaacttcctcttaggatattaccttccaaatgatgatggagaattttatcagttctgttacgttacccataagggtgaaattcgtggagcaagtacacctttccagtttcgagcttcttctccagttgaagagctgcttactatggaagatgaaggaaattctgacatgttagtggtgaccacaaaagcaggccttcttgaggttggtgtt

SEQ ID NO: 5801 - DNA, 492 bp, Homo sapiens
  MAP TO AC003962.1; EXPRESSED IN PLACENTA, SIGNAL = 2.1; EXPRESSED IN HEART, SIGNAL = 1.9; EXPRESSED IN FETAL LIVER, SIGNAL = 1.3; EXPRESSED IN BRAIN, SIGNAL = 1.6; EXPRESSED IN ADULT LIVER, SIGNAL = 1.9; EXPRESSED IN LUNG, SIGNAL = 1.3; EXPRESSED IN BONE MARROW, SIGNAL = 1.3
ttaaaattttcaattacatcatagctgatctgattcatttatcatgaattacaaattcttcaggaaaatcaactccattgttaatagcaaatatcccaaactattccatagtaaaaaagaagaggtgattgattccttagagtgacctcagtaaaaccctaacatgagattaatatttgttaatctgacaaagttataaaaattcaagccttaatccacagataattttacattgatgaaaactgattttctctctacatagtttgcaattttttgacaatgtttaacacacttacatttttgtctttcagccaggggtcccctgcaacaggctgataacccacaggatatctccttaaaatctatgtgattgtcacgattttcatcaaaagcattaaacaaacctgtaaaataggaagagatgccataaatcacagccaagcttcctaatgttaataatgacatgtttacaaaaggaggaatgactctttc

SEQ ID NO: 5802 - DNA, 465 bp, Homo sapiens
  MAP TO AC002426.1; EXPRESSED IN HELA, SIGNAL = 4.6; EXPRESSED IN FETAL LIVER, SIGNAL = 4.4; EXPRESSED IN BONE MARROW, SIGNAL = 4.2; EXPRESSED IN ADULT LIVER, SIGNAL = 3.9; EXPRESSED IN PLACENTA, SIGNAL = 3.9; EXPRESSED IN LUNG, SIGNAL = 4.2; EXPRESSED IN HEART, SIGNAL = 4.9; EXPRESSED IN BRAIN, SIGNAL =   4
attctgtcatttaatcttcacaagagccctctcaagtagatattacccttaccactctttagacattcaaagcaaagctcgctggaatttggtaactcgctgaaagtctcacagatggtaagtggcagagctggccctcaaagcggaacctctctccacccttgaccaggatacctcaatgaactcacttatcacctggattaggagcaggttagaaagctaaactactaagatgctcctgaaaactccaagtcttcctgaagaagagcaaggccctgttctgcaagacaccctagatgatgccagcaaaaatctggaaacactccacgcccttgctagaatagctctaactcagcatcggcagttcccaactcaagctgtacatcagaaatcccctaagaaccctgccaaaattggagtttctcaggcctcaatgcagacctaccgaagaaaatcctgtgggaa

SEQ ID NO: 5803 - DNA, 431 bp, Homo sapiens
  MAP TO AC006330.2; EXPRESSED IN LUNG, SIGNAL = 2.1; EXPRESSED IN ADULT LIVER, SIGNAL =   2; EXPRESSED IN PLACENTA, SIGNAL = 1.7; EXPRESSED IN HEART, SIGNAL = 2.2; EXPRESSED IN FETAL LIVER, SIGNAL = 2.3; EXPRESSED IN BRAIN, SIGNAL = 2.5; EXPRESSED IN BONE MARROW, SIGNAL = 2.2; EXPRESSED IN HELA, SIGNAL = 2.4
gaagtgtgatcttgagcagccgcgtgtgtgagattgccttggtgacctttgccctcctttgccacagtggctgtgacagtgagaagcaagtcccagaggaacttagaagggactcaaagccaggaaggaaagggggcggcctggagggcccccgcctgccaggcctgcccagtgggtgttcaccggagccgtggctgaggtctgtggccctcaccaaccctgtgtctgccttccttaggggaggaacatcatcgtgttctacggctcccagacggggactgcagaggagtttgccaaccgcctgtccaaggacgcccaccgctacgggatgcgaggcatgtcagcggaccctgaggagtatgacctggtaagctgccaccgcgtgctggccccagatggaggcagtgggtaggacagggagcaggtctgta

SEQ ID NO: 5804 - DNA, 354 bp, Homo sapiens
  MAP TO AC006121.1; EXPRESSED IN LUNG, SIGNAL = 2.6; EXPRESSED IN BRAIN, SIGNAL = 1.9; EXPRESSED IN ADULT LIVER, SIGNAL = 3.6; EXPRESSED IN PLACENTA, SIGNAL = 2.8; EXPRESSED IN HELA, SIGNAL = 2.7; EXPRESSED IN HEART, SIGNAL = 2.4; EXPRESSED IN BONE MARROW, SIGNAL = 2.5; EXPRESSED IN FETAL LIVER, SIGNAL = 2.6
tgccatttacacattagcatcaggccatttattacaaaacactatacactttccactgcaggcgggttatatattgacagcaaatttctgcagataagacagtgaataaactctccactccatgttgattaggaatagtttttctagttttaaatattagccagacacagaaaaaggttggactgtaaggcctgggtgcacagtcttgatggaaccagttaattatgtgcatttcattgatccttggtttgaggtggggatacttcttcactgccttcataattttcttgtgctcgttggccagttctctgagggttgttcatgtgatgtgctgctgggcctgtatatggctgt

SEQ ID NO: 5805 - DNA, 350 bp, Homo sapiens
  MAP TO AC004743.1; EXPRESSED IN PLACENTA, SIGNAL = 3.2; EXPRESSED IN BRAIN, SIGNAL =   3; EXPRESSED IN ADULT LIVER, SIGNAL =   3; EXPRESSED IN LUNG, SIGNAL = 3.4; EXPRESSED IN HELA, SIGNAL =   3; EXPRESSED IN HEART, SIGNAL = 2.7; EXPRESSED IN FETAL LIVER, SIGNAL = 2.7; EXPRESSED IN BONE MARROW, SIGNAL = 2.9
ccaatttctttttatatccgactgtgagaaggaaaactatttgaattctatgagagaaaccacagtcactctctaaatcaatgatctcgaaaacgcagtcatgcaactcaggagtgaaaggttgatgtattttttaattaaaaagaaattaagacgatatttagtatgcagacaagcacaaggacctcacttgtccttatagtagatggtcacaggttatctactgcgagtgagatatgctaaggaaatgcgagagctgcaccacacagagatgtcagcagcacctcacactcttctcctgtatatcaggatgacctacagtttacctgtgcccaggaaagcaaaactac

SEQ ID NO: 5806 - DNA, 478 bp, Homo sapiens
  MAP TO AC005234.1; EXPRESSED IN LUNG, SIGNAL = 2.4; EXPRESSED IN HELA, SIGNAL = 2.3; EXPRESSED IN BRAIN, SIGNAL = 2.3; EXPRESSED IN BONE MARROW, SIGNAL = 2.2; EXPRESSED IN ADULT LIVER, SIGNAL = 2.2; EXPRESSED IN PLACENTA, SIGNAL = 2.3; EXPRESSED IN HEART, SIGNAL = 2.2; EXPRESSED IN FETAL LIVER, SIGNAL = 2.4
acagcatcacgctgagaatgggggaatattcaggacacccttgctgaatagaactcattttaattgagctgcatgatgtcctgacacacagaaatgccttgccagcttttcaagtggatgtcctgcccctgttgctgtcaaaagatgctacaagtagaaacaccttctgttaataatcccgagtgggtcacgcatattttccttcagtagtcgtgctaatactctcaggaagtgagcctctttgaagctactgaatctccttcccagtccccagggcctggtgctggtccccttggcacacggtctccaggtacatctctttggggtaccagagtggcacgtcccctgcaatctgcttgtaaccctgagcaaagacttcacgctgctgaccaggcccatggcccatgtgccctgtcaggcctctgctacttagcctggccacagccttgatgtcacacctgtccctccacaccattct

SEQ ID NO: 5807 - DNA, 477 bp, Homo sapiens
  MAP TO AC004128.1; EXPRESSED IN PLACENTA, SIGNAL = 2.6; EXPRESSED IN LUNG, SIGNAL = 2.8; EXPRESSED IN HEART, SIGNAL = 2.4; EXPRESSED IN BRAIN, SIGNAL = 2.5; EXPRESSED IN BONE MARROW, SIGNAL =   3; EXPRESSED IN HELA, SIGNAL =   3; EXPRESSED IN FETAL LIVER, SIGNAL = 2.9; EXPRESSED IN ADULT LIVER, SIGNAL =   3
actgattcctgtccagtggctaagatgcaacaggctatttctgcaatggatcctgtccacaacaagcccaggctggatgtgactgtagctgtaagcagaatgctttctgcctacccactgccatataaaaatgggcaaagacattctatccaccaactagtcatgggcagtactaacattagagacatggaagagggacagactgtcattcaaaataggaaaaataagtttaataaaaggacagcactctctcactcaccactgaggttagagccatctggaaactatagatgcgggcaaggccgaagtcagcgagttttatttgtccgctgctggtcaccagaatgttctgtggttttagatcgcgatgcactactcggtgtgaatgaagaaagtccagacctcggagaagctgaaacatcatatcctaataaaattaaaaaaagaaaatcagtaaacactcaaaacggaagttga

SEQ ID NO: 5808 - DNA, 489 bp, Homo sapiens
  MAP TO AC005509.1; EXPRESSED IN LUNG, SIGNAL = 1.7; EXPRESSED IN BRAIN, SIGNAL = 1.8; EXPRESSED IN HEART, SIGNAL = 2.1; EXPRESSED IN BONE MARROW, SIGNAL = 1.7; EXPRESSED IN ADULT LIVER, SIGNAL = 1.9; EXPRESSED IN PLACENTA, SIGNAL = 1.9; EXPRESSED IN HELA, SIGNAL = 1.8; EXPRESSED IN FETAL LIVER, SIGNAL = 1.9
cttggcttctgtgagaggatgcatgtagagtggatagttgtttcctcctcagttggcatggtggcttgaattttctttttgttcctcacagactatacatttgttttcttccagtaatacaagaatctccagaggaaggagtcagatggtccataatgagcttgacaggcatttcttccaaagacgctggggattacaaatgtaaggccaaaaatctggctgggatgtcagaagctgtggttactgtgacagtgcttggcattaccacaactccaataccaccagacacttctgaaagaactggagatcatcctgagtgggatgtccagccgggatctggaagatctacatctgtatctagcgcatcatcatatctttggtcctcttccttctcccccacatcttctttttctgcttctactttgtctcctccctctactgcttccttctctttatctcctttctcctcctccactgtttcttcaacca

SEQ ID NO: 5809 - DNA, 478 bp, Homo sapiens
  MAP TO AC004988.2; EXPRESSED IN PLACENTA, SIGNAL = 1.8; EXPRESSED IN BONE MARROW, SIGNAL = 1.8; EXPRESSED IN ADULT LIVER, SIGNAL = 1.7; EXPRESSED IN LUNG, SIGNAL = 1.2; EXPRESSED IN HELA, SIGNAL = 1.9; EXPRESSED IN HEART, SIGNAL = 1.8; EXPRESSED IN FETAL LIVER, SIGNAL = 1.9; EXPRESSED IN BRAIN, SIGNAL = 1.6
tggagcagagggtatgtgtgaagcaaagtaaagataatgaacagttatttagcactatgtgtcaggcattggcctgaatactttatgcatagtatctaattcatcctcacaaaggccatatgacatagacaatgtaatcataaccatcgtcatcatcatcatcatcatcatccacctcacagatgagtaaaccatgtctcaaagaggtaaataacttttcagccacaggtcctgcaaatcctagagtcatgaggaacagccgggtatagctctactccctttctccagggatacctcacacttttgaaaaacagggctgttctctgtatccctgtcaatgtagatgcagagggtcttggcgatgatgtggttaaagtagtgaaaactcagccttacactaggtatggatttaattatcccatagtactgattagtttgatagcaaaaaaggatatttgagaaggaagctgcccatatt

SEQ ID NO: 5810 - DNA, 422 bp, Homo sapiens
  MAP TO AC004148.1; EXPRESSED IN ADULT LIVER, SIGNAL = 1.8; EXPRESSED IN PLACENTA, SIGNAL =   2; EXPRESSED IN LUNG, SIGNAL = 1.7; EXPRESSED IN HEART, SIGNAL = 1.8; EXPRESSED IN BRAIN, SIGNAL = 1.9; EXPRESSED IN HELA, SIGNAL = 1.7; EXPRESSED IN FETAL LIVER, SIGNAL =   2; EXPRESSED IN BONE MARROW, SIGNAL = 1.7
tttgcctacacacgttggtcactctcaccgggctgtccagcgcctccagggcagggctgccggactcttcttcgaggcccctctccaggtctggcccagaaaaggtattcaggtttgttgaagccacgaacgaaagggattgagaggcatgtaagaaaaactgctctagctaagccacggacgaagtgcaaggaagagcccgccggcgcggccactcaccgatgaggaccgcgttgtccaggtttcggagctgggccaacagttgcccccgcgcttggaagatgggcagactccggcgctgcagctccacagcttcagggtagggactggccgagggctgggccaggggcggctgctgcctccggcctcctcctcctcctctgccgccgctgcccgcagtcagcagcatcaccacttgcctc

SEQ ID NO: 5811 - DNA, 468 bp, Homo sapiens
  MAP TO AC004590.1; EXPRESSED IN LUNG, SIGNAL = 2.7; EXPRESSED IN FETAL LIVER, SIGNAL = 2.5; EXPRESSED IN BONE MARROW, SIGNAL = 2.2; EXPRESSED IN PLACENTA, SIGNAL = 2.5; EXPRESSED IN HELA, SIGNAL = 2.5; EXPRESSED IN HEART, SIGNAL =   2; EXPRESSED IN BRAIN, SIGNAL = 2.2; EXPRESSED IN ADULT LIVER, SIGNAL = 2.7
attggattcagggaaggttgctagcattatgaagagctattcaaggttgaatgaggtcattaaggtcaggggtcatttggagtcacaggtggtcaggtcgggtgtctggaaacctgagttctgtagatagcctcctcttaccaacctggactttctctttgggcagtgggagccatggaagactcagtcgtgggagggaccccagtgctagtgtctgggccctcagggggtcctgcctagcccaggatgctggggatggggcgagggtaggggttgggggttgggaaagtacagtctctagggctgactcacatcctcccgtaggccagtgtgtctctgaaacggatccagcaattcctgagccaagaggaacttgacccccagagtgtggaaagaaagaccatctccccaggtctagagagcccctacctgggctgcctgccccagtccttgctccagaaaaacctc

SEQ ID NO: 5812 - DNA, 482 bp, Homo sapiens
  MAP TO AC004389.1; EXPRESSED IN PLACENTA, SIGNAL = 2.1; EXPRESSED IN LUNG, SIGNAL = 2.6; EXPRESSED IN HEART, SIGNAL = 1.6; EXPRESSED IN BRAIN, SIGNAL = 1.6; EXPRESSED IN BONE MARROW, SIGNAL = 1.8; EXPRESSED IN ADULT LIVER, SIGNAL = 2.3; EXPRESSED IN HELA, SIGNAL = 1.7; EXPRESSED IN FETAL LIVER, SIGNAL = 1.7
gacaaaacaacattctttaacactccaaaaatatcacactagctcatcaggaatagaaccaaaccaaaaacaaatatctgaattgccagaaacaggactcactgatcaaggatgcactacagaaaggtgaagtcccaacctaaataaatttttaaaaatcaagatataaatggaaaaaagtctagtgaaatagcataaataaaaaacaatcacaacttctggaaatgaaggacacacttagagaattgcaaatgcactggaaaatctcagcaacagaatcaaacaagtagaagaaagaatgacagagcttgcagacaaggcttttgagttaacccaatccaacaaagagaaaaaaaagattaaaaaaaatgagcaaagcctccaagatgtttgggattatgttaaacaacaaaacctaaaaataattggcattgctgaggaagaagagtaatctaaaagtttggaaattatatttgagggaa

SEQ ID NO: 5813 - DNA, 491 bp, Homo sapiens
  MAP TO AC004894.1; EXPRESSED IN BRAIN, SIGNAL = 1.5; EXPRESSED IN PLACENTA, SIGNAL = 1.7; EXPRESSED IN LUNG, SIGNAL = 1.6; EXPRESSED IN HEART, SIGNAL = 1.5; EXPRESSED IN BONE MARROW, SIGNAL = 1.4; EXPRESSED IN ADULT LIVER, SIGNAL = 1.6; EXPRESSED IN HELA, SIGNAL = 1.7; EXPRESSED IN FETAL LIVER, SIGNAL = 1.4
tgatagggaaggtcgagcactttaattggcaattctgccaaatgatatacaatgggaaaagtgaaacagaattgagatagaaggaaaggttgctgggcaggaaaatcacaaagtttcaccacctatcatcaggtaatattgaggatttatctcaggggaggtttcaactgacatgtatgatgccgtacagttgagaaatcctcttttagagacttgagttcattcttaagacataggaagacttttatattatcattttaaccaattgtttaaaatttctactcaacttactttcacaaaatcctcaggtaaaagtaaagaggcatatgatgaacaactgctctttgcaggtaaacaagttcatctacttttaactcctccacatcttgtttctgtttggatttgtagaagtagtaactgaggaaacacacaaaaatattaaaacaatgtttgagatccatatttctcaatctggcatttaatattcttca

SEQ ID NO: 5814 - DNA, 449 bp, Homo sapiens
  MAP TO AC006191.1; EXPRESSED IN ADULT LIVER, SIGNAL = 3.2; EXPRESSED IN PLACENTA, SIGNAL = 2.9; EXPRESSED IN LUNG, SIGNAL = 1.7; EXPRESSED IN FETAL LIVER, SIGNAL = 7.5; EXPRESSED IN HELA, SIGNAL = 3.8; EXPRESSED IN HEART, SIGNAL = 3.5; EXPRESSED IN BRAIN, SIGNAL = 5.2; EXPRESSED IN BONE MARROW, SIGNAL = 4.4
aaaaacacacatcagagcattttcttgaccaggtttctttccttgttggcatcaaaagaatggagaatagactaagtattattttcagatcttaaatcaactcttcctcttattggctaggataatttgagttctttaaatagattctacagtttcaaccgaaactctgtaaatggtaaaatctcagcaaacacatgtccttttcagccctgccactgcctgtggtagaaggatggtgtgatggttattaggtgtcaacttgattagactgaagaatacctagatggctggtaaagtattgttgctgggtgtgtctgtgagggtgttatcagcagagattgacagtcgagttggtggactggaagaggaagacccaccctcaatgtgagtgggcaccataaaatcagctgccagcatggctagaacaaagcaggcagaagaatatggga

SEQ ID NO: 5815 - DNA, 479 bp, Homo sapiens
  MAP TO AC006015.2; EXPRESSED IN PLACENTA, SIGNAL =  10; EXPRESSED IN LUNG, SIGNAL =  13; EXPRESSED IN FETAL LIVER, SIGNAL = 9.3; EXPRESSED IN BRAIN, SIGNAL = 8.9; EXPRESSED IN BONE MARROW, SIGNAL = 9.6; EXPRESSED IN ADULT LIVER, SIGNAL =  10; EXPRESSED IN HELA, SIGNAL = 9.5; EXPRESSED IN HEART, SIGNAL = 8.8
ccatgctgtaaagagatgctgtgatccaggctttattattccatttctagagcacaggcagagtaggtgtagcttaattctgaagggccctaggatttttcagaatggtaaatgagcaatggcttcaactccaagtcgccagctgcattatgccttaacaataacgagagtcagcgtgcatttggaagcttcgaagacagacactgacttctctttagctatccaagtcctagattgtatcttcttccaagagaaggctgtttgcctacactgaaaatctgttgtgtagtgccatcaccttcattgattgtcttagctagatcttctggataacttgctgcagcttccaacaaagcatttgctgcttcaccttgcacttttgtgttatggagatgaattctttccttaaacatcatgaaccaacctccgctagcttccaacttttcttctgtagcttccccacctccctaagccttcat

SEQ ID NO: 5816 - DNA, 476 bp, Homo sapiens
  MAP TO AC004130.1; EXPRESSED IN BONE MARROW, SIGNAL = 5.5; EXPRESSED IN PLACENTA, SIGNAL = 5.7; EXPRESSED IN LUNG, SIGNAL = 5.9; EXPRESSED IN HELA, SIGNAL = 6.1; EXPRESSED IN FETAL LIVER, SIGNAL = 5.9; EXPRESSED IN ADULT LIVER, SIGNAL = 6.1; EXPRESSED IN HEART, SIGNAL = 6.8; EXPRESSED IN BRAIN, SIGNAL = 5.3
tgggaaatgaactgtaggatttggagaccaataaattggtatggttttcaaattgccttataattatactagaataataattatactataattattataattacactagcatattccaaattttatgtgcaaatttgtgatgattgtgctaggtgctagaatgtgactaatttattaagagcttatcctgaaaagtttaaaatgaagactacatgatgtttttcttctattgaactaggagccgaagctaattttatgctgaaagttcatcctctgaagaaatatcctgtggatctttattatcttgttgatgtctcagcatcaatgcacaataatatagaaaaattaaattccgttggaaacgatttatctagaaaaatggcatttttctcccgtgactttcgtcttggatttggctcatacgttgataaaacagtttcaccatacattagcatccaccccgaaaggattcataa

SEQ ID NO: 5817 - DNA, 458 bp, Homo sapiens
  MAP TO AC006347.2; EXPRESSED IN PLACENTA, SIGNAL = 1.3; EXPRESSED IN LUNG, SIGNAL = 1.4; EXPRESSED IN FETAL LIVER, SIGNAL = 1.5; EXPRESSED IN BONE MARROW, SIGNAL = 1.3; EXPRESSED IN HEART, SIGNAL = 1.4; EXPRESSED IN BRAIN, SIGNAL = 1.2; EXPRESSED IN ADULT LIVER, SIGNAL = 1.9
ttctaaatgctaaaccaaagtcaccaattttgaaatacctaaaacaggcaattatctttacaatactatatacaacttattaagtatggttttcatttagtgatgtaaaagaccacatccagggtctatcacatttcttgatattacaatcctttgacttagtctaccttattttgaagatagcttatctagtctaccttatactgaagacagcttacctatcttacgtagtctaccttacactgaagatagcttacctaggaataaacttaaaaacaaagaagatactgaagagagcttacctatcttcagtatttcccttttgtgtctctagagcattcagttttattcttgttatctccacttctttctcttgttgtgtcatagatccttggagaacttgtacattttcccatctctagaggaaataatcttggctactttctcttttctgtccg

SEQ ID NO: 5818 - DNA, 458 bp, Homo sapiens
  MAP TO AC004757.1; EXPRESSED IN PLACENTA, SIGNAL = 2.2; EXPRESSED IN LUNG, SIGNAL = 2.8; EXPRESSED IN HEART, SIGNAL = 2.2; EXPRESSED IN BONE MARROW, SIGNAL = 2.3; EXPRESSED IN ADULT LIVER, SIGNAL = 2.5; EXPRESSED IN HELA, SIGNAL = 2.5; EXPRESSED IN FETAL LIVER, SIGNAL = 2.3; EXPRESSED IN BRAIN, SIGNAL = 2.4
gctaatgagtagccacaatggggatttgaacctagtggtgtgttgcttaggcctatgttctcagcccatgtagaaactgtcttcacagtgcaactgagttctgagcagggtgcctggcacagagcaaacatttaatgaatgttagctactatcatgactcccctagagcagttccagacaggggacctaggctcctgatatctataccagggactccctggggtcctaggttgtcctctttccatcttttgtctatactatcttgctcatcctaggagctggaggaacttctcttttggagagattgctgctggtcttccctgcttctctcatcccctcctcccgaaggcagagcagaggaattctcggcttcttccagttaccctcagcctgcaaagaaaacatagtctgctgcgtctgctgccagttcctctctggcgacagccacaacccatttg

SEQ ID NO: 5819 - DNA, 451 bp, Homo sapiens
  MAP TO AC005242.1; EXPRESSED IN PLACENTA, SIGNAL = 4.9; EXPRESSED IN LUNG, SIGNAL = 3.9; EXPRESSED IN HELA, SIGNAL = 5.3; EXPRESSED IN HEART, SIGNAL = 6.3; EXPRESSED IN FETAL LIVER, SIGNAL = 6.4; EXPRESSED IN BRAIN, SIGNAL = 9.8; EXPRESSED IN ADULT LIVER, SIGNAL = 4.1; EXPRESSED IN BONE MARROW, SIGNAL = 3.7
atgggagtggttgtgtggtcacgtctcggaaaccggtaggacttgcagcatagcagaccaaactgactgaagagcagattccagaattcatagaagctttttccctatttgacagagacaatgatggaactataacaacaaaggaagtggaaacgataatgaggtctcttgggtagaatcccatgaaagcagggttaccagacatgattaatgaagtagatgctgatggtaatagaacggactctcctgaatttctgacaatgatggcaagaaaaatgaaagacacacaaagtgaagaagaaattagagaagcattccttgtgtttgataaggatggcaatggctatatcagtgcagcagaactttgccatgtgatgacaaaccctggagagaagctaacagatgacaaggttgatgaaatgatcagggaagcaggtattgatggtgatgg

SEQ ID NO: 5820 - DNA, 475 bp, Homo sapiens
  MAP TO AC004585.1; EXPRESSED IN BONE MARROW, SIGNAL =  13; EXPRESSED IN ADULT LIVER, SIGNAL =  15; EXPRESSED IN PLACENTA, SIGNAL =  13; EXPRESSED IN LUNG, SIGNAL =  12; EXPRESSED IN HELA, SIGNAL =  11; EXPRESSED IN HEART, SIGNAL =  12; EXPRESSED IN FETAL LIVER, SIGNAL =  21; EXPRESSED IN BRAIN, SIGNAL =  13
ggacaacagatcctgagttcgaattctgccttcaccactaagtgaccctgggcaagttacttaatttttctaagtcattagttttttcatctataaagcaggaattatagcaacactaagccttgaggaggtgagaggaagattaaacgagtcatgacatgtgaagtgcttagaccagggactagcacttggtaaatatgtagagtgagtggtattaccatttctattattcagacggagactccatctccatcagccctgcttctgtagtggctgaccacctcctcttctgggtttccacgtgagaccccaccctggttcttcagtttttcctgggatctcgtctctctgagaccaagaagcagtcttagctttgagatattgagttggatggtccttgaatgcccccttgtggacagctggctttctttcactctttcagctgaagaggaaaactggctgtgtgtgtgtgtgt

SEQ ID NO: 5821 - DNA, 500 bp, Homo sapiens
  MAP TO AC006199.1; EXPRESSED IN LUNG, SIGNAL = 2.6; EXPRESSED IN ADULT LIVER, SIGNAL = 4.2; EXPRESSED IN PLACENTA, SIGNAL =   3; EXPRESSED IN HEART, SIGNAL = 4.3; EXPRESSED IN FETAL LIVER, SIGNAL = 5.2; EXPRESSED IN BRAIN, SIGNAL = 5.1; EXPRESSED IN BONE MARROW, SIGNAL = 6.5; EXPRESSED IN HELA, SIGNAL = 6.1
acacacacacacacacacactgtataatattaggtgagtgcaaaagtaattgagatttttgcattgttggaattttccatttgatattggaataacttcttaactacatgtggttatgttatagatcatattaatgggcacttctcactttatttctttttgctaataacttactacttggtgtttattttatgtttattttagactatggaaaggaaatgatgttagaattaaaagcaaatttgagtgattttctttttcaaattcaaaatgggccgtaaagcagcgagacaactcgcaacatcaacagcacatttgacccagaaccactaatgaaaatacagttcattggtggttcaagaagttttgcaaaggagacaagagccttgaatatgaagagcacagtggtcagccatcagaagctgacaacgacaaattgagagcagtcatggaagctgatttttttttacaattacagaagttgccaaagaactcaaagc

SEQ ID NO: 5822 - DNA, 461 bp, Homo sapiens
  MAP TO AC004851.1; EXPRESSED IN BRAIN, SIGNAL = 4.3; EXPRESSED IN ADULT LIVER, SIGNAL = 4.2; EXPRESSED IN PLACENTA, SIGNAL = 3.8; EXPRESSED IN LUNG, SIGNAL = 4.8; EXPRESSED IN HELA, SIGNAL = 4.3; EXPRESSED IN HEART, SIGNAL =   4; EXPRESSED IN BONE MARROW, SIGNAL = 3.8; EXPRESSED IN FETAL LIVER, SIGNAL = 4.2
ctggggacacagacaagaggcacctaacgtgacctggagagggagatgaggtcagggaagctttgcagagaggagtgacaacccagctgagacctgcaacaagaaatcagcccagggacacagccggggagcattacgcacgctctaggggagaggcagcagcgttccaggaagcgagacggagcacagtacgttttagaaacgatgaggctcatcgtggctggcacagagagacacaggcagggcctgccatgcctagtctgtagcttttccaggagccacgggaacccctgagctgcctgggagtgaggccatcagatacagatctttacctggagccaatgcagcagccccaccgtcacgtcctgtctctggccctacgcttctgtccaaatcaccgtcctccagggccatgcagaaagccacttctgcaggctgccatcaaacacacctgggagtgg

SEQ ID NO: 5823 - DNA, 457 bp, Homo sapiens
  MAP TO AC005145.1; EXPRESSED IN LUNG, SIGNAL =  41; EXPRESSED IN HELA, SIGNAL =  37; EXPRESSED IN BRAIN, SIGNAL =  40; EXPRESSED IN BONE MARROW, SIGNAL =  39; EXPRESSED IN ADULT LIVER, SIGNAL =  31; EXPRESSED IN PLACENTA, SIGNAL =  36; EXPRESSED IN HEART, SIGNAL =  33; EXPRESSED IN FETAL LIVER, SIGNAL =  35
agtggctcacccctgtaatcccagttacttgggaggctgaggtgggaggattgcttgaacccaggagatcaaggatacagtgagccatgatcacactactactctccagcttgaatgacagagtgacattctgtctctaaaaatatatattttttaattttgaaaaggcctgtccataggcactatctctccttctccattgaagcaactatccctaaactcatcaattacctacatattggctaactccatcttcataggcccacttgacttctcaacagcattggatgtgtttacttttcctttgtgaaatgttcttctcccccagctcctgaagctaaagtcttcaccgagtttacaactgccatgtttgtgtttttctcatcttccattgtagattcttcttcctacattcagtcctcattaattcagcaggtacttattgagtcatactctg

SEQ ID NO: 5824 - DNA, 375 bp, Homo sapiens
  MAP TO AC002485.1; EXPRESSED IN LUNG, SIGNAL = 1.2; EXPRESSED IN BONE MARROW, SIGNAL = 1.1; EXPRESSED IN ADULT LIVER, SIGNAL = 1.1; EXPRESSED IN PLACENTA, SIGNAL = 1.1; EXPRESSED IN HEART, SIGNAL = 1.3; EXPRESSED IN FETAL LIVER, SIGNAL = 1.2; EXPRESSED IN BRAIN, SIGNAL = 1.1
cttttccagagaccctgaatgaattttgaaagagggaactggtaaatgaagacaaggtgtacctctgtggtttaggtttttagaaataattttctaatgcttaaaaatgggattgagacttttattggagaaatgtggaatagatacaatgttttcattttttaaaatttttttgctacatacaacgaaagtccctggatattttatataaaacaagcaaagcagaaaatttgagacaaaaaaaaaaaaaaaaagaaatgcctagggacctagagacagcaggacttgcacaacaaggtagagagttccctgtgtttttgtgtttttttcttcatatattccagacttggatttgaagaagttggcaacctgaga

SEQ ID NO: 5825 - DNA, 477 bp, Homo sapiens
  MAP TO AC005245.1; EXPRESSED IN LUNG, SIGNAL = 2.1; EXPRESSED IN FETAL LIVER, SIGNAL =   2; EXPRESSED IN PLACENTA, SIGNAL = 1.9; EXPRESSED IN HELA, SIGNAL =   2; EXPRESSED IN BRAIN, SIGNAL = 2.3; EXPRESSED IN BONE MARROW, SIGNAL =   4; EXPRESSED IN ADULT LIVER, SIGNAL = 2.1; EXPRESSED IN HEART, SIGNAL =   2
actggagagtggaatgctggtgccagtaccccttcctgcaggcccccatcattactgtaggagacgatcttggataatgcccctcgcttggctttggggaagagtgaggaaggccactgcttgtcacgaggctgacaacggcctgtgcgtaatcaattttcctccactcattctccttttaaaggggggcaaggtagggagtgtctgtggagcaagggcagtgttctaagggtacctaggatttattttaccttggtgtggtaagacacagacggggaaatgactgtcatgaaaacagtttttatactcacagatctgtagaagcagggggcactggatgccatgtagggccacacagggaagcaccaggtgggtcaggaggcagagggagagggggaagtataagtaagggcctttactggggtttccacagaaggaacaggtgaggcagggtgagcagggttacgatcggctagt

SEQ ID NO: 5826 - DNA, 476 bp, Homo sapiens
  MAP TO AC006064.9; EXPRESSED IN PLACENTA, SIGNAL = 9.3; EXPRESSED IN LUNG, SIGNAL =   8; EXPRESSED IN BONE MARROW, SIGNAL = 8.5; EXPRESSED IN HELA, SIGNAL = 8.8; EXPRESSED IN ADULT LIVER, SIGNAL = 6.9; EXPRESSED IN HEART, SIGNAL = 8.1; EXPRESSED IN FETAL LIVER, SIGNAL = 8.1; EXPRESSED IN BRAIN, SIGNAL = 8.6
ctaccaagaccctgaggcagggtgtcaacacagggacaaatgttctcagctagaagaacattgcttcatctcctcttaagagagctggcaaaacatcaactcctcagtttgaagttagtcctatattttcccaggacaaaagtatcccaacactataggatgaaggagaatacctttctcagggctgaaaagctcatagttcctctcctgcaccccagcctcacaatagcctacatagaaaagactacactttcccattttttgccccggctgagatcagtcactcaccgtacaacggggacagagccattcaccgttggggatctctggaagtgggggattcaggcagtggatgtggtaggaagaaggacaggtatcacagcagagcagttccccaccatccttgcagacccgacagaattccatatggtggtcatcctcctcttcgaggtctcccccaacctcttccaggatct

SEQ ID NO: 5827 - DNA, 379 bp, Homo sapiens
  MAP TO AC002524.1; EXPRESSED IN PLACENTA, SIGNAL = 2.5; EXPRESSED IN LUNG, SIGNAL = 2.8; EXPRESSED IN HEART, SIGNAL = 2.2; EXPRESSED IN FETAL LIVER, SIGNAL = 2.5; EXPRESSED IN BONE MARROW, SIGNAL = 2.5; EXPRESSED IN HELA, SIGNAL = 2.5; EXPRESSED IN BRAIN, SIGNAL = 2.4; EXPRESSED IN ADULT LIVER, SIGNAL = 2.3
ctcttggtcctctgtctggctatcctgtcgtgttctgctctgttggtcaaatactgagtggctatgcttccaaccagaggatccacagggttgcagtccattaaaagggaacaaatagacagcaaaacctttgaaacagtcaaagcgggactccagttgtctttaaggatgtccagacagatgactccctgactgttgatgttgcagtgatcgattctggtgcggaaagtaacctttggtggcttaaatggataatctgatgaaaatgtgatatccagaaaaaacacaccaccttcatatacagaacccagtggaccaagtatagttgatctccattcacaaatgttatctcctttaggcccagcactgcaattaggag

SEQ ID NO: 5828 - DNA, 408 bp, Homo sapiens
  MAP TO AC004168.2; EXPRESSED IN LUNG, SIGNAL = 1.9; EXPRESSED IN HEART, SIGNAL = 1.8; EXPRESSED IN FETAL LIVER, SIGNAL = 1.7; EXPRESSED IN BRAIN, SIGNAL = 2.1; EXPRESSED IN HELA, SIGNAL = 1.7; EXPRESSED IN BONE MARROW, SIGNAL = 1.7; EXPRESSED IN PLACENTA, SIGNAL = 1.7; EXPRESSED IN ADULT LIVER, SIGNAL = 1.7
ctggcaaaaacagctctctgaagatgatgcacgtaaataaaacgggtataaaagaaagtcttgtattatgtaatgaaaaatgaaaagaatgccctgttgatggtaaaggtaattttttttccttcttttaaggacaataaaatcatagaaaataaaatgatatcagtatcattttggaaaagtttctatttttaatatctcctaaacaaaaatgcttttgaactaagttgaaggtttggctgaacaatctgtgaacaagaaaaagagctgctgtacctggtcctcttgcttcaagttgccagtaatacaaagccaaactgcaccaacaatgccaagctcagttggaagaacatttccaccaacgtaaataatatttatttctagaattgaacaaaatacctaagcagt

SEQ ID NO: 5829 - DNA, 488 bp, Homo sapiens
  MAP TO AC005908.1; EXPRESSED IN HELA, SIGNAL = 2.1; EXPRESSED IN BRAIN, SIGNAL = 2.2; EXPRESSED IN BONE MARROW, SIGNAL =  15; EXPRESSED IN ADULT LIVER, SIGNAL = 2.2; EXPRESSED IN PLACENTA, SIGNAL = 2.3; EXPRESSED IN HEART, SIGNAL = 1.8; EXPRESSED IN FETAL LIVER, SIGNAL = 2.4; EXPRESSED IN LUNG, SIGNAL = 2.3
ccaacacttccttttgctgctgcccaaaatcccaggcccctagaatcaggaagcagcattttaactgcggaccatgctgcctgggaaatctcaggctctagcttgttccaatggtcgttgctgctgaaaggggcgacatattatgtggttttctcctcctcctcccaggggacctcacacatggccagggttcacatatggccacagcacactgcagtgaatccacgactcctcgagaatcaggccagagccatgatccatcaccacctcatggcagctaccccagcagtgttcttagtgtcttctgggccagatgggagccaagccaaggctgcagcagccagctacctggctgagcctccaggcagccccacacctgggccgttctcctacacaaaagcctctgtggtcctattcctccctaacccaaggcccaatatttttaaactgcattccaaagaacaactcgctgagtgccaccaatacct

SEQ ID NO: 5830 - DNA, 470 bp, Homo sapiens
  MAP TO AC004098.1; EXPRESSED IN LUNG, SIGNAL = 3.7; EXPRESSED IN HEART, SIGNAL = 2.8; EXPRESSED IN FETAL LIVER, SIGNAL = 3.2; EXPRESSED IN BRAIN, SIGNAL = 3.1; EXPRESSED IN HELA, SIGNAL = 3.3; EXPRESSED IN BONE MARROW, SIGNAL = 3.7; EXPRESSED IN ADULT LIVER, SIGNAL = 3.6; EXPRESSED IN PLACENTA, SIGNAL = 3.5
ttccctcctaactttaagaccctatatatgtatgttgataattttacctgttctacaggaaacttcataatagaactgggctgactatacattctttttctgtgtgtgtgtgaatatatactttttatttagccatttttgtttacaattgaaactctgggaattcaaaattaacatccttgcccgtgagcttcttatagacaccagaaaaagtttcaaccttgtgttccacattgttctgctgtgctttgtccaaatgaacctttatgagccggctgctatctagtttgacggggattctcttgcccacaatttcgcttgggaagaccaagtcctcaaggaaggcatcgtgcacagctgtcagagtacggctcctgggacacttttgcttattttttgtacggcttttttgagttggcttaggcagaattctcctctgagcgataaagacgacatgcttcccactgaac

SEQ ID NO: 5831 - DNA, 458 bp, Homo sapiens
  MAP TO AC004477.1; EXPRESSED IN BONE MARROW, SIGNAL = 7.4; EXPRESSED IN ADULT LIVER, SIGNAL = 7.9; EXPRESSED IN LUNG, SIGNAL =   8; EXPRESSED IN HELA, SIGNAL =   7; EXPRESSED IN PLACENTA, SIGNAL = 7.6; EXPRESSED IN HEART, SIGNAL = 7.1; EXPRESSED IN FETAL LIVER, SIGNAL =   7; EXPRESSED IN BRAIN, SIGNAL = 7.5
ctttcccaactcgctctcagtctgtctgtcctgcccctgcttccctgtctcattttgacaccgccccccaccccttggttttctctttttcttctgtcttctccagcacctcttgtctgtttcacaccagctgggtttcccccgccctccgcgtctttgtcattctgtcttcctctcccatctgctctttgtccatccctttcccgtgctctgtcttgttctgtgcatcccaactttctctcttactctgccaggctagtctccaatgagccttttccttcccctttccttctccccgtcttcttcctccttctccgccatctgtcctacattaaccaaatccatccctttcagcatctcctctgtgagcctcctttctggtgtgtttcccttaacccctgccatctccttttgcttcatccacttagcacaaacaaaggtgagccctaggagcagta

SEQ ID NO: 5832 - DNA, 474 bp, Homo sapiens
  MAP TO AC001226.1; EXPRESSED IN PLACENTA, SIGNAL = 4.5; EXPRESSED IN BRAIN, SIGNAL = 6.3; EXPRESSED IN BONE MARROW, SIGNAL =   5; EXPRESSED IN ADULT LIVER, SIGNAL = 5.8; EXPRESSED IN LUNG, SIGNAL = 3.6; EXPRESSED IN HELA, SIGNAL = 3.9; EXPRESSED IN HEART, SIGNAL = 4.2; EXPRESSED IN FETAL LIVER, SIGNAL = 5.3
ggcaacagagggagacctgtcttaaaaaaaaaaaaaaaaaaaattaacatgattagctttgttcactaggtgactttgttttgtttttttaaactaggaaacatgttcaaccaaatggcaaagtgggtgaaacaggacaatgaaacaggaatttattatgagacatggaatgtaaaagccagcccagaaaagggggcagagacatggtttgattcctacgactgttccaaatttgtgttaaggacctttaacaagttggctgaatttggagcagagttcaagaacatagaaaccaactatacaagaatatttctttacagtggagaacctacttatctgggaaatgaaacatctgtttttgggccaacaggaaacaagactcttggtttagccataaaaagattttattaccccttcaaaccacatttgccaactaaagaatttctgttgagtctcttgcaaatttttgatgca

SEQ ID NO: 5833 - DNA, 489 bp, Homo sapiens
  MAP TO AC005181.1; EXPRESSED IN BONE MARROW, SIGNAL = 3.1; EXPRESSED IN PLACENTA, SIGNAL = 3.6; EXPRESSED IN LUNG, SIGNAL = 4.1; EXPRESSED IN HELA, SIGNAL = 3.4; EXPRESSED IN FETAL LIVER, SIGNAL = 2.9; EXPRESSED IN ADULT LIVER, SIGNAL = 2.9; EXPRESSED IN HEART, SIGNAL = 3.3; EXPRESSED IN BRAIN, SIGNAL = 3.4
gctgctcaacctgattctcctttctacaaggaaagtcactaaatgctataatcagacccaatagagcatttatcaatgtttttctcattaaaaagtaattatatgatttaaatataatttgggagaagattacctaaaatagcatttcaaaaatcagtgctaaaagcagttggaaatattcacatgcatatgagtctcatgatcacattcacatactacctagttcttaaaaatggatcatactctatcatctgtttcaaatgtctttcagggctgcctgttacaatagccggaggaacatgccacagagtccccgtcatggctaggaccttacaggaaagctttggctgcatggtcacccaccaattggaccagctatttgaccatgaattggaccccctcaaggtgctgaaggtaagaaagaataagaataaagaagctgtttgaggggcggtgttggaggccctggggccaagactgcagctcagg

SEQ ID NO: 5834 - DNA, 482 bp, Homo sapiens
  MAP TO AC002038.1; EXPRESSED IN PLACENTA, SIGNAL = 4.4; EXPRESSED IN HELA, SIGNAL = 5.2; EXPRESSED IN HEART, SIGNAL = 6.1; EXPRESSED IN FETAL LIVER, SIGNAL = 5.2; EXPRESSED IN BRAIN, SIGNAL = 6.5; EXPRESSED IN ADULT LIVER, SIGNAL =   4; EXPRESSED IN LUNG, SIGNAL = 5.8; EXPRESSED IN BONE MARROW, SIGNAL = 5.6
tgaaataactccagagttgaggctagcattaagcttccaaaccataaggcatagtgctgcatgtgatggattaccacccgaacctctgtaagcttaggtttgattctcctgccactgagctccttactgagttttaatctggcatgtaccactcttcaaatctctctgtagttgagattcaaatacctgaatatggtcaaaccccttgaaagaacaacattcttatacagtggacaatgcacatcagtgggacagttttgtattcatcaacaacattcaagatggattccataaagtctgggttggcaaactctgggtaaaaaaatatttcaggttgcaggaaccttttgtaaccaacgtttattatgaacttctcctggttgatcacattgatacctgtgtactgtttcatccacttccagggatccacatcatacttagcaaattctttgactatatcagggcaaatgtaacagtatttc

SEQ ID NO: 5835 - DNA, 453 bp, Homo sapiens
  MAP TO AC006206.3; EXPRESSED IN PLACENTA, SIGNAL = 2.9; EXPRESSED IN LUNG, SIGNAL = 2.5; EXPRESSED IN HELA, SIGNAL = 4.2; EXPRESSED IN FETAL LIVER, SIGNAL = 4.3; EXPRESSED IN HEART, SIGNAL = 3.3; EXPRESSED IN BRAIN, SIGNAL = 3.9; EXPRESSED IN BONE MARROW, SIGNAL = 3.9; EXPRESSED IN ADULT LIVER, SIGNAL = 3.1
agcaagtcagaggaaccgacatacaggacctcgcggcacttgctctaggaaagggatgctatcccggggaccagagctttccttaagtctcctatgtaatgccctagagggtgggagccaggccaggctgcctgccttcgcacatgctaagcactgcccaagtgccaatcagtatctcaaaaacaattctgaaaagtattccacgattgattttactacctttattgatacacgcaaagcagggatatttacattccatcaaaagtttgctgagggtcccaaattttactctgtagtataacttctgtaaagctgtggggactccctcttttacaagtggctcccagaacttcaggaatggcttggacagtagctgttcctttactccaagccattcggacataactgagactgttggcaatctcactagaggcatcaaaatccctgccaaga

SEQ ID NO: 5836 - DNA, 470 bp, Homo sapiens
  MAP TO AC006241.1; EXPRESSED IN PLACENTA, SIGNAL = 4.4; EXPRESSED IN LUNG, SIGNAL = 5.1; EXPRESSED IN HEART, SIGNAL = 3.7; EXPRESSED IN FETAL LIVER, SIGNAL = 3.7; EXPRESSED IN BRAIN, SIGNAL = 5.1; EXPRESSED IN BONE MARROW, SIGNAL = 4.4; EXPRESSED IN ADULT LIVER, SIGNAL = 4.2; EXPRESSED IN HELA, SIGNAL = 4.4
cccagttagtggccatgccccacccgcagctctttctggagaccttgcctgtgccgcaaagcatgagtaggaggcatggggtgtcctgagagtagggagtccaggattcagaacccaggatgagagatgccaaggcaactcgagaaggggacagctgagaaaagactcaggaaggaccttgctgatatctaatccagtggtcctcaaacagcaagcacccgaatccccgacagagttcctggggggcctgagagtcggcattgctaacacactcccagctggtgccaacatggcagatctggaccacactgagaacagatccaacccagttctcttcccgagtcttgggtcagtcttcagctggcaacacggacaagggcccaccttgcacacagctcttacgggacagaagtcggcggctctgtcctgccaggaggcattgcagtcgggaccaggtgagagaccgcagg

SEQ ID NO: 5837 - DNA, 454 bp, Homo sapiens
  MAP TO AC005151.1; EXPRESSED IN PLACENTA, SIGNAL = 1.6; EXPRESSED IN HEART, SIGNAL = 1.7; EXPRESSED IN BRAIN, SIGNAL = 2.2; EXPRESSED IN ADULT LIVER, SIGNAL = 1.9; EXPRESSED IN LUNG, SIGNAL = 1.6; EXPRESSED IN FETAL LIVER, SIGNAL = 2.1; EXPRESSED IN BONE MARROW, SIGNAL = 1.9
tggctccctaagctgtcaacatggaggctgggccacctctcatctcagggtggcacccatgtggcccctgtgccaggagaaggaggattctgcttcttaggggtaattggaagggtgaagtggggacagggtgggaagagcagtggactgagagggccaaagggccgagggcaatggcagggggtcgcctacccagaaggcggaagagtgtgccccggcggaacacctctgtgtgttcgtacagccgcagggccagcaccgcgcccgacacatagaggaaggagctgggcttggccagggactccagggccaccaggcctgcctgccgtgtcccccggtgcagcaagaaggaggcatgctgttggaaggtgtcacggccctgccacttagccagctccagagacccgttggctgtgacgtgaaggaagaagttgggtctgtctgctgcctccag

SEQ ID NO: 5838 - DNA, 470 bp, Homo sapiens
  MAP TO AC004687.1; EXPRESSED IN LUNG, SIGNAL =   2; EXPRESSED IN BRAIN, SIGNAL = 1.6; EXPRESSED IN ADULT LIVER, SIGNAL = 1.7; EXPRESSED IN PLACENTA, SIGNAL = 1.7; EXPRESSED IN HELA, SIGNAL = 1.7; EXPRESSED IN HEART, SIGNAL =   2; EXPRESSED IN BONE MARROW, SIGNAL = 8.1; EXPRESSED IN FETAL LIVER, SIGNAL = 3.3
tttgccttatggtaggagggcaagagaaagacagagagggtcccagagaggcccagttgtgccccttggtctaagccaaaggtacagggttccttgaggtgaggtccttccctccctctatgaccttggttgtgttgggaaggtgggttttctgggctgctggcgatatgtgaatcttccctgctgtctccagtgacctccccaccttgaagcagagagacctgcccatagccacctgtcccctcccccatgcaggatacaatgcctggaggcgcttctgtgggctcccgcagcctgaaactgtgggccagctgggcacggtgctgaggaacctgaaattggcgaggaaactgatggagcagtatggcacgcccaacaacatcgacatctggatgggcggcgtgtccgagcctctgaagcgcaaaggccgcgtgggcccactcctcgcctgcatcatcggtacccagttc

SEQ ID NO: 5839 - DNA, 498 bp, Homo sapiens
  MAP TO AC005252.1; EXPRESSED IN LUNG, SIGNAL = 1.6; EXPRESSED IN FETAL LIVER, SIGNAL = 1.6; EXPRESSED IN BRAIN, SIGNAL = 1.5; EXPRESSED IN BONE MARROW, SIGNAL = 1.4; EXPRESSED IN PLACENTA, SIGNAL = 1.5; EXPRESSED IN HEART, SIGNAL = 1.6; EXPRESSED IN ADULT LIVER, SIGNAL = 1.6
tgtttcagtgacagccacgtggctaaacataaatcagtaagagccagccacagatttggcctggaactgttggaaaaacagcctctctctgagtgtacaggtgcttgtgaggtctgagcacctagtaccaatttgctacattgtaagcctggagcagcccaatttgctatgatacatggagaagcctacctgtaaatatataagtccaacccagaaacatatatgagaaatgaagctatttctatggacacaaattgagcacctagatcaagctacatctgaagtcactgttcattcattcattcttcagacagctggtaggcactgccctataccaggttctctgctgggagctgagccctgcctccttagagcttgccacccagaggaagagggtgctcccagtgactctctgaaagatataaagcctgggaagccactgacctttggtctgagcagtagaaaagacactatccctcaaactggcatcatcccaat

SEQ ID NO: 5840 - DNA, 457 bp, Homo sapiens
  MAP TO AC004593.1; EXPRESSED IN BRAIN, SIGNAL = 3.1; EXPRESSED IN BONE MARROW, SIGNAL = 2.5; EXPRESSED IN LUNG, SIGNAL = 3.2; EXPRESSED IN ADULT LIVER, SIGNAL = 3.5; EXPRESSED IN PLACENTA, SIGNAL = 2.9; EXPRESSED IN HELA, SIGNAL = 2.5; EXPRESSED IN HEART, SIGNAL = 2.8; EXPRESSED IN FETAL LIVER, SIGNAL = 3.1
tcaactgactaaagtctcaaacaggaaaatacttaccataacagcaggctgaaatttcaagtaaaaactaaagggtaattttttttttagtgtgtattggaatgaatcagccaaaggtgggttcaaattaatgcctgtaaccttgataaattacttaccctaattttttgttttcttaaccaaaaagagcagggatgataatatctacagctggagttgttgagcattttaattaagatattatataagttttctagcctcagtttccccaaatggaaaatgaggataacaattctcacttcaggattgttatgggtatatgacaatgtatacaaagtgtttagcatgatcctggcacataggaaatgattacttaaggagagtgacttttctatatcactaatggcagaaagcatggtgagagtggtcataatacctggagcagtagtagtggtca

SEQ ID NO: 5841 - DNA, 476 bp, Homo sapiens
  MAP TO AC002303.1; EXPRESSED IN PLACENTA, SIGNAL =   2; EXPRESSED IN BRAIN, SIGNAL =   2; EXPRESSED IN ADULT LIVER, SIGNAL = 1.7; EXPRESSED IN LUNG, SIGNAL = 1.9; EXPRESSED IN HELA, SIGNAL = 1.6; EXPRESSED IN HEART, SIGNAL = 1.5; EXPRESSED IN FETAL LIVER, SIGNAL = 1.9; EXPRESSED IN BONE MARROW, SIGNAL = 1.7
aggagggacacagacctggtggccgggcgcagggctctggaggagggtgctgagctggggaccagctagttttatattatttgccatcacatgcatcctgtcttcatagccagccttgaaacattggtgctcaaacaaggaatttccaggtggtgaggccccctgggtgccaggcctacatctaagcagctcctgagtcctcatatttgtcccggcctggggacccctgcacccattcttcctccagccctcgaggggatggagaggaagctctgcagtcccaagccaccccccaccaaggcctctctccccactgaccctccaggctggggctgccccgacctcgtctgctacaccgattacctccagacggtcatctgcatcctggaaatgtggaacctccaccccagcacgctcacccttacctggtaagtagccgggcctcaccagtccccggggatgcaattcagggtgcc

SEQ ID NO: 5842 - DNA, 486 bp, Homo sapiens
  MAP TO AC004827.1; EXPRESSED IN PLACENTA, SIGNAL = 8.2; EXPRESSED IN LUNG, SIGNAL =  10; EXPRESSED IN FETAL LIVER, SIGNAL = 7.5; EXPRESSED IN BRAIN, SIGNAL = 9.6; EXPRESSED IN ADULT LIVER, SIGNAL =   9; EXPRESSED IN HELA, SIGNAL = 8.2; EXPRESSED IN HEART, SIGNAL = 7.8; EXPRESSED IN BONE MARROW, SIGNAL =   8
accatctcctctgaaggcagaaattgtctatttttttaacccgaggaaagaccatgacaccatgagttaattactaagcttatggttgaaggtggagatcctttcttgaaacttgtgtcatctgactgtgttatgcttgcctcctggccatctgtgagccctgggagaagctgtcagcgaggatttgcctgtttgttttcagaccattttccccatcaccctcctaccatcaccaccattgtctttttttgttgttaaggtggagacagaaatccagcgcgtctcggaggcatatgagaacctcgtgaagtcatcctccaaaagagaggccctagagaaagccatgagaaacaagctagagggcgagattcggaggatgcatgatttcaacagggatctgagaggtgagggaaccaacagacttgtctttgtacttctgaagcagctgcagggtggtgaagggaagggctgagcaggatccaacta

SEQ ID NO: 5843 - DNA, 355 bp, Homo sapiens
  MAP TO AC004150.8; EXPRESSED IN PLACENTA, SIGNAL = 4.3; EXPRESSED IN LUNG, SIGNAL = 4.3; EXPRESSED IN HELA, SIGNAL = 4.4; EXPRESSED IN FETAL LIVER, SIGNAL = 4.2; EXPRESSED IN BRAIN, SIGNAL = 4.7; EXPRESSED IN BONE MARROW, SIGNAL = 3.9; EXPRESSED IN ADULT LIVER, SIGNAL = 4.5; EXPRESSED IN HEART, SIGNAL = 4.2
tgagtccaagctgcacaaagatgctcaaggggaaaaaaaatcagggactacagagtaggggtgggaaggcccttgagacagttgctgaaagagaccagggcttacacatgactcagggccctcgggggtggggaccaggatgccggagggcttctctgtctcaccacttgaagatgaggttgagccactcggtgatgaggctgatccagagcaccgcgatgcccacacggcgggaggcgtagtaggccgcggggaagtagaacagaaagaggatcttgggatcgcccagaaaggtgatccagagccacacgttctccagccaggctagctggttctgtagcgcctcggctatcac

SEQ ID NO: 5844 - DNA, 440 bp, Homo sapiens
  MAP TO AC005959.1; EXPRESSED IN PLACENTA, SIGNAL = 1.7; EXPRESSED IN LUNG, SIGNAL = 1.9; EXPRESSED IN BONE MARROW, SIGNAL = 1.6; EXPRESSED IN ADULT LIVER, SIGNAL = 1.5; EXPRESSED IN HELA, SIGNAL = 1.8; EXPRESSED IN HEART, SIGNAL = 1.8; EXPRESSED IN FETAL LIVER, SIGNAL = 1.7; EXPRESSED IN BRAIN, SIGNAL = 1.7
tgagggagaacacttcccaggactttcaaataaggtctttcctaaatgtacttggctcagtgtggcaaaagcactgggctagcagcagtcagatgtgggttcaaagcaaggcacaatcatttattagctataaatttgggcaagtcacttcttgagaataagtttcttcatctgtaaacagaagtaataccttccttatatcttaaattggtgtggaagtaaatgagtaaaaacctcagggtttttctgagtttaaatgagacaattcatgtaacgtgcttagcacaatacctggtacccagtaggtactctgcagtatttattgatgatgatgatgatgatgatgatgatgatgacaaagaaatacaaggaaatgtcaacaccttaacagtgcattcatagatctacaaaatgcttaatctcagtgttctggcaaccac

SEQ ID NO: 5845 - DNA, 397 bp, Homo sapiens
  MAP TO AC005529.7; EXPRESSED IN LUNG, SIGNAL =   2; EXPRESSED IN HEART, SIGNAL = 3.9; EXPRESSED IN FETAL LIVER, SIGNAL = 2.4; EXPRESSED IN BRAIN, SIGNAL = 1.7; EXPRESSED IN BONE MARROW, SIGNAL = 1.3; EXPRESSED IN ADULT LIVER, SIGNAL =   3; EXPRESSED IN PLACENTA, SIGNAL = 1.7
gggctgtcctgatatgaaccttttgagtttttttcctcattcccaggataggaatacctctgtggttcaaaacacgaaggctgagattcagaggaactacaaatcccataaagtgttgcacgtctagggcctttggagaacgaggtcggccccagcgcaggcgcggtggcgcgagttggactgtgaagaaacatggcggccgcgacgttgacttcgaaattgtactccctgctgttccgcaggacctccaccttcgccctcaccatcatcgtgggcgtcatgttcttcgagcgcgccttcgatcaaggcgcggacgctatctacgaccacatcaacgagggggtgagggcctgtgccatccctgaccttggacccgcctgaggggtgacagtggagt

SEQ ID NO: 5846 - DNA, 478 bp, Homo sapiens
  MAP TO AC006078.1; EXPRESSED IN BONE MARROW, SIGNAL = 1.5; EXPRESSED IN ADULT LIVER, SIGNAL = 1.5; EXPRESSED IN HEART, SIGNAL = 1.5; EXPRESSED IN FETAL LIVER, SIGNAL = 1.6; EXPRESSED IN BRAIN, SIGNAL = 1.6; EXPRESSED IN PLACENTA, SIGNAL = 1.3; EXPRESSED IN LUNG, SIGNAL = 1.7
aaaagttcagtctttacagtgttggtatctaaaaatcaaccacttttcaatttgacataaagtcaaatgcacactgaaacaggaatagaatgtaaataaacataatgtttttacaaatgttcaggcaagttgtgtcatgaatgctaattactgccactgaactcaatacctactgggagtcagctttttgtatgaagttcccaaacagttatttattctagaggattatagcagaggatgctgggaatattgcttgccggtactgaccttggctgggaaaagccaaggtccacagtacgctgttaaaagtcccacctttccccccataatctttgctttccctcttttcagctctactcttttcttcctcaatatgcggaatagaggacatttgaaagatgagagggcagacgttgagaaggaaggcctctggatacagagcaaaaaaatgagaactagctgctccaattccctaatc

SEQ ID NO: 5847 - DNA, 466 bp, Homo sapiens
  MAP TO AC005913.1; EXPRESSED IN LUNG, SIGNAL =  15; EXPRESSED IN FETAL LIVER, SIGNAL = 1.7e+02; EXPRESSED IN BONE MARROW, SIGNAL =  28; EXPRESSED IN PLACENTA, SIGNAL =  52; EXPRESSED IN HELA, SIGNAL =  23; EXPRESSED IN HEART, SIGNAL =  12; EXPRESSED IN BRAIN, SIGNAL =  16; EXPRESSED IN ADULT LIVER, SIGNAL = 1.3e+02
acgggtctgtctcttgcttcaacagtgtttggacggaacagttccggggactctttcttccagcttccgaccgccctcctatttcctctccacttgcaacctccaggaccatcttcttggccatctcctgcttctgggacctgccagcaccgtttttgtggttagctccttcttgccgaccaaccatgagctcccagattcgtcagaattattccactgacgtggacgcagccgtcaacagcctggtcaatttgtacctgcaggcctcctacacctacctctctctgggcttctatttcgacggcgatcatgtggctctggaaggcgtgagccacttcttccgcgaattggctgaggaaaagtgcaagggctacgagcgtctcctgaagatgcaaaaccagcgtggcagccgtgctctcttccaggacatcaagaagccagctgaagatgagtggggtaagacccc

SEQ ID NO: 5848 - DNA, 454 bp, Homo sapiens
  MAP TO AC002539.1; EXPRESSED IN PLACENTA, SIGNAL =   2; EXPRESSED IN LUNG, SIGNAL = 2.6; EXPRESSED IN FETAL LIVER, SIGNAL = 1.9; EXPRESSED IN BONE MARROW, SIGNAL = 2.2; EXPRESSED IN ADULT LIVER, SIGNAL = 2.1; EXPRESSED IN HELA, SIGNAL = 2.2; EXPRESSED IN HEART, SIGNAL = 1.7; EXPRESSED IN BRAIN, SIGNAL = 2.3
tgagcattttcatctgcttccttctctaaccagagcccacccctgaacagacgcattcatgtggacaattgctcattcacctatttcacacccatttcattttacttaaaaaatattttttgttgttgtttggagagagaatttgtgtttatttacaacagtgttttctaaaagcaacactgagaggaataagatcctagactattgtaacatttcactgtgttggagcaagtatgatggagctgctgctcttcttcttctcttcttcttcttcttcttcttcttcttcttcttcctcctccccctccccctccccctcccctctcctcctccttctcctcctcttcttcttcttcttattcttccttctcctccccttcccctccccctcctcttcttcttcttcttcttccttctcctcctcctcctcctcctcctcctctttctccttctc

SEQ ID NO: 5849 - DNA, 480 bp, Homo sapiens
  MAP TO AC006210.1; EXPRESSED IN BONE MARROW, SIGNAL = 1.6; EXPRESSED IN ADULT LIVER, SIGNAL = 1.2; EXPRESSED IN LUNG, SIGNAL = 0.84; EXPRESSED IN HELA, SIGNAL = 1.7; EXPRESSED IN PLACENTA, SIGNAL = 1.2; EXPRESSED IN HEART, SIGNAL = 1.5; EXPRESSED IN FETAL LIVER, SIGNAL = 1.7; EXPRESSED IN BRAIN, SIGNAL = 1.6
gttgtgttctgaggtggcagccaaaagtggtgctgtaaatttatgcatgcaatgtttgtagaagaaatgtagaaattcacttctttcacttttctcaggtgttgtcagcatgttgcgtggatcaagtagagtatgcagaactaccatcaaatgaacagcacctcctaactcaggatcagtatcacagatcatttgtttaattattacattaatgaaaaggtcactatctttgcacacgtgagcttctgaaattataaattctcggatcctggatggactgtactccactagataagcacatataactgcagcagctgaccttacttgcaaatcatccctgatcattacgattttaagagcaggaagaactcccaactgtatcaacgtttcaaatagtgcatccttgctttgaggctgtaatgcctgagaaaatgaacataactccttgaaaaaaaatagcaattcacaccgtctatcatc

SEQ ID NO: 5850 - DNA, 393 bp, Homo sapiens
  MAP TO AC004502.1; EXPRESSED IN PLACENTA, SIGNAL = 2.2; EXPRESSED IN LUNG, SIGNAL = 2.5; EXPRESSED IN HELA, SIGNAL = 2.1; EXPRESSED IN FETAL LIVER, SIGNAL = 2.2; EXPRESSED IN HEART, SIGNAL = 2.2; EXPRESSED IN BRAIN, SIGNAL = 2.4; EXPRESSED IN BONE MARROW, SIGNAL = 2.3; EXPRESSED IN ADULT LIVER, SIGNAL = 2.6
aacaatcctaaatagctgttcttccattctaagtatttcaggtgtttagccactaaacatatcatataaaactttccatttctaactctttatggattttggaattgcagattagggattttggatatgtcttaattatcaatgcttaatcagaaaacaactgatgttttggaaagataaatgtttaaaaatccttcacctcctccacaagtggcatcgcaatcttcccagcttgtgtgtgtccacatgaagaggggctcaggtgctttagagctctggttttctggaagagggtctgatgggatagtgtattcatagtgaagaccataattctgatcctgaaacaggagcacctatagtatacaaaaatgatcaaggcagatgggtcaaact

SEQ ID NO: 5851 - DNA, 453 bp, Homo sapiens
  MAP TO AC004166.4; EXPRESSED IN LUNG, SIGNAL = 2.4; EXPRESSED IN BRAIN, SIGNAL = 2.5; EXPRESSED IN BONE MARROW, SIGNAL = 2.4; EXPRESSED IN PLACENTA, SIGNAL = 2.3; EXPRESSED IN HELA, SIGNAL = 2.8; EXPRESSED IN HEART, SIGNAL = 2.1; EXPRESSED IN FETAL LIVER, SIGNAL = 2.2; EXPRESSED IN ADULT LIVER, SIGNAL = 2.2
tctctgagggtgccctactccctgggaagacccacccaaagtccttgctatgaagcagatcactggggctgaccttgggtgtattaagttttggagtcagggtcaccaaagtgtgagtttcacagttgaacacgatggttcagaagcagggtatagaatgaaaggcaggagataaaattgcacttctcaattgctctgaactctagctagacttgacatgggacgtgaataaccttcctgtctagagagctgcctccttgaagtgtgacattgtctctctcacttccagaacaccggacccaggggagatgtggattttcagcaggaactttattccaatgctaatggcagacatcaggaaggaggagaggaaccatttgtgcagatcatctagaagaacctggaccattcttgacagagctgaatacagtgatcacgttgtcctccaaggag

SEQ ID NO: 5852 - DNA, 489 bp, Homo sapiens
  MAP TO AC004703.1; EXPRESSED IN PLACENTA, SIGNAL = 9.5; EXPRESSED IN LUNG, SIGNAL =  15; EXPRESSED IN FETAL LIVER, SIGNAL =  21; EXPRESSED IN BRAIN, SIGNAL = 9.8; EXPRESSED IN ADULT LIVER, SIGNAL =  19; EXPRESSED IN HELA, SIGNAL =  15; EXPRESSED IN HEART, SIGNAL =  13; EXPRESSED IN BONE MARROW, SIGNAL =  19
gatcactgcattctagcctcggcaacatagtgcggtcttgtctctttttttttttttttttttaagtacaatttccattttatttttctccagagaatagcctgtcttcagtctttaagaactcagctccttacatgggctttggtgggggacctggggcagcacccgcaggtctaaatcggggtgggggtgttcggtccttgcgggcttcacgagatcgattcctgactactttgctgtgaattgcacaactcacacagtaatgtagcttcacatacagtttgggaagcacataggcatcgaagacgctcacttcagaaatgtccctgactgctgcggcctccactatgtttcgaatgacgaatttcttaatggccttgtccttgggcacgcatcgggcacagttagtgcagcgaataggctgcacgtggccgcggccctttttggcacgaccattgttccttcttttctttgtcatcttggaggcac

SEQ ID NO: 5853 - DNA, 486 bp, Homo sapiens
  MAP TO AC006329.2; EXPRESSED IN ADULT LIVER, SIGNAL = 9.5; EXPRESSED IN LUNG, SIGNAL = 6.1; EXPRESSED IN HEART, SIGNAL =  73; EXPRESSED IN FETAL LIVER, SIGNAL =   2
ccatcacttcctgtgtgagctgaggcctgggatgaggatggggcaatcgatggggaagtggggagcactgtgctgtggggtgggcgggatgcggacatatctgtgtttctgctgtgtctcctgttcctcctctgggattgggactatttccatcctgctgaccccttgccactcacacttggggggctgcctcttgggttagaccttccacccccgcggtctgttgttcactgaccgttactgtcattgtaatactccatgatgttgttcagggtctccataaagatgtcctccctggccttctgaacttggctctgcttctcccagtcctctactccttccacgtgtctccatggtcccaggggctcaggcttcctgtcttcactgttgtagtggaagaaggcacggccattgaggaagacagtaccctgcagcctgtgggtgcctttgccaggcctggacagcccagtgtagagataggtcaga

SEQ ID NO: 5854 - DNA, 450 bp, Homo sapiens
  MAP TO AC004797.1; EXPRESSED IN PLACENTA, SIGNAL = 1.7; EXPRESSED IN LUNG, SIGNAL = 1.8; EXPRESSED IN FETAL LIVER, SIGNAL =   2; EXPRESSED IN BONE MARROW, SIGNAL = 1.6; EXPRESSED IN ADULT LIVER, SIGNAL = 1.9; EXPRESSED IN HEART, SIGNAL = 1.6; EXPRESSED IN BRAIN, SIGNAL = 1.5
tttgactcatgctttggtgctgcaacactggaagaattgcacacagtttccaggaatatctttttttcatttgagtgattctttgtggatgagaaaagatttgagtcttaataattaccttgttttaaagctatttctttatagtctgaactgtttaataaattgggccacttaccaatgagccacacagccagttcttgtcaggagctggttgaaaactgtgctgtgcatgtagcaggaatggcacaagaagatagccgtcgtggtcaagtgccatcttccttttatcatggtgccaaccaagaacttgacctgtccaccaaagtgtacaaaagggaatcaggaagtccttattctgtgttagtggacaccaagatgagcaaaccgcatctccatgaaacagaagaacagccatatttcagggagacaagagcagtgtctgacgtgcat

SEQ ID NO: 5855 - DNA, 455 bp, Homo sapiens
  MAP TO AC005972.1; EXPRESSED IN BONE MARROW, SIGNAL = 1.5; EXPRESSED IN ADULT LIVER, SIGNAL = 1.5; EXPRESSED IN HEART, SIGNAL = 1.5; EXPRESSED IN FETAL LIVER, SIGNAL = 1.5; EXPRESSED IN BRAIN, SIGNAL = 1.4; EXPRESSED IN PLACENTA, SIGNAL = 1.5; EXPRESSED IN LUNG, SIGNAL = 1.4
ttaaaaaggtaaatttaatgttggtgtagactttcatctttaatcaaggtaattgaatatgccccccgaagttcatgtgttgaaacataatccccaaagcaacagtgtttggaggtgaagcctaatgggaggtgcttaggtcatgaggtctctgccctcatgaatatgtcattattttaagagtgggtttattataaaagtgagttcgactctctctctctctgactctctctaactttctatctctctctctctcactctttctctctctctcgtgtgtgctcctgcccttccaccttctgccgtgggatgactcagcaagaaggccctcaccagattcagtgccttgatcttggacttctcaacctctagaaccatgagccaaatcaatttattttcattataaactactgagtctttggtattctgttacagcaccacaaaacagattaaga

SEQ ID NO: 5856 - DNA, 482 bp, Homo sapiens
  MAP TO AC006095.1; EXPRESSED IN HEART, SIGNAL = 2.7; EXPRESSED IN BONE MARROW, SIGNAL = 2.7; EXPRESSED IN ADULT LIVER, SIGNAL = 2.3; EXPRESSED IN HELA, SIGNAL = 2.8; EXPRESSED IN FETAL LIVER, SIGNAL = 2.7; EXPRESSED IN BRAIN, SIGNAL =   3; EXPRESSED IN PLACENTA, SIGNAL = 2.4; EXPRESSED IN LUNG, SIGNAL = 2.8
tgggggttagtgttggattgggtttttttttttttaggaaaatgcagaacttggcaagtactgctaatttttaagcccggtgaatggtaggatgccgcaggttatgtcttgcagttaattcttacagaacattcaaacatccagcaatgaggagttcgggtatgaaggccatccagtaaagtctagtctgtgggcttgtcagcttgagttagccagcattccatctgtggcaagcagggcctgtgcgacattggagaagggctgagaagagtggccgtcctttgctggttcccttagggagctcctgacctcctgctgccacaggcctcttcgggagtgggaatggtgtcagtgcaaaggaagcaccaaggggttcgatgggaccatttatgaagcatgtccagcaaggacttgctgacattgcgcaagatctggtggcatcccatgtctaacatctccgtggtgctgggacagacagatca

SEQ ID NO: 5857 - DNA, 455 bp, Homo sapiens
  MAP TO AC004633.1; EXPRESSED IN PLACENTA, SIGNAL = 1.7; EXPRESSED IN HEART, SIGNAL = 1.4; EXPRESSED IN BONE MARROW, SIGNAL = 1.7; EXPRESSED IN ADULT LIVER, SIGNAL = 1.6; EXPRESSED IN FETAL LIVER, SIGNAL = 1.4; EXPRESSED IN LUNG, SIGNAL = 1.7; EXPRESSED IN BRAIN, SIGNAL = 1.7
gcaaatattctgaactcttccccagaaatattcaggattcagtgaatagaggtcttcctgaatgcattagtatattcattcactgaacaaagaatgactgagtgccctttatatgctgacactgttctaggtgctgggaatgaagtagtgaataaaaacatcaagaatcgccattctcaaggcgctaacattccagtgaggaagcggccagcaagcagactcctgagaaggacacacggcacctcagagagcagcgtgctagagaggagaacaagcgggaagggcattagagatggctggaaggagggggatgtggttttaaattggttggtggtaaaacactgtctccctgagaagcagacatttgaacaaagacttgaaggaggtgagggagtgagtcaagaaccaggagactgttgtagcaaatgagaagtccgtgatgctggaacttgact

SEQ ID NO: 5858 - DNA, 488 bp, Homo sapiens
  MAP TO AC005544.1; EXPRESSED IN PLACENTA, SIGNAL = 2.2; EXPRESSED IN ADULT LIVER, SIGNAL = 3.4; EXPRESSED IN LUNG, SIGNAL = 2.1; EXPRESSED IN HEART, SIGNAL = 1.9; EXPRESSED IN FETAL LIVER, SIGNAL = 2.3; EXPRESSED IN BRAIN, SIGNAL = 1.7; EXPRESSED IN BONE MARROW, SIGNAL = 2.3; EXPRESSED IN HELA, SIGNAL = 1.8
gaagctgcagcaagttacccagaagatctagctaagatcattgatgaagatggctacaccaaactacagattttctgtgtagacaaaacagcctcttattggaagaagatgctgtctaggactttctcaggtagagaggaagaagtcaatacctggcttcaaagcttcgaggaacaggctgactgtcttgttaggaactaatgcagctggtgaactttaagttgaaaccagtgcttgtttaccattccaaaaatcctaaggctttgaagaatgatgctgaatccatgctgcctgtgctctataaatggaacaataaagcctggatgacagcatatccatttacagcatggtttaacccatgttttaaacccactattgagacctactgctttgctggtgggcgggggagggggggtgggattttttaaaaagattcctttcaaaatattactgctcattgacaatgcagttggtcatccaagaactct

SEQ ID NO: 5859 - DNA, 455 bp, Homo sapiens
  MAP TO AC006226.4; EXPRESSED IN PLACENTA, SIGNAL = 4.1; EXPRESSED IN LUNG, SIGNAL = 2.8; EXPRESSED IN HELA, SIGNAL = 4.2; EXPRESSED IN FETAL LIVER, SIGNAL = 2.8; EXPRESSED IN HEART, SIGNAL = 4.8; EXPRESSED IN BRAIN, SIGNAL = 6.9; EXPRESSED IN BONE MARROW, SIGNAL = 1.8; EXPRESSED IN ADULT LIVER, SIGNAL = 2.5
tccctccagctctcagattctccccagcttttggaggacctggaagttgaaaaagtcacagaacggctctggagtcactccggcacagcgtttgtgctgcctgtgtgttggagagccagcctaccttgctctttaatacgtgtaagccttttcttttcaagatgcctgaggaagtgcaccttggagagaaggaggtggagacttttgcctttcaggcagaaattgcccaactcatgtctcttatcatcaataccttctattccaacaaggagattttcctttgggagttgatctctaatgcttctgatgccttggacaagattcgctatgaaagcctaacagacccttccaagttggacagtggtaaagagctgaaaattgacatcatccccaatactcaggaacataccctgactttggtagacacaggcattggcatgaccaaagctgatctc

SEQ ID NO: 5860 - DNA, 450 bp, Homo sapiens
  MAP TO AC004836.2; EXPRESSED IN PLACENTA, SIGNAL = 2.8; EXPRESSED IN LUNG, SIGNAL = 3.2; EXPRESSED IN FETAL LIVER, SIGNAL = 2.3; EXPRESSED IN BRAIN, SIGNAL = 2.7; EXPRESSED IN BONE MARROW, SIGNAL = 2.6; EXPRESSED IN ADULT LIVER, SIGNAL = 2.9; EXPRESSED IN HELA, SIGNAL = 2.6; EXPRESSED IN HEART, SIGNAL = 2.7
ctgggtttctttctggttgcaaagaacagagaatcataggtttattgggatataacatgtgaaaataaagagttggctccattgctcagtctgtccagaacccagaagaagcagaagacctcacttctcaggggtggtgtagtataatagatattagtcatattggtgccaccccaacatcatttgaagaaacttcttaaatttggaaaatacgccatgtgaggggtgctacctcaccagggtggagatcagaactcagttactcagactcctctgcagctaggacacaggcatgtgacataggctctgtggattggatgcagtatgatgagatttcagtctggaagagtgaaaagccagggagaagctgctgcatggaattgttcttggtgatggggcggaacatggtggagggacatggaaccccagaggcagcagagacagagatga

SEQ ID NO: 5861 - DNA, 474 bp, Homo sapiens
  MAP TO AC002529.1; EXPRESSED IN PLACENTA, SIGNAL = 1.4; EXPRESSED IN LUNG, SIGNAL = 1.7; EXPRESSED IN HELA, SIGNAL = 1.7; EXPRESSED IN FETAL LIVER, SIGNAL = 1.5; EXPRESSED IN BRAIN, SIGNAL = 1.6; EXPRESSED IN ADULT LIVER, SIGNAL = 1.2; EXPRESSED IN HEART, SIGNAL = 1.9; EXPRESSED IN BONE MARROW, SIGNAL = 1.4
gcaaacattgctgacactgcagagtttatctgtgtatggcattcattatagcagcccaatttgttcccttgcttcaataatgaagtttgctgtggtcagtggaatcagactgattggtttactggagagacaactatgtttggcaagttgtacatgtagctggacaatgttactgagaaattggtcagcaccagataggaatgtaccagtttaaattactaagacacacatatgatttcttaagaaaaaattaagattatagtgaaggattttggagatgatttgttctcagcccaaagaagaagagaagaaaataagaaggcaaaggaaaaggagcaggagggggaaaaaaaacagtaacaaaataactatggaatttaccattgactgcctgaatacaaattatatactgataacaattaaatctgtattcatcactctgcaaaacatgctcagctattccggtaagcaatg

SEQ ID NO: 5862 - DNA, 477 bp, Homo sapiens
  MAP TO AC004664.1; EXPRESSED IN PLACENTA, SIGNAL = 4.5; EXPRESSED IN LUNG, SIGNAL = 4.9; EXPRESSED IN HELA, SIGNAL = 4.6; EXPRESSED IN HEART, SIGNAL = 4.6; EXPRESSED IN FETAL LIVER, SIGNAL = 4.6; EXPRESSED IN ADULT LIVER, SIGNAL = 4.5; EXPRESSED IN BRAIN, SIGNAL = 5.5; EXPRESSED IN BONE MARROW, SIGNAL = 4.9
attccctcagagtcaccagcttagcaaattccagagtcaggcttctaactcatctgtctgactcggaagcctgtgttctttctaacacaccatactgacttccctggcctgaaagtggaatcattatctatttattctttcaaccatttctgtgtgtcatttatttatgggcatctagtagatattcagtaaatgtttgttcaatggatgaatgaatgaatgagcgaatgtctcctggagaggagctcactatctacatggggacacagatcccatacagggccatctataggtgttgtgaagcattgtggaaggaagccccctttctgggagtgcctcaggtaaactacacgaagaatagaacgttgcacctgagcctggagggccgagcagcaggctgtgtcagtgaagggtgttggaagcagaaggaacagcatgtgctcaggcttgaggtgcagtgccagtgctgtagggatt

SEQ ID NO: 5863 - DNA, 493 bp, Homo sapiens
  MAP TO AC004169.3; EXPRESSED IN PLACENTA, SIGNAL =   1; EXPRESSED IN BRAIN, SIGNAL = 1.3; EXPRESSED IN ADULT LIVER, SIGNAL = 1.3; EXPRESSED IN HEART, SIGNAL = 1.8; EXPRESSED IN LUNG, SIGNAL =   1; EXPRESSED IN FETAL LIVER, SIGNAL = 1.3; EXPRESSED IN BONE MARROW, SIGNAL = 1.2
ttcccaccaatactatcaccaccatcaccaacaccaccaccatcaccactaccaccaccatcaccactaccaccatcacctccaccatcatcactgccatcaccaccaccatcaccaccatcaccatcctcaccagcaccatcaccaccatcatcaccaacaccaccaccatcaccactactaccaccatccattcccaccaatactatcaccaccatcaccaacaccaccaccatcaccactaccaccattatcaccataactaccaccatcacctccaccatcaccaccatcaccatcctcaccagcactatcaccaccatcaccaacaccaccaccatcaccatcaccaccaccatccattcccaccactactatcaccatcaccaccaccctatcaccaccatcaccaccaccattgtcaccaccaccaccatcaccaccatcaccatcaccaccaccatcaccaccaccattgtcaccattatcacca

SEQ ID NO: 5864 - DNA, 488 bp, Homo sapiens
  MAP TO AC004520.1; EXPRESSED IN BONE MARROW, SIGNAL = 1.1; EXPRESSED IN BRAIN, SIGNAL = 1.3; EXPRESSED IN ADULT LIVER, SIGNAL = 1.6; EXPRESSED IN PLACENTA, SIGNAL = 1.1; EXPRESSED IN LUNG, SIGNAL = 1.3; EXPRESSED IN FETAL LIVER, SIGNAL = 1.2; EXPRESSED IN HEART, SIGNAL = 1.3
ttttcacagtccagattccctatttgtattaaaagaatctctccgtatgtttgtcaaaccctgaaggctttcttggcttgtatgattttatcctttacaaaacatcttactcaatttaggatgagaaaacaaacccatgacaaactttcactgcccatgggtgtttaccataaactcccctactgcctgcagagactttttgttgtggtcctgtaagttgacgaatgaaaagaacttacttttccaactttctttggcttactttgtagtgaggttttgcaaggttctcagcaggaggaaattaaggaggaccaggaccagacatctatagatctgtccgtttctagagaacaagtacattttacaggactctacaaaagacagttcgcagcactgtacttcagagcagagtcaaaagaccaagtcacgtgaagtggcttacagtgaggagaaaaaatgacctggtgtcttttagttatgaagttgcc

SEQ ID NO: 5865 - DNA, 461 bp, Homo sapiens
  MAP TO AC006377.3; EXPRESSED IN BONE MARROW, SIGNAL = 1.9; EXPRESSED IN ADULT LIVER, SIGNAL = 1.7; EXPRESSED IN PLACENTA, SIGNAL = 1.5; EXPRESSED IN LUNG, SIGNAL = 1.3; EXPRESSED IN HELA, SIGNAL = 1.8; EXPRESSED IN FETAL LIVER, SIGNAL = 2.1; EXPRESSED IN HEART, SIGNAL = 2.7; EXPRESSED IN BRAIN, SIGNAL = 2.6
ggaaatggccagaaaggtatcaatctccctgaagaggatggcacaggtgagctggtagctgcttctgctggaatcctgcagcccaatgaggtgggatcagaaggaactggatgagcagggaagccttgccctgtgagctgaccccatcagtagggttgttcaccagtttccattcattatgtcattaatgccgcgaaaagagcccttcaccagtgtaagtctactcaccattctgttgctgttctcctgatgacttctcggctttggagtttttcccacgagggttgtcacttttgtttgcccgtgttccattgacttgattcttagtttctccagacgtctttttctcagctttgccagatgcgccttcttcagcctggcttttggcttccatttccttttgctgctcctctgcggccaggcgagccttttcctctgcttccttcttggccttctcctct

SEQ ID NO: 5866 - DNA, 450 bp, Homo sapiens
  MAP TO AC004707.1; EXPRESSED IN LUNG, SIGNAL =  16; EXPRESSED IN BRAIN, SIGNAL =  18; EXPRESSED IN PLACENTA, SIGNAL =  16; EXPRESSED IN HEART, SIGNAL =  16; EXPRESSED IN FETAL LIVER, SIGNAL =  19; EXPRESSED IN BONE MARROW, SIGNAL =  17; EXPRESSED IN ADULT LIVER, SIGNAL =  18; EXPRESSED IN HELA, SIGNAL =  19
ggtgagatgggaagagggagctgcctgccttccgaagaaacctagacttggagctccatgctcgtgggtccccactctgcctctgccacttagtaagtacactggatgaagacttaggcagggaggtaggatccccttggctctttcttcctcagagagataggggtgaggatccgggccatgccacccccctgcccccgcctgggaagggctggagcacccctgtccctcaccagtcagctgacagtgccggggcacagccttgggcatgaggctcccagcctggtgcaggcacaccacattggcgatctcctgctggcactgcttggtgctggcccgggccagtgcagacagtgcgtccttgcccacgatctcgcacttgggggtgaagccattgtccgtgggctggggggcgccctccacgctccctgtatctccgtgtggtgggaa

SEQ ID NO: 5867 - DNA, 445 bp, Homo sapiens
  MAP TO AC005284.1; EXPRESSED IN PLACENTA, SIGNAL = 3.2; EXPRESSED IN LUNG, SIGNAL = 3.6; EXPRESSED IN HEART, SIGNAL = 4.2; EXPRESSED IN FETAL LIVER, SIGNAL = 4.1; EXPRESSED IN BONE MARROW, SIGNAL = 3.4; EXPRESSED IN HELA, SIGNAL = 3.2; EXPRESSED IN BRAIN, SIGNAL =   4; EXPRESSED IN ADULT LIVER, SIGNAL = 3.6
ttcctggaaaaacacaaccctcctagcttaaatcaggaagaattagataccctgaacagaccaataacgagcacagagattgaaaaggtaattttaaaattaccaacaaaaaagtccaggaccagacagatttaccagcagaattctaccagacattcaaagaattgaataaaataatacatttttaaaaataaaaagaaatataatattttattataatctatttccttaaaaatacagctaggtaccaatcctattgacactattccacaagatagagaaagaggaaacataacccaaaaagaaaactatagactgatatccctgattagcgtagatgctaaaatccttaacaaagtactagctaatcgaattcaacaacatatcaaaaagataatccaccatgatcaagtaggtttcatatcaggaaggaaactctgacaca

SEQ ID NO: 5868 - DNA, 454 bp, Homo sapiens
  MAP TO AC004804.1; EXPRESSED IN LUNG, SIGNAL = 1.6; EXPRESSED IN BONE MARROW, SIGNAL = 1.8; EXPRESSED IN PLACENTA, SIGNAL = 1.5; EXPRESSED IN HEART, SIGNAL = 1.7; EXPRESSED IN FETAL LIVER, SIGNAL = 1.5; EXPRESSED IN BRAIN, SIGNAL =   2; EXPRESSED IN ADULT LIVER, SIGNAL = 1.4
ccattttgcctgaactttccagaagattttaggaatttcagagaggtaattacacacagatatgtataagccagaggatttaaaaatcattaaagaggaaccaaaaatatttctatttgatcaggatttgttccacctttgaccaaatttattctagagagtgagaaatacaagttagcactaaaattaagtaagtgtattggggtaaaacacagagccagaagatgaatgcagggagaaaaagtatttccactaagcatatgcttgaagaataagactacaaacacttacttcatctccagaacttcctctaagtgtttccttctctctgcccgaagattagtcaagtgagtttccttttctgccagagactgctgggtggaggacagctttgctttcatggattctagttcctgctttaccttctccatggccatcagtaactcctccacct

SEQ ID NO: 5869 - DNA, 451 bp, Homo sapiens
  MAP TO AC006238.1; EXPRESSED IN BRAIN, SIGNAL = 1.8; EXPRESSED IN BONE MARROW, SIGNAL =   1; EXPRESSED IN LUNG, SIGNAL = 1.1; EXPRESSED IN ADULT LIVER, SIGNAL = 1.1; EXPRESSED IN PLACENTA, SIGNAL = 1.4; EXPRESSED IN HELA, SIGNAL = 1.8; EXPRESSED IN HEART, SIGNAL = 1.6; EXPRESSED IN FETAL LIVER, SIGNAL = 1.5
aaaagtatggatcctgagattaatggaaaagcaagactgcactattttatttaagcctctaagggctttaattactgaaattgcctcactgtccatattatacaatcatattatacaattatacaaacatattatacaatcatattatacaatcagtttatccatactatacaatcaacagtttcagaatgtatcatgaaaactctccaaaatccacttaatatggtcatgtaatcattttttataaaccagtattcccattctgggagcctaaaattacagtatgaaaaagttaccaaccggaagggaccatgtcttttacttcttttacaccattttcatacagtgtagtattgttctggtcgtataaatactcatccatcacctttacataaacacgtacctaaataaaaaatgaaaacacttctttccattcttttggcagccttct

SEQ ID NO: 5870 - DNA, 491 bp, Homo sapiens
  MAP TO AC005178.1; EXPRESSED IN LUNG, SIGNAL =   2; EXPRESSED IN ADULT LIVER, SIGNAL = 2.3; EXPRESSED IN PLACENTA, SIGNAL =   2; EXPRESSED IN HELA, SIGNAL = 2.1; EXPRESSED IN HEART, SIGNAL = 2.1; EXPRESSED IN FETAL LIVER, SIGNAL = 2.3; EXPRESSED IN BRAIN, SIGNAL = 1.9; EXPRESSED IN BONE MARROW, SIGNAL = 1.9
ttcagatttctctggggtcctcttggccaagagggggtccgttcagtcctttgggggtgcttaggattccatttttaatttacagtcttctcagttctccgtaggagcccaactcaacctcctccttccccaggactggggtaccttatctgcatcttccatcatcaaatgccccttgcttcaaagacccatctcataccctgagcagcgctttgctccccaaacatgccctgaggtcaaccagtcccgccgcaggggacccagccaacctcctgcttcaagtctcaagtcagtctgctctaaaaacaacctcgtggccccagagcacagccacgaaaacccagatatgctaaacttctccccacccccacaaacacacacacacacaccattgtgcaaggacaacactggcccacaggctcttccttcacacaagagtccagcaacacctatagctgagccaaagcaagtgcaacttggctcattccaat

SEQ ID NO: 5871 - DNA, 472 bp, Homo sapiens
  MAP TO AC002537.1; EXPRESSED IN LUNG, SIGNAL = 0.83; EXPRESSED IN BRAIN, SIGNAL = 0.98; EXPRESSED IN BONE MARROW, SIGNAL = 0.92; EXPRESSED IN ADULT LIVER, SIGNAL = 0.97; EXPRESSED IN PLACENTA, SIGNAL = 0.88; EXPRESSED IN HEART, SIGNAL = 1.7; EXPRESSED IN FETAL LIVER, SIGNAL = 0.85
agcacctcagacagctctggggaatgggagacacaaaatccagtgcagtttggcaagaggcagctgtaggccatgaattttgctctgccatccccctgctctagggttccctggatcctggcttcccactgccttagtgggaccaccatgcagagctaacctggcacaagtgctgagcctcctgtctgtactcattctccttgggttcaggaacctgaataattccagaaccttcatgtaatttccatttgacttaagccccccaactgacagtgcgcccacagagggggaaactagagttccggagcccggagagaggtactcacgcgcatgagcgaggctgagggcccagagccgcaagtaggaggcagtgttggagatgcagcccaggcagtactcgatggtgtggatggcctggtggaccatggtgtccccaaagtcaaactgtcgtgggaggaaaccagagagaaga

SEQ ID NO: 5872 - DNA, 486 bp, Homo sapiens
  MAP TO AC004217.1; EXPRESSED IN LUNG, SIGNAL = 2.8; EXPRESSED IN HELA, SIGNAL = 2.5; EXPRESSED IN FETAL LIVER, SIGNAL = 2.4; EXPRESSED IN BRAIN, SIGNAL = 2.5; EXPRESSED IN BONE MARROW, SIGNAL = 2.5; EXPRESSED IN ADULT LIVER, SIGNAL = 2.4; EXPRESSED IN PLACENTA, SIGNAL = 2.7; EXPRESSED IN HEART, SIGNAL = 2.2
cattcagcccattcttcagcatataaaaagggctcaggaagtggtagctacttatgttccaaacaaatgaactccccaagtgttttcaccccagcacctgtggcagggagaagcgttctctggcagcagtgaaagagattatagccaaaatatccttttctagtgcgcacacaccttttgtaagtcaaaggtctattctttggggaccacccatagagatgtctttcctcactcagtttccttttcatcttctagaagaggctataaccacgaatgaggttataaaccaattattgcaccacgttggtgcgatgtgcatacaccaactcaatcttcttgccaccaaccccaatcttccaatcacaagtgtcttgggcaagcagcatccaattgaagcacatcatcttagcagtatttgtgacattatggagaaggccatggttaatggagatacctgtattatacgctgcattctcgttgtctttc

SEQ ID NO: 5873 - DNA, 484 bp, Homo sapiens
  MAP TO AC002479.1; EXPRESSED IN PLACENTA, SIGNAL = 2.1; EXPRESSED IN ADULT LIVER, SIGNAL = 1.8; EXPRESSED IN LUNG, SIGNAL =   2; EXPRESSED IN HELA, SIGNAL =   2; EXPRESSED IN HEART, SIGNAL = 2.2; EXPRESSED IN FETAL LIVER, SIGNAL =   2; EXPRESSED IN BRAIN, SIGNAL = 2.4; EXPRESSED IN BONE MARROW, SIGNAL =   2
gatccaccatagacgatgccacatgagggaagcagggaatgtggggggtgccaggaggatgatgctggatccaaagatgtgagggagtgaagcacacagagctcaaatccccagaaatccctcaaatacccaaggatccactggaggggaacaggcacctgcagggggacatttgaagtcatgtcactttgcaaattcaagaaaatataatttctatttgtacctgcaagctgatgagggctggacaccccagttaccatttcaaaccacttattttccatgcagatgcttggttgcacttttccactcacctaaggtgcactccagcaaccaggacgtagaggaacatactcatcccgtctgagccccacatctcctggctgtgaaatccatggcttcttctcaggaggagaatctggggagcatagcacattgcaaacaagtgcccattgtaggaacagtaacttttctgtcggctctccct

SEQ ID NO: 5874 - DNA, 467 bp, Homo sapiens
  MAP TO AC005293.1; EXPRESSED IN HELA, SIGNAL = 3.3; EXPRESSED IN HEART, SIGNAL = 4.3; EXPRESSED IN BRAIN, SIGNAL = 3.2; EXPRESSED IN BONE MARROW, SIGNAL = 3.1; EXPRESSED IN PLACENTA, SIGNAL =  48; EXPRESSED IN LUNG, SIGNAL = 3.4; EXPRESSED IN FETAL LIVER, SIGNAL = 3.9; EXPRESSED IN ADULT LIVER, SIGNAL = 4.1
ctcatgccatgcttcagtccctgaccagacctctggactctccttccctcccacagtgcagacagtcgcccaggtgagtccagtgggccccacgtcctcctccaggtgcagaggagctactgttggccaatagaggaccacagccctgtgacactgcagacaaggacctggccttgtcatggtgttaggaccctccccgcttcctggcccttatcagcgcccatgcccatggcctctgccagctcagtctctgggagagaggtttcctcaacttcctcctcaccctcccacaggacacagtacctggaacagactttgccacttcacaatggaattgggagagggaggcaggcagaagggtcctggagctgctgaagctcttggagaagtgagtttctgcactgtcgatgctctgggccccactctcagcatagcccaagcactcaccccctacccacatgtgaaag

SEQ ID NO: 5875 - DNA, 421 bp, Homo sapiens
  MAP TO AC005348.1; EXPRESSED IN PLACENTA, SIGNAL =  26; EXPRESSED IN LUNG, SIGNAL =  19; EXPRESSED IN HEART, SIGNAL =  18; EXPRESSED IN BRAIN, SIGNAL =  27; EXPRESSED IN ADULT LIVER, SIGNAL =  19; EXPRESSED IN FETAL LIVER, SIGNAL =  27; EXPRESSED IN BONE MARROW, SIGNAL =  20; EXPRESSED IN HELA, SIGNAL =  15
aaacaatgcagaaacacacacacaaaataatacagtttgttattattatttttcttttattttaaaccagttctatataacaggaaaggtcactaattaactaattaatgtctaaggaagtcagaaaaaaaattggtgtacttaaaagtcattagcaatactagttaaaatgaaaaaaaatccacaaaaacctttttaagataaaaagttttaccaccatttctacattgctaaaatgtattctttctctctgctgcctactctccagtaaaaatgcaaatgagcaaaaagcagacaaaagtcagggagcaaaagcagacaaaagggattctgtttccgaataaccaaggattgactgtcctgtcctacccagtcctgctgtataaaatcatagatgtcttcgaagttaacgggagctcag

SEQ ID NO: 5876 - DNA, 461 bp, Homo sapiens
  MAP TO AC005549.1; EXPRESSED IN FETAL LIVER, SIGNAL = 1.4; EXPRESSED IN BONE MARROW, SIGNAL = 1.3; EXPRESSED IN ADULT LIVER, SIGNAL = 1.4; EXPRESSED IN PLACENTA, SIGNAL = 1.5; EXPRESSED IN LUNG, SIGNAL = 1.4; EXPRESSED IN HEART, SIGNAL = 1.4; EXPRESSED IN BRAIN, SIGNAL = 1.3
ctggacaggccttcagatgcccagttgctctgtaccctcttctcccatctgccgccaccagcgccccgaccttggctgtctcccatctagtcccaaacattttcaacacttctgctgtcttggtgcccaacttctccactctcctccccattttcctcctagactttcttttacccccttgtaaaactagtcttcagagcctccatttcctattaggttgataggcctaggtagaaaaaggatgtgtctgtgtggctaaatagagccatctctcatgaaggcaggagcaagcaggtatttctgattgacctcagtgatggtcctcaccacacctgctctttagatctctgggaagatgagagggtcaagctcctctgtggactctctcttcatgccctgcccatggatgcaccaatgtaagttttctgcagacaacaaatggtttggggcaatcacagaag

SEQ ID NO: 5877 - DNA, 465 bp, Homo sapiens
  MAP TO AC006381.2; EXPRESSED IN LUNG, SIGNAL =  21; EXPRESSED IN HELA, SIGNAL =  26; EXPRESSED IN PLACENTA, SIGNAL =  18; EXPRESSED IN HEART, SIGNAL =  24; EXPRESSED IN FETAL LIVER, SIGNAL =  28; EXPRESSED IN BRAIN, SIGNAL =  28; EXPRESSED IN BONE MARROW, SIGNAL =  26; EXPRESSED IN ADULT LIVER, SIGNAL =  22
caaaaagaccaccaccacacattttcacatttcaccatgccatttatagactctttttctacagttaacaatgtcattttcattgtcactgttatctcaatcaccttgattcagaaccattccctggctatttcgccatctgttaaggaattaacaaccggagcttgattattgatgttaaaaacttcttcaatattgacttctgccagcttactgatggacttcgaaggtacattttttttgcctatttaaggaggtcagacagtatttctttctcacttggcatatgaaatccttctacatcgccacctttttcatcatcatcactgaatacagtttcaggccagatattgtgccaggcatgcacaactgtgtctttagtcactgtgttcccagcatttgcaacagcatatacagcacccttcatgctaaacttttttgaaaaccttccacatgctctcctct

SEQ ID NO: 5878 - DNA, 453 bp, Homo sapiens
  MAP TO AC004674.1; EXPRESSED IN LUNG, SIGNAL = 5.6; EXPRESSED IN BRAIN, SIGNAL = 5.5; EXPRESSED IN BONE MARROW, SIGNAL = 5.4; EXPRESSED IN PLACENTA, SIGNAL = 5.6; EXPRESSED IN HELA, SIGNAL = 5.4; EXPRESSED IN HEART, SIGNAL = 5.1; EXPRESSED IN FETAL LIVER, SIGNAL = 4.9; EXPRESSED IN ADULT LIVER, SIGNAL = 5.7
tgactggttgaggtgaggtgccactgtttgagttgccaactaaactagctgctgttttcatgtaacactattttaacttgaaaggacaactaacaactaatgattattcagacttggaggctaggcagacattttctcaaaatgaatgatacaagtctgtcactttaaggaaaacgattgacagtatttggtgcaaataatacaatttgagttttcaagtgacaattaaaatttaagaaaacttgaatctgcccccaggagcttgatagctttacaacccttaaagacttctctaatgagatccgtggtattaatgagtgtgatgctaaaatattgtatgaggaaaatctgcatagctcaacaaaccaatatattcctaacaaccaacatggtgttacaaaattgtgcatgggtaaaggatacattcaaaatgcaagatgtgccaatgggttt

SEQ ID NO: 5879 - DNA, 487 bp, Homo sapiens
  MAP TO AC002350.1; EXPRESSED IN PLACENTA, SIGNAL = 2.6; EXPRESSED IN LUNG, SIGNAL = 1.8; EXPRESSED IN HELA, SIGNAL = 2.6; EXPRESSED IN FETAL LIVER, SIGNAL = 5.5; EXPRESSED IN BONE MARROW, SIGNAL = 2.9; EXPRESSED IN ADULT LIVER, SIGNAL = 2.2; EXPRESSED IN HEART, SIGNAL = 2.9; EXPRESSED IN BRAIN, SIGNAL = 3.6
tgctttctgtcaatgcaaatggaagaattcagatcatctgtggcccaattactatgtataatacaaatcctttttctttccccaccgtgttaaccctgatcaggattttattgatattcgtagaggatgtggagcataactaagaaaggtcctgtttaggcaaaggagattgaaattatggtgtgttgctctgtggggtcatgtgttaaaatgtgtgtgcaaaggcagcctaggaagaaaaaataaatggagatgatttttgtttctaggtagcagcaccgcctgcattgtggtgctggacagaaccagccaccgcttacacacagcaaacctgggcgattcaggcttcctggttgtcaggggtggtgaagtcgtgcaccgatcagatgagcagcagcattacttcaacactccattccagctctcaatcgctccccctgaagccgagggagtcgtcttgagcgacaggtaatctcccctctcagcc

SEQ ID NO: 5880 - DNA, 483 bp, Homo sapiens
  MAP TO AC004583.1; EXPRESSED IN ADULT LIVER, SIGNAL =   2; EXPRESSED IN PLACENTA, SIGNAL = 2.3; EXPRESSED IN HELA, SIGNAL = 2.5; EXPRESSED IN HEART, SIGNAL =   3; EXPRESSED IN LUNG, SIGNAL = 2.7; EXPRESSED IN FETAL LIVER, SIGNAL = 4.7; EXPRESSED IN BRAIN, SIGNAL = 3.1; EXPRESSED IN BONE MARROW, SIGNAL = 2.9
agctccagtgaggccaccacgcctgtcgccgtgcagcacatccgccctgccagagtgaagaggcgcaagcagtcgcccgttcccgctctgccgatcgtggtgcagctcatggagatgggattttccagaaggaacatcgagtttgccctgaagtctctcactggtgcttccgggaatgcatccagcttgcctggtacttcgttttcctggcctctgcttgtgtatgtgtgggttcccgcttcagggctgttgactcacagtggctgctgtgctgtgtgtgcctctcttaggtgtggaagccttggtcgggtggctgctggaccactccgacatacaggtcacggagctctcagatgcagacacggtgtccgacgagtattctgacgaggaggtggtggaggacgtggatgatgccgcctactccatggtcagtgcctcccatgtgaccgcccgcacctgggccgctgtccgtctagcgctcta

SEQ ID NO: 5881 - DNA, 462 bp, Homo sapiens
  MAP TO AB003151.1; EXPRESSED IN LUNG, SIGNAL = 4.6; EXPRESSED IN FETAL LIVER, SIGNAL = 5.2; EXPRESSED IN BONE MARROW, SIGNAL = 4.9; EXPRESSED IN HELA, SIGNAL = 5.6; EXPRESSED IN BRAIN, SIGNAL =   4; EXPRESSED IN ADULT LIVER, SIGNAL = 4.2; EXPRESSED IN PLACENTA, SIGNAL = 3.8; EXPRESSED IN HEART, SIGNAL = 4.2
tctaatcctattttctttagtgccagtgacaacgtctcagtataaacatttccatcctttaatactgtatttatttccttagcagttttccttttcttccattctatcttctgacccaatgcaatgaaaacttctcaaaatatcagtcaaaacttcgttgtttttacttcaacactgaaattacagccagtaagagtaaggctaggcctacctagaagaaaattagtgatatgtatgtcagtcttaaggttttgatatttttattaaaactgaaaatacacatctccaaatggggaaaaaaattatatagtgttaatgttaagaacaaagttgattccaacctcttgagacataaacacaagcatgaggattatggacagaaacaaatccgtattccaggaacagccgttgattatcgtgagggccgtaacagatgaatacctcttcatgctttctccaacg

SEQ ID NO: 5882 - DNA, 469 bp, Homo sapiens
  MAP TO AC001237.1; EXPRESSED IN HELA, SIGNAL = 3.9; EXPRESSED IN HEART, SIGNAL = 3.2; EXPRESSED IN BRAIN, SIGNAL =   4; EXPRESSED IN ADULT LIVER, SIGNAL = 4.1; EXPRESSED IN LUNG, SIGNAL = 4.5; EXPRESSED IN FETAL LIVER, SIGNAL =   4; EXPRESSED IN BONE MARROW, SIGNAL = 3.9; EXPRESSED IN PLACENTA, SIGNAL = 3.8
cagatgaggaaaccaaaaacaggaaggttaaatgacttgctcagggatccacagtcaagagcagaagagccaggactaaaatgcaagtccatctgattccgaagtctgggcttgaagccactgtaccgtatccgcaagcccctgcatggggtctggcatccagcaggtgctcagtgagttcgtgcagtaagtgtctgcctctccctcttcttcccagagttcacttccctgtagctggctcctaccgctggcccaacacgggtctctgctttgtgatgagagaagcggtgaccgttgagattgaattctgtgtgtgggaccagttcctgggtgagatcaacccacagcacagctggatggtggcagggcctctgctggacatcaaggctgagcctggagctgtggaagctgtgcacctccctcactttgtggctctccaaggtaaacaacagggaaggatagggaggaa

SEQ ID NO: 5883 - DNA, 397 bp, Homo sapiens
  MAP TO AC006070.1; EXPRESSED IN BRAIN, SIGNAL = 1.5; EXPRESSED IN ADULT LIVER, SIGNAL = 1.2; EXPRESSED IN HEART, SIGNAL = 1.3; EXPRESSED IN BONE MARROW, SIGNAL = 1.3; EXPRESSED IN LUNG, SIGNAL = 1.5; EXPRESSED IN FETAL LIVER, SIGNAL = 1.4; EXPRESSED IN PLACENTA, SIGNAL = 1.3
tcagagcccagcaaacttatcctgtaaagggacagatatacataatttaggctttgtggggcacatggtctctgttgcaactactgaattttgccgttgtatcattgcattatatcattacatttatagacaatatgtaagcaaatgagtgtggctgggttctaataaaactttgtaaaaacaggctggggctctgtttggctcatggtgagacgggaagagtttccttgttcccctcgcagggcgtgcaacgggggcgtggctcgcttcttccgtgccccactgctcacacttctaggggaagcatgcagatgggcaggctttggggctctgaccccacggcagcgtctaggggtgagtgtttacagctgaagccccagtgggtgtgtgtacaggg

SEQ ID NO: 5884 - DNA, 442 bp, Homo sapiens
  MAP TO AC004682.1; EXPRESSED IN PLACENTA, SIGNAL = 2.1; EXPRESSED IN LUNG, SIGNAL = 2.1; EXPRESSED IN HELA, SIGNAL =   2; EXPRESSED IN FETAL LIVER, SIGNAL = 1.9; EXPRESSED IN BRAIN, SIGNAL = 2.3; EXPRESSED IN ADULT LIVER, SIGNAL = 2.2; EXPRESSED IN HEART, SIGNAL = 2.1; EXPRESSED IN BONE MARROW, SIGNAL = 1.9
ctgaattcttcttactgagtgggaatactaagtgatacatttccttgtgaatagagtgaaatgtttaataagatctctgtagatgaaaagataaaaagatggatagatggatgtgaatgactgaacaaatgaaaaaaaaatcctggaatgaatacgtccttagtgatgatctaaagccttttttgtatatcctgtctctatggtaggacaagaagcaagcacaggcattagcattcgaggagtcagaggtggaatttgggtccagtaaacagtgtcatctgagacaactccagcaactgaagaaaaaattgctggtccttcaacaagaactggagtttcacacagaggagttgcagacttcttactattctctccgccagtatcagtccatcctagagaagcagacttccgacctggttcttctgcaccatcactgcaaact

SEQ ID NO: 5885 - DNA, 492 bp, Homo sapiens
  MAP TO AC002464.1; EXPRESSED IN LUNG, SIGNAL = 0.45; EXPRESSED IN ADULT LIVER, SIGNAL = 0.97; EXPRESSED IN HEART, SIGNAL = 4.7; EXPRESSED IN BRAIN, SIGNAL = 0.69; EXPRESSED IN BONE MARROW, SIGNAL = 0.68
atcagccatcattccagaggtcaccagatttgtaacttccccaattactcctataaataacctcactattgtagcccttttgagatgtttttccagacttttgtatttctgatgactggatgactccacctggacccgagactcatgactcacccagtcctgtggccccacccagaagtggactcagagcaagaggaccattttccacaccccaatgagtgcatccccaaccaatcagcagcacctgttccctagccccctgaccaccaaactctccttgagaaaccgtagcctccaaattttctgggaggctgatttgagtaataataaaactttggtctcctatgtagctggctctatgtgtattaaactcttcctctattgcaattcccctgccttggtaagtcggctttatctgggcagtgggcaagaagaattcactgggtgttacatgttgaaataaatatatacctggataacagacaagctttg

SEQ ID NO: 5886 - DNA, 491 bp, Homo sapiens; identical to SEQ ID NO: 5552
  MAP TO AC004470.1; EXPRESSED IN FETAL LIVER, SIGNAL = 1.4; EXPRESSED IN LUNG, SIGNAL = 1.6; EXPRESSED IN BRAIN, SIGNAL = 1.6; EXPRESSED IN BONE MARROW, SIGNAL = 1.5; EXPRESSED IN ADULT LIVER, SIGNAL = 1.5; EXPRESSED IN PLACENTA, SIGNAL = 1.4; EXPRESSED IN HEART, SIGNAL = 1.7

SEQ ID NO: 5887 - DNA, 442 bp, Homo sapiens
  MAP TO AC004586.1; EXPRESSED IN FETAL LIVER, SIGNAL = 2.8; EXPRESSED IN BONE MARROW, SIGNAL = 2.7; EXPRESSED IN LUNG, SIGNAL = 2.6; EXPRESSED IN BRAIN, SIGNAL = 2.6; EXPRESSED IN ADULT LIVER, SIGNAL = 2.9; EXPRESSED IN PLACENTA, SIGNAL = 2.4; EXPRESSED IN HELA, SIGNAL = 2.4; EXPRESSED IN HEART, SIGNAL = 2.8
agcttggtttggggtcttcctgcctgggcttcccttcccagctctgcccagcgtgagcctgggccagtccagtgcccactccaggggcctgtggatggctctgcatgccactccatggttgtaagggctgagggcatataggggggagagagagacccccggctgcccccacggcctcttcaacaaggtggttaagtgactcctcctcgatcctcccttgcccagctccctccaccgctgcagctcattccggaggtgcagaagcccctgcatgagcagctgtggtaccatggggccatcccgagggcagaggtggctgagctgctggtgcactctggggacttcctggtgcgggagagccagggcaagcaggagtacgtgctgtcggtgctgtgggatggtctgccccggcacttcatcatccagtccttggatgtgagtg

SEQ ID NO: 5888 - DNA, 455 bp, Homo sapiens
  MAP TO AC004141.1; EXPRESSED IN LUNG, SIGNAL =  12; EXPRESSED IN PLACENTA, SIGNAL =  13; EXPRESSED IN HEART, SIGNAL =  12; EXPRESSED IN FETAL LIVER, SIGNAL =  12; EXPRESSED IN BRAIN, SIGNAL =  13; EXPRESSED IN BONE MARROW, SIGNAL =  13; EXPRESSED IN HELA, SIGNAL =  13; EXPRESSED IN ADULT LIVER, SIGNAL =  11
ctggcaccagttttgcctaccctttgcaagatttgggccccatcaggcttcctgtcattatctttgggacttaagttgccaacttctggacaatgaggcaatgccattgaatgtcctgttacatataaatgatatatgtatagtgtggtgcttcagagtttaatttagaatatacgtctgtaaaccttcacttccattccactatgatgcgtgtgcattttccctccacactcccgaagatagcaaatatgtaacaatgaagattgaattaccatggctgttacatctagatgtttccacaagcctgccattttgatcgtagcatgccattgcttggtaacgatatccttgtccgcattccttgatgtctccttgtactttcattcccagcaacacttccacttttccctctggtaaaatacagtctgaccagttccccacaggttgtgcattat

SEQ ID NO: 5889 - DNA, 481 bp, Homo sapiens
  MAP TO AC002468.1; EXPRESSED IN LUNG, SIGNAL = 1.5; EXPRESSED IN HELA, SIGNAL =   5; EXPRESSED IN BONE MARROW, SIGNAL = 1.4; EXPRESSED IN ADULT LIVER, SIGNAL = 2.3; EXPRESSED IN PLACENTA, SIGNAL =   2; EXPRESSED IN HEART, SIGNAL = 2.1; EXPRESSED IN FETAL LIVER, SIGNAL = 1.5; EXPRESSED IN BRAIN, SIGNAL = 1.6
aagagaaagcgggaaaatcccctaatcagtgagtctttgaggagttatgggtagaactatataatccaggtaactacccaagaaatacaggcaaatcctgcttccctgattcccttgcttctctctcatctttttcaaacagaactttccactccatttgttttgggtaacaacaacctaaaagctttttctttcttaaatgctttccatgctctctgggatctttctgtgcctcagagcatttccaagacttcaatcacagtttccaaggctgcttctctatttggatggagatctgtgaccaagaccaaaccaaacttgtggtctgcttaattcacacccggccacacatcgtggctgaagcacaggacagcggcgatctcaccacttgcaggagcatttcaggagccaagacaaccagctcctctgtatcaccatggttctcgagcttcttcctccttggcacatctggtgacaacat

SEQ ID NO: 5890 - DNA, 414 bp, Homo sapiens
  MAP TO AC004485.1; EXPRESSED IN ADULT LIVER, SIGNAL = 1.4; EXPRESSED IN PLACENTA, SIGNAL = 1.3; EXPRESSED IN HEART, SIGNAL = 1.3; EXPRESSED IN LUNG, SIGNAL = 1.3; EXPRESSED IN FETAL LIVER, SIGNAL = 2.6; EXPRESSED IN BRAIN, SIGNAL = 1.3; EXPRESSED IN BONE MARROW, SIGNAL = 2.7
actgcagacagtcatggtgcagcccacaaaataccaaccttcgcctctcttggctaatatgagtgactgctccttaccaattatggctttatcctcaatctaatctgccctgcctgtagataagatttattgagatattcaatcatagaattgcttctgctttctgacaacacccaatttagaacaaaccttacttggccacccccccaccccccgcaaaactatccagccaaagcccaaatgcccaggttctttctaacaccttcttactgagatgtttccttctcccctcctccaatctccgcgccatcagcccctgttccctgtgatatgcattctcctttgctgcaataagtgagagaaagtcatctaacttgttcaagtacagctgtttctggtggtcttttgctgaaa

SEQ ID NO: 5891 - DNA, 491 bp, Homo sapiens
  MAP TO AC005500.1; EXPRESSED IN PLACENTA, SIGNAL = 8.5; EXPRESSED IN HELA, SIGNAL = 8.4; EXPRESSED IN BRAIN, SIGNAL = 9.5; EXPRESSED IN BONE MARROW, SIGNAL =  24; EXPRESSED IN ADULT LIVER, SIGNAL = 7.8; EXPRESSED IN HEART, SIGNAL = 8.5; EXPRESSED IN LUNG, SIGNAL = 8.7; EXPRESSED IN FETAL LIVER, SIGNAL = 8.3
taggtggaaacacaggaggctcctggccattccttccatgctgtgtggtggggagcacctgtgctcaggtgtgtaacagcctgtgggcctggctgtagatcggtgtgcactggtatgtggggtagttggggagggttcaggctgggctgaggcaaagcagaaatgggaccagaacaagaggtgcaagcctgcggagcagcctccctgcctagtcagtgctgtgctttcctcatgtctcggcacaggtatgacccacggcacaaccgctggttccagatccagtccctgcagcaggagcacgccgacctgtccgtgtgtgttgtaggcaggtacatctacgctgtggcgggccgtgactaccacaatgacctgaatgctgtggagcgctacgaccctgccaccaactcctgggcatacgtggccccactcaagagggaggtaaggaagccctcgaagaggggccttctcctgcctaatttccttccccagga

SEQ ID NO: 5892 - DNA, 427 bp, Homo sapiens
  MAP TO AC005950.1; EXPRESSED IN BRAIN, SIGNAL = 1.8; EXPRESSED IN BONE MARROW, SIGNAL =   2; EXPRESSED IN ADULT LIVER, SIGNAL = 1.6; EXPRESSED IN HELA, SIGNAL = 1.9; EXPRESSED IN HEART, SIGNAL = 1.8; EXPRESSED IN FETAL LIVER, SIGNAL = 2.3; EXPRESSED IN PLACENTA, SIGNAL = 1.5; EXPRESSED IN LUNG, SIGNAL = 1.8
gagcagcttgtccctgtctcccctccccgggaggctgtgtgcctggagaccagagctgtcaaaagtggaggagggggaccccctgatgtgtcctctaaggtccaggtagcaggagagctccactggggagggggtcctgcagtgctgtcctctcttgcaggcaaggccaggcgggtgctgcctgggacccagtgactcagcacccctgcccggatcaactggacttttgccccctgctccgccagcctcctgcttggatctctcctgggtctccctgctgcgcctgtccaggatgcagggagctcgggctcccagggaccagggccagtcccccggcaggatgagcgctctaggccggtcctcggtcatcttgcttacctacgtgctggccgccacagaacttacctgcctcttcatgcagttctcc

SEQ ID NO: 5893 - DNA, 454 bp, Homo sapiens
  MAP TO AC006075.1; EXPRESSED IN HELA, SIGNAL =   2; EXPRESSED IN FETAL LIVER, SIGNAL = 2.1; EXPRESSED IN PLACENTA, SIGNAL = 1.9; EXPRESSED IN LUNG, SIGNAL = 2.1; EXPRESSED IN HEART, SIGNAL = 2.3; EXPRESSED IN BRAIN, SIGNAL = 2.6; EXPRESSED IN BONE MARROW, SIGNAL =   2; EXPRESSED IN ADULT LIVER, SIGNAL = 1.9
ctttccaagcctcggtttctgcatctgtaaaatggggagaagtgatggttactgtttccttatagggtctggtgaagatgacctgagattggtccatctcaggctggtggcaccatggtgacccctagaaagtacgcggggcacgatcgtcctgggatctgggaggaaggtttctgcatggtggctcctcatgacgttctctccctctctgcacctttttgatttttcagggtaatcaggaagcagccgctgcccctgacacaatggctcagccttacgcttcggcccagtttgctcccccgcagaacggtatccccgcggaatacacggcccctcatccccaccccgcgccagagtacacaggccagaccacggttcccgagcacacattaaacctgtaccctcccgcccagacgcactccgagcagagcccggcggacacgagcgctcagac

SEQ ID NO: 5894 - DNA, 462 bp, Homo sapiens
  MAP TO AC002365.1; EXPRESSED IN PLACENTA, SIGNAL =   1; EXPRESSED IN LUNG, SIGNAL = 0.91; EXPRESSED IN FETAL LIVER, SIGNAL = 1.2; EXPRESSED IN ADULT LIVER, SIGNAL = 0.94; EXPRESSED IN HEART, SIGNAL = 1.5; EXPRESSED IN BRAIN, SIGNAL = 1.6; EXPRESSED IN BONE MARROW, SIGNAL = 1.2
aaaatggtcaaaaattattgtctggttaaaggagatctagaaaatgaatcagtatcttcaggtcccctgttttccattgtgtgtgttctcaagctttcccattccctggataaacaggagtcgtgtccagggaaggcaggccagggtgaggggtgtagtgcatccctgatcccctgagtggtaataaggtcagcccccagggcccattcccgccaagtgtgaggtatgtctgctgcgttccgaggacctgctctgcctcaggaattgctgctcgtggaaggctcatggaacatgcttctctgttacagattgaagagggcagtaaagccgcggcggtcgacaagttactggctggagatgagatcgtcggcatcaatgacattggtctctcagggtttagacaggaagcgatttgcctggtgaaggggtcccataagaccctgaagctggtcgtcaaaaggt

SEQ ID NO: 5895 - DNA, 478 bp, Homo sapiens
  MAP TO AC004590.1; EXPRESSED IN LUNG, SIGNAL = 4.1; EXPRESSED IN FETAL LIVER, SIGNAL = 4.9; EXPRESSED IN BRAIN, SIGNAL = 4.7; EXPRESSED IN BONE MARROW, SIGNAL =   5; EXPRESSED IN ADULT LIVER, SIGNAL = 4.5; EXPRESSED IN HELA, SIGNAL = 4.3; EXPRESSED IN PLACENTA, SIGNAL =   4; EXPRESSED IN HEART, SIGNAL = 4.3
caggggacagaggatgctgcctggggaggccggtgcagtggcactgagggtggagatggatcttgtcaggcagaggacacagggaggcaggggctgtgcattccaggccaaggcacagcacaggcccagcaaggagttgtgagaaggaatggtgggcagcgtggaatggctgcaatggatgagaatggatggaaggtaggaccctgtgagcaggaggtcaggggagggagcaggtgtgccactgacactctttctgcctgcacaggtaaagcaaatgaaattgaaggactcgcgcatcaagctgatgagtgagatcctgaacggcatcaaggtgctgaagctgtacgcctgggagcccagcttcctgaagcaggtggagggcatcaggcagggtgagctccagctgctgcgcacggcggcctacctccacaccacaaccaccttcacctggatgtgcagccccttcctggtgaggctt

SEQ ID NO: 5896 - DNA, 471 bp, Homo sapiens
  MAP TO AC002302.1; EXPRESSED IN ADULT LIVER, SIGNAL =  31; EXPRESSED IN LUNG, SIGNAL =  38; EXPRESSED IN HEART, SIGNAL =  28; EXPRESSED IN FETAL LIVER, SIGNAL =  30; EXPRESSED IN BRAIN, SIGNAL =  33; EXPRESSED IN BONE MARROW, SIGNAL =  32; EXPRESSED IN PLACENTA, SIGNAL =  34; EXPRESSED IN HELA, SIGNAL =  31
gagaatggtgtggaggatggatggaggttgggtgataaagttgggtaatgagtttgagcatattttgagggtagtgcaggatggtgagggagagataggagattggttgttgaagcagtagggaaaattattggggggatatggtgaaaaatggatgaaggatggattataaaattagcaataacttttgggatgaggtgggcaaggtttaggagatggggagttgcagccttcgtgccccctccttatggctgcctcttcactcatctctcaggttctccgtctgatggttggggtacaggtgacagaagagcagctggagaacatcgctgaccgcacggtgcaggaggctgatgaagatggggatggggctgtgtccttcgtggagttcaccaaggtcagagtgcccttggggattggggagttgagatcaggagttctggggcagacagacttgggaaacgttcaacg

SEQ ID NO: 5897 - DNA, 468 bp, Homo sapiens
  MAP TO AC004148.1; EXPRESSED IN PLACENTA, SIGNAL = 3.3; EXPRESSED IN LUNG, SIGNAL = 2.7; EXPRESSED IN FETAL LIVER, SIGNAL = 3.5; EXPRESSED IN BONE MARROW, SIGNAL = 3.3; EXPRESSED IN ADULT LIVER, SIGNAL = 2.7; EXPRESSED IN HELA, SIGNAL = 3.3; EXPRESSED IN HEART, SIGNAL = 2.9; EXPRESSED IN BRAIN, SIGNAL = 3.2
gagaggttactgaaggcttaagatgttcaaggaaagcaactaatttatccaacctgacgacagattttgaaagcaaagcacatgggaccaatagagcccctgatctctcaggagctggtaaagaactctcggaagaataggcaagaaagcagctcactatgtaaaaggagtcttgtttagaaaaataaaaggcagtgggcatggggagagagctgttgagtcaagaagtactaatagtcaagaaggaaccaggtaccagcttcccaagttcagttctcttctcatctgagactctagtagcaagagagatggcagctactcgacgaggctgggtcacagcaatgatgccctggcggctgatccctccttcatacaggtactgagggatctgagttgtcttcccagagccagtttcccctaggagagagggggaaaaaaaaaaaaggctcactgaaatgcaaactgggg

SEQ ID NO: 5898 - DNA, 464 bp, Homo sapiens
  MAP TO AC002478.1; EXPRESSED IN BONE MARROW, SIGNAL = 1.8; EXPRESSED IN PLACENTA, SIGNAL = 2.1; EXPRESSED IN LUNG, SIGNAL = 1.9; EXPRESSED IN HELA, SIGNAL = 1.9; EXPRESSED IN HEART, SIGNAL = 2.2; EXPRESSED IN FETAL LIVER, SIGNAL = 1.5; EXPRESSED IN ADULT LIVER, SIGNAL = 2.6; EXPRESSED IN BRAIN, SIGNAL = 2.8
taagccaggcacagaaggacaagtactacatgaacccacttctatgaagaatctaaaatagtcaaactcacagaagcagagagcagagtggtgattgccaagcctacagggagggtgaaacggagagatgttggtcaaatgatacaaagttttgattatgccagataaataagtcctagatatccagaggacaacatagtagctatagttaagaatattctattgtatactaaaaatatgctagaaggatagatcttacattgtcttcttatcacagtaataataaccatatcaaacaaagagggcagaaggaaacttttggaggtgattgaaatgattatggtgttgattgtggtgatagcttcacaggtgtacacttatctccaaactcatcaagttgtgtgcattaaagatgcacagcgtttcaatgtgagtcataactcagtgatttggcttaaaaatgg

SEQ ID NO: 5899 - DNA, 488 bp, Homo sapiens
  MAP TO AC004499.1; EXPRESSED IN FETAL LIVER, SIGNAL = 1.7; EXPRESSED IN BONE MARROW, SIGNAL = 1.8; EXPRESSED IN PLACENTA, SIGNAL = 1.6; EXPRESSED IN LUNG, SIGNAL = 1.7; EXPRESSED IN BRAIN, SIGNAL = 1.7; EXPRESSED IN ADULT LIVER, SIGNAL = 1.5; EXPRESSED IN HELA, SIGNAL = 1.6; EXPRESSED IN HEART, SIGNAL = 1.6
accattcctgtggtacgagcactgaaaagaaagggtgggtgcctgtatgaattcaacccattgaaaaaagttatttaacatcagctgtgttctaggcaccttcttggttagatttggggaacagtgatgaacgagacagatctggttccagtcatcaattacattatagtgtcacagggagacaacatacaaaagagagaacaaataggatgaatgttacaaaagggggtgtgttggggggcaaaggcagtgcataacgagttgatgacagcagccactgcctgggtgcagagcccctaaggatacatgctcttgacttaacaggattgcgaacggcaatgtgtctggagcagttgtcagcccaggagaagggaacaagacaaagagggtaggaaacagaagactggaaacattttcttattttttctctgaatctctaggagttgatatgagatccttttctgaatacaggaaaccagaggtggtgt

SEQ ID NO: 5900 - DNA, 440 bp, Homo sapiens
  MAP TO AC005291.1; EXPRESSED IN PLACENTA, SIGNAL = 5.5; EXPRESSED IN HEART, SIGNAL =  19; EXPRESSED IN ADULT LIVER, SIGNAL =   5; EXPRESSED IN LUNG, SIGNAL = 7.3; EXPRESSED IN FETAL LIVER, SIGNAL = 5.7; EXPRESSED IN BRAIN, SIGNAL = 5.3; EXPRESSED IN BONE MARROW, SIGNAL = 6.9; EXPRESSED IN HELA, SIGNAL = 5.7
cctgaaaagggcagacacagtctggaaagaagagccctttttcttagcacctttcttcgcgctgctatctgaggtaaaaagaaaacccgtgaataagaatagaataccagaggcttatatgaacatgtattataacattatgtgagaatggatttaatttagattaaggacacagaaagtacctgcttcagcactagcatacgtggaaaagagactggctagagtcttcattgcagacttctggtacagcccaaccacagtatcattcagggggtccttatttttgtccagccagccagtaatgttgtagtccacagtgccagcatagtgaatcagagagaagtgggcctcagccttgcctttgaccaccttgggcttctggaagttggcagacttgcccaggtgctggtcatacagcttgttcttgaaggaggtgtccg

SEQ ID NO: 5901 - DNA, 482 bp, Homo sapiens
  MAP TO AC002308.1; EXPRESSED IN LUNG, SIGNAL = 1.4; EXPRESSED IN BRAIN, SIGNAL = 1.9; EXPRESSED IN BONE MARROW, SIGNAL = 1.2; EXPRESSED IN ADULT LIVER, SIGNAL = 1.5; EXPRESSED IN PLACENTA, SIGNAL = 1.8; EXPRESSED IN HEART, SIGNAL = 1.4; EXPRESSED IN FETAL LIVER, SIGNAL = 1.1
cagtgctggggtcacaagaggcagcgctctcgggacgtctccaccatggcctgggctctgctgctcctcactctcctcactcaggacacaggtgacgcctccagggaaggggtcttggggacctctgggctgatccttggtctcctgctcctcaggctcaccggggcccagcactgactcactggcatgtgtttctccctctttccagggtcctgggcccagtctgccctgactcagcctgcctccgtgtctgggtctcctggacagtcgatcaccatctcctgcactggaaccagcagtgatgttgggagttataaccttgtctcctggtaccaacagcacccaggcaaagcccccaaactcatgatttatgagggcagtaagcggccctcaggggtttctaatcgcttctctggctccaagtctggcaacacggcctccctgacaatctctgggctccaggctgaggacgaggctgatta

SEQ ID NO: 5902 - DNA, 446 bp, Homo sapiens
  MAP TO AC004594.1; EXPRESSED IN PLACENTA, SIGNAL = 5.5; EXPRESSED IN LUNG, SIGNAL = 6.2; EXPRESSED IN BRAIN, SIGNAL = 6.3; EXPRESSED IN ADULT LIVER, SIGNAL = 7.1; EXPRESSED IN HELA, SIGNAL = 6.2; EXPRESSED IN HEART, SIGNAL = 7.6; EXPRESSED IN FETAL LIVER, SIGNAL = 6.4; EXPRESSED IN BONE MARROW, SIGNAL = 6.4
tctttgtatgaaaccctaccaccatatttatttctattttgttctccttgccctgccttattaagaattgtagaggaacaattagaaggctgaacaaagaaaatattggatcattagagactttatatggtatttttttcactgatggcaattgatgcagaaaagaaaaaacaatgtattaatggtatacctaattaacggggagttcatgatgttcatttttcctttttcttctagcaatggctcagcaacatcagaagaccttttttggaagcttgatgcactgcaaatgtttgtctttgatctgcactggccagaacaggaatttgcccaccacttagagcaaagacttaaactaatggccagtgatatgctagaggcctgtgtcaaaaggtagacatgtattttcaaattgctgcttaatgtgccagcacccaaaaatatca

SEQ ID NO: 5903 - DNA, 461 bp, Homo sapiens
  MAP TO AC004160.1; EXPRESSED IN PLACENTA, SIGNAL = 4.5; EXPRESSED IN HELA, SIGNAL = 4.8; EXPRESSED IN HEART, SIGNAL = 5.6; EXPRESSED IN FETAL LIVER, SIGNAL = 6.4; EXPRESSED IN BRAIN, SIGNAL = 5.6; EXPRESSED IN BONE MARROW, SIGNAL = 5.1; EXPRESSED IN LUNG, SIGNAL =   4; EXPRESSED IN ADULT LIVER, SIGNAL = 4.3
ggggctgctaacttccttggatgtacagtcagagtatgatgcagaatgagtaagcaggctagtcttgtgtaggtatctcatgctgtggagacaaagaattcctgaagcacaagaaacatttgtgcagctaagttaaggttctattgcttcagctggttgctaaagcaatagtcagaacaaaatgctgagcaaagaggatgtgagacagggcattgaaaatgtatgtctccctgtccttctcaacctgcttcgtacctcagggagctgacctctgtagcatagatcacctgaactccctttccatctggcttctcattgagtcttggtaccagaagaaatggtaggaaatctgaaagcaggagaatagaatggttgagagtatttgtttcccctatcttctgtccttcctgcattgccacagtttgttactcttggctgccactcctattgggtgaacctgc

SEQ ID NO: 5904 - DNA, 435 bp, Homo sapiens
  MAP TO AC006080.1; EXPRESSED IN LUNG, SIGNAL = 9.8; EXPRESSED IN FETAL LIVER, SIGNAL =  16; EXPRESSED IN BRAIN, SIGNAL =  15; EXPRESSED IN ADULT LIVER, SIGNAL =  17; EXPRESSED IN PLACENTA, SIGNAL =  19; EXPRESSED IN BONE MARROW, SIGNAL =  17; EXPRESSED IN HEART, SIGNAL =  13; EXPRESSED IN HELA, SIGNAL =  15
gtcatttctttcaggcccagccttgcttcagattcatctcttctgaaggaggaacagctattttacatgatgatttcatatccttggaaccttgaaatctttttccaaggagaacattgcaaacttctgattcaatttctccatgttaatatttatgtaggaagttgactacatgaatcagaacattttttaattgcaagggcaagaaactaactcaatctgacttcagccccataggagatgtgttggtacgtatacatcaaaaatccaaaggtaaatttgccactatatgtagctgaaatcaggtccataaacaatgcggtcaaaaatcttactctctcttcatttttcagttttgctttccttagtttggcttcattctccaaggttcttaaacatggagccttaaaagatactgcacaccaagtagctcca

SEQ ID NO: 5905 - DNA, 483 bp, Homo sapiens
  MAP TO AC005971.5; EXPRESSED IN HELA, SIGNAL = 1.6; EXPRESSED IN LUNG, SIGNAL = 1.8; EXPRESSED IN HEART, SIGNAL = 1.5; EXPRESSED IN FETAL LIVER, SIGNAL =   2; EXPRESSED IN BRAIN, SIGNAL =   2; EXPRESSED IN BONE MARROW, SIGNAL = 1.9; EXPRESSED IN ADULT LIVER, SIGNAL = 1.6; EXPRESSED IN PLACENTA, SIGNAL = 1.6
ttagatggcaggacaaaggcgggggcttgagggtgttaaggaggacacagtttagaaaaaacttctgcctctatctgagcactgataatttagttattcagtctcacacaagatcgtaaagatatcaaaaggtgtgtttgttcttcagtaggtttaatggtgagcattggaagttctggcctccttagagagtggccctggagaaggactggaagtgggagggtggccacagaaaaaattacagaaaccacctggtgtgaatgggaccaagacctcaggttttccattcagggagctgcccccttaccagattgatgccattcacttctatgtgctgaaggaggactctggccacgtgctctgtgtcccactgcatgcctgggtcatctgggaaatccctacaagagagaagcacaacttgaacaccttttctaatcaggcacaaccttctccctaagctccagtaggtgcatgcccagtttt

SEQ ID NO: 5906 - DNA, 480 bp, Homo sapiens
  MAP TO AC006088.1; EXPRESSED IN LUNG, SIGNAL = 4.8; EXPRESSED IN BRAIN, SIGNAL = 5.2; EXPRESSED IN HELA, SIGNAL = 4.1; EXPRESSED IN ADULT LIVER, SIGNAL = 5.3; EXPRESSED IN BONE MARROW, SIGNAL =   4; EXPRESSED IN FETAL LIVER, SIGNAL = 4.4; EXPRESSED IN HEART, SIGNAL =   5; EXPRESSED IN PLACENTA, SIGNAL =   5
acaacagctgctcccacatcccctcggactggagcttcagccctgactgaggtgggcagacctaagacctgagaccacaagattagctcagtgtctaccaagcatctagccactgtccagggccagagcataccacgtctgcagtgcctgtgagcagagccagcagttgccctgtgactgtaaccaccaaattgtccaaacacccgctgcagttagcaagaagggtaggcttcaccctcctttactgaggagaatgatgcggaggagtttcctctccagggctaggcaaggcaggcgagcagccagaagccgggtgcccacagggcagggacaggaaggctgtgctgctactggctgctcacttctccatcaacctcaccctctgcaccactaaccaagaccttgtcctcttgcctgtctcgctgctttcacagctgcaacgattgtgtctgcctcatggggttttcctccagagccttt

SEQ ID NO: 5907 - DNA, 479 bp, Homo sapiens
  MAP TO AC005553.1; EXPRESSED IN PLACENTA, SIGNAL = 2.7; EXPRESSED IN ADULT LIVER, SIGNAL = 2.6; EXPRESSED IN LUNG, SIGNAL = 2.8; EXPRESSED IN HEART, SIGNAL = 2.4; EXPRESSED IN FETAL LIVER, SIGNAL = 2.6; EXPRESSED IN BRAIN, SIGNAL = 2.7; EXPRESSED IN HELA, SIGNAL = 2.7; EXPRESSED IN BONE MARROW, SIGNAL = 2.6
gaccagtgaattgcatgagcctaggcccattgccaaacttcttttgctgtgaagtaaattctttgatcagaagcaatgctgtgtggaatccttgataagaagcaatgctgtgtggaatactatgacagtgtgtaaggcattctgtaagcccacggatggtagttttggcagaagcatttcatgcagagaagacaaagtcgtaaccagagtaagtgtttattccagtaaggacaaaaaactgcctcttccatgatggaagcagtccagtgtaatcaacctgatgctggatagctcgctgatcactccaggaaatagtgccatatcttggggttccgtgttagcctctatttctgccagattgaacaacagtggtggccacaggcaggtcagccttggtgagtggaagtctatgttgctgagcccatgcataagctccatctctaccaccatggctattttggtcataagcctattgggca

SEQ ID NO: 5908 - DNA, 451 bp, Homo sapiens
  MAP TO AC005521.1; EXPRESSED IN LUNG, SIGNAL = 2.1; EXPRESSED IN FETAL LIVER, SIGNAL = 1.8; EXPRESSED IN BONE MARROW, SIGNAL = 2.1; EXPRESSED IN PLACENTA, SIGNAL =   2; EXPRESSED IN HELA, SIGNAL = 1.9; EXPRESSED IN BRAIN, SIGNAL =   2; EXPRESSED IN ADULT LIVER, SIGNAL = 2.1; EXPRESSED IN HEART, SIGNAL = 2.2
aactgaaaaccccagaatgaggcacttgtggaagcctggtgcatgaagactccttagagacactgttcctcttaattagcccaaggaactaaaggaaggccttttacatattactctcaggtgtttgataatgcttcatgggctgaagaagctgatcacttgaaaacttttatctttcaggtgagatcattatccttcacaaatgggttgcttgggagcaataattcaacatttaattagttttctttatttctcctaagggatacatctatgaaaatctgaactgcattgtggttgaagtttcagtaggcttcagtatcagaataatgttcccaaatggcatatttcctattattagtcaacagtatgagctttgagtattttagtgcaatgtttataggacatggtgccataaggcaatacagctttaaccctgcactctcttgtgaga

SEQ ID NO: 5909 - DNA, 477 bp, Homo sapiens
  MAP TO AC004580.2; EXPRESSED IN ADULT LIVER, SIGNAL =  10; EXPRESSED IN PLACENTA, SIGNAL =  10; EXPRESSED IN HEART, SIGNAL = 9.1; EXPRESSED IN LUNG, SIGNAL =  12; EXPRESSED IN FETAL LIVER, SIGNAL = 9.6; EXPRESSED IN BRAIN, SIGNAL =  11; EXPRESSED IN BONE MARROW, SIGNAL = 9.5; EXPRESSED IN HELA, SIGNAL =  10
aaaggcaaaggacatggaagatttatactccctgatttcaatcttaatattatgccttaataatcaagacagcggagcattcatggaagaatagatgtatagatcagcagaacagaattgtaacagaattacaaacattatgggtaattagcttttgataaaagtgccaaaacaattcaatgggaaaaggatacacttgtatccagaatatataaagaactcttagaacttaagaagacaaaaaaaattaaacatgggcaatataattaaatagacatctcactaaagtagacctatgtaaatggctactaagcacaggaaaagatgctcaatgttgttagtcattagggaaatgcaaattaaaatgaaaacaagttgctatcacacatccacaaaggtgagtataatgaaaaaacagatgtgaaaaagattaaagaaactagaagttcatacgtggctggtgggaatgtacaaggg

SEQ ID NO: 5910 - DNA, 461 bp, Homo sapiens
  MAP TO AC002528.1; EXPRESSED IN PLACENTA, SIGNAL = 1.3; EXPRESSED IN LUNG, SIGNAL = 1.6; EXPRESSED IN HEART, SIGNAL = 1.6; EXPRESSED IN FETAL LIVER, SIGNAL = 1.7; EXPRESSED IN BONE MARROW, SIGNAL = 1.5; EXPRESSED IN ADULT LIVER, SIGNAL = 1.4; EXPRESSED IN BRAIN, SIGNAL = 1.9
gcttctctttaccttgacccacaaatattctaagagatttgtctgcaagagagtttcaacaaatgtttgtcctttgaccactgttctgtattgaaccctagggtgagcctggtccagctggctccaaaggagagagcggtaacaagggtgagcccgtaagtagctctatcatcacacttttataaagttaattgtttttctcattccagtttctccagctggacatagtattaaaattatttttttactccctcttcttttgttcttttcattaaacagggctctgctgggccccaaggtcctcctggtcccagtggtgaagaaggaaagagaggccctaatggggaagctggatctgccggccctccaggacctcctgggctgagagtaggtttcaaatgctcccaacaccctaacacaccagaggcagattatgataccccttcactgggaattggtca

SEQ ID NO: 5911 - DNA, 475 bp, Homo sapiens
  MAP TO AC004874.1; EXPRESSED IN LUNG, SIGNAL = 2.9; EXPRESSED IN FETAL LIVER, SIGNAL = 3.1; EXPRESSED IN BRAIN, SIGNAL = 3.3; EXPRESSED IN BONE MARROW, SIGNAL = 2.8; EXPRESSED IN PLACENTA, SIGNAL = 3.2; EXPRESSED IN HELA, SIGNAL = 2.5; EXPRESSED IN HEART, SIGNAL = 3.4; EXPRESSED IN ADULT LIVER, SIGNAL = 3.1
aggttcctgctatcacagagctaacattctaactcaccacctgtagggtggtgaatctgggagaagtggggctgcatctgttaatgctgtcctccttagggtttattctcagttcttagccaaggagaagcctaagggaaccagtgattcacgccttgggacgactggatgaggattcggctgaaatcttacactatgtccagctgcagtgcctgagcttttatccttcctctgactctgcatttccgatctctccttccccaggtgtaaggagctcaagtactccaaggacctgccccagatatccatcatattcatcttcgtgaacgaggccctgtcggtgatcctgcggtccgtgcacagtgccgtcaatcacacgcccacacacctgctgaaggaaatcattctggtggatgacaacagcgacgaaggtacaggggtggctgacctgtgcacaggacatgatgacagcagg

SEQ ID NO: 5912 - DNA, 464 bp, Homo sapiens
  MAP TO AC004167.1; EXPRESSED IN PLACENTA, SIGNAL = 1.8; EXPRESSED IN LUNG, SIGNAL = 1.4; EXPRESSED IN HEART, SIGNAL = 1.4; EXPRESSED IN FETAL LIVER, SIGNAL = 1.3; EXPRESSED IN BONE MARROW, SIGNAL = 1.9; EXPRESSED IN ADULT LIVER, SIGNAL = 2.7; EXPRESSED IN BRAIN, SIGNAL = 1.1
caaaggatagcagagcagcctctaaccaagaatgagtatatattagaaaaataggaacaataattaatatcatctgcattgaattatttttccatcttaagtcttaaaagccatagtgtactaaaaatcgcaaaattatgtttcaaaatgcttgaaacaaaaaacaaagacttcctttttaaaaagttgtataaagaataaggagaggtagagccagtgtttggggtagatggtataggattcatagacgacagaaagaaaatggatcttctcaattattattttgctttccctttcttttccatcaggaagaataattttaaagctgaaaatgcaagaacaggtctgaataagaaggaattgatgactaaggtggaaggaaataatgagggaaaacctaccaccataagtgattttgtcttgagcatttagacattatttccgtggtgttaaaagaacttgca

SEQ ID NO: 5913 - DNA, 483 bp, Homo sapiens
  MAP TO AC002432.1; EXPRESSED IN LUNG, SIGNAL = 1.8; EXPRESSED IN BRAIN, SIGNAL = 2.2; EXPRESSED IN BONE MARROW, SIGNAL = 1.8; EXPRESSED IN PLACENTA, SIGNAL = 1.7; EXPRESSED IN HELA, SIGNAL = 1.9; EXPRESSED IN HEART, SIGNAL = 1.7; EXPRESSED IN FETAL LIVER, SIGNAL = 1.6; EXPRESSED IN ADULT LIVER, SIGNAL = 1.6
tggtactgtattcctcattatttcagtgaaaaaaaaaaactatcgcacagaagctttttttttctttcgtttgaaacccattcattggcatttagtatgaatagtagatggagaatcagagtcatgctgaaaatgattaaccatcagtcaaagtgactttcatgtcttatccatgtaagaaatgtgctcttaattagaatttcccttcggctttttaacaaacatacagagtttcaggaatgagaagaggaaattgcagctgatgagattttcaggatccctagcagagcaatttctttgtggattttggaaagcattctgtagaaggacaacatcgttaggctcttcatagagtttcttagaagcctcagtattctgagcaacacgtgattgcgcccagatctgaggatggggaactctgaaatgaaacacagctgtcctgatatttttaagaaaattgtaagggagacactttgtgcaatc

SEQ ID NO: 5914 - DNA, 489 bp, Homo sapiens
  MAP TO AC005585.1; EXPRESSED IN PLACENTA, SIGNAL = 4.9; EXPRESSED IN LUNG, SIGNAL = 5.4; EXPRESSED IN HEART, SIGNAL = 4.9; EXPRESSED IN BRAIN, SIGNAL = 4.3; EXPRESSED IN ADULT LIVER, SIGNAL = 4.9; EXPRESSED IN FETAL LIVER, SIGNAL = 5.7; EXPRESSED IN BONE MARROW, SIGNAL = 4.6; EXPRESSED IN HELA, SIGNAL = 4.8
gagactcccacctccaagcccaccaccaagggcgagccagccaggagccctgaatatctgactaccaagttaatcaagccctcctccccagtgctaggcttgccccagacctgccaagagccagagagcatccctgtcagagcctccctgcagttcccagccacgaccttcaagaacaccaggagtgtccactcccagaccattgagacggccctggtgccctgtgacgcatgcgccagcgtccagggaagcctgcagaaggtgggcaaggtggtcatcagcctgtgtcagagccagaacctgccctcgtccttaggccagttccagcaactggtgcaggacagcatggggctcaggccactgccggctgccaccgtgggccgctgggcagcagagcagaggaaagacctgacgcgcctcagtaagcatgtggaggccctcagggcccagctggaggaggctgaagggcagaaggatggcctgaggaag

SEQ ID NO: 5915 - DNA, 457 bp, Homo sapiens
  MAP TO AC004466.1; EXPRESSED IN PLACENTA, SIGNAL = 5.6; EXPRESSED IN LUNG, SIGNAL = 7.1; EXPRESSED IN HELA, SIGNAL = 5.2; EXPRESSED IN HEART, SIGNAL = 5.1; EXPRESSED IN BRAIN, SIGNAL = 5.6; EXPRESSED IN FETAL LIVER, SIGNAL =   5; EXPRESSED IN BONE MARROW, SIGNAL = 4.9; EXPRESSED IN ADULT LIVER, SIGNAL = 5.1
caaaagcccagagagtttgcccaaggtcccacaacttgttcttgagaaccccgactccctaaagcccagatcatcccccctctcaaatcctctttttcttcttcttgcatgtgccttccttttcaccatagcaaacccaatttttcttcacacagtggagtgggagtctccgtggcaggaggacccccgagggagccccgagtgttaaagcccctcctatcttggacctttacccccaaccgcaggaggaaggtttcctggaggagctgctggccagccctcctgactccccttcccaccccacagtcattctgacagatgaggaagtgcagaggaagcgggagatgatcctgaagcggaaggaggaggaggccttgaaggacagtctgcggcccaagctgtctgaggagcagcagcgcatcattgccatactgctggacgcccaccataagaccta

SEQ ID NO: 5916 - DNA, 473 bp, Homo sapiens
  MAP TO AC006330.2; EXPRESSED IN PLACENTA, SIGNAL = 1.2; EXPRESSED IN LUNG, SIGNAL = 1.7; EXPRESSED IN HEART, SIGNAL = 1.6; EXPRESSED IN BRAIN, SIGNAL = 1.4; EXPRESSED IN FETAL LIVER, SIGNAL = 1.6; EXPRESSED IN BONE MARROW, SIGNAL = 1.3; EXPRESSED IN ADULT LIVER, SIGNAL = 2.1
gttcacgaaggtggatggtgcttgttttatagctaaggaaacacatttggaaggtcagtcattgtccagggtacctgcctagacaatcacagtgctgggacccctgcctggcaccctctggctctgagcctcgcactcctgaccgcagctcagtcccacccacctgctcagcaaggcgtccccagcaaggcacccagaacccgcatgtgtagagagactcctcggcagggctgatggagcgacaggtcggggtttctctaacaagcactttcctggaaacttcattttaacatgttcccatctccctcagaaaaagggcatcgagaagaacctgggcatcggcaaagtctcctcttttgaggagaagatgatctcggatgccatccccgagctgaaggcctccatcaagaagggggaagatttcgtgaagaccctgaagtgagccgctgtgacgggtggccagtttccttaat

SEQ ID NO: 5917 - DNA, 470 bp, Homo sapiens
  MAP TO AC004216.1; EXPRESSED IN PLACENTA, SIGNAL = 3.6; EXPRESSED IN LUNG, SIGNAL = 1.8; EXPRESSED IN HELA, SIGNAL = 2.1; EXPRESSED IN FETAL LIVER, SIGNAL = 1.9; EXPRESSED IN ADULT LIVER, SIGNAL = 1.7; EXPRESSED IN HEART, SIGNAL =   2; EXPRESSED IN BRAIN, SIGNAL = 2.2; EXPRESSED IN BONE MARROW, SIGNAL = 1.8
aaaccagaaggaggagaggcaccagccagaaggaacagcaaatgcagaggtggaaacagagcgatcagtgtggtgtggctggagccaagagagccgggggagagtagagatgaagaaaggaagcaggaaaagatgagatgggagagcagggcacggtcagatcactccgtcccttgtgggctgtaggaagagtctgagttttaccctcaaagcaataggaagccattgatagatttcaagcgaggctgcaaaagtggaacaactattccagtggttcaaggcatgctttgggagctacgttagctgctctgtcaccatggacaccaggaccattggcccactgcgtgtcagacttgtgctggggttgattttccagaaagtggggctggttatgtttcccatcactgagatgcttttgaacaataggcatcaagatgacaggttggtttggggggcaggtctgtaattta

SEQ ID NO: 5918 - DNA, 467 bp, Homo sapiens; identical to SEQ ID NO: 5409
  MAP TO AC006007.1; EXPRESSED IN LUNG, SIGNAL =   1; EXPRESSED IN BRAIN, SIGNAL = 2.1; EXPRESSED IN HELA, SIGNAL = 2.1; EXPRESSED IN ADULT LIVER, SIGNAL =   2; EXPRESSED IN BONE MARROW, SIGNAL =   2; EXPRESSED IN FETAL LIVER, SIGNAL = 2.2; EXPRESSED IN HEART, SIGNAL = 1.8; EXPRESSED IN PLACENTA, SIGNAL = 1.9

SEQ ID NO: 5919 - DNA, 486 bp, Homo sapiens
  MAP TO AC005383.1; EXPRESSED IN PLACENTA, SIGNAL = 3.2; EXPRESSED IN ADULT LIVER, SIGNAL = 3.4; EXPRESSED IN LUNG, SIGNAL = 3.9; EXPRESSED IN HELA, SIGNAL = 2.9; EXPRESSED IN HEART, SIGNAL = 2.9; EXPRESSED IN FETAL LIVER, SIGNAL = 2.8; EXPRESSED IN BRAIN, SIGNAL = 3.5; EXPRESSED IN BONE MARROW, SIGNAL = 2.9
aggaaagatcctgagcctcctaaaaccctagagtgtattagcaagtgcattatctcttaagtcaggcatgcaggatgtaggtgtataattgaatattgaagatactgagaattgctgacctgaaagtaaacttggcaaagacctggtgctgggtactactaaagcaaaaatgaaacttgttcataggattctttttactgctgtccttattttctagatatacagtctagaaacaaacattggtctgaagaagccataacaagattccagatgtgtgttgctgggataaaattgcaagccagagtggttgaagtcactgaaaatgggataggagttgaactcaccgatctctccacttgttatcccagaataattagtgatgttctgattgatgaacatctggttttaaaatctgcttcaccacataaagacttaccaaatgacagacttgttaataaacatgagcttcaagttcatgtacaggga

SEQ ID NO: 5920 - DNA, 353 bp, Homo sapiens
  MAP TO AC004470.1; EXPRESSED IN BONE MARROW, SIGNAL = 1.3; EXPRESSED IN ADULT LIVER, SIGNAL = 1.5; EXPRESSED IN PLACENTA, SIGNAL = 1.8; EXPRESSED IN HEART, SIGNAL = 1.4; EXPRESSED IN LUNG, SIGNAL = 1.8; EXPRESSED IN HELA, SIGNAL = 1.8; EXPRESSED IN FETAL LIVER, SIGNAL = 1.4; EXPRESSED IN BRAIN, SIGNAL = 1.4
ttgtcttctctgctagcttccctccatgccccactcagagtcattttttaaagtttttgcttattttcatattgtttcttttaaataatatggccgaactcaaacttttgctatttcaattagtgctgcaatcaactctgggcatatagtagtccatatttttgccggtatatctttgggatagattcgtatcttggcagaaatgctgggtcaaaagctaaaagaataaacagtgttgtctgatactgtcgacttctcttcaacagccgttgtatcattatcaacagcaatgtatgagagccgtgtttccacacagactggaaagcagactatgctggattttgtcaagcaga

SEQ ID NO: 5921 - DNA, 465 bp, Homo sapiens
  MAP TO AC004977.1; EXPRESSED IN LUNG, SIGNAL =  11; EXPRESSED IN FETAL LIVER, SIGNAL = 5.4; EXPRESSED IN BONE MARROW, SIGNAL = 0.89; EXPRESSED IN PLACENTA, SIGNAL = 0.94; EXPRESSED IN HEART, SIGNAL = 1.7; EXPRESSED IN BRAIN, SIGNAL = 0.79; EXPRESSED IN ADULT LIVER, SIGNAL =  16
gcattcacaacttattgccgtcagagtcaatacatgggtgaggtggggattgggcaagagggaaagcgtcagccttccctgatattctggaaagtctcccggggctgggggtgggcaggtacagagcttcgagctctgctgatcgctgacatccaggggtgggggtaggaagagacctgggccgggagaagtccacctcaagcctgcagtgtcacactctatccctccacagatcctccctctgtggtggtcaccagccaccaggccccaggagaaaagaagaaactgaagtgcctggcctacgacttctacccagggaaaattgatgtgcactggactcgggccggcgaggtgcaggagcctgagttacggggagatgttcttcacaatggaaatggcacttaccagtcctgggtggtggtggcagtgcccccgcaggacacagccccctactcctgccacgtg

SEQ ID NO: 5922 - DNA, 488 bp, Homo sapiens
  MAP TO AC005535.2; EXPRESSED IN PLACENTA, SIGNAL = 1.2; EXPRESSED IN LUNG, SIGNAL = 1.5; EXPRESSED IN HEART, SIGNAL = 1.3; EXPRESSED IN FETAL LIVER, SIGNAL =   2; EXPRESSED IN BONE MARROW, SIGNAL = 1.4; EXPRESSED IN BRAIN, SIGNAL = 1.1; EXPRESSED IN ADULT LIVER, SIGNAL = 1.4
tgccaactgatagcaagagctctataccattggtggcagaatcatggactgggattttacaaattctgccatcagactattaatgcaaacaaggtaaccctcaattaacttcttgacctgctaatatatgatttcacatttgagttagagaacacacacagcagtcagtgcattaataacacaggcgtgaacactgatagcgtccacacagcaaagcaaaaacccagcacacacgctcctgatatcacgctgtaggagcaaaggtgcacatcctagccaccagggcagggccaggacacttggttacatgcaggaggctccagtggaggcactgagcaggctccacatcgcacagtacccaaatcagagggcccactgcaacatggtgcagcagcaccaatgcatgtgtgcaaacgcgctgtaaagttagttgcagcaagccctctattaggtacagagctataaagaggaaaacagagcacacagtt

SEQ ID NO: 5923 - DNA, 498 bp, Homo sapiens
  MAP TO AC005385.2; EXPRESSED IN PLACENTA, SIGNAL = 2.3; EXPRESSED IN LUNG, SIGNAL = 2.1; EXPRESSED IN HEART, SIGNAL = 2.2; EXPRESSED IN BRAIN, SIGNAL = 2.5; EXPRESSED IN BONE MARROW, SIGNAL = 2.3; EXPRESSED IN ADULT LIVER, SIGNAL = 2.3; EXPRESSED IN HELA, SIGNAL = 2.2; EXPRESSED IN FETAL LIVER, SIGNAL = 2.6
gcagctcatacattccccacagcactgccgctttccagaaggtttcatgcttggtctttcccgagtccaagctggcatcggagaagaacaggaatggctctcagtgcttggcatagccccgtgcaaactccagtgagtgtgtgcttgaaggacaggtgccacatcagcactggatcggcttcctagggctgcagcagcaaaatgccacaaaccagatggcttaaactgacagaaagttatactcttgcagttctggagtctagaagtctaaaatgaaggggccagcagggccgtgcccccactgaaggccataggggagaattcttccttcagtcttctggctctggttgcctccaggccttccttggcttgtgactgcatcactccaatctctgcctctgtctttactttgctttccttctgtgtctgtgtcttctctttttctgtctcctgcaagaacacttgtcatgagatttagggtccgcccatgtaatacaa

SEQ ID NO: 5924 - DNA, 454 bp, Homo sapiens
  MAP TO AC004585.1; EXPRESSED IN PLACENTA, SIGNAL = 1.6; EXPRESSED IN LUNG, SIGNAL = 1.7; EXPRESSED IN HEART, SIGNAL = 1.8; EXPRESSED IN BRAIN, SIGNAL = 1.6; EXPRESSED IN HELA, SIGNAL = 2.1; EXPRESSED IN FETAL LIVER, SIGNAL = 1.8; EXPRESSED IN BONE MARROW, SIGNAL = 2.1; EXPRESSED IN ADULT LIVER, SIGNAL = 2.5
ttactttgcagaatgctgtcctaggacaccaaagacaattaatcttaacggtaataaccacatcttgataaataatgtaagcatttaaaggttaaaatactgaatgtcaatatcatgtcaaatttagtactgggaatcaccctcagtggcaggtaccagaatacttgcacttagaaagaaaaacctaaattaaagacagccgtacaaagtcttggcactgcctctgcgtttgttgctagtgggttacctgtctccatcggaatgttctcgtcgtctttcttctcctcgcctttgttagctgcttgttcttcctcaggaacgatgctgctctgactgcgctcagcttgctctgcggcctccttctccctttcctcctgccttttgcgggcctgttcctctgcctgtgcaatctcagctgcaattttctccatatccacttctactttcagaccgc

SEQ ID NO: 5925 - DNA, 470 bp, Homo sapiens
  MAP TO AC006203.1; EXPRESSED IN PLACENTA, SIGNAL = 8.1; EXPRESSED IN LUNG, SIGNAL = 6.6; EXPRESSED IN HEART, SIGNAL = 8.4; EXPRESSED IN BRAIN, SIGNAL = 8.4; EXPRESSED IN HELA, SIGNAL = 8.2; EXPRESSED IN FETAL LIVER, SIGNAL = 8.7; EXPRESSED IN BONE MARROW, SIGNAL = 8.9; EXPRESSED IN ADULT LIVER, SIGNAL = 8.8
tttctcttgcatgttgcctgtttttagtatataaaatataacaatttctaataactgtttaattcaatatctcaacatttttcttttctacctttgataaaggtagggataaaggttctctgggaatctttccctacctttcttataatactgggaacgcagtattataaaaatagtattcacctgcatgttttctcagtagcttgtttttgtttttccgtgtattctactaacccacatgttgtaattgttcccatttaactattcagtgcatgaggagtaaacagtggatggtgaagaatagagatgtagcctcttctttaaccccagttaaccaacttagtgaagaagtcttttttcccaaatatgtaacacagatgaaggtggagcttagtaaacgggaaagtggcaataaagaacgggggaagtaagaagacagctgagcctagaagtttcataatagatcttga

SEQ ID NO: 5926 - DNA, 450 bp, Homo sapiens
  MAP TO AC002456.1; EXPRESSED IN HELA, SIGNAL = 1.9; EXPRESSED IN BRAIN, SIGNAL = 1.6; EXPRESSED IN BONE MARROW, SIGNAL = 1.9; EXPRESSED IN ADULT LIVER, SIGNAL = 1.6; EXPRESSED IN PLACENTA, SIGNAL = 1.9; EXPRESSED IN HEART, SIGNAL = 1.7; EXPRESSED IN FETAL LIVER, SIGNAL =   3; EXPRESSED IN LUNG, SIGNAL = 1.6
attgaaagtcaactctagttatggtgtttggcaaggtccctgaagtaaatgctcttgacctcatggagctttcaaactagaaagagggacaaagaacaaatgaacaaataaatcaagttattgcacattttgaaaagtaccttaaaaaggattatcattattattctaatttttatttatatttctttaaattagaaacaagttagtgctgctaattccttctcacaagaggagcactgaccaccacaaattagggaaaatccaagatcacatttttactttttaataatatcaaattttattttagattcaggtgacacatgtgcaggtttgttacatggctgtatcgtgtgatgctgaggtttgtggcatgattgatcccatcacccagatagtaagcttagtagccaatagtctttgaacccttgtccccttccttcccacctctag

SEQ ID NO: 5927 - DNA, 488 bp, Homo sapiens
  MAP TO AC004478.1; EXPRESSED IN ADULT LIVER, SIGNAL =   4; EXPRESSED IN PLACENTA, SIGNAL = 3.3; EXPRESSED IN BONE MARROW, SIGNAL =   3; EXPRESSED IN LUNG, SIGNAL =   4; EXPRESSED IN HELA, SIGNAL = 3.2; EXPRESSED IN HEART, SIGNAL = 2.5; EXPRESSED IN FETAL LIVER, SIGNAL = 2.8; EXPRESSED IN BRAIN, SIGNAL = 3.8
attgacaatgcaactggtcgcccaacacttctgaaaaagatataaaaggaaattaatgttgttttcatgactgctaacaaaacattcatcctgcagtccatgaatcaggagtaatttcaactctcaagtattatcatttaagaactacatttcataaggttatagctgccatagttagtgatttgtctgatgaatctgagaaacgcaaatggaaatggttctgaaaaagattcatcattctaaatcccatgaagaacattcatgattcatgggaggaggtcaaaatatcaatattgacaagaacttggaagaaggtgattcccccgctcatggatgactttgaggggttcaagacttcattgaaggaagccactgtagatgttatggaagtagcaaaagaactagacttacaagtggagcttgaggatgtgactgaattgttgcaatatcatgataaaacttgaatggatacaaagttgcttcttatg

SEQ ID NO: 5928 - DNA, 465 bp, Homo sapiens
  MAP TO AC005598.6; EXPRESSED IN ADULT LIVER, SIGNAL =   7; EXPRESSED IN PLACENTA, SIGNAL = 7.1; EXPRESSED IN LUNG, SIGNAL = 7.4; EXPRESSED IN HELA, SIGNAL =   7; EXPRESSED IN HEART, SIGNAL = 7.2; EXPRESSED IN BRAIN, SIGNAL = 7.3; EXPRESSED IN BONE MARROW, SIGNAL = 6.7; EXPRESSED IN FETAL LIVER, SIGNAL = 6.7
aaggaaaaaggtacctcggccgagggacacagacaaaggcagggaggtaggggcagtaggctactctttgggagcttttaaaaatcccactaccactttggggccaaatacaaagttaaaggacagagaaaagtcctcgtttccattattcagcccatggcagtgaaaactgagcttctggagccctgagacaacactcagaatgaacttataaatgttactcgtaggctttgtcttctaaatctttcttaaatcttcttcttcttcctcttcctcctcctcttcttctcctcctcctcctcctttttcttctttttcttcttcttttcctcctcctcctccttcttcttcttcgtcttcttcgtcttcttcttctttttctctctctctctctccttccaactggtctccttgttcccattccatcctccaaacctccaagcatgatgtgatgtgacccaacca

SEQ ID NO: 5929 - DNA, 476 bp, Homo sapiens
  MAP TO AC005393.1; EXPRESSED IN PLACENTA, SIGNAL = 5.4; EXPRESSED IN BONE MARROW, SIGNAL = 5.2; EXPRESSED IN ADULT LIVER, SIGNAL = 5.4; EXPRESSED IN LUNG, SIGNAL = 4.5; EXPRESSED IN HELA, SIGNAL = 5.4; EXPRESSED IN HEART, SIGNAL = 4.8; EXPRESSED IN FETAL LIVER, SIGNAL = 5.5; EXPRESSED IN BRAIN, SIGNAL = 5.1
ccaggaaggtttcctcacacagtgagaaggggtggggtgtcagaaacagactcagtcacaaccacacctgtttggaggcctgtgtctgtgatgcagcagaaacgacagtgagggaggtactggaggaggaaggggtcaccagggaaatgcacagataaagacgatggagtgaggatgagtggtgtgagttccagcctccatgcttctcatgaagccttttctccactgtgcagaatctaccaggaaggtgtgcattctcctaacctgtgcaatggtaaaaagctggagatcctgggggcaaggcacttggccttgaaagaaaatcctcctcctccttctccagtggttctgggagagcatagatcttgatcattcgcaggacctggggacagaagtagagaaaacacttgtgtcttctttacccaccctcagatcccttggctctgccaggtgagagccactcccactctgtctct

SEQ ID NO: 5930 - DNA, 471 bp, Homo sapiens
  MAP TO AC004590.1; EXPRESSED IN BONE MARROW, SIGNAL = 2.2; EXPRESSED IN ADULT LIVER, SIGNAL = 2.5; EXPRESSED IN LUNG, SIGNAL = 2.3; EXPRESSED IN HELA, SIGNAL = 2.6; EXPRESSED IN HEART, SIGNAL = 2.2; EXPRESSED IN FETAL LIVER, SIGNAL = 2.2; EXPRESSED IN BRAIN, SIGNAL = 2.2; EXPRESSED IN PLACENTA, SIGNAL = 2.1
tgagtctggagtttccccactcaggcctcatgctcctggtgctcacaaatccctgccctgcccagtcccttccccattcttggttctgccctgctcaccctatatgcctcgagcactcgtgccatctctcccttcctgggccctctccctggagagcccactccccagtctcacccctgttccccttcccatcctgcagccccctgagcgtggacctggagcgctattaccagacagagaacgaggatgagagccccttcatctgctcccagccacgcgagaacggcatgcggtcctgcagaagcgtgcccacgctgcgcggggacgggggcggtggcccaccttgcggtctggactatgaggcctacaacagctccagcaacaccacctgtgtcaactggaaccagtactacaccaactgctcagcgggggagcacaaccccttcaagggcgccatcaactttgacaaca

SEQ ID NO: 5931 - DNA, 497 bp, Homo sapiens
  MAP TO AC006207.5; EXPRESSED IN ADULT LIVER, SIGNAL = 2.3; EXPRESSED IN PLACENTA, SIGNAL = 2.4; EXPRESSED IN HEART, SIGNAL = 2.3; EXPRESSED IN LUNG, SIGNAL = 1.6; EXPRESSED IN FETAL LIVER, SIGNAL = 2.6; EXPRESSED IN BRAIN, SIGNAL = 3.1; EXPRESSED IN BONE MARROW, SIGNAL = 2.2; EXPRESSED IN HELA, SIGNAL = 2.3
caaaagaaacggaaggtatcagaaaagaactccttaacctaactcctcttttcgtcctctacctctacttatctgtaaacataactggaccacccttctctatctcctttctgacatatgttctcagaatttcatctcaccacacttcttcaggagctagaatccatcaactgcccttccactctttctctaagtcttttaaattctccttctccataggtcctttccaattacaatgttcagttctctcccatgattaaattttaaaaacataacataacaataatcccacattagctgtcttctcacatctctcatcctcctcactgccaagcttcttgaaaaagttgtcaacatttgctgtatacacaatatgatgtctaccaaccttgccttcatctaagttaccaatggccttcttattgaaaaatgcaaaggaacttttcaaatttatcttacttgacatcttttcagtatgtaatcgtacagatggcacc

SEQ ID NO: 5932 - DNA, 494 bp, Homo sapiens
  MAP TO AC006358.2; EXPRESSED IN PLACENTA, SIGNAL =  31; EXPRESSED IN LUNG, SIGNAL =  36; EXPRESSED IN HEART, SIGNAL =  27; EXPRESSED IN BRAIN, SIGNAL =  33; EXPRESSED IN FETAL LIVER, SIGNAL =  28; EXPRESSED IN BONE MARROW, SIGNAL =  31; EXPRESSED IN HELA, SIGNAL =  31; EXPRESSED IN ADULT LIVER, SIGNAL =  28
tcccacgtagctgggactacagacatggaccactgcacccagccctctattacatttcattttaaagtaaactattattttacagtacttgactcataattgatttcatgacccatgagtgggtcacagtttacagttttaaaaacactggtttagattttcattccctaaagcctggtttctcagcttccaattatagcaaatgcctttgtgttgcagctactagggctgcttgttaaatcgatgtctcttccctttcaccctttgagaagacaccggcccctcctagcaatgtctccgtgcttttcccgggtgccccagcccttcatgctgactccgcttgttctcacacaccagttttcccaaagcagggggcatgaggaccacggtgggatgcaagatgctttcaggcggtacaaggatgaacgttttcatagcgacatttttgtatatcatggaaaaatatatctgaaacagcaaaacctatgatttca

SEQ ID NO: 5933 - DNA, 476 bp, Homo sapiens
  MAP TO AC005544.1; EXPRESSED IN PLACENTA, SIGNAL = 1.7; EXPRESSED IN HEART, SIGNAL = 1.9; EXPRESSED IN FETAL LIVER, SIGNAL = 1.7; EXPRESSED IN BRAIN, SIGNAL =   2; EXPRESSED IN BONE MARROW, SIGNAL = 1.8; EXPRESSED IN ADULT LIVER, SIGNAL = 1.8; EXPRESSED IN HELA, SIGNAL = 1.9; EXPRESSED IN LUNG, SIGNAL = 1.8
tgtaagcatggaattgctggatcatatggtagttctctgcctaaatttttgaagaactgccacactgttttccacagcagctgtaccattggacattctcaccagcagtgcataagggtttcagtttctccacatcttcgccaatgtttgttatttagcaataacattttaaaaaatgcaatgcttttattatatcagtggttcagaatgacaatcttaagtcttttcttaaaaaattttctttgtaggaaagcaattcagagttttgtttcttagcacagtacgtacaagacatacttgtaaacataaacagacaccaattaaaaagaaagagcaacttctggaagattccacagaggacttagattatggttttttatctaactacaagcttctcaatactgccatcacaagagcacaatccctggttgctgtggtgggtgatcccattgctctgtgctctattggaagatgca

SEQ ID NO: 5934 - DNA, 495 bp, Homo sapiens
  MAP TO AC004593.1; EXPRESSED IN ADULT LIVER, SIGNAL = 3.8; EXPRESSED IN BONE MARROW, SIGNAL = 4.3; EXPRESSED IN PLACENTA, SIGNAL = 3.7; EXPRESSED IN LUNG, SIGNAL = 4.7; EXPRESSED IN HELA, SIGNAL = 4.1; EXPRESSED IN HEART, SIGNAL = 3.5; EXPRESSED IN BRAIN, SIGNAL =   4; EXPRESSED IN FETAL LIVER, SIGNAL = 3.6
gtcaggatgacaaaggcagggctcctgtggcctggcccatgtgacccccagccagtcctaaatcttggggcgtgggaaggaataatcacgaggcaaggaggagacggaacaccctccacactgagaagcctttgttagaaccttccagccatgaggtcagaggaagaagctgagtgatctcttaaaaaaatatgtatatatatattagttgggggttttctttttctcttgtctttcttttcaatctaggtttgtgttttatagactgtgtgatacaggcaatgggacaactgggcagttagttggaactgaccttgcagacagccaagacggcaagctgggtgactcaagttcagaatgggttttttataaaaacaaacaaacagccatgattgatgtctcccttctcatcttttatatatccttttttatgggcagttgtggagaattggactggtttactgacatcatttctctctttgcaggctgatttca

SEQ ID NO: 5935 - DNA, 390 bp, Homo sapiens
  MAP TO AC004896.1; EXPRESSED IN ADULT LIVER, SIGNAL = 5.4; EXPRESSED IN PLACENTA, SIGNAL = 4.7; EXPRESSED IN LUNG, SIGNAL = 5.4; EXPRESSED IN FETAL LIVER, SIGNAL = 4.6; EXPRESSED IN HELA, SIGNAL =   5; EXPRESSED IN HEART, SIGNAL = 5.1; EXPRESSED IN BRAIN, SIGNAL =   5; EXPRESSED IN BONE MARROW, SIGNAL = 4.6
taaattacctgccctccaccccacctcatctgcagttaggtatctactagacacctcaaaataaataaataaagcatatttttgcctctgaaatttttcttctcagtcgtcctcaatcacttaatggccactccattcttctggcttttcaggcagaaatgatcttggactcctcacatccttcatctaatcttacctaaaatcttaccatctctactgctattaccccaatccaagacactatcatagctaccatctctactgctgttaccctaatccaagacactatcatagctaccatctctactgctattaccctaatccaagacgctatcatagctaccatctctactgctattaccataatccaagacgctattgtagctacca

SEQ ID NO: 5936 - DNA, 482 bp, Homo sapiens
  MAP TO AC005610.1; EXPRESSED IN PLACENTA, SIGNAL = 3.5; EXPRESSED IN ADULT LIVER, SIGNAL = 4.3; EXPRESSED IN LUNG, SIGNAL = 4.3; EXPRESSED IN HELA, SIGNAL =   4; EXPRESSED IN HEART, SIGNAL = 3.5; EXPRESSED IN FETAL LIVER, SIGNAL = 3.3; EXPRESSED IN BRAIN, SIGNAL = 7.5; EXPRESSED IN BONE MARROW, SIGNAL = 3.2
cacgctagaaaggtgctgcccactgtcatatttaggatcactttagctttctactgatttccaagttaacttgcgattcatttagctttctaaaatagctcttaatatttccttactggttatcacagccttcctatggaacaggctttaacaaactaaatttgcaggagaaaaaaacaaaacagaaagaaatgtcttgtggtatgcatgcacatgcactgttcccggagcgcctgtgccctgctcctcacacccaggagtcgggggaggccgggtagtggctcgtttcatagttcagttcactgtagggacgggcagctgagtagaagtcaacgtagttgccggtggacttgagacccaggtgcatggtgtactcgctggcgggagggcgatggtggacctggtcctcgaagaaggactcatcgtaatttcttgtggaattctgaaatggctggtaggtctcgtaatcttttctgctgggc

SEQ ID NO: 5937 - DNA, 500 bp, Homo sapiens
  MAP TO AC006368.2; EXPRESSED IN BONE MARROW, SIGNAL = 1.7; EXPRESSED IN ADULT LIVER, SIGNAL = 3.2; EXPRESSED IN LUNG, SIGNAL = 1.2; EXPRESSED IN HELA, SIGNAL = 1.9; EXPRESSED IN HEART, SIGNAL = 1.8; EXPRESSED IN FETAL LIVER, SIGNAL = 2.4; EXPRESSED IN BRAIN, SIGNAL = 2.2; EXPRESSED IN PLACENTA, SIGNAL = 1.6
ccagcccctacaatgatgtgagtcaattattttaaagatatgtctgtctctctctctctctccctctccacccccctccttccctctactcacacacatacatataaatggggccaatcatttatatgtgtgtgtgtgtgtgtgtgtgtgtgtgtgtgtgcaccaacctaacaccactcctttgttgcaaatgcaatgattctgataccaaaagatctgagaacacttgccccaaatcccacagctggtctcggaaaagtgagatgtagaacccaagtcctccaccacaaaacaaaagctctttccactgctttaatttcttcacttgaagaggattcagacaccttagtttccattcttatatcatttaccttttctctggccatttcttcaaatgtccatactgagaccaaggcctagtcagggacagcaaaaagcaataggcaccctaccaaggctttttaaacatcctgcaaggtggtttgggtcaaaggcaggta

SEQ ID NO: 5938 - DNA, 460 bp, Homo sapiens
  MAP TO AC004995.1; EXPRESSED IN ADULT LIVER, SIGNAL = 5.8; EXPRESSED IN PLACENTA, SIGNAL = 3.7; EXPRESSED IN LUNG, SIGNAL = 4.4; EXPRESSED IN FETAL LIVER, SIGNAL = 5.6; EXPRESSED IN BONE MARROW, SIGNAL = 4.6; EXPRESSED IN HELA, SIGNAL = 5.2; EXPRESSED IN HEART, SIGNAL = 4.6; EXPRESSED IN BRAIN, SIGNAL = 2.5
tttctttcccacttggttaggaaatactaagaaaaagaggtgtgtgtgtgtgtgtgtgtgtgtgtgtgtgtgtgtgtgtttgttttgttttgtttttcctctcaagctgttctttatttcagggagagggcagggaagggggctcagtctttcttggcagcggctttcctcatggcggccaggacgttgctttgctcctcccgcttcctcttggcgcggatgtgcgcccacacccttttcttgatgaacttgaggacccgtttgtctttggagacctttcagtaactccttggcgtgctgcttgtacggggcgaagccacatgcctccgggatcatgtcccgcacaaacttggtgtgtttggtcagacgcccgcggcggcggctgtgcctgggctcgctcacgttcttggtcaccttttggcccttgttgaggcccacggccatagggtagcgcagagcc

SEQ ID NO: 5939 - DNA, 471 bp, Homo sapiens
  MAP TO AC005549.1; EXPRESSED IN PLACENTA, SIGNAL = 2.9; EXPRESSED IN LUNG, SIGNAL =   3; EXPRESSED IN FETAL LIVER, SIGNAL =   3; EXPRESSED IN BONE MARROW, SIGNAL = 3.2; EXPRESSED IN ADULT LIVER, SIGNAL = 2.9; EXPRESSED IN HELA, SIGNAL = 3.2; EXPRESSED IN HEART, SIGNAL = 3.5; EXPRESSED IN BRAIN, SIGNAL = 3.4
gtggcaagcagtgcaaaaagataaaaatgttagctagaaagctgtcactgtccccattcccagccttctcaccctgctggatagtgatctaaccactgctcctcaagcttcaatgtgggttgcaattcctggggaacttgttaacatgcagactttggttgaatgggtctgggatggggatgaaatcctgcatgtttaacaagctccagggtgatgcagatgctgcctcattggggactgcactgtgtgtagcaagatgtagagaacaatgacaatatgcatggagcacctactccgtgccacaactttgctgagctctttgtacgtacgtttctattcaatgatctcaacagcaaagaggcagttacggttgttatccctattttactgataaaggaactagatttcagggaggtaaggtagtttattctaagttacatagacattttagcctggtctctgaatttttca

SEQ ID NO: 5940 - DNA, 459 bp, Homo sapiens
  MAP TO AC004905.1; EXPRESSED IN PLACENTA, SIGNAL = 2.7; EXPRESSED IN HEART, SIGNAL = 2.6; EXPRESSED IN FETAL LIVER, SIGNAL = 3.7; EXPRESSED IN BRAIN, SIGNAL = 2.8; EXPRESSED IN BONE MARROW, SIGNAL = 2.7; EXPRESSED IN HELA, SIGNAL = 2.6; EXPRESSED IN LUNG, SIGNAL = 2.2; EXPRESSED IN ADULT LIVER, SIGNAL = 2.9
cagcacaaaaccacacatccaatcacacgcagacctcagagagccttgagagaaaagacagggtcagtggagattctgcaaaaaatgcagaatttggaggagaaagatggagaaaatgaaacccaccgcatcttagcaaaaaagatctttaacctcagtcctggatttttggcttcagtacaagggaacatcagcccaagagcctgtgtgtgaacgcatttttcatatagagagtgtggtgcattggcctgtcccggaccggggaggggatggcagcaggggcacctacctccttcaaactctgtttggcagttccccgaggtctcattcaggctctcttcctcattgataatgatgttctcaatgtccttcatcgttaggtggtctcggaaggcatgatagagaatgtgcttcaactcttccagagttatcctttgcatgtcaaactgtggagataaa

SEQ ID NO: 5941 - DNA, 491 bp, Homo sapiens
  MAP TO AC005295.1; EXPRESSED IN PLACENTA, SIGNAL = 1.5; EXPRESSED IN HEART, SIGNAL = 1.8; EXPRESSED IN FETAL LIVER, SIGNAL = 1.9; EXPRESSED IN BRAIN, SIGNAL = 1.7; EXPRESSED IN BONE MARROW, SIGNAL = 1.6; EXPRESSED IN ADULT LIVER, SIGNAL = 3.4; EXPRESSED IN HELA, SIGNAL = 1.7; EXPRESSED IN LUNG, SIGNAL = 1.6
gtgttgtgcaatggagcttggaacatatgccataggcatgagcacattttatttattttttaatttatttttatgtatttttttgtagacgtggggtcttgctatgttgcccaggcgggtttcaaacttctgggctcaagcaatccttccgcctcggcctctcaaagtactgggattataggcatgagccaccttgcctgagctggtatttcttgagtatctactttgcagaaaacaacctggaaaggaacatggttcctagatacatgcagctttctgtctagtgggaaatcccacagcacctcacccactttcctttccaaactctttagctgaatgtcccttccatataaaagtcatgtgcttaccacttttaaaaacgtacataccaatgagtccagtggcatagcctttctctttcagtatttttgcaaaagttgtctcatttgttggaagacctccagatgctccggtccactgaagaacacggt

SEQ ID NO: 5942 - DNA, 464 bp, Homo sapiens
  MAP TO AC006372.2; EXPRESSED IN ADULT LIVER, SIGNAL = 1.9; EXPRESSED IN BONE MARROW, SIGNAL = 1.8; EXPRESSED IN PLACENTA, SIGNAL = 1.5; EXPRESSED IN LUNG, SIGNAL = 1.7; EXPRESSED IN HELA, SIGNAL = 1.6; EXPRESSED IN HEART, SIGNAL = 1.8; EXPRESSED IN BRAIN, SIGNAL = 1.9; EXPRESSED IN FETAL LIVER, SIGNAL = 1.5
tgtcaaaagttccagcaaagcaaactttaaaaagcctgtcaatcactattcttgctgcggtgatacaaataatcaagacaagtttatgacactaaacttattttgcaaacaaatcagtctaactttgattattttggttagaaatgaaggcgatttgagagagaaaaattatgtttcaggagaaaactatagtacatctactgttagattctggcctctttgaggttttactacctacctgcaatctgaaatggatccagaattcttcttgttccctccaacatctgactacgactttccaaactattatttcccattttcttccattcttcaaattgggaattgttgcctttttcctgaagccttgcaagctggagctggacgacttgatataaacctcagcactcatagggacaactttcatggcatccaaactgccaaccagggagcctgtggtttaggac

SEQ ID NO: 5943 - DNA, 383 bp, Homo sapiens
  MAP TO AC005483.1; EXPRESSED IN PLACENTA, SIGNAL = 6.5; EXPRESSED IN BRAIN, SIGNAL = 6.3; EXPRESSED IN ADULT LIVER, SIGNAL = 6.8; EXPRESSED IN LUNG, SIGNAL = 6.1; EXPRESSED IN HELA, SIGNAL = 5.8; EXPRESSED IN HEART, SIGNAL = 6.3; EXPRESSED IN FETAL LIVER, SIGNAL = 6.9; EXPRESSED IN BONE MARROW, SIGNAL = 5.2
gttttgtgtggtccctctgcctttggggatggcaccaccccatggaaaggtccttggtgctcctaggggcagacgggaagcacggggagcatacctgtagaggattgggtggcgtgagcggtgaaggcaggccatgtcctggagactgactaggtttctgcggggggctggagctctgctgggttggagatggttggttctggttctgggagtgggagtggggttggtgctgctggggctgaggcgcctgttgcagctgagatgtaggagctggcggctgctgagaggcgggtggtggctgctggggtggggtgggctgcagcggctgctgctgggactgcgagggcgcctgtggggctggttgcgggtgctggttggttgac

SEQ ID NO: 5944 - DNA, 475 bp, Homo sapiens
  MAP TO AC002482.1; EXPRESSED IN PLACENTA, SIGNAL = 1.3; EXPRESSED IN LUNG, SIGNAL = 1.3; EXPRESSED IN FETAL LIVER, SIGNAL = 1.3; EXPRESSED IN BONE MARROW, SIGNAL = 1.2; EXPRESSED IN BRAIN, SIGNAL = 1.3; EXPRESSED IN ADULT LIVER, SIGNAL =   1; EXPRESSED IN HEART, SIGNAL = 1.3
ctcccctagatggctgtgacatgtctccaccatgcagctgagcctttgagatcctgaggcacatgtcacaggtcccacctcacctcagggtctagggtgggagtgctgggcttgggggtgagtaagatctacttcttcctctttgctttgcatcccatacagatgctccctgctgtattcaagctgagaaaagcctaacacatcctcaaagtctttttctttgtaactatttctagatgcactcaacgtcccatctacttgctgcttcacatttagcagtaagaagatctccttgcagaggctgaagagctatgtgatcaccaccagcaggtgtccccagaaggctgtcatgtgggtagaaaaatccctgctcacctggctcctccccactcccacattccccaatccaaagttctgccccaggagacagacgtcagactgacttgagatcttaggatgagatctagccagactg

SEQ ID NO: 5945 - DNA, 484 bp, Homo sapiens
  MAP TO AC005660.2; EXPRESSED IN PLACENTA, SIGNAL = 2.3; EXPRESSED IN BRAIN, SIGNAL = 2.3; EXPRESSED IN BONE MARROW, SIGNAL = 2.1; EXPRESSED IN ADULT LIVER, SIGNAL = 2.5; EXPRESSED IN LUNG, SIGNAL = 2.6; EXPRESSED IN HELA, SIGNAL = 2.2; EXPRESSED IN HEART, SIGNAL = 2.5; EXPRESSED IN FETAL LIVER, SIGNAL =   2
atgcatgtacgtggcttcccatggattaaaatcatgcatgtaaagttcatgagcatggtgtctgagacctgaaagtgttcaagaagtatttatggccatcattattattatattattattattaatgatatcattattacattcccaggaaattctgatctgttgggttaacatttccaaggtgccaagctgtgggtctcttcaagagaacagagacacctgggcaggatgaattggcatctttttgcccagctaatcgataagcttggaactttgtctgggacatagtagatgcttgagaacacccaaggcaggagtgaagcctgtttaccgagatggaagattctgcaggcagggaaaccacatgcccgtggaagaggagaggtgaactcgggggtgctggcaggggctggaggtgggaggtagtgaataggagatgccaaccttttcttaacaatttagttgcatcttagggaaaatgggg

SEQ ID NO: 5946 - DNA, 474 bp, Homo sapiens
  MAP TO AC004962.1; EXPRESSED IN ADULT LIVER, SIGNAL =  11; EXPRESSED IN PLACENTA, SIGNAL = 9.7; EXPRESSED IN LUNG, SIGNAL =  10; EXPRESSED IN HELA, SIGNAL = 9.5; EXPRESSED IN FETAL LIVER, SIGNAL =  10; EXPRESSED IN HEART, SIGNAL =  10; EXPRESSED IN BRAIN, SIGNAL =  12; EXPRESSED IN BONE MARROW, SIGNAL =  10
atggtgggagaccatagcaggagggtcgtgccctaaccttttctctcctgtcatgcttttgccggtcatcttgtgtgtgtgtgtgtgtgtgtgtgtgtgtgtgtgtgtgtgtgtgtgtgtgtggccatggccatgttgaatgcccagtggtttgggcagataacattggacatcatgggtgacatgcatctcaatgaatagagctgtggcctaggccacaacatcggccccttctccaggaagtcctacactcgttaccaagtcttgctaccaggaactctgcagctagctcccactaccatcgcctctcacctctgcaacctgggctgcacctgcaatggcctgagcctgtactacctggccatgctcctctccacactctggtcccacgtggctttctcccaagcgagcctctggccctgctgggggagggggctcccttggcaagcctcctgtgctgaacaggtcccaaat

SEQ ID NO: 5947 - DNA, 459 bp, Homo sapiens
  MAP TO AC005369.1; EXPRESSED IN PLACENTA, SIGNAL =  24; EXPRESSED IN BRAIN, SIGNAL =  27; EXPRESSED IN BONE MARROW, SIGNAL =  25; EXPRESSED IN ADULT LIVER, SIGNAL =  25; EXPRESSED IN LUNG, SIGNAL =  28; EXPRESSED IN HELA, SIGNAL =  25; EXPRESSED IN HEART, SIGNAL =  23; EXPRESSED IN FETAL LIVER, SIGNAL =  22
tgggatgtttgctatctgtggtgtttctgacagcaagttccgtaccatctgctcctcagtagacaagctggacaaggtaacaacccaagtacttgactttttttcccagatcccaccctgccttgggaaatggaaaacaagattgagagagagagaggtgcatgcctctatacccaccagaggaaggttagccccaggatgtaggctcatgggcagctactgctctaaaacggttccccgaggacagtacacacttgctctgtggtgcggaagctgcccaggggtccctgactggtgtctgtctgcctaggtgtcctgggaagaggtgaagaatgagatggtgggagagaagggccttgcacctgaggtggctgaccgcattggggactatgtccagcaacatggtgaggaacagaaccaagcctccccagcagccgtcccactgccctcagtcctaaa

SEQ ID NO: 5948 - DNA, 487 bp, Homo sapiens
  MAP TO AC005172.1; EXPRESSED IN LUNG, SIGNAL = 2.5; EXPRESSED IN HELA, SIGNAL = 2.1; EXPRESSED IN HEART, SIGNAL = 2.5; EXPRESSED IN FETAL LIVER, SIGNAL = 2.2; EXPRESSED IN BRAIN, SIGNAL = 2.1; EXPRESSED IN PLACENTA, SIGNAL = 2.1; EXPRESSED IN BONE MARROW, SIGNAL = 2.2; EXPRESSED IN ADULT LIVER, SIGNAL = 2.3
tgaacactacagcagagcaacctagtcaaactataaatcgaatcggatcacctctctgcataaaattgtttacttatcttcagataaatggggcttggggaggaaacttaatcagaactgcaaggcaccacatggtctgtctgctactcatgcttccagcctcacatttcccattttcttccctttattatagccaaatgaaatcacccctcttttggtcactcctacttcccagcaccacagggcctttgcataggctttctccctgcctgggactctcttctctttcttctttgcctggttaactccactcatctttgaggtctcagcttgcaccagttcctcagggaaattgtccctaacatcactaagtaaaatctcccacttaggggcttgcattgccctctttgtagctcttgtcttgatagcgttcttacacatgttggtgtggttagttactgtagtaacagcagtcactgtccacctc

SEQ ID NO: 5949 - DNA, 471 bp, Homo sapiens
  MAP TO AC005291.1; EXPRESSED IN PLACENTA, SIGNAL = 1.2; EXPRESSED IN HEART, SIGNAL =  20; EXPRESSED IN BONE MARROW, SIGNAL = 1.2; EXPRESSED IN ADULT LIVER, SIGNAL = 1.1; EXPRESSED IN LUNG, SIGNAL = 1.5; EXPRESSED IN FETAL LIVER, SIGNAL = 1.2; EXPRESSED IN BRAIN, SIGNAL = 1.3
ggtggagagaagagaagttcacctaacaatattgtctcaaaaaagtccaccttaaaaaaaacaggcacatttagatggtgaaagatagtggagtgcgtggtgattattcatttacaagaatgatgctttttgtttttcaagaattcactactctgggagtccttgactgagtgagcagacttcctagtgcatgctacaatgagcttcaggaaacccagatttgatttatgcagttttggaagaacagctcttgaaatgaatgcagtttatctcacacggcctcgcccgcacatgaacatagatggacccaatcgcatccctttcccagatgcagttaccttcggtgccgtctggctccgcctgctcctcacgctgcttctgcttgaacttcatgttcccataatgcatcacggctcccgtcagtttgtagatcccgactttctcctctgagctgaagcccaggatgtcaat

SEQ ID NO: 5950 - DNA, 401 bp, Homo sapiens
  MAP TO AC005384.1; EXPRESSED IN LUNG, SIGNAL =   3; EXPRESSED IN BRAIN, SIGNAL = 2.5; EXPRESSED IN ADULT LIVER, SIGNAL = 2.7; EXPRESSED IN PLACENTA, SIGNAL = 2.5; EXPRESSED IN HELA, SIGNAL = 2.5; EXPRESSED IN HEART, SIGNAL = 2.5; EXPRESSED IN BONE MARROW, SIGNAL = 2.3; EXPRESSED IN FETAL LIVER, SIGNAL = 2.3
acaaaatcaatggctgctcctccaagctgtggtctgagcccactgctggtcctggtggtaaccgctctgtccaccctattatctttaacagaaacatcatagctgcattaaaaaaatacaatatggacatgtaaaaagacaaaaaccaagttatctgtttcctgttctcttgtatagctgaaattccagtctaggagctcagttgagaaacagttccattcaactggaacattttttttttttccttttaagaaagcttcttgtgatcctttggggcttctgtgaaaaacctgatgcagtgctccatccaaactcagaaggctttgggatatgctgtattttaaagggacagtttgtaacttgggctgtaaagcaaactggggctgtgttttcgatgatga

SEQ ID NO: 5951 - DNA, 473 bp, Homo sapiens
  MAP TO AC005591.1; EXPRESSED IN PLACENTA, SIGNAL = 5.1; EXPRESSED IN LUNG, SIGNAL = 5.5; EXPRESSED IN FETAL LIVER, SIGNAL = 4.5; EXPRESSED IN BRAIN, SIGNAL = 5.8; EXPRESSED IN ADULT LIVER, SIGNAL = 4.8; EXPRESSED IN HELA, SIGNAL = 5.1; EXPRESSED IN HEART, SIGNAL = 4.8; EXPRESSED IN BONE MARROW, SIGNAL = 4.8
aggattctcaaaggcagtggacaccagggcgccatccttgccctcccctcccaggataggggatcggggcaagctggggatgagctggcgacaagggagtgttgggctcgaagcccgaggagagtcgccctctcctgctgagctctcctcggcgtggagcagggcgtgtgcggcggccacaggccgaaatggcccaggccctttcgactggcccacgtggtcctcaccttgtccgagtccgggtcggggtcggcctggctcaagaggtacaggaaggatttcgggtcctgacacagcggcgtctgcccagtggtgaggaagtaggtgccgccgctgtagagccggacccacttggacctgctgctggggcgctgggccaggacgctgagccccgcgctttaagggaggcacaagaagccaccccaaccccgccccgagcctgccacgggccagcggcaggagctcgcagtgat

SEQ ID NO: 5952 - DNA, 479 bp, Homo sapiens
  MAP TO AC003104.1; EXPRESSED IN LUNG, SIGNAL = 1.1; EXPRESSED IN ADULT LIVER, SIGNAL = 1.2; EXPRESSED IN PLACENTA, SIGNAL = 1.3; EXPRESSED IN HEART, SIGNAL = 1.3; EXPRESSED IN FETAL LIVER, SIGNAL = 1.3; EXPRESSED IN BRAIN, SIGNAL = 1.2; EXPRESSED IN BONE MARROW, SIGNAL = 1.6
tcactcaggcctcacttggctgtcaggggccaagagacaggacagaaaagtctggaagctggaggcagtgaggggaaggcgcgggaagactacaactcccgtcatgcgccgcgcagcaacgcctgcgcactgagcgctggttgcccatgcggccctagggctgggagcgcggcgccgctctccgctgcgggggaggccatggcggaaccttcccaggccccgaccccggccccggctgcgcagccccggccccttcagtccccagcccctgccccaactccgactcctgcacccagcccggcttcagccccgattccgactcccaccccggcaccagcccctgccccagctgcagccccagccggcagcacagggactggggggcccggggtaggaagtgggggggccgggagcgggggggatccggctcgacctggcctgagccagcagcagcgcgccagtcagaggaaggcgcaagt

SEQ ID NO: 5953 - DNA, 497 bp, Homo sapiens
  MAP TO AC005599.5; EXPRESSED IN LUNG, SIGNAL = 1.7; EXPRESSED IN BRAIN, SIGNAL = 1.8; EXPRESSED IN PLACENTA, SIGNAL = 1.7; EXPRESSED IN HEART, SIGNAL = 1.9; EXPRESSED IN FETAL LIVER, SIGNAL = 1.7; EXPRESSED IN BONE MARROW, SIGNAL = 1.7; EXPRESSED IN ADULT LIVER, SIGNAL = 1.8; EXPRESSED IN HELA, SIGNAL = 1.9
gcaaaagataaggagcaagaatgtgtttttgcactagaccttcttgttctttagatgatatcaacttctagcagaatgccaactaaagttgcaaagaaaacaaacagttctgcacatttcctgccatctaaggctgaccccccatctcccaattcttttttgcctgtttgtgattggagggcctactgtcctctcagactgaccaaagggttatgatttgcggtcatcgtcatcgtgagcagcacccaactactactcgagatacccaggcctagcttacaggaagcaggggacggagtcctgtattcaggcaccttggatgtgtgggttcccccagcagctgagcatcaccccagcctgctccttccaggtgacactaaggaagtgcaacccctcccagaagagcatgagcctggtgaagtcctcagtggaaccagaactgttcttctcgtcaagcagttatctatgttatctttcttggcacgattgtcttatgg

SEQ ID NO: 5954 - DNA, 477 bp, Homo sapiens
  MAP TO AC005414.2; EXPRESSED IN LUNG, SIGNAL = 0.96; EXPRESSED IN BRAIN, SIGNAL = 0.75; EXPRESSED IN PLACENTA, SIGNAL =   1; EXPRESSED IN HEART, SIGNAL = 1.3; EXPRESSED IN FETAL LIVER, SIGNAL = 0.92; EXPRESSED IN BONE MARROW, SIGNAL = 0.91; EXPRESSED IN ADULT LIVER, SIGNAL = 0.93
aaagcctcatagtgtgtgattccatttatatgaaatttctagaggaggcaaagcaatggagacacaaagcagatcaggttgccagggactggggatgggaggaaggattgactgcaagcaggcgaggggggtttcagggagtgatggccgtgctttaaaatggattgtggttatggctgcatgactatataaacttactaaaaataattaagatgtacatttacattgataaattctgaggcatgtaaattataagtcaataaagctgatggggtcagtgggagagaaagagaggagaggagaagaaggaggaggaggaaaaggaggaggaggaggaaatgacagaggaggaagaggaaatgaaattgacagagaacaaggaggaggaggaggccacaaagatgaccacgaaggtgatgatgacaatgaagaggaggaggcatgtaaattataagtcaataaagctgatggggtcag

SEQ ID NO: 5955 - DNA, 475 bp, Homo sapiens
  MAP TO AC005611.1; EXPRESSED IN LUNG, SIGNAL = 6.7; EXPRESSED IN BRAIN, SIGNAL = 6.9; EXPRESSED IN ADULT LIVER, SIGNAL = 7.3; EXPRESSED IN PLACENTA, SIGNAL = 6.8; EXPRESSED IN HELA, SIGNAL = 7.6; EXPRESSED IN HEART, SIGNAL = 7.2; EXPRESSED IN FETAL LIVER, SIGNAL = 7.4; EXPRESSED IN BONE MARROW, SIGNAL = 7.2
tgggagttgaaagtcatttacactcaattatatttgttgtatattttaaattacacattttaaaataattcttgggatatgctttggtaagttaaaaattttgcaagaagaaagtaattagacagtttgaaaactaaataaaaaacatttctaattctgtgcttttatcctctccacttttttctagcggcaaccagttctttttcttctccaaatgtatcctccatggagtccttcccaccactcgcatactctactcctcagccgccccttcctcctgtgaggccttcagcaccattaccttttgtgcctcctcctgcagttccttctgtcccaccacttgttacttctatgccacctcctgtttctccatcaactgctgctgccttcggtaatcctcctgtatctcacttcccaccttcaacttctgccccaaacactcttttacctgcacccccttcgggtcctcctatat

SEQ ID NO: 5956 - DNA, 471 bp, Homo sapiens
  MAP TO AC004060.1; EXPRESSED IN PLACENTA, SIGNAL = 2.3; EXPRESSED IN HELA, SIGNAL = 2.2; EXPRESSED IN HEART, SIGNAL =   2; EXPRESSED IN BONE MARROW, SIGNAL = 2.1; EXPRESSED IN FETAL LIVER, SIGNAL = 2.1; EXPRESSED IN LUNG, SIGNAL = 1.8; EXPRESSED IN BRAIN, SIGNAL = 1.9; EXPRESSED IN ADULT LIVER, SIGNAL = 1.9
ttggggtcatgactcttatccaggtactaccttctcattctcttttttttgtcttatgtgaactccctctccctgcccaataccattctgacattctggggttcagtgacttattcattcaagtttccatgcatcccattctcacatatcaagactttagaaacatagtcttccagaatatctgcgttgaaagagaccctagagaccatcttgtctctcccctcccccattttgtaagtaggcaaagcagcccacagaagggcaggagttacttactcaagctcaagcatcagattggtggcaaagtctggactcgaacccaaatcttctggatccaaatctgacccactttctaccacctcgagctgtagctcctccaggaactgtgcctcctccccaagctctgggtcctccccgagttggggttcctccacgagctggggctcctccagcctttccaccttcatctca

SEQ ID NO: 5957 - DNA, 449 bp, Homo sapiens
  MAP TO AC005701.1; EXPRESSED IN ADULT LIVER, SIGNAL = 2.6; EXPRESSED IN PLACENTA, SIGNAL = 3.2; EXPRESSED IN LUNG, SIGNAL = 2.9; EXPRESSED IN HELA, SIGNAL = 2.5; EXPRESSED IN HEART, SIGNAL = 2.2; EXPRESSED IN BRAIN, SIGNAL = 2.5; EXPRESSED IN BONE MARROW, SIGNAL = 2.4; EXPRESSED IN FETAL LIVER, SIGNAL = 2.4
cctctttctctgtggcctctctaatgcattttaaaatcttctgcccctgccatttcctcctctcttgaggaaatgtcctggcctttagtagaatctgtgacttcattacacccatcatctcctctgcaaagtcatggagctggggatgactagttcctagcaaggacaaatgctcagatagccatgcggggctgctactggagccactgcagatccttgagggcaactgcacgcacgtcctcggctgctcagctgcactcacctgcaagggcatctcggggtcaaattcgaactgggggacgagcttggaccaaggctcgaatttcttggtctctgggtcgatgtaatagtcaaagatggttccttgggaaggaaacttgactgttttgaactcagtcagccaccatttgctgaactctgcccggtagtccacaagctgcaaaaacaaa

SEQ ID NO: 5958 - DNA, 451 bp, Homo sapiens
  MAP TO AC002542.1; EXPRESSED IN PLACENTA, SIGNAL = 3.7; EXPRESSED IN HEART, SIGNAL = 3.1; EXPRESSED IN BONE MARROW, SIGNAL = 3.5; EXPRESSED IN ADULT LIVER, SIGNAL =   4; EXPRESSED IN HELA, SIGNAL = 3.7; EXPRESSED IN FETAL LIVER, SIGNAL = 3.8; EXPRESSED IN LUNG, SIGNAL = 4.2; EXPRESSED IN BRAIN, SIGNAL = 3.1
gtgccaagagtcaaacccagcgttctgtgacttcaaagttaatgtttgttcattcatttagtctcacctctctaaacactgtgtatttgcagacatctcccgaattcatatctctagtctagacctccctgagctcaaacctgctcacccagttgcctagtcagcatcttcagctggatgtctcacaaatactatatgtgagatgtgttccaaaactgatttctaatgcctctcccccctactactcacccagtcatcaccttctcaggttgtggctgcttcatccttccagttattgagaccaaatactttgaggttatccatgactcctttatttctgacactccacatgcactgccagtaagtgttgttgactttaccttcaaatgtatcaccattgcctccaccattactaccttagtccaagacaccgtcttctgcctgggttact

SEQ ID NO: 5959 - DNA, 462 bp, Homo sapiens
  MAP TO AC004675.1; EXPRESSED IN PLACENTA, SIGNAL = 6.3; EXPRESSED IN LUNG, SIGNAL = 5.4; EXPRESSED IN HELA, SIGNAL =   5; EXPRESSED IN HEART, SIGNAL = 4.6; EXPRESSED IN BRAIN, SIGNAL = 5.2; EXPRESSED IN BONE MARROW, SIGNAL =   5; EXPRESSED IN FETAL LIVER, SIGNAL = 4.2; EXPRESSED IN ADULT LIVER, SIGNAL = 4.6
tgagtgtgtttgttgctgctctcttcccctaggatgtgaacattataagggaagggaatttgtttatctctacagccccagtgtctaaaacagttgttggtacataataagtgctcagacaataacttgagtgaatacagcgtgttgggaaaggcttttttgaagggggctgctttttgaacttggctttgaaagatgaacaggagagaaagaagctggccatataggacatgactagcagaggagaaatggctggggaggggcggatggtactcacagtcactcagggagtaaccctcaaacccatccaagtcctccagctgcagcacctgggccaagtcacagcgactgatgaggctggcctgatttagggcaagaaagctgctgaccaaatagatgagtagcgcctttgtcatccttggaggggaggaggtgcagctgagggctgatggttcttagggt

SEQ ID NO: 5960 - DNA, 475 bp, Homo sapiens
  MAP TO AC004816.1; EXPRESSED IN PLACENTA, SIGNAL =   3; EXPRESSED IN ADULT LIVER, SIGNAL =   3; EXPRESSED IN LUNG, SIGNAL = 3.3; EXPRESSED IN HELA, SIGNAL = 3.2; EXPRESSED IN HEART, SIGNAL = 2.8; EXPRESSED IN FETAL LIVER, SIGNAL = 2.8; EXPRESSED IN BRAIN, SIGNAL = 3.4; EXPRESSED IN BONE MARROW, SIGNAL = 3.1
cctagggtttgacttgctggaagctggcaagtgccagctgcttcccctggaggagcctgagccaccagcccgggaggagaagaaaagacgggagggtctttttcagaggtccagccgtcctcgtcggagcaccagccccccatcccgaaagcttttcaagaaggaggagcccatgctgttgctaggagacccctctgcctccctgacgctgctctccctctcctccatctccgagtgcaactccacacgctccctgctgcgctccgacagcgatgaaattgtcgtgtatgagatgccagtcagcccagtcgaggcccctcccctgagtccatgtacccacaaccccctggtcaatgtccgagtagagcgcttcaaacgagatcctaaccaatctctgactcccacccatgtcaccctcaccaccccctcgcagcccagcagtcaccggcggactccttctgatggggcccttaag

SEQ ID NO: 5961 - DNA, 483 bp, Homo sapiens
  MAP TO AC005840.1; EXPRESSED IN PLACENTA, SIGNAL = 4.5; EXPRESSED IN LUNG, SIGNAL = 5.1; EXPRESSED IN HEART, SIGNAL = 3.7; EXPRESSED IN BRAIN, SIGNAL = 5.6; EXPRESSED IN BONE MARROW, SIGNAL = 5.4; EXPRESSED IN ADULT LIVER, SIGNAL = 3.6; EXPRESSED IN HELA, SIGNAL = 4.3; EXPRESSED IN FETAL LIVER, SIGNAL = 3.8
aatgttcctgggaggagagggtaagggatcaaggcctgagaagggctggttctctgccctcttcaaggtggtgcctccccacagctgcaggatttccctccttgcttgagctcagtctcaccctgcgcctatttactgtattaaccccagtcctctctctttcgccactcacctggcccttaccaaggccccctcttacctggctcacacatctggcagcacagctttccctgagcccagtagtgcctctctgggcagctcttgggggctggagtagttgagagccccaccagggtccccagaacgcacagccaccagggatgtggccgtgccatggtccctgcccaggcggctcctttctgtgcccagttgctgatgctggcctctggagttagcacctccaagctgggcgctgctgtctcttctttgcaccccctgggcagtggctgcttcaggtggcaagccaacctttgaaggcagaat

SEQ ID NO: 5962 - DNA, 477 bp, Homo sapiens
  MAP TO AC004448.1; EXPRESSED IN ADULT LIVER, SIGNAL =  11; EXPRESSED IN PLACENTA, SIGNAL =  14; EXPRESSED IN LUNG, SIGNAL =  14; EXPRESSED IN HELA, SIGNAL =  13; EXPRESSED IN HEART, SIGNAL =  12; EXPRESSED IN BRAIN, SIGNAL =  12; EXPRESSED IN FETAL LIVER, SIGNAL =  12; EXPRESSED IN BONE MARROW, SIGNAL =  12
agccacaagtaatccggttcagtcacccagtgtgtggctggggcatccaggaggaagcccaagtggccaaaccacaacccacacccatgtctgtggcagcctctcccacagcccacactctgaagggcaggcagttgtctttctgcaggacccccaccccttccccttccctgccttccttggcaggccctcctgctccaggggccatctacccgctaggacagtcttgggaaggatggattgtccctgtttcatgaagggaggccagtttaacagatgaatctgccaaggacactgtctcttcccaacaggggtattgcaggcaccaatggaacaggttggggaggagagtttgggaccaagaacacccatgaacccttagaagccaccatagaggtaaggactgaattgtaatcccatcagctggtgaccttaggcaagtctcggccctctctgagcctcagtctcacttctgca

SEQ ID NO: 5963 - DNA, 486 bp, Homo sapiens
  MAP TO AC002544.1; EXPRESSED IN PLACENTA, SIGNAL = 5.7; EXPRESSED IN LUNG, SIGNAL = 6.1; EXPRESSED IN FETAL LIVER, SIGNAL =   6; EXPRESSED IN BRAIN, SIGNAL = 6.7; EXPRESSED IN BONE MARROW, SIGNAL = 6.6; EXPRESSED IN ADULT LIVER, SIGNAL = 7.5; EXPRESSED IN HELA, SIGNAL = 5.8; EXPRESSED IN HEART, SIGNAL = 5.3
atattgttggatgtctggcggggatattaaaaaaaccactcaaacgtagaagaatctctcttcatccaggaccatactgtgcatggcaggatggctttgctctctccctctaaggacattgtcacattcacagtgagatcaaagcccccacaaacaagcttccaaaatggccctagggggcagtactacctcactgagaaccactgttcagggagttagctgggtcgcagaggcaaaatgttggactacagcgtgtggggccacactgagcgatgatgaagaggagaggcatcccaacacccaccgggctaacctcttccgctggcagcaccaagcccgggtggagctcatggagcagttccagaaggagaaggaggaactggacaggggctgctgggagtacaagtgcaagatggccgagtgccagaggaagctgaaggagctggaggtgtcagagggtgccagggtggaggtggagtggctaca

SEQ ID NO: 5964 - DNA, 455 bp, Homo sapiens
  MAP TO AC004527.2; EXPRESSED IN PLACENTA, SIGNAL = 2.6; EXPRESSED IN LUNG, SIGNAL = 2.7; EXPRESSED IN HEART, SIGNAL = 2.1; EXPRESSED IN BRAIN, SIGNAL =   2; EXPRESSED IN BONE MARROW, SIGNAL =   2; EXPRESSED IN ADULT LIVER, SIGNAL = 2.5; EXPRESSED IN HELA, SIGNAL = 2.3; EXPRESSED IN FETAL LIVER, SIGNAL =   2
gtcaccactcattggctgtgaagttgagctgagtgccctgttgtccatcttcttggtgaagcacttgaagccgtcaatcttgctctcccactcctaaaggttgagtgtcgccctgggggtgggctcagggtcaggaagaatctggcactcaccaactcatccttctcagccttcctcttgccctgtctccaggctgtctcttcagtgctggtggggcgcatcaggaagtgacaaaaaatgtggcactgtgcctgcatccagaagctggccgtgtggttcatccaccagattgggccctttctgcacttgaacatagaccccacttcaccatagatgccttccacactgtcagtgagctctttgccaatcagcccaggcaggacctggacccagtcatggacctgttaatgctgtctcagggacaccaggccaacaccctggacatcatccacata

SEQ ID NO: 5965 - DNA, 468 bp, Homo sapiens
  MAP TO AC005509.1; EXPRESSED IN PLACENTA, SIGNAL = 3.7; EXPRESSED IN BRAIN, SIGNAL = 1.5; EXPRESSED IN BONE MARROW, SIGNAL = 1.3; EXPRESSED IN ADULT LIVER, SIGNAL =   2; EXPRESSED IN LUNG, SIGNAL = 5.5; EXPRESSED IN HELA, SIGNAL = 4.5; EXPRESSED IN HEART, SIGNAL = 1.5; EXPRESSED IN FETAL LIVER, SIGNAL = 1.6
ttcatgctaagctgccactgcagctcaatctcaagaccctggaggttgcaccgcaggtcggtgacctgggacctgttcatctggagctgctccatgtggccaacaacttcccagttcagttcctcagtgcagctggtgaaccagcgttcagcatcctttcggttctgcttggcatgacctcatattggctctgcatgtcactcaggatattggtggcatcagcgcccagagccgaatccacttccacactgatctggcctcccacctggcccctcagggcattaatttccccctcatggttcttcttcaggtaggccagctcttccttcagcccttcggtctgcatctccaggtcggtcctggccagggtcagctcaaccagcaccccgtgcaggccattatgtcagcctccacactcacgagcagagtctgctccctctcatacttagttcagaagtcatctgcagc

SEQ ID NO: 5966 - DNA, 475 bp, Homo sapiens
  MAP TO AC004242.1; EXPRESSED IN PLACENTA, SIGNAL = 3.5; EXPRESSED IN ADULT LIVER, SIGNAL = 3.5; EXPRESSED IN LUNG, SIGNAL = 3.4; EXPRESSED IN HELA, SIGNAL = 3.1; EXPRESSED IN HEART, SIGNAL =   3; EXPRESSED IN FETAL LIVER, SIGNAL = 3.1; EXPRESSED IN BRAIN, SIGNAL =   3; EXPRESSED IN BONE MARROW, SIGNAL = 3.3
ttccactgtggtcatagaacatactttttgtgatttcaattcttttaaagttgttaaggtttgttttattacctaggatatggtctatcttgtttattgttccatatgcagttgaaaaaaatgtaataaggcggagtatattgattgaattatgaatattgagccagctttggattcctgagataaaattcacttggtcatgaagtattattcttagcattgtgaacaccccaaacttgagacaggtctcagttaatttagaaagtttattttgccaaggttgaggatatgtgcccatgacacagcctgaggaagtcctgacgaacatgtgtccaaggtggacagggtacagcttggttttacacgttttagggagacaggaaacatcagtcaatatatgtaagaagtacactggttccctccagaaagtcagggacaactcaaagcagggagggggcttccaggtcacaggtag

SEQ ID NO: 5967 - DNA, 458 bp, Homo sapiens
  MAP TO AC006137.1; EXPRESSED IN PLACENTA, SIGNAL =   3; EXPRESSED IN HEART, SIGNAL = 4.1; EXPRESSED IN LUNG, SIGNAL = 3.4; EXPRESSED IN FETAL LIVER, SIGNAL = 4.5; EXPRESSED IN BRAIN, SIGNAL = 5.8; EXPRESSED IN BONE MARROW, SIGNAL = 3.3; EXPRESSED IN ADULT LIVER, SIGNAL = 3.4; EXPRESSED IN HELA, SIGNAL = 3.6
tctccttccccactttttccttttgtttttaaattctctcttatttccctgatcgcattttttctatcggtatccttatgttctctggcttttcttgttctgttttgatttctccttttaatttattctgtccacttaccctacgtcctccccctacatttttctgtgcccttcctctctttccctgtgcccttcctctctttccctcctccccactccttcatcacctcctcttctcctactatcccaattgtgcttcttcctccagaaagaggagcgtgtctctgaactgcgccatcaactccagtctcggcagcagctccgctcccggcgccacccaccgacacccccagaaccctctgggggcctgcccaggggaccccctgagccccccgaccggcttagctgtgatgggagtcgagtgcatttgctttataagtgagggtagggtgagggag

SEQ ID NO: 5968 - DNA, 462 bp, Homo sapiens
  MAP TO AC005905.1; EXPRESSED IN BRAIN, SIGNAL = 3.4; EXPRESSED IN ADULT LIVER, SIGNAL = 3.4; EXPRESSED IN PLACENTA, SIGNAL = 3.9; EXPRESSED IN LUNG, SIGNAL =   3; EXPRESSED IN HELA, SIGNAL = 3.9; EXPRESSED IN HEART, SIGNAL = 3.1; EXPRESSED IN BONE MARROW, SIGNAL =   4; EXPRESSED IN FETAL LIVER, SIGNAL = 4.1
agaagtaggcaggcattcccgtctgctgagatgcaaacagggtttaaagattcttccttcccaaaaggtcaggcgcaactgataacaagttgggaggagggggtggtgagaaatggaccatgattgagaatgatttgaagagaaaaaagacatgtgccaatatagcattaaatgaaagggctgtgggcctcaggtttagaaagtcctagatctctcttttatatgtgccttttgtcaacttatttctctgttccctgggaagtacctcagaaaaaaaaaaaaaaaaaaaaaacacacacacacacacacacacacccaccagaaaaagcagccagagagcaataggggaaagggcagaaggtccaccaaccacagccactttcacactgaactccacgggcaaagccctatcctgcatcttgttatacgactgtgactgagagccttgttcaaatgctcaat

SEQ ID NO: 5969 - DNA, 487 bp, Homo sapiens
  MAP TO AC004933.1; EXPRESSED IN LUNG, SIGNAL = 1.6; EXPRESSED IN BRAIN, SIGNAL = 1.6; EXPRESSED IN PLACENTA, SIGNAL = 1.5; EXPRESSED IN HEART, SIGNAL = 1.6; EXPRESSED IN FETAL LIVER, SIGNAL = 1.5; EXPRESSED IN BONE MARROW, SIGNAL = 1.3; EXPRESSED IN ADULT LIVER, SIGNAL = 1.6; EXPRESSED IN HELA, SIGNAL = 1.7
ctcttctatggactgcatgggtaactgtttagacaactaaacggaaaatcttaatttatgcttcatttgcaattacagagttggcctctgcaagtttcaatatctctttcgggaatctgtgaacatgtttccttctcacgcatacccaactccctcctgtaagcagtgaccatcatgagtagtgctacccgacacccacctagagcagcgccttcagtgcttacggcctgcacttgggttaagccagagctggcctacccaggccctgctaccatgctgcctgaaaagctgcttctgcaccttctgcagatcagcaagggtgtgggccgagctgactgtggccttggaggctgtctgtccctgcaggctggccactggctgtagtaggagagtgcccaggtgctgtgggttaccctggaccatcctgtgggcctgaatttggatgggatggagagggacctgggccgcacaggaggacctcactccc

SEQ ID NO: 5970 - DNA, 469 bp, Homo sapiens
  MAP TO AC005522.1; EXPRESSED IN PLACENTA, SIGNAL = 3.7; EXPRESSED IN LUNG, SIGNAL = 3.8; EXPRESSED IN HEART, SIGNAL = 3.5; EXPRESSED IN FETAL LIVER, SIGNAL = 3.5; EXPRESSED IN BRAIN, SIGNAL = 4.1; EXPRESSED IN BONE MARROW, SIGNAL = 3.7; EXPRESSED IN ADULT LIVER, SIGNAL = 3.8; EXPRESSED IN HELA, SIGNAL = 3.3
gatgcttctggatggagaccactttatgcaacaagggcccagctggctagggaagggaggcagctgagaagctgagagcccaggtggcagcagccagcatcccacgggtataagatggccagaggcggctgcctgctgctctgcaggtaccatggagctgagctataggctcttcatctgcctcctgctctggggtagtactgagctgtgctacccccaacccctctggctcttgcagggtggagccagccatcctgagacgtccgtacagcccgtactggtggagtgtcaggaggccactctgatggtcatggtcagcaaagacctttttggcaccgggaagctcatcagggctgctgacctcaccttgggcccagaggcctgtgagcctctggtctccatggacacagaagatgtggtcaggtttgaggttggactccacgagtgtggcaacagcatgcaggtaaga

SEQ ID NO: 5971 - DNA, 479 bp, Homo sapiens
  MAP TO AC004874.1; EXPRESSED IN LUNG, SIGNAL = 3.7; EXPRESSED IN BRAIN, SIGNAL = 3.8; EXPRESSED IN ADULT LIVER, SIGNAL =   3; EXPRESSED IN PLACENTA, SIGNAL = 3.3; EXPRESSED IN HELA, SIGNAL = 3.2; EXPRESSED IN HEART, SIGNAL = 2.8; EXPRESSED IN BONE MARROW, SIGNAL = 3.3; EXPRESSED IN FETAL LIVER, SIGNAL = 3.3
gctgatttcacacgcttcacagcccaggagtgaagctgcaggatccagcgtgggcaggtccctgggagcctcagtttgcatctgagttccagccttcccaaagcccagccttaagtagctaaatgctgttcattccgtgtggtcttgggaggtgtgcctcacgggagagaagagaggtttcatgtctatttctctatgtttcagggctgagccggttctatcccgcatccaggaaaaccggaagcgtgtgatcctcccctccattgacaacatcaaacaggacaactttgaggtgcagcggtacgagaactcggcccacgggtacagctgggagctgtggtgcatgtacatcagccccccaaaagactggtgggacgccggagacccttctctccccatcaggtctgtggctggtgagcctggcggccaacgagcccccaaattcaagggtaaaaaggagctactgagagaggccagga

SEQ ID NO: 5972 - DNA, 456 bp, Homo sapiens
  MAP TO AC005908.1; EXPRESSED IN PLACENTA, SIGNAL = 2.3; EXPRESSED IN HEART, SIGNAL = 2.1; EXPRESSED IN BRAIN, SIGNAL = 2.4; EXPRESSED IN BONE MARROW, SIGNAL = 2.4; EXPRESSED IN ADULT LIVER, SIGNAL =   2; EXPRESSED IN LUNG, SIGNAL = 2.7; EXPRESSED IN HELA, SIGNAL = 2.2; EXPRESSED IN FETAL LIVER, SIGNAL = 2.2
gaaaagacgcacctgtcctctgtgtttaaagcctttaagagagccccaggtgctgttctgttgttgatctgctttcctggctagaggggttcgattctctttgtttggtgacattttttttttcttgttcaatcttagtcaagggtgtaagaaacggtggctgctccgggcgttggccccttctcacgggttcctcactgccctcccctccaggccaaactagctcacccctgcaccctcccgcttaaggtcagcttccccactgtccactcattccctcgcctttcatcctcaccctgtgggtaattcagacggatggtcccgggcgtttcgcgaggagaaggctgttggtgaattgggggatgatcgggctgcacaacagatcgctcgtgatgccgaatgtgtgctcgtgggtcctgccctcccacctgggagaggagttttgcttgtggcttc

SEQ ID NO: 5973 - DNA, 464 bp, Homo sapiens
  MAP TO AC004098.1; EXPRESSED IN PLACENTA, SIGNAL = 4.1; EXPRESSED IN HEART, SIGNAL = 4.1; EXPRESSED IN BONE MARROW, SIGNAL = 3.9; EXPRESSED IN ADULT LIVER, SIGNAL = 4.2; EXPRESSED IN LUNG, SIGNAL = 5.5; EXPRESSED IN HELA, SIGNAL = 4.1; EXPRESSED IN FETAL LIVER, SIGNAL = 3.9; EXPRESSED IN BRAIN, SIGNAL = 4.8
agacgagatgggcaaacaaccccattccctgcgcccaggctcccagcctcccccctgcttcccggagccctacctggtgccctacttgcaggtgtgcacgtcgtagatgcgaatacactcctggcagctgacgtagcagcaccagtggaagatgcagtggcatttttccttccgcttctccgtcctcgtgttgtggccccggccacagcagagcagatcgcagccatcgatgccgtgggaggtgacattgcaagtccggtcccttgtgccaaaggaacccgtctctgggttgggctcacaaaagttgggggagttctcgtagtagaccaggtccctctccgtgggtggcttgaagagcgagtacttggcccggagggtctccacccagcctcgggactcacggtgcttctctactaccatctccgaggcgctgtcatacttgtccttgaggaagtcaccgatgg

SEQ ID NO: 5974 - DNA, 476 bp, Homo sapiens
  MAP TO AC004943.1; EXPRESSED IN PLACENTA, SIGNAL = 1.5; EXPRESSED IN LUNG, SIGNAL = 1.6; EXPRESSED IN FETAL LIVER, SIGNAL = 1.4; EXPRESSED IN BRAIN, SIGNAL = 1.4; EXPRESSED IN BONE MARROW, SIGNAL = 1.4; EXPRESSED IN ADULT LIVER, SIGNAL = 1.7; EXPRESSED IN HELA, SIGNAL = 1.7; EXPRESSED IN HEART, SIGNAL = 1.8
tctctttggcagtccaatgtcattgcccaggacctcacattctagcatagtgggtgtcctgtagtcattaaagcatgacttgaggaccttcagctgcagattggtcatttgagtgcgaaaacgtttctgcccaggccgatctccgctgtcaccagatttgcctgcagatccactcgcaccaggactcggggagcagggatctgcaaggcttgaggtttcactgtagtccactgtaccttcattgtcatattccttgctataaaagctcggggccgggctgaccagaccagatgacaaccgatcttcatactcagacattgccatcatggccgctttggtcaacccttcgttgggtgcagaagaggatttggtttcagttgctattcccgttgcactgtcgttatctgcgttgccctcgtctccagttgtggtatctgtgattgctgtgttgacagaggaacagtcatcgttgtcca

SEQ ID NO: 5975 - DNA, 368 bp, Homo sapiens
  MAP TO AC005529.7; EXPRESSED IN PLACENTA, SIGNAL = 2.4; EXPRESSED IN LUNG, SIGNAL = 3.6; EXPRESSED IN FETAL LIVER, SIGNAL = 4.2; EXPRESSED IN BRAIN, SIGNAL = 2.5; EXPRESSED IN ADULT LIVER, SIGNAL = 3.1; EXPRESSED IN HELA, SIGNAL = 2.5; EXPRESSED IN HEART, SIGNAL = 2.5; EXPRESSED IN BONE MARROW, SIGNAL = 3.8
gtggcataaggcactgtgtgttctgcaggaaggcgctcatggctggctggtagatgagaggcggccttctcaggggctgcaaagctgaggctgttgaggggttgagttgaacttggggcccctagtgaggaggccccaggcgatgggagcgcggcctggtgagtctggtgccgctgcctccccactggccctgcaccaggtctcaggatgggatcatgcctttgctcctcttgcggtcggccatggttctccggttgtggttggctcttgtcgccttgttggcttccttcttcctgcgttcctgggttgtctcgcggctctgcccatggcctcgggggctgccggccactgctgttgagctgtcatgc

SEQ ID NO: 5976 - DNA, 413 bp, Homo sapiens
  MAP TO AC004387.1; EXPRESSED IN BRAIN, SIGNAL = 1.2; EXPRESSED IN ADULT LIVER, SIGNAL = 1.4; EXPRESSED IN PLACENTA, SIGNAL = 1.3; EXPRESSED IN LUNG, SIGNAL = 1.2; EXPRESSED IN HELA, SIGNAL = 2.1; EXPRESSED IN HEART, SIGNAL = 1.3; EXPRESSED IN BONE MARROW, SIGNAL = 1.5; EXPRESSED IN FETAL LIVER, SIGNAL = 1.4
aggatcacatggacccaatcatatcatctgtgtgaagagaccaatcctcagaaatatcaagaaagtgagatggctgcagaggttgagcctcctgagcccctgcttggtgacaagggacctgggtatgctcttcttcactgaagacacaaggtggacaatcgcagttgggcctttgactggactgtgacaagctgaacacctcgtagcatttctcatccttctgggctgtggccctgctcttgctggctactctcatggagcagggcttggtgagccatggggacttttggggggcagcacatgacactgggatcacaaacttagatggcgtgcccttagaagagtagtgtatctcagtgctgtagataaccatgtcctgagagacagctttggccctgatgccacattcagta

SEQ ID NO: 5977 - DNA, 487 bp, Homo sapiens
  MAP TO AC004104.1; EXPRESSED IN LUNG, SIGNAL = 7.3; EXPRESSED IN HELA, SIGNAL = 7.2; EXPRESSED IN HEART, SIGNAL = 6.2; EXPRESSED IN FETAL LIVER, SIGNAL =  11; EXPRESSED IN BRAIN, SIGNAL = 7.6; EXPRESSED IN BONE MARROW, SIGNAL = 7.4; EXPRESSED IN PLACENTA, SIGNAL = 7.3; EXPRESSED IN ADULT LIVER, SIGNAL =   8
gagagagagagagagagagagagagagagagagagagagagagagagagagagaaattactggaacacagaaggagagaattgtttagagcaggccaccttggaggatcactgaagtcaggagacacagccatcctgaggcaactttgcaaagaaagagttggggacaaatatcttgacctcattctcctgcttcatctgatctcttgctccccattggaacagtggatggcctgagaaggaactaataaaatgttgaatgaatggatggcaagttctccccttctgttttgacctagttaagcccactatgttcttcagacttcagatcaaatgtctcttcctccaggaagtcttctctgacttccctagacaagatcacccccatgttatacacttccatggcttcattcatagccccactgcatattgtaattatacattcgtgtgattatttaattgatctatctcttcatggccaagctgta

SEQ ID NO: 5978 - DNA, 449 bp, Homo sapiens
  MAP TO AC004830.1; EXPRESSED IN LUNG, SIGNAL = 3.5; EXPRESSED IN FETAL LIVER, SIGNAL =   3; EXPRESSED IN BONE MARROW, SIGNAL = 3.1; EXPRESSED IN HELA, SIGNAL =   3; EXPRESSED IN BRAIN, SIGNAL = 3.2; EXPRESSED IN ADULT LIVER, SIGNAL = 2.8; EXPRESSED IN PLACENTA, SIGNAL = 3.1; EXPRESSED IN HEART, SIGNAL = 2.9
ggatgtggtttttgcctcacataacaagatgccaggtgtattcaggtgccactcatgttctagaaagacacttgcattttcagaggtcaaaacagaatgaccggattgtaactgaaagctttggacagcaagtaaaccacaacccaaaggtcttactaacaaatgttctcaaactccagctgcccagacaacctgccagcctgacctgggaagctcacagggaagctgaagcgtctgtgatgcacagggtgagattttgggatgataaggaatgttgaaatattataattgatgagatttggatgacaggctctcttgctgcttccagattgtttctgtgaataatacaatgcttccagctccttcaaaaccaaactgcctctcttgtggttaacaagggtgggatgagggaaaagagaacgtagcaactgaatgacaaattgatgcca

SEQ ID NO: 5979 - DNA, 480 bp, Homo sapiens
  MAP TO AC005972.1; EXPRESSED IN ADULT LIVER, SIGNAL = 1.3; EXPRESSED IN PLACENTA, SIGNAL = 1.4; EXPRESSED IN LUNG, SIGNAL = 1.5; EXPRESSED IN HEART, SIGNAL = 1.4; EXPRESSED IN BRAIN, SIGNAL = 1.2; EXPRESSED IN BONE MARROW, SIGNAL = 1.3; EXPRESSED IN FETAL LIVER, SIGNAL =   2
tttttggggagagttaggggcttcgtattgtatttatacaaaatagcatagggagatgcctgcccatgtggacagcagtccaagttttatacagttctttggtcttaaaagttgatagacaaaagtctttattctggggtctttagaggggactctatgggtcctgtgccttggccttgacctcgttactggccattggttgccaaagcttagtatgttgacagtatggacagctgggaaagagactgggatggatggtgtgggtgatatccagttcagggctggtaccttttaagagtaccaatttgattactttgggcttgaggagcacctttttggcctctgtataggtgctcattgccttggaaatgttggcctgaatcttttcgaggacttttttgttgggcttgttggcagaattatgcattccttagaatctgaatgtcttgaagccatttctgtgccattttcaggactggt

SEQ ID NO: 5980 - DNA, 470 bp, Homo sapiens
  MAP TO AC005598.6; EXPRESSED IN PLACENTA, SIGNAL = 4.1; EXPRESSED IN LUNG, SIGNAL = 4.4; EXPRESSED IN HELA, SIGNAL =   4; EXPRESSED IN FETAL LIVER, SIGNAL = 3.8; EXPRESSED IN ADULT LIVER, SIGNAL = 4.4; EXPRESSED IN HEART, SIGNAL = 3.6; EXPRESSED IN BRAIN, SIGNAL = 4.1; EXPRESSED IN BONE MARROW, SIGNAL =   4
ctggggactttgggtcaggccccgaggcaaaagcaaggaagcactggggaggaattccatttccagactggagggagagattcctgcactatgcgtcccagcagcttggggcaaggtgctggagaagtctggcttcgtgtcgactgccgcaacacagaccagacctactggtgtgagtacagggggcagcccagcatgtgccaggctttcgctgctgaccccaaaccttactggaatcaagccctgcaggagctgaggcgccttcaccatgcgtgccagggggccccggtgcttaggccatccgtgtgcagggaggctggaccccaggcccatatgcagcaggtgacttccagcctcaagggcagcccagagcccaaccagcagcctgaggctgggacgccatctctgaggcccaaggccacagtgaaactcacagaagcaacacagctgggaaaggactcgatggaaga

SEQ ID NO: 5981 - DNA, 474 bp, Homo sapiens
  MAP TO AC004447.1; EXPRESSED IN LUNG, SIGNAL = 4.3; EXPRESSED IN HELA, SIGNAL = 4.1; EXPRESSED IN HEART, SIGNAL = 3.7; EXPRESSED IN FETAL LIVER, SIGNAL = 4.4; EXPRESSED IN BONE MARROW, SIGNAL = 4.1; EXPRESSED IN PLACENTA, SIGNAL = 4.4; EXPRESSED IN BRAIN, SIGNAL = 4.4; EXPRESSED IN ADULT LIVER, SIGNAL = 3.7
gggaatgggaaagcagttccagacggaaactacacagaaataccacttagcttttatgatggtcacaaatgtggccaaaatgaccagggccaacaagctggttaaaaaatctacaccaggacagaaaggagccctgtaaacacctgcacatgtaaatgatcagcttctcatctgaagatgccttctgtttaaaaaacaaaaatcaactgccagctgtaagccatcttggctgtgaaggagccaagcggcaggctgcaggtggaaggactgaggccccacccactcccaccccaggctgcctgctgcgtacacgctgaccggctccctgatgccctttccgagggagcccaggccatggccctccttccagcccatcttctgcagcatctggaagcccaggttcttatcggtcagcttctgctgggcgaagtccaagtccttgggtttctgaggagagaggagagtccaggcatg

SEQ ID NO: 5982 - DNA, 495 bp, Homo sapiens
  MAP TO AC004125.1; EXPRESSED IN PLACENTA, SIGNAL = 2.5; EXPRESSED IN BRAIN, SIGNAL = 2.4; EXPRESSED IN BONE MARROW, SIGNAL =   2; EXPRESSED IN ADULT LIVER, SIGNAL = 2.2; EXPRESSED IN LUNG, SIGNAL = 2.6; EXPRESSED IN HELA, SIGNAL = 2.2; EXPRESSED IN HEART, SIGNAL = 1.9; EXPRESSED IN FETAL LIVER, SIGNAL = 2.1
caccatggctgagtcttcttctcaactgcactatttgctgtttgacaggaagagaactctgtcccttgacctcccttgttctctcagacaagtactttagctctaggcttttaacacttttgcctcgcccttctctatgactcggtgcagtgaagtagcacctcattagcactgtcttccttctttcactgaagacaagtccgtggtcccttattatttttcagtatttcatttctcattgtggaaaaataggtttttttaaatgacgttgatgtagaagtttctagtccttaccaaatcttgcaaagctcctagaatcatcattcttgctgggcagccccttcccaactcacagattctcacctttcattggctcaggctggtatttactcctgtgcagcttccccttctcagcctggagatccaacaagagatgcaaagtgagtgatttgaatttagggggacctacagcctgggttccctgcaccaaatgta

SEQ ID NO: 5983 - DNA, 464 bp, Homo sapiens
  MAP TO AC004704.2; EXPRESSED IN HEART, SIGNAL = 1.5; EXPRESSED IN ADULT LIVER, SIGNAL = 1.6; EXPRESSED IN PLACENTA, SIGNAL = 1.4; EXPRESSED IN LUNG, SIGNAL = 1.6; EXPRESSED IN FETAL LIVER, SIGNAL = 1.4; EXPRESSED IN BRAIN, SIGNAL = 1.5; EXPRESSED IN BONE MARROW, SIGNAL = 1.7
gaagaaatgcctgccagaaggggaaaaacaatagttacattaaaaatacctacaaagacatttttaagcacatgattttatcagacaatgagcacttaaactacattatcttttacttctcacaatagatactaagttaaatacttcctattaggaaacaggcttagaaaacttttttttctttttctttttctttttttttttttttttttttttgccctaggtcacggacttgggaaatgacctaagcaggagctgaattccatccctggtctgtttggctcccaagccatgctcttaacctctatattctagtacttccggagaaaagtcatgagaatgagcagggcatatgtgaagatagcctgactgaagaagaagagttcatgttgagtgtggaggaaaacaaaggtcaacaggcagattgggaccaagttagagagtgcctggaaactcacgaaaaa

SEQ ID NO: 5984 - DNA, 471 bp, Homo sapiens
  MAP TO AC004836.2; EXPRESSED IN LUNG, SIGNAL =   6; EXPRESSED IN HEART, SIGNAL = 5.6; EXPRESSED IN ADULT LIVER, SIGNAL = 5.6; EXPRESSED IN BONE MARROW, SIGNAL =   6; EXPRESSED IN BRAIN, SIGNAL = 5.9; EXPRESSED IN FETAL LIVER, SIGNAL = 5.9; EXPRESSED IN HELA, SIGNAL =   6; EXPRESSED IN PLACENTA, SIGNAL = 5.5
aagctttaagtgtagcccaggccctgttctagctagaatgaagttttgcataatgaatagataccagattcccctgaagggctcttgccccagagactctcagtggcccacgttcacaggtacttgcaggcatgcatatatgcttctcacctcttaggaaatggcctttgcaggcatgaaaaaacaaatacctcaagttcccttcctgagcctcttaggcaacatgaaaaaactacataccaatcccgagaatggaagctggtttggagtttcacctcacaaaaagctggccccaccatgctcacccaaatggcagatttatgaaggttctgtttgacaagagcaaaggatccactttgagcagctctgggcctatggaaggcaaggtgttcatgtttaagcacaaaggtaaacagagcatagcagcaggttacagagatcatttattttcccgctgatgacagacatgag

SEQ ID NO: 5985 - DNA, 480 bp, Homo sapiens
  MAP TO AC004736.1; EXPRESSED IN LUNG, SIGNAL = 3.6; EXPRESSED IN FETAL LIVER, SIGNAL = 3.9; EXPRESSED IN BONE MARROW, SIGNAL = 6.2; EXPRESSED IN HELA, SIGNAL = 3.7; EXPRESSED IN BRAIN, SIGNAL = 3.7; EXPRESSED IN ADULT LIVER, SIGNAL =   4; EXPRESSED IN PLACENTA, SIGNAL = 3.7; EXPRESSED IN HEART, SIGNAL = 3.5
tctttccctctctgagcctgtttattttcactgaatgaaaatattgactagaggtagcctgggagcacccattccctgcaatagtcccatgcatatgtgaagtggtccctaccacctaaatggttcccctgaataaggactgaagagcaaagcacccctgcagcctgtcaggccctccttttcctctaaccttgcacctagcagaggggagctcacgctggggtggtagccaggctggccccagagctgatgggaggcagtggctcaaggccctgaccttttggtctagagtgaatcccctggtcatgagaccgctcagaatagccagaggcattatattcagctgtcgtggaggccttgagatcctcagcccaggcagtggaccctggaatgagcccccactgaaccccctcccccacctctgagacaaccaccacctccctccttgatagacttcagccaatcccctccaaagcttct

SEQ ID NO: 5986 - DNA, 467 bp, Homo sapiens
  MAP TO AC004843.1; EXPRESSED IN HELA, SIGNAL = 3.9; EXPRESSED IN HEART, SIGNAL = 3.7; EXPRESSED IN BRAIN, SIGNAL = 4.1; EXPRESSED IN ADULT LIVER, SIGNAL = 3.8; EXPRESSED IN LUNG, SIGNAL = 4.1; EXPRESSED IN FETAL LIVER, SIGNAL = 3.8; EXPRESSED IN BONE MARROW, SIGNAL =   4; EXPRESSED IN PLACENTA, SIGNAL = 3.7
gggagaggatgagaagccacccagggaggatgagatcagtagcagcaggaagccacctaaaagggaaaaagcacagtgactagaggtcaaggccagagtccttgggaagatcctggagccttcatgggcccatcccgtaggagctagagaaggggcatgcatcttctgccagacctggcctccaaagcaggaacagaaggatacggccctcagcatctccctgccccattctctctcaactctcagcagatcctccctggccaaatccagtgggaagctctctgggaaaccacagctgttgggggccatggggccagaaacctgctgccttatggagctcagcaggaggatctgaaggcaagcagcaacatgccagcagggcatgggtgggtggatgggggactggtggagtttggaggactggggagctatgacaatgtgaagagagacccagaaatggtaggtgg

SEQ ID NO: 5987 - DNA, 485 bp, Homo sapiens
  MAP TO AC004595.1; EXPRESSED IN PLACENTA, SIGNAL = 6.8; EXPRESSED IN LUNG, SIGNAL = 6.9; EXPRESSED IN FETAL LIVER, SIGNAL = 9.2; EXPRESSED IN HELA, SIGNAL = 7.7; EXPRESSED IN BRAIN, SIGNAL = 8.5; EXPRESSED IN BONE MARROW, SIGNAL = 6.3; EXPRESSED IN ADULT LIVER, SIGNAL = 9.3; EXPRESSED IN HEART, SIGNAL =  12
tgctttaaggggaggaggagagggcgggagggaatcggggagggaaggagggttgtgttttgtcttaatgtctgagagagaacaacctccttctgggtgttgctctggagccgatgggtcgggtttcaaaccacgttttgtgatatccccctcctcccttccctccttctcccccaccccctgccggtgtgcgtggatcgcgggtttatggagattaatgttcggggggaggggggagaagaggagaggaagaagacgaataataataatcctaataacctgttgtcgtgtgtgtgtggtgggggggtttgttgcagatcagaagaaggaggaggaggaggaggcggcagcggcagcggcgatggctacagaaggagggaaaacctctgagccagagaataacaataaaaaacccaaaacctcaggctcccaggtaaaagcaaacaaattaaaaaaattcatcacgacacattaggagagagagg

SEQ ID NO: 5988 - DNA, 464 bp, Homo sapiens
  MAP TO AC005606.1; EXPRESSED IN LUNG, SIGNAL = 4.3; EXPRESSED IN BONE MARROW, SIGNAL = 3.9; EXPRESSED IN PLACENTA, SIGNAL = 4.1; EXPRESSED IN HELA, SIGNAL = 3.6; EXPRESSED IN HEART, SIGNAL =   3; EXPRESSED IN FETAL LIVER, SIGNAL = 3.6; EXPRESSED IN BRAIN, SIGNAL = 3.6; EXPRESSED IN ADULT LIVER, SIGNAL = 3.6
ggacgcaccttcttgttgagctccgtgcggtggtgatagcccttctgcccggcccgagcaatggagcagcccacgcgggcggggtgccaggcgccaatgcaggccaccttgcgcaggcccttatgggtcttccgcggcagcttcttggtatgccagcggcttgtgacccctgtgagtgagaggggctggtggctgagaggccaggctggtccccactgcctccaggcagcctgccctggagctgccatcctcactgagccctacctttgacgcctcgacccttggtgacagcaatgacatcaatgacctcactctggctgaacacgctgtgcacgggcacctgcttctccagccgggcctgggcccaggccaccttctcggccaccgtgccaccgttcagctggatctccatgatgtgggccttcttctgccggaagggcagcagtttcatctgcaggacatgg

SEQ ID NO: 5989 - DNA, 500 bp, Homo sapiens
  MAP TO AC004453.1; EXPRESSED IN LUNG, SIGNAL = 2.4; EXPRESSED IN BRAIN, SIGNAL =   3; EXPRESSED IN PLACENTA, SIGNAL = 2.6; EXPRESSED IN HEART, SIGNAL = 2.5; EXPRESSED IN BONE MARROW, SIGNAL = 2.2; EXPRESSED IN ADULT LIVER, SIGNAL = 2.5; EXPRESSED IN HELA, SIGNAL = 2.8; EXPRESSED IN FETAL LIVER, SIGNAL = 2.8
gttagcacaggcagcaaatgcattcccaggcacagagggtcctgccttgggttctggcaccccctcttgtctgtcacctccctttgtgtagttggtcctgagcttatcctggacacccatccctcagtgggctctgctctgtccccagccctggacacctgtctcaggtctctgactcaggtctctgtcctgcttgtccccaggtgaacctgagcaaggtgggcgagtattggtggaacgccatcctggagggagaagagcccatcgacattgacaagatcaacaaggagcgctccatggccaccgtggatgaggaggaacaggcggtgttggacaggcttacctttgactaccaccagaagctgcagggcaagccacagagccatgagctggtacgagcatggcagtcctggagagtccaccctttaggcccttgtgctggtgacaaggccgatagtggcagaggggttggtgatgacggtggggaagaaggttgtgtg

SEQ ID NO: 5990 - DNA, 493 bp, Homo sapiens
  MAP TO AC005610.1; EXPRESSED IN BONE MARROW, SIGNAL = 4.2; EXPRESSED IN PLACENTA, SIGNAL =   4; EXPRESSED IN LUNG, SIGNAL = 4.4; EXPRESSED IN HELA, SIGNAL =   5; EXPRESSED IN FETAL LIVER, SIGNAL = 4.4; EXPRESSED IN ADULT LIVER, SIGNAL = 4.4; EXPRESSED IN HEART, SIGNAL =   4; EXPRESSED IN BRAIN, SIGNAL = 4.1
gttctgtgccctcaccactctcatggccgtcactgactaattatttatgaaactaaactggcctcaatttggatattagtggttataatgagtaaacaaccagacctattcagccttagcaccaacaggtggtttctgattttttgtcacacgatcctaaatacccctgccaaaaccatgcgtcagtattgatggctgctggaagaaacatcacaacagctcgattaaaggactctaacaagttctttcgacacttcatagaatagaaaattggatcttagttacacgcatccctatatcagctgatatcaccaccacatatgaagactaccaagggactgagtcaggagttccagaacttgtttgcactggaggcagaaaactttgagaaagtggagtgcctactaatccaagatcaacaaaacaaggattaattacctcaacaaaatgatacaaatttcgctgtgattactgttctgatttgaatcgggca

SEQ ID NO: 5991 - DNA, 457 bp, Homo sapiens
  MAP TO AC006121.1; EXPRESSED IN PLACENTA, SIGNAL = 1.6; EXPRESSED IN BONE MARROW, SIGNAL = 1.7; EXPRESSED IN ADULT LIVER, SIGNAL = 1.9; EXPRESSED IN LUNG, SIGNAL = 1.6; EXPRESSED IN HEART, SIGNAL = 1.5; EXPRESSED IN FETAL LIVER, SIGNAL = 1.7; EXPRESSED IN BRAIN, SIGNAL = 1.8
agaaaaagcccactgacaggtgacataataaaaatgaacaattcctaactacaccaaattcctgagacaaacatcagagtaaaatacacaatttatatgcaaaattacaattccttacgtacatgaaaaagtacatcagacaccatttacagagttcctacttttgacttaccctccaaaggtaatctaatcctattaactccaagtcatccatcatataggctctcctttttgctactagttttccttctcgacaattcacagctttgaagaatcgctcaaaacacttcattccattttcagttaacagagaaggatcaagctgaagcacattactttcaaagaagtccttattaatatcaggatctaagtctggttcatcccccatcaacttggaataccacttaaaacaggcttcacgatcacaaaggtaaactgcattctcagctaagcattt

SEQ ID NO: 5992 - DNA, 450 bp, Homo sapiens
  MAP TO AC004847.1; EXPRESSED IN PLACENTA, SIGNAL = 2.2; EXPRESSED IN LUNG, SIGNAL = 2.4; EXPRESSED IN FETAL LIVER, SIGNAL = 2.5; EXPRESSED IN HELA, SIGNAL = 2.6; EXPRESSED IN BRAIN, SIGNAL = 2.7; EXPRESSED IN BONE MARROW, SIGNAL = 2.5; EXPRESSED IN ADULT LIVER, SIGNAL = 2.7; EXPRESSED IN HEART, SIGNAL = 2.5
cctgtgatcacctccatcagagatagttcactgtcatggacagcagccttcttggtgtcatgaatttcttggcgaattggctgagttcaaatgtggatcttatgtttccctctctctgtgccctgccagaactctgtgggaggggtctgtggtcagtatcctctttgcttccttccttccctgccccttagggagttgatggcaggctttcttgctcaatcaggccactgccatcacccagtttagctcaccacctgcagactcagaggggacagtggaggctgcaatgttgctgcaaccaaaggacctgcgccaaggatacccccacagcggtagtgggatccccacttactggagcatctcccgtgaaggcacacagacccaagcatcaaccatcctcagcaccagcccagggtgggtgagcactggtgggtccatcttcctagctcc

SEQ ID NO: 5993 - DNA, 485 bp, Homo sapiens
  MAP TO AC004752.1; EXPRESSED IN HELA, SIGNAL = 2.4; EXPRESSED IN BRAIN, SIGNAL = 2.3; EXPRESSED IN ADULT LIVER, SIGNAL = 2.2; EXPRESSED IN PLACENTA, SIGNAL = 2.1; EXPRESSED IN LUNG, SIGNAL = 2.4; EXPRESSED IN HEART, SIGNAL = 2.2; EXPRESSED IN FETAL LIVER, SIGNAL = 2.1; EXPRESSED IN BONE MARROW, SIGNAL = 2.3
attgcttttcccaagacaggtttgattaactctttaggaaccatcctcactcctaagcagatctcttcagagctcctaaaaagtcttcacatcatggtcctggcatttgttgtgcacctcgggcatatatgttcatcaatttgcttgttgctttaactttcaagtcttttaatcctctataatcctgtgagatatgtattattatgctcatttttaacagagggggaaaatgaggctcagaaaattcatggtggtgatcttttcaaatacatacctaatcatgtcattctcctgcttaacttaccctcgaaagccttccaaacccctcagcatagcctccaaagccctgtgtgatctgtttctggcctacttctcccacctctgctcaaaccacttctccgcttgctcaccacattttatattttcaggccactgcctgttttgcaagcgcgtcaagcccattcccatctcaaggcctttgcact

SEQ ID NO: 5994 - DNA, 453 bp, Homo sapiens
  MAP TO AC004518.1; EXPRESSED IN PLACENTA, SIGNAL = 5.7; EXPRESSED IN LUNG, SIGNAL = 6.2; EXPRESSED IN FETAL LIVER, SIGNAL = 5.3; EXPRESSED IN ADULT LIVER, SIGNAL = 4.6; EXPRESSED IN HELA, SIGNAL = 5.6; EXPRESSED IN HEART, SIGNAL = 4.5; EXPRESSED IN BRAIN, SIGNAL = 5.5; EXPRESSED IN BONE MARROW, SIGNAL = 5.5
tcacagcaaacttcagccctatgttaactgacttcacagcaacgctataaggttgggtcggttactcttctctgggtgaggctgtggctggatgagagatgtttgttagctgcctgtggacacacagctggcaggctgaaatttgaagcagcgtcttgctcccagtccacactcagggccgtgtgagtgggatgtgagcctgagtctgccctcccttgggtttgctgtcctgagagaacaaaagcaaatccgtgttctggttctctgagatagctcttactagacctggctcagtttgacccctttctgctgctggaaaggaggacagtgcaggtcaaagccctggttgctgattacagacaagatgggagtcatgtggggtgtcagcttctgtctcctgagagagaaaaccgaaaaatgctacctgaatttccaggatgaggttgaaggcac

SEQ ID NO: 5995 - DNA, 456 bp, Homo sapiens
  MAP TO AC005479.2; EXPRESSED IN LUNG, SIGNAL =   3; EXPRESSED IN BONE MARROW, SIGNAL = 2.8; EXPRESSED IN PLACENTA, SIGNAL = 3.2; EXPRESSED IN HELA, SIGNAL = 3.1; EXPRESSED IN HEART, SIGNAL = 2.4; EXPRESSED IN FETAL LIVER, SIGNAL = 2.4; EXPRESSED IN BRAIN, SIGNAL = 2.7; EXPRESSED IN ADULT LIVER, SIGNAL = 2.5
acagtgctctgctggtagggataggagacagatgggggcagtggaggaaaaggagtgtcacagaagggcaggagctcactgcttcctaaatagcatacggttctcttcccagaggctcagccctgcagggtcaggggaaatcgtcctgaccttgatgtgctggggttgggatgagcacagtaatttggaatagatcaagaaccccagaggttgtggggcatgaccctgtgggaccacagcagtgacctggccacctctgtcctctctcatggcatggctctggggacagatattgacgagtgtgaggactatggagacccggtgtgtggcacctggaagtgtgaaaacagccctggctcctaccgctgtgttctgggctgccagcctggcttccacatggccccgaacggagactgcattggtgagtagggagggaggagagagaggagagagggc

SEQ ID NO: 5996 - DNA, 476 bp, Homo sapiens
  MAP TO AC006016.2; EXPRESSED IN BRAIN, SIGNAL = 7.9; EXPRESSED IN PLACENTA, SIGNAL = 7.1; EXPRESSED IN LUNG, SIGNAL = 6.1; EXPRESSED IN HEART, SIGNAL = 5.7; EXPRESSED IN BONE MARROW, SIGNAL = 5.6; EXPRESSED IN ADULT LIVER, SIGNAL = 5.5; EXPRESSED IN HELA, SIGNAL = 4.7; EXPRESSED IN FETAL LIVER, SIGNAL = 6.4
ccaaatacatgtggttgagccattatcgggtggacatacgtatcactggccccaggtcctgccacaaccccgacaggttacttccacccatcaataccactttccaggtggccatatggcgataactgagactagtaagatgttagaggaggtgcagatagtgcatggaatgcacaaaccctacaattctctggtatggccagtcagaaagcctgacggaacttggaagatgatggtggatgttcgagaactaaataaagtaacacccccttcacatgcagctgtgctgtctatcacggatttgatggatcacttgatgatggaattgggacagtaccactgtgtgatggacttggcccatacattcttcccaattgacatcacaccagagagccaggaacagtttgtcttcacatggaaagggcgacaatagactttcacggtgttgctgcagggctgtgtgcataaacccacca

SEQ ID NO: 5997 - DNA, 485 bp, Homo sapiens
  MAP TO AC004216.1; EXPRESSED IN PLACENTA, SIGNAL =   4; EXPRESSED IN LUNG, SIGNAL = 4.7; EXPRESSED IN HEART, SIGNAL = 4.2; EXPRESSED IN BRAIN, SIGNAL = 4.9; EXPRESSED IN ADULT LIVER, SIGNAL = 4.4; EXPRESSED IN FETAL LIVER, SIGNAL = 4.2; EXPRESSED IN BONE MARROW, SIGNAL =   4; EXPRESSED IN HELA, SIGNAL = 4.8
acgtcctctactttggcagctacatgatgtgaaaactaatgcaacttctcaagaaagatttgctgcaccccggcagtcagcccgaattactgaatcatggagagttaacacaatcaataaatctacagttgctgggcaagagcgctgttttgcatacatacagccacggagcaaaaagccatcagctatttcactggttgcatgcagtcacccttaagcttgtaagaacctggaagctgggccaacagtgtctgccagacagagcctcttacacctgttttgtcttttcctgcttacactcttcaatgatttcttcacctgaatgatatttctcctgagttacaaaatggcagttgttaattatgaatggaaaagtttcctttacaggggagaaatctgacaatatcaccttaaccaggtaatcaaggttaacgtcattgataatgggacaaatgacattacgtgcctggtgatggaatgcacta

SEQ ID NO: 5998 - DNA, 455 bp, Homo sapiens
  MAP TO AC003683.1; EXPRESSED IN PLACENTA, SIGNAL = 0.91; EXPRESSED IN LUNG, SIGNAL = 0.98; EXPRESSED IN FETAL LIVER, SIGNAL = 0.86; EXPRESSED IN BRAIN, SIGNAL = 0.94; EXPRESSED IN BONE MARROW, SIGNAL = 0.98; EXPRESSED IN ADULT LIVER, SIGNAL =   1; EXPRESSED IN HEART, SIGNAL = 5.4
ttggtgttctggtttggttgaatcttcctttttctttctcccttttgtcccctctcctaatagaactaaatggtttattttgaccaaggtatacacagtttggtttactcggacaccaaagctgtatcaaatcagggagaagaatgagagagaaatgcaaatagaactcctgtgccagggtaatcagtaacacttgtccacggcatttctgtaggactaccgagtgaatatttttctgagacaacagtggaatgattcacggctggcgtacagtgagtacccagatgactccctggacttggacccatccatgctagactccatttggaaaccagatttgttctttgccaatgagaagggtgccaacttccacgatgtcaccactgacaacaaattgctacggatttcgaaaaatggcaaagtgctctacagtatcaggtaagcctccattggct

SEQ ID NO: 5999 - DNA, 459 bp, Homo sapiens
  MAP TO AC004526.1; EXPRESSED IN PLACENTA, SIGNAL = 2.6; EXPRESSED IN HEART, SIGNAL = 1.9; EXPRESSED IN FETAL LIVER, SIGNAL =   2; EXPRESSED IN BRAIN, SIGNAL = 1.8; EXPRESSED IN BONE MARROW, SIGNAL = 3.8; EXPRESSED IN ADULT LIVER, SIGNAL = 1.9; EXPRESSED IN HELA, SIGNAL = 2.3; EXPRESSED IN LUNG, SIGNAL = 2.2
ctttgcataaggcccttcacagtgagactgaatacatgatcatccattctaaaatgtgagcttttccaggatagatcaagatagctcttctaacacatagacagtattacattgcttgtctacttaccagaatgcatttgtgtagttgcttaaatgaagttccatgtttatcttttaaaaatgttgcccttgggtttttacatagtgtcagcttttactttaatgccagggattttgttcctatctaataatgtcatttaatatatttttcatgcagaatgtgcagaaaagctatttgacttggtggatggttttgctgaaagcaccaaacgtaaagcagcagtttggccactacaaatcattctccttatcttgtgtccagaaataatccaggatatatccaaagacgtggttgatgaaaacaacatgaataaggtaaggagggcaaaattatttcca

SEQ ID NO: 6000 - DNA, 460 bp, Homo sapiens
  MAP TO AC004222.1; EXPRESSED IN PLACENTA, SIGNAL = 2.2; EXPRESSED IN BONE MARROW, SIGNAL = 2.1; EXPRESSED IN ADULT LIVER, SIGNAL = 2.4; EXPRESSED IN LUNG, SIGNAL = 2.2; EXPRESSED IN HELA, SIGNAL = 2.5; EXPRESSED IN HEART, SIGNAL = 2.3; EXPRESSED IN FETAL LIVER, SIGNAL = 2.3; EXPRESSED IN BRAIN, SIGNAL = 2.4
agtgtacaagagccacagcgttattgggcttggagtgtcccctaaagcagatatagctgcagtgaccaaagacttaagataacaacacccaagtgccttcaaatacttggaaagccttccccagaagggtgggtacaaacaagcccagactacaaagactacaaaaatacctaactcttcaatgcccaggcactaatgaacatccataagcatcaagaccatccagaaaaacatgacccaccgaaggaattaaagaaggcaccagtgatcaatcctggagagacagcgatatgtgacctctcagaccgaggagtcaaaatagctgttttgaggaagctcaaggaaatccatgataatgtggagaaggaattcggaatcctatcagataaatttaacgaagagattgaaacaattacaaagaaccagagagaaattctggagacgaaaaatgcagctgaca

SEQ ID NO: 6001 - DNA, 475 bp, Homo sapiens
  MAP TO AC004615.1; EXPRESSED IN LUNG, SIGNAL =   8; EXPRESSED IN ADULT LIVER, SIGNAL = 7.2; EXPRESSED IN PLACENTA, SIGNAL = 7.1; EXPRESSED IN HELA, SIGNAL = 7.6; EXPRESSED IN HEART, SIGNAL = 6.3; EXPRESSED IN FETAL LIVER, SIGNAL = 7.3; EXPRESSED IN BRAIN, SIGNAL =   7; EXPRESSED IN BONE MARROW, SIGNAL = 7.9
gtgttattttctgcccagcccaaagccaaaaggaaaatgcacatctggcttgtaaatcacaaccaagcattgatgcctcgcttgctctttattgggtggctgccctctgtgctttacaagttcttagtatggcttatggggcatcctgagggaaacctccagtggcctctgaaagatggcatagagggacctccgaatcctctctgaaatgtaacgtctgctacctgatgtgcactatctgtggtccccagaggaaaaataattcatttttatctttttatttatttattttttctatttagaaattggcccctggttacgggagttcagagcgaagaatgctgtggatttctcgcagttaacatttgacccaggacagaaagaacttgttgtaggagcaaggtgagagatattgtattttgccaccacagatatttttggacttcattttacatctgtgcagttacatgtgacc

SEQ ID NO: 6002 - DNA, 468 bp, Homo sapiens
  MAP TO AC003685.1; EXPRESSED IN ADULT LIVER, SIGNAL = 1.8; EXPRESSED IN PLACENTA, SIGNAL = 2.5; EXPRESSED IN LUNG, SIGNAL = 1.5; EXPRESSED IN HEART, SIGNAL = 1.4; EXPRESSED IN BRAIN, SIGNAL = 1.4; EXPRESSED IN FETAL LIVER, SIGNAL = 1.3; EXPRESSED IN BONE MARROW, SIGNAL = 3.9
aagagaccagacctggcaaccaaggggtgaggtactggccaggaaggtggagtgggctcaggctctgtggatttcaagtgcagactgacggcctgggagaggccaaggagaccagatcctggcagcagctgaggaggtgcccaagggcactttcaggcactggggccttcagtttgttctgtgggcaagggttgggggttgggatgcagggtaggttgggctggcctggaatctccctgagggcaccctgccttatctacctagatcattcactggtccacatcctgttcgtttccttcatgtccacctcattgacctctccgtcatcaggtgacccattgtagtcattcatcttgtccatgtcctgcatgtcctcatcatcctctaagtcctcttcactatcctcattgtcttcatcatcctcctcttcctcatcatcatagtgctctgaggctggcttgccaatag

SEQ ID NO: 6003 - DNA, 499 bp, Homo sapiens
  MAP TO AC004764.1; EXPRESSED IN PLACENTA, SIGNAL = 2.2; EXPRESSED IN LUNG, SIGNAL = 2.2; EXPRESSED IN FETAL LIVER, SIGNAL =   2; EXPRESSED IN ADULT LIVER, SIGNAL = 2.1; EXPRESSED IN HELA, SIGNAL = 2.2; EXPRESSED IN HEART, SIGNAL = 2.1; EXPRESSED IN BRAIN, SIGNAL =   2; EXPRESSED IN BONE MARROW, SIGNAL = 2.1
ttcagcagaagtctgagaggctaaacttgatggctgtgttaacatatgtcacgtgtagcacagtggagaaagcaggatatggctcataatgacagtggtgaagacctgcgaatgaagttgctagttatcacctacattagggtttgacataggtctatgttatgggtcgctgcatctgctggaactcacagactttactatagagaatcaaagatcccgtatccgaagtctatggaaatgctcatggtggtaaattccaacagaatgaaacaccaaacttgcttaaagtaactcacgtttcaatttgaaagagatattgtcaaaattggaggcccccaggttcctgtctgttccaaatctttgcatgatgacagtggtttctctgatgtggtaagctttggctttcttctgttttctttctaaaagatcactggagtagagaggagttaaacagacatgacctttgacctcttgcatgacctccacagatagcaaaccg

SEQ ID NO: 6004 - DNA, 474 bp, Homo sapiens
  MAP TO AC005660.2; EXPRESSED IN BONE MARROW, SIGNAL =  24; EXPRESSED IN PLACENTA, SIGNAL =  22; EXPRESSED IN LUNG, SIGNAL =  29; EXPRESSED IN HELA, SIGNAL =  24; EXPRESSED IN HEART, SIGNAL =  18; EXPRESSED IN FETAL LIVER, SIGNAL =  23; EXPRESSED IN ADULT LIVER, SIGNAL =  22; EXPRESSED IN BRAIN, SIGNAL =  24
tggaatgaaagactaaggcagagcttgttattgaccaagaactttgcacttgcccagttcatctcctttttaactgaagttgcgtctctagtagctgctcatccagctgaagcagagtgcctctggacacccacattactgacactcatgcatacagtaggtgttcaaatctgtgctgcctgaattgggattttgaaagaaggccccataacttctgcttcccttggtggcaggcgatgggagggaggtgaccctggtgtgtccaatcagaagactccaaccaccatcttgctgactcccgagaggaagttccacagcttcgggtatgccgccagggacttttaccatgacctggatcccaatgaggccaagcagtggctgtacctggagaagttcaagatgaagctgcacaccactggggtgagcaagcctctcccctgggcccaggtcccccgcaatggagtgccaagcttc

SEQ ID NO: 6005 - DNA, 464 bp, Homo sapiens
  MAP TO AC006070.1; EXPRESSED IN PLACENTA, SIGNAL = 2.4; EXPRESSED IN HEART, SIGNAL = 2.2; EXPRESSED IN BRAIN, SIGNAL = 2.6; EXPRESSED IN BONE MARROW, SIGNAL = 2.5; EXPRESSED IN ADULT LIVER, SIGNAL = 2.3; EXPRESSED IN LUNG, SIGNAL = 2.5; EXPRESSED IN HELA, SIGNAL = 2.5; EXPRESSED IN FETAL LIVER, SIGNAL = 2.4
ggtaaatcttttgccagagggttactgtatggggatgatggtcctctgcggaactgatcagcagcaagcaggctgacagcagctggtcacacaggtgggctggaagcaagtggtcctgcagcaggtagtctcacagcaggctgggcggcagcacggctggcagcagctggagccacagctctggtttaggcaaccaggcaggtagacactcgtggggtggtagcaggttctcctgcagtagatgggtgcacaggagctgggctggcagcagctggacccacagctggtttggccacagcagctggacccacagcagatgggctggcagcagggtgtgctgcagcaggaaggctggcagcagctggtcacacaggtgggctggcagcaggtggtcctgcagcaggtgttttgacagcaagttgggtggcagcaaggctggcagcagctggacacacagcaggagg

SEQ ID NO: 6006 - DNA, 472 bp, Homo sapiens
  MAP TO AC005157.1; EXPRESSED IN PLACENTA, SIGNAL = 1.6; EXPRESSED IN ADULT LIVER, SIGNAL = 1.7; EXPRESSED IN LUNG, SIGNAL =   2; EXPRESSED IN HEART, SIGNAL = 1.4; EXPRESSED IN FETAL LIVER, SIGNAL = 1.6; EXPRESSED IN BRAIN, SIGNAL =   2; EXPRESSED IN BONE MARROW, SIGNAL = 1.7
ttttctgttttatgattgtgagggctaatactgagtgtcaacttgattggattggagggtgcaaattattgatcttgggtgtgtctgtgagggtgtggccaaaggagattaacgttcaagtcagtgagctgggaaaggcagacccatccttaatctgggtgggcaccatcaaatcagctgccagcatggccagcatgtaaaccagggagaaaaatgtgaaaaggctagactggctgagcctcccaccttacatctttctactgtgctggatgcttcctgcccttgaatatcagattccaagttcttcagctccaagttcttgggctgaggtgggatctttccctccccactgtacactgagcaatagagggtggtgaggggtgagggagccacgctgctgaattctggttggcattcccagctgtgtaaaatggggtgttggggtggggcagcctctgcttgggtttggtta

SEQ ID NO: 6007 - DNA, 476 bp, Homo sapiens
  MAP TO AC002428.1; EXPRESSED IN BRAIN, SIGNAL = 3.5; EXPRESSED IN PLACENTA, SIGNAL = 3.7; EXPRESSED IN LUNG, SIGNAL = 4.2; EXPRESSED IN HEART, SIGNAL = 3.4; EXPRESSED IN BONE MARROW, SIGNAL = 3.9; EXPRESSED IN ADULT LIVER, SIGNAL = 3.4; EXPRESSED IN HELA, SIGNAL = 3.4; EXPRESSED IN FETAL LIVER, SIGNAL = 3.9
ttaagcttggtgatgaaggcatgtcaaaatcggacatacgctgaaagttaggcttcttgtgttaaacaattagccaagttttgaatgcaaaggaaaagtccttgaaggagattaaaaagtgctactccagtcaacacgcaaatgacaagaaagtgaaacagccttattgctggtatggggaaagttttcatggtctggatagaaaatgaaatcagctataacctgcccttaagccaaagcttaatccagagcaaggccctaacctctttaattctatgaaggttgagagaggtgaggaagctgcagaagaaaagtttgagattagcagagtttggttcatcagatttagggaaagaagccatctccataacataaaagtgcaaggtgaagcagcaggtgctgatggagaagctgcagcaagttatccagaagatctagccaagatcattgataaaggcagctacattcaaaacaga

SEQ ID NO: 6008 - DNA, 480 bp, Homo sapiens
  MAP TO AC002433.1; EXPRESSED IN LUNG, SIGNAL = 4.6; EXPRESSED IN HELA, SIGNAL = 4.5; EXPRESSED IN HEART, SIGNAL = 4.7; EXPRESSED IN FETAL LIVER, SIGNAL =   6; EXPRESSED IN PLACENTA, SIGNAL = 5.9; EXPRESSED IN BRAIN, SIGNAL = 6.6; EXPRESSED IN BONE MARROW, SIGNAL = 5.9; EXPRESSED IN ADULT LIVER, SIGNAL = 4.2
ggcttaactaggcaaaacttcgattaataaatgataagctgtagacctctactcagagtagtaacaaagagagagctggaggtggtggctcttgcttgtcactccaactcccatggagggtccttccttcttcaacctgactttcttatccccacagacctcatgtggaaccttgtaccatgggtgctattctgtggctgctgtaggatcttcccaggtagaaccagaccttatcctttttctttggtttcttgggagtagagctgaacatgagtgggtgacttccttttccaggctattggtcaaagctgcggtcagcaacaacttggccaagatatgcttgacccagttttgccacgggctactgaccaagaggttgctgttcggagttggcatgagtcagagaagcaggttaccagcaggttaccagctgggcaaaactcagatcgattagacatatcttggggtctttttacccct

SEQ ID NO: 6009 - DNA, 470 bp, Homo sapiens
  MAP TO AC003084.1; EXPRESSED IN PLACENTA, SIGNAL = 3.4; EXPRESSED IN LUNG, SIGNAL =   2; EXPRESSED IN HEART, SIGNAL = 1.7; EXPRESSED IN BRAIN, SIGNAL = 1.8; EXPRESSED IN BONE MARROW, SIGNAL = 1.6; EXPRESSED IN ADULT LIVER, SIGNAL = 1.8; EXPRESSED IN HELA, SIGNAL = 1.8; EXPRESSED IN FETAL LIVER, SIGNAL = 1.6
tgaaggtctgtaaaggacatttgttatttttacatgtcaggcatctgttttctttgaaggtaactacactctgactttccctggagaaccatacatcccccacattggctatcaggtttgcgtgaatcgaacaattctaacttcatggacgtatgacttaggcttggccagtcaaattgcattatactaaccagagtaattggctcaggggttgtattatttccctattgttaactgtaaccaattaacacaaatttaatagcttaaatataaatataaatttattatcttatagtcctggaggtccgaagcccccaaatcaaggtgtcagcagggctgtattccttctggctctgggtatctttcagatctttctctgatctctgcttctgtcataaagtctcctactatgactgttacctccctgccttcctcttacaaggattatgtgattacattgggcccttctg

SEQ ID NO: 6010 - DNA, 469 bp, Homo sapiens
  MAP TO AC002452.1; EXPRESSED IN BRAIN, SIGNAL =  12; EXPRESSED IN ADULT LIVER, SIGNAL = 9.5; EXPRESSED IN PLACENTA, SIGNAL =  10; EXPRESSED IN LUNG, SIGNAL =  13; EXPRESSED IN HELA, SIGNAL =  10; EXPRESSED IN HEART, SIGNAL = 9.8; EXPRESSED IN BONE MARROW, SIGNAL =  11; EXPRESSED IN FETAL LIVER, SIGNAL = 9.8
ttggggtaggtagaggaggactgcagctttatcattatttgaattgtttgaattttttatagttagaatattttcaagtattacctatatgtgtaaaagtaaataaaatggacttaactagctctgaggtagactgagctcaccagaaggtatatgaattcccaatgccaggttgcctggaagaggctttagggacaactgtttccagggaatgaaaaaccatcctctgcccttatgtattatctgagaatttcagtcaagatattcttaccttggtggtccacagtttgacagtccagtcaaatgatgatgtgacaaacaggtgagaaaagtcgattgggcccactgccatgtggcagttaattcctgtcactggcccttggtgaccttcaaagacctcaccaatacctgctttgctgtaggaagagcacacatgagcagaattccagtgacctctgaaaagcaatga

SEQ ID NO: 6011 - DNA, 483 bp, Homo sapiens
  MAP TO AC005234.1; EXPRESSED IN LUNG, SIGNAL = 1.6; EXPRESSED IN HEART, SIGNAL = 1.4; EXPRESSED IN FETAL LIVER, SIGNAL =   2; EXPRESSED IN BONE MARROW, SIGNAL =   2; EXPRESSED IN PLACENTA, SIGNAL = 1.6; EXPRESSED IN BRAIN, SIGNAL = 1.6; EXPRESSED IN ADULT LIVER, SIGNAL = 1.3
tcacctgatttctcttgggcaactgtaaaacgaagggttggtcgggtgatctctaagttccccttccgaatgtggtccagggtcctactctatccctccttagccctgtgcttgcagggacagagatgggagaagggaaggggaggagagagaggaggcaggagggagcccaagggtgtcatgaatcaggactccactttctccttctttttgctctttttcaggaaggagggggttcggaatttctttttcttctttgagggagacttggaaggtgagccctctggggacatggggccgctggtgaccgactcggttttgtccttagaggtatcaacatccgtgtcagcactggtggtcatctggctcaggcctttgctgaggatttcctctgccgtctgctcctcctccctcccgttgaccaccaccccttccggctgggttgtttcgggctctgtggtggcggctttgcttgtttctgtc

SEQ ID NO: 6012 - DNA, 465 bp, Homo sapiens
  MAP TO AC005598.6; EXPRESSED IN BONE MARROW, SIGNAL =  11; EXPRESSED IN PLACENTA, SIGNAL =  11; EXPRESSED IN LUNG, SIGNAL =  13; EXPRESSED IN HELA, SIGNAL =  11; EXPRESSED IN HEART, SIGNAL =  10; EXPRESSED IN FETAL LIVER, SIGNAL =  12; EXPRESSED IN ADULT LIVER, SIGNAL =  12; EXPRESSED IN BRAIN, SIGNAL =  12
tgcctgatcttacacccaggaatttgtagttgtaacaaggtccctgcggaacttccatttgcttctgtcttctgtcctagaagtggactttagaaagactcttgtggtagacatgtgtactgctgtgttgctgctggtctaatgtcttcaacacgtattcttagtgactcttaacacttttaaccttagattgtgaatattcacaattcttacttgtcatagtctgtttatcctctttatcttctatgctgtttttaaaagcaatacaaacagaagctagagtaaccagtgttttgtctgacacattcttcttgataaactttatgaggtgtggtttatattcgtctgtacctttagtcacatgcctgcttcttagcacagaggtgatgaaaccacccacagctttgttgggggtattatatttctttatttttttgttttttagcccatcacaacattgatagc

SEQ ID NO: 6013 - DNA, 486 bp, Homo sapiens
  MAP TO AC005600.1; EXPRESSED IN PLACENTA, SIGNAL = 0.74; EXPRESSED IN LUNG, SIGNAL = 0.83; EXPRESSED IN FETAL LIVER, SIGNAL = 1.4; EXPRESSED IN BONE MARROW, SIGNAL = 0.81; EXPRESSED IN ADULT LIVER, SIGNAL = 0.98; EXPRESSED IN HEART, SIGNAL = 2.4; EXPRESSED IN BRAIN, SIGNAL =   1
gctccattcccagtactcccgggtccccagccccagcccaccttgctccgggacatccggaagagaaaaaggatggccaggtagacgggatagacaaccacgctggacaccaggccaacagcgactgtgtcgacgctcagcgggctcagcctggacacatgccccgtgctgtgtggaggagaggaggccacacaggtgaggctgaggggcaggaagggctgggcaggaagaggctgccccgacccctacggcacccacctgtaggcagagtcgccaacagccccgtaccacacggcgttggcgcccaggaagaggcagatgaggagaacgcagcaggtggccctctggatgcgagtgaaacggctacgaggcggccggtcccatatggagagccagatgtgcttgtcaaagaagccacgctgcagctcagccaccagcaggcgccggaagcgcaaaagggctgcgtcgcctagaaggcagggaggg

SEQ ID NO: 6014 - DNA, 405 bp, Homo sapiens
  MAP TO AC004148.1; EXPRESSED IN BRAIN, SIGNAL = 1.1; EXPRESSED IN PLACENTA, SIGNAL = 1.2; EXPRESSED IN LUNG, SIGNAL = 1.2; EXPRESSED IN HEART, SIGNAL = 1.3; EXPRESSED IN BONE MARROW, SIGNAL = 1.1; EXPRESSED IN ADULT LIVER, SIGNAL = 1.3; EXPRESSED IN FETAL LIVER, SIGNAL = 1.2
gatacgacttggccagaaatgtcttttctataacatactgaatgttaacctgacatggcacctgccctgaagctctaagtggcttaatggtcaaagtcttaatttttgaaccattaaaacaacatctgagattctggttacagaaaatctttagcttctttatttcctttcactctcacaaacccaataatcatttgtttcttgaatccaggcactgcgggagttggtattaaaataccgtgaggacatcattaatgtgcggacagcagcagaccacgtagaagaaaagctgaaggctgagatacttttcctaaaagagcagatccaagcagaacagtgtttaaaagaaaatcttgaagaaactctgcaactagaaatagaaaactgcaaggaggaaataggtga

SEQ ID NO: 6015 - DNA, 487 bp, Homo sapiens
  MAP TO AC004504.1; EXPRESSED IN ADULT LIVER, SIGNAL = 1.3; EXPRESSED IN LUNG, SIGNAL = 1.4; EXPRESSED IN HEART, SIGNAL = 1.4; EXPRESSED IN FETAL LIVER, SIGNAL = 1.5; EXPRESSED IN BRAIN, SIGNAL = 1.4; EXPRESSED IN BONE MARROW, SIGNAL = 1.3; EXPRESSED IN PLACENTA, SIGNAL = 1.4
cacaggctggctactcactgtagagtactgagcacagcctggctgcacactgtaggatgctgagcacagcctggctgcacactgtagggtgctgaatacaggctagccacacgttgtagagccctcagtgcctgctagatgtcattttatttttctttttacctttatcactttgagggctttttcaagtctatggtctttcaggctcaattaattgtaactaagcctctgagacaaagtgcttgttgaatgtcttccactgttccgacacagaaacgcagcataagtcgaagttgcaatggacagcatacgtcgaaacttcctctgtgccaggctccttgtggggactctcttctcatcgcctcctttagtcctcaccactgccctatgaggaagaatgtgctttttaacttcattttacagatgagaaaactgaggcccataaggcgaagttactctctcaagccagtaagcagtaggaattggg

SEQ ID NO: 6016 - DNA, 454 bp, Homo sapiens
  MAP TO AC004600.2; EXPRESSED IN FETAL LIVER, SIGNAL = 1.2; EXPRESSED IN ADULT LIVER, SIGNAL = 1.1; EXPRESSED IN PLACENTA, SIGNAL = 0.94; EXPRESSED IN LUNG, SIGNAL = 0.98; EXPRESSED IN HEART, SIGNAL = 1.8; EXPRESSED IN BRAIN, SIGNAL =   1; EXPRESSED IN BONE MARROW, SIGNAL = 1.1
aatagatgatcatgttatatggctttcaattaacaagctgggaatcaaaaaagtaaatgaatcacactaatttgattccaaaccaatgtgagccccataataatttttaactagggcaatttcttaaaagtttcctcacacaatgacagcaaagtattttctcaattgtctaatatgatttggggatttgtatataaaatcacgaatgtgctcagaaactataaagacagttcatatgtatgtgacgaggaatgcaaggttttcggtaggtatacagtcacaagttaataattacctacctttctgtgtctgggccatttttggctataatcatctttaattttcctagtcctcccacaggtgctctgtctgtgcccgttgtaaactgcaagaagagtcttttctgttcatctgtaaatgaatgaacgatttcccagaactccctaatgagaaa

SEQ ID NO: 6017 - DNA, 371 bp, Homo sapiens
  MAP TO AC002465.1; EXPRESSED IN LUNG, SIGNAL = 8.2; EXPRESSED IN BRAIN, SIGNAL = 8.1; EXPRESSED IN PLACENTA, SIGNAL = 7.9; EXPRESSED IN HEART, SIGNAL = 6.8; EXPRESSED IN FETAL LIVER, SIGNAL = 7.2; EXPRESSED IN BONE MARROW, SIGNAL = 7.3; EXPRESSED IN ADULT LIVER, SIGNAL = 6.6; EXPRESSED IN HELA, SIGNAL = 7.8
gatggatccaaacccaactgaggagttacgatgacctaaagaagcgtatttggtggtaaccacagttggggagggaacacgaggaaatttgtgcgggtttgcttaagtacaaactcccgtatttccactgggtaaaagggaaatacacgtgagggagtaggaggtttcacgaggctgggcctcgccttcgagggccaggggaggctgaaaccaggtgtggtcaagacaaggcctcctccgctacctgagacgtccggtcgagatacccaatctcccagccatcatcctcgctctcgctactctcgcctccgccagccactggcaggcctcgcagcgcgctcgccgccatgccagccaaggaagctccctgt

SEQ ID NO: 6018 - DNA, 476 bp, Homo sapiens
  MAP TO AC004518.1; EXPRESSED IN PLACENTA, SIGNAL = 4.2; EXPRESSED IN LUNG, SIGNAL = 4.2; EXPRESSED IN BRAIN, SIGNAL = 3.8; EXPRESSED IN HELA, SIGNAL = 3.8; EXPRESSED IN HEART, SIGNAL = 3.9; EXPRESSED IN FETAL LIVER, SIGNAL = 4.2; EXPRESSED IN BONE MARROW, SIGNAL = 3.8; EXPRESSED IN ADULT LIVER, SIGNAL = 4.2
aagactgccagtgtggaagcttgcgaacagctgaggcagcccgcacggataccctgtccagctcccttctttgtcttgaatcatgcaatatccatgcagggaaaaaaaaaaaaaaaaaagcccttatttgctgttatgtatcctgcctcatttaatgtattatcccagaaaagtagattgagttgtatgtggcagattgggagctgccatcatggtggttaaaagtacagaccaggtagtacagaaccaggtagcctgggttggaacccagcttcagtacttataagctacctacctttgaggattattgtgaagattaacgtccattggttgttgttgttctcatcagcattattactgtaggaaccctggaagtctcccctacccacccaagtcctattgcactttctatcatgacagaccatttctcttttttgagagtcttatattacaatgcagacacacctgagagggct

SEQ ID NO: 6019 - DNA, 485 bp, Homo sapiens
  MAP TO AC005610.1; EXPRESSED IN PLACENTA, SIGNAL = 1.5; EXPRESSED IN HELA, SIGNAL = 1.8; EXPRESSED IN HEART, SIGNAL = 1.7; EXPRESSED IN FETAL LIVER, SIGNAL = 1.7; EXPRESSED IN BRAIN, SIGNAL = 1.7; EXPRESSED IN ADULT LIVER, SIGNAL = 1.7; EXPRESSED IN LUNG, SIGNAL = 1.6; EXPRESSED IN BONE MARROW, SIGNAL = 1.9
gctgaatcacagaaaggatggagaaggatactccttgatggaggaggaggaaaggggattagggagagaagttggctcattccatgtaatagagtttagagagaaggtgggaggggagagtgaatatttcaagggctgctcaaatgaaggttgagtggatttggtgattatggggagagaaaacaggctaaataccaaatcctcattaaggtgtttcaacagatgagatttagcagaaaatggaattttgagttacgtgcatggtggcttctgaccctgctcctggaagacaacttttagaaacttgaccctgatggggtggagggtgacccagtgaatagccacagctgtgatgatatggtcaatgttgatgtttctattgataattttgtttccaaagagagttttggaaactttgtcttctatccttagaagttagattcatcaactattttcttataagagacttctctgacccaggagct

SEQ ID NO: 6020 - DNA, 499 bp, Homo sapiens
  MAP TO AC005479.2; EXPRESSED IN PLACENTA, SIGNAL = 1.6; EXPRESSED IN LUNG, SIGNAL = 1.5; EXPRESSED IN FETAL LIVER, SIGNAL = 1.6; EXPRESSED IN BONE MARROW, SIGNAL = 1.8; EXPRESSED IN ADULT LIVER, SIGNAL = 1.6; EXPRESSED IN HEART, SIGNAL = 1.9; EXPRESSED IN BRAIN, SIGNAL = 1.4
gttcccatcccagctttcactgcccaggggctcaaggccagtgaccatgttgccaggcctgggtagacttccctcaatctggaagactgaagtagccttccctgcctgctcacgtgcttatcccaacctggggctccctccctccttgctgccacaattgccgtgtctcccaaagggagggaaaggaaggccctggtttcctgcaggaacagcacctctcagtttgtcctctggctgttggctttgcagaggccttcagagagatctgccctgccggccacggctacacctacgcgagctccgacatccgcctgtccatgaggaaagccgaggaggaggaactggcaaggcccccaagggagcaagggcagaggagcagcggggcactgcccgggccagcagagaggcagcccctccgggtcgtcacggacacctggcttgaggccgggaccatccctgacaagggtatctgagctgggggagatgcctgagggatttt

SEQ ID NO: 6021 - DNA, 412 bp, Homo sapiens
  MAP TO AC002477.1; EXPRESSED IN PLACENTA, SIGNAL = 1.5; EXPRESSED IN LUNG, SIGNAL = 1.4; EXPRESSED IN FETAL LIVER, SIGNAL = 1.3; EXPRESSED IN BRAIN, SIGNAL = 1.5; EXPRESSED IN BONE MARROW, SIGNAL = 1.4; EXPRESSED IN ADULT LIVER, SIGNAL = 1.2; EXPRESSED IN HEART, SIGNAL = 1.4
tgaccttcaaaggcttaccactgtctaaacattccttatcagtcatcgaactttttgtatttatattacatttgtgtgaaactaaataggtcaaagaatttttcccactttaatggattctcataatgctgtgaggcaggtattaccatctgcaatttacagtaacagtctcagagaaactagtaacttccctgaagtcacacagctagcaactgatggaggtaggagacttaggtactgtgatgaaaagactgttgccctgattctttttgcccacttacctattaattctctattttttgcttctatttcctctagcagtgtctctggagtagatgtcattttctcattatctgtggcataactttccaaaaactttctatattctggatctaaataatcatttgaggaa

SEQ ID NO: 6022 - DNA, 466 bp, Homo sapiens
  MAP TO AC004159.1; EXPRESSED IN PLACENTA, SIGNAL = 1.6; EXPRESSED IN BRAIN, SIGNAL = 1.6; EXPRESSED IN BONE MARROW, SIGNAL = 1.5; EXPRESSED IN ADULT LIVER, SIGNAL = 1.7; EXPRESSED IN LUNG, SIGNAL = 1.8; EXPRESSED IN HELA, SIGNAL = 1.9; EXPRESSED IN HEART, SIGNAL = 1.8; EXPRESSED IN FETAL LIVER, SIGNAL = 1.6
caatcctttagtgtcaggcagagatacaacatttttttcagcacttacggaagtttggtggaaagctgtaatagacgagtacttattcttttctttatttttctttctctctttcttttttcttttttggccagtaaacagaatttattagtaagcataagtcagatcggcatggcccaaggagacagtgctgccaaaagccttcatgagtacagaacctgccacttgtccaaggggctgtgattgggaacttacttgaccccacaaccatcagggatgaggtgcttctcagccactttgtcttcaaatttgtcagcattaaacttggtgaagccccacttgttggagatatggatcttctgccatccagggaacttgaacttggccctgcgtaaggcttcaatcacatggtccttgttctgaagcttagtgcggataaacatgatgacttgaccaatgtggaccc

SEQ ID NO: 6023 - DNA, 465 bp, Homo sapiens
  MAP TO AC004525.1; EXPRESSED IN FETAL LIVER, SIGNAL = 1.5; EXPRESSED IN ADULT LIVER, SIGNAL = 1.5; EXPRESSED IN PLACENTA, SIGNAL = 1.9; EXPRESSED IN LUNG, SIGNAL = 1.3; EXPRESSED IN HEART, SIGNAL = 1.4; EXPRESSED IN BRAIN, SIGNAL = 1.3; EXPRESSED IN BONE MARROW, SIGNAL = 1.5
aagggtcctgagaccaaaaagtgtgagaactgctggtctagtccagtattccagccgtatccatgtgccacgtggaccaacactcccaccatgcgctccactgtatcttacataacatgtccctggagatgggacctcccctctaacaccatataaacagcagcaaaccatactcagcatcctgcactccagcgcaccacctggacccagctcactcttggggcaaaccctttgggcacaacctccccaaacctccagctccagcgcaggcttactcggagagcagaaaaaccagctggtacaacaggcggagctcggtgctgcaattggtgggaccattcatcttccactcgcaagtagagatgctcatgtagtcggagacgcaggtgggctcctgcaagaccttcatgttccctggggagacacaggagcagcctgagcggcccaggaactcaatgcgtgagg

SEQ ID NO: 6024 - DNA, 489 bp, Homo sapiens
  MAP TO AC005629.1; EXPRESSED IN BONE MARROW, SIGNAL = 3.9; EXPRESSED IN PLACENTA, SIGNAL =   3; EXPRESSED IN LUNG, SIGNAL = 3.5; EXPRESSED IN HELA, SIGNAL = 4.1; EXPRESSED IN FETAL LIVER, SIGNAL =  53; EXPRESSED IN ADULT LIVER, SIGNAL = 3.9; EXPRESSED IN HEART, SIGNAL = 3.9; EXPRESSED IN BRAIN, SIGNAL = 4.5
  unsure 26
  unsure 28
  unsure 41
  unsure 44
  unsure 46
  unsure 363
  unsure 365
ttcttgatggaaaaccccaggctggntngtcgggacgagcncantnacgctccggcagctctgcacgtctctgcggccctctccagggaggaaatctgcggatctgcacctgggcgatgcggtagatgcgcgtgtaggtcacgatcatgatggccatggggatgtagaagctgatgagcgaggaagagatggcgtaggttcgattcaggctggagtcacagttctctcgcctcacgtcgggctcccaaacggcctcctcccagggcgtccagttggccaggttgtttggcaggtccagcccacctcaagagaccgcctggtccctgtgccagttgagctggaccggaatgaaggagatgaggntngacaaggtccaggccgggcggaccatgaccaaggccatgcgctgggtcatcttgcctcgtagcggaaggcctggagacggcagtagcgggccacgctgatgacccgacgcacaggttcaggatg

SEQ ID NO: 6025 - DNA, 465 bp, Homo sapiens
  MAP TO AC004061.1; EXPRESSED IN BONE MARROW, SIGNAL = 1.2; EXPRESSED IN PLACENTA, SIGNAL = 1.4; EXPRESSED IN LUNG, SIGNAL = 0.84; EXPRESSED IN HEART, SIGNAL = 1.4; EXPRESSED IN FETAL LIVER, SIGNAL = 1.6; EXPRESSED IN ADULT LIVER, SIGNAL = 1.1; EXPRESSED IN BRAIN, SIGNAL = 1.7
caggaacaacccaatacaaagaatttgtactgaggagttaggcattactaaaagataactgaaaatgtggaagcagctttggaactgggtaaggggcagaggttggaagaatttggaggactcagaagaagataggaaaatgaaggaaaatttgggatttcttagagattagttaaatgatggtgaccaaaatgctgatagtgatatgtacagtgaaggccaggctgccgaggtctcaaatggaaatgaggaacttactgggaactggaccaaaggtcatgtgtgttatgccttagcaaagaacttggctgcattctattcatgccctagggaactgtggaagtttgaacttaggagtgatgacctagggtatctgaaagtagaaatttctaagcagcaaagtgttcaccatgtggcctggctgcttctaacaacctacactcagatgcaggagcaaagaaatga

SEQ ID NO: 6026 - DNA, 402 bp, Homo sapiens
  MAP TO AC004615.1; EXPRESSED IN PLACENTA, SIGNAL = 5.1; EXPRESSED IN LUNG, SIGNAL = 5.6; EXPRESSED IN HEART, SIGNAL = 5.3; EXPRESSED IN BRAIN, SIGNAL = 5.6; EXPRESSED IN HELA, SIGNAL = 4.7; EXPRESSED IN FETAL LIVER, SIGNAL = 5.4; EXPRESSED IN BONE MARROW, SIGNAL = 5.1; EXPRESSED IN ADULT LIVER, SIGNAL = 4.9
actcccaaaggcagtctggaggaaaatttctgagtataccactttcagaggtgccatcacatttgagaattgttgattttcagattgcttttgaatttaagtgataaaaatactttttggaataatagatattatattaaccatggagaggaaataagagagatacatatttagcctgagtagcttttgtagtaatgcatgcaattcttcttttaccttttcagggtgagttttctataggtgatccttcctttcttcctgttcctacaattagaaacagaacaataagagaactcatggctataaagcagtgctggccaatagaactttctatgatgatagaaatgctcatattctgtattgacaaatatggtagccattagccatgtgtagctgttgagg

SEQ ID NO: 6027 - DNA, 450 bp, Homo sapiens
  MAP TO AC005495.1; EXPRESSED IN PLACENTA, SIGNAL = 2.7; EXPRESSED IN HELA, SIGNAL = 2.7; EXPRESSED IN HEART, SIGNAL = 2.9; EXPRESSED IN FETAL LIVER, SIGNAL = 3.1; EXPRESSED IN ADULT LIVER, SIGNAL = 3.2; EXPRESSED IN LUNG, SIGNAL = 2.8; EXPRESSED IN BRAIN, SIGNAL =   3; EXPRESSED IN BONE MARROW, SIGNAL = 2.8
aatatccattttgccccttgcttttttacctcatctaagattgaagtggtcagagcagtggctgttcttattctttctgtttgaatatcttcatcttcatctatgggttcttctggatttggcttagcatctctactttggggggaaattctatggagaaaatgaaatgtgttacatgtggtattctagctgttaaaagatgtgtcaaaaatcagcattcctgtgattttactactgtcctcttctctaatgtgcaggtgatgatgtgatgatgactgtcaatattgcttctgcttttgccaagaactcctgtcccactagccagaatccttttcttaatgttgttgccattcttctggtaagaatctttgaccctttcaaatctgtcagcaggtactgctcctttctctttaaaattcatgtcactctcattttctctactcagtctga

SEQ ID NO: 6028 - DNA, 463 bp, Homo sapiens
  MAP TO AC004687.1; EXPRESSED IN PLACENTA, SIGNAL = 4.5; EXPRESSED IN ADULT LIVER, SIGNAL = 5.3; EXPRESSED IN BONE MARROW, SIGNAL =   5; EXPRESSED IN BRAIN, SIGNAL = 5.5; EXPRESSED IN FETAL LIVER, SIGNAL = 5.3; EXPRESSED IN HEART, SIGNAL =   5; EXPRESSED IN LUNG, SIGNAL = 4.8; EXPRESSED IN HELA, SIGNAL = 4.3
ttccattcaggaccttccaccttctactcttccccatcttcccccattgtatggatgacacagttctttgtctacagccatcactagaacccttccaacccaggaggtgacacaaaggtcctgaaatattcttcagtgtaggaattcttcctgcaggacctaggagctgccctcatccaattcattcatttattcatttcctttctccttccttcctttttttccttctgactatatgcctgctttgtgctaggttccaggctaggctctgaagacatggaacttgccaatcaggacatccaggtccatggggagagagccatgtactgcaagctttggctatgtgtttgtgattccattcggaccctattgtgtgtgtactttgagtgctgccagtaccacaccactatctcccttttctctcaaactcagaactagtttcagtgcctctctttttcttgcc

SEQ ID NO: 6029 - DNA, 453 bp, Homo sapiens
  MAP TO AC005660.2; EXPRESSED IN LUNG, SIGNAL = 4.3; EXPRESSED IN HELA, SIGNAL = 4.7; EXPRESSED IN BRAIN, SIGNAL = 4.8; EXPRESSED IN BONE MARROW, SIGNAL =   4; EXPRESSED IN ADULT LIVER, SIGNAL = 4.4; EXPRESSED IN PLACENTA, SIGNAL = 3.1; EXPRESSED IN HEART, SIGNAL = 3.9; EXPRESSED IN FETAL LIVER, SIGNAL = 4.3
gctcagaattgaaacctgccccactgaagcgggccctgctgatccttgctgcgttcctgtcattgcaaatgactcccaggctgcagctttgcagatgctgctctgagctctgccaggaccacccctcttcttccagccttgaccgtgacctggcagccgcagatgtcctgcggggctggcagctgctccatggcaccccttctgggcaatcctgagctgcagagtttttgccttgattttagtccccttatttttagggtggccatatgtcctggtttgctggaatagttctagtttatgcctcttttcctagtgaaattagtaataatgatatctttcaccttctaagtatctcagtttggaaggtgaattatgtggttgcgctccttatctttgtcttctcagccatctgggcctcaagacggatgagggaggcagtagggtgtgcaggta

SEQ ID NO: 6030 - DNA, 454 bp, Homo sapiens
  MAP TO AC005317.1; EXPRESSED IN PLACENTA, SIGNAL =   2; EXPRESSED IN HEART, SIGNAL = 2.1; EXPRESSED IN BONE MARROW, SIGNAL = 1.7; EXPRESSED IN ADULT LIVER, SIGNAL =   2; EXPRESSED IN LUNG, SIGNAL = 1.8; EXPRESSED IN HELA, SIGNAL = 1.8; EXPRESSED IN FETAL LIVER, SIGNAL = 1.9; EXPRESSED IN BRAIN, SIGNAL = 2.1
accagtggatgtccagatgctggcaatgagtaggccttccctacgctgggtggcgtccacaccctccggcttccattgcctgggtctcctggaggtggtttgctggatgaataccgcatgcacagaggctggccttgggtttgaatatggcagccagtggacagcatgtgcttcagttatgagactgcccaggagatgcttcttccaaggcagagcacgtgcagagtccagtgctggagaggccgggtgcgcagttgacccatttccagttctgttttccctctcatgttcctctgtccccatctaggacatgctctggagtcagaagacagcgaaaagagaagcagaagccccggtggcaagagtctgaaggtgggttccttcctgacatgggcattgggctgcgcatgtgtgttcgcagttctttccagctgctgttctgacctctttgtgc

SEQ ID NO: 6031 - DNA, 473 bp, Homo sapiens
  MAP TO AC004664.1; EXPRESSED IN PLACENTA, SIGNAL = 2.2; EXPRESSED IN LUNG, SIGNAL = 1.9; EXPRESSED IN HEART, SIGNAL = 1.4; EXPRESSED IN BRAIN, SIGNAL = 1.7; EXPRESSED IN BONE MARROW, SIGNAL = 1.8; EXPRESSED IN ADULT LIVER, SIGNAL = 1.7; EXPRESSED IN HELA, SIGNAL = 1.7; EXPRESSED IN FETAL LIVER, SIGNAL = 1.6
tgccctgtggtttattttctgtctttgtaggtttattggcttatggctccacaaaaccctacccttgtggttgtcaactgggaacaactttatcctcaggggatgcttggcaatgtctggagacatttttgtttgcacaacagaggggatgctactggcatctcatgagtacagtcccggggtgctgctcaacactgtacaaggcaaaggacagtcccccatcccagagtggtccctccccaaaggtcgacccgcagtgggggctgtgcactgttgtctgtaagctccctggcagccctggggctgttttcttcccaggggtccagctcctgtgcagcacagtgctggtgggtgtaggtgtttgggggacacagatggtgacagtaaggtctgtgcttttcactttctcattggccagcggaatagggtgggaaatgggatgcagactgcctgcccccagcattgagccattg

SEQ ID NO: 6032 - DNA, 454 bp, Homo sapiens
  MAP TO AC000111.1; EXPRESSED IN PLACENTA, SIGNAL = 5.4; EXPRESSED IN HELA, SIGNAL = 4.5; EXPRESSED IN HEART, SIGNAL = 4.4; EXPRESSED IN FETAL LIVER, SIGNAL = 3.2; EXPRESSED IN BRAIN, SIGNAL = 8.1; EXPRESSED IN ADULT LIVER, SIGNAL = 4.3; EXPRESSED IN LUNG, SIGNAL = 6.7; EXPRESSED IN BONE MARROW, SIGNAL = 3.6
tttacaagtactacaagcaaaacactggtactttcattgttatcttttcatataaggtaactgaggcccagagagattaaataacatgcccaaggtcacacaggtcatatgatgtggagccaggttaaaaatataggcagaaagactctagagaccatgctcagatcttccattccaagatccctgatatttgaaaaataaaataacatcctgaattttattgttattgttttttatagaacagaactgaaactgactcggaaggcagcctatgtgagatacttcaatagctcagccttcttcttctcagggttctttgtggtgtttttatctgtgcttccctatgcactaatcaaaggaatcatcctccggaaaatattcaccaccatctcattctgcattgttctgcgcatggcggtcactcggcaatttccctgggctgtacaaacatggt

SEQ ID NO: 6033 - DNA, 481 bp, Homo sapiens
  MAP TO AC005529.7; EXPRESSED IN HELA, SIGNAL = 1.6; EXPRESSED IN FETAL LIVER, SIGNAL = 1.7; EXPRESSED IN PLACENTA, SIGNAL = 1.7; EXPRESSED IN LUNG, SIGNAL = 1.6; EXPRESSED IN HEART, SIGNAL = 1.7; EXPRESSED IN BRAIN, SIGNAL = 1.5; EXPRESSED IN BONE MARROW, SIGNAL = 1.5; EXPRESSED IN ADULT LIVER, SIGNAL = 1.7
gcaaacaaactctattgttttccacagaaagtatagaaaataaagttcagccaaatcctcttggctcagacctggcactaacaccttcaggaggtgttagtgaaaaacaggtggaccagagtgataggcatcggctgcaggggaagtttcaggaaggaagaagcaagctctccccagaaaatctggctctgatctctgtcccacatcaccatgagaagtcaccagagccccaaccctctcctcacctgaagagccgcagacacatcttctcctggggaaattccttgggcccctccacactgtcgtcatggctctcggtctccaggtaaacatccagcagcacacacagccgctgcagctggttggtcaacagctggtggctgggccaagggccacacagctccttgtagcacacattgacttcgccctccatggcctgtgtgataggaaagccagcatctcagcactaccttcctgcatg

SEQ ID NO: 6034 - DNA, 474 bp, Homo sapiens
  MAP TO AC003091.1; EXPRESSED IN PLACENTA, SIGNAL = 3.3; EXPRESSED IN ADULT LIVER, SIGNAL = 3.5; EXPRESSED IN LUNG, SIGNAL = 2.3; EXPRESSED IN HEART, SIGNAL = 2.9; EXPRESSED IN FETAL LIVER, SIGNAL = 4.9; EXPRESSED IN BRAIN, SIGNAL = 3.3; EXPRESSED IN HELA, SIGNAL = 2.6; EXPRESSED IN BONE MARROW, SIGNAL = 3.1
cagcacctcactcctgtgccaacattatcacttgagtgaaactaggcacagagagcagcagaacctcccctgccccgaacatccacagatggtgcacagagacctgcccctccagtgtcctgcccccttgccaatgcctccaccagtgtgactgcacacatagttgccaataagtgggcccctgccccaacaagctgtgctggttctgccgctactgtgaacacctgcacaaaggcaggcacctggcacccgctagtaccctgccacagttgatgatcatacatctcatcatgctgccactgctgctgacacatgccaatgaggacagatcctgctgccactgccctataaagtgctttgactggcaccacccattgaagtgttgtgaccagaagtctgggagcacctcagcccatccagtgcagcaggtccctaaccttgaggagccagagaacaaagccaggtcccaatagt

SEQ ID NO: 6035 - DNA, 470 bp, Homo sapiens
  MAP TO AC002458.1; EXPRESSED IN PLACENTA, SIGNAL = 2.1; EXPRESSED IN LUNG, SIGNAL = 2.3; EXPRESSED IN HELA, SIGNAL =   2; EXPRESSED IN HEART, SIGNAL =   2; EXPRESSED IN BRAIN, SIGNAL = 2.2; EXPRESSED IN FETAL LIVER, SIGNAL = 1.9; EXPRESSED IN BONE MARROW, SIGNAL = 2.4; EXPRESSED IN ADULT LIVER, SIGNAL = 1.9
catgtggttcttggcaacactcagtttcttgcaggctgtggaactaaggactcaggttcttgctggctgttggctgaagccacccccagttccttgccttcaggccttcccaacgtggctgcttgcttcctcaaagccagcaagggagcaagtccactagcacaatggctgttatcattgtacacaatatacagttgacctgtgaacaacacaactttggaattcacaagtccacttagatgtggattttttttcaattaaagttataccaaatgtgcctgtctctcctgcctccccttctgtcacctccatgtcttccacatctgccccccttgagatagcaggaccaagccctcttcctcctcctcagcctactcaacatgaagataaagatgaagacctttatgtttcacttccacttaataattagtaactacatttttcttcctcttgattttcctaatattctt

SEQ ID NO: 6036 - DNA, 400 bp, Homo sapiens
  MAP TO AC004701.1; EXPRESSED IN BONE MARROW, SIGNAL = 1.2; EXPRESSED IN ADULT LIVER, SIGNAL = 1.3; EXPRESSED IN LUNG, SIGNAL = 1.5; EXPRESSED IN HEART, SIGNAL = 1.4; EXPRESSED IN FETAL LIVER, SIGNAL = 1.3; EXPRESSED IN BRAIN, SIGNAL = 1.5; EXPRESSED IN PLACENTA, SIGNAL = 1.3
agtacaccagcaggctttgggggaaaaaaatcaagccggctttcggtatttgagttgttctcattttagtccagggaagcctgcttcaaaacctgggtctaaaaggtctttagcttttatctagaaaagacaacgtgcttgagaaagttcctttagttttttgtttcagttgacattgacacactgggtcagacttgtcccaaagcaccatgtctaaatggcttcctttatgtggttctaattgggattctttctcaggaggtcaaattagagctcctgcagttggagctacagcaccggcagttgacagcatcagctcagttctgcctcttgagacatgtaagacagccacttagagtttgttcctacagtcctttgacaaatggccctactctgactg

SEQ ID NO: 6037 - DNA, 451 bp, Homo sapiens
  MAP TO AC004596.1; EXPRESSED IN PLACENTA, SIGNAL = 5.1; EXPRESSED IN HEART, SIGNAL = 3.8; EXPRESSED IN LUNG, SIGNAL = 4.5; EXPRESSED IN HELA, SIGNAL = 4.2; EXPRESSED IN FETAL LIVER, SIGNAL = 3.7; EXPRESSED IN BRAIN, SIGNAL = 4.3; EXPRESSED IN BONE MARROW, SIGNAL = 4.4; EXPRESSED IN ADULT LIVER, SIGNAL = 4.1
gaaggcagcagtattttgggggtgggactggggggtgagcgtgacctttctccctccagagagagctgagtgagatgcgggcacctccagctgctacaaattcttccaagaagatgaaattccagggagaacccaagaagcctcccatgtgagcctgggggttggagtctgccctggaggtcggggagggtcagggctggatggctgctttgttggggtcctgaccctccttctaccaacccacctcccaggaacggttaccagaagttctcccaggagctgctgtccaatggggagctgaaccacctgccgctgaaggagcgcatggtggagatcggcagtcgctggcagcgcatctcccagagccagaaggagcactacaaaaagctggccgaggagcagcaaaagcagtacaaggtgcacctggacctctgggttaaggtgagagggc

SEQ ID NO: 6038 - DNA, 442 bp, Homo sapiens
  MAP TO AC004706.1; EXPRESSED IN BONE MARROW, SIGNAL = 8.3; EXPRESSED IN HELA, SIGNAL = 7.4; EXPRESSED IN HEART, SIGNAL = 7.7; EXPRESSED IN FETAL LIVER, SIGNAL = 8.4; EXPRESSED IN ADULT LIVER, SIGNAL = 9.1; EXPRESSED IN PLACENTA, SIGNAL = 7.8; EXPRESSED IN LUNG, SIGNAL = 8.8; EXPRESSED IN BRAIN, SIGNAL = 8.3
agggttatgcactgtgggagattcgattcggagccaggggctgagcctaaggctgggatctgtgtggctgagatctgtgctcacttcgaggtttccgtgcttgcctggacggctcttgcgccctgggatctgtaaaccccaagggtggtgcgccctggggtcgccatgcccctcagattctttacagggcacctcccatccggcacctggagctcctgagtgcgcgcgccccgggagagctgtgctccccgcgaaatccgtgcgctccagctcagggctcccgggatcggtgcccgttagtgggcacaggacgccgggtgtccgaagggctgcctggagatgcaactgaccttggcgggcatcagaatgacgagtggcagcagcaggagcggggtgacgaacaagatcacgaaggacttgaacttggagacatagctcagcg

SEQ ID NO: 6039 - DNA, 492 bp, Homo sapiens
  MAP TO AC003034.1; EXPRESSED IN LUNG, SIGNAL = 1.6; EXPRESSED IN HELA, SIGNAL = 1.9; EXPRESSED IN BONE MARROW, SIGNAL = 1.6; EXPRESSED IN ADULT LIVER, SIGNAL = 1.7; EXPRESSED IN PLACENTA, SIGNAL = 1.5; EXPRESSED IN HEART, SIGNAL = 1.8; EXPRESSED IN FETAL LIVER, SIGNAL = 1.8; EXPRESSED IN BRAIN, SIGNAL = 1.9
gtagaggaggagctggggtccagagagactgatgtcaaggctcagctggctgactgctgtgccatgttgtgtctgttatgctgttccttctctgtctgagaatatgtcaaagacctttatgcccaattctagccatcctcttattgtcctcatcccagagcactttctgaagcttcttattgcacagggcagctgccctgaagtggctccagcctgaagaacttcccctcaccctacagcagttctgaaaaatgcaacccactgtcgtcacagatcacccaccctggactgatttgtttttcaacagatagagtttgtcttgaacctgcccaagactgtcacagggaaaattcaacgagccaagcttcgagacaaggagtggaagatgtccggaaaagcccgtgcgcagtgagacatctaagagacattcatttggattcccctcttctttctctttcttttccctttgggcccttggccttcctatgatga

SEQ ID NO: 6040 - DNA, 460 bp, Homo sapiens
  MAP TO AC004839.1; EXPRESSED IN BONE MARROW, SIGNAL = 1.1; EXPRESSED IN LUNG, SIGNAL =   1; EXPRESSED IN HEART, SIGNAL = 1.5; EXPRESSED IN FETAL LIVER, SIGNAL = 1.1; EXPRESSED IN BRAIN, SIGNAL = 1.2; EXPRESSED IN ADULT LIVER, SIGNAL = 1.2; EXPRESSED IN PLACENTA, SIGNAL = 1.2
ttcctccaagctaaagccttctacaggaaaacaaataagtaccactgaacctgtattctaaatgctggtcttctaacaaagattccaaaggaatgagacacgggcctgtttttactaagagacttgaattaaaaaaagaataatgggttctgcctaaacattatctgccaccaccacacctatatctaatggggagtaatttggcaatgactgttttaaaataagtttctggtgattggccagtaatacattattctggttttttttcttagagttttgagacgtctggttacgcttattactcaactggcaaaagaactgtcaaacaaaggtgtacttaaaactcaagcagaaaatactaacaaggctgccaaaaaatttatggaagaaaacgaaaaactaaaaagggtatttaattttctttgtaaaaattaaatgttgttggtgttcccgaggagta

SEQ ID NO: 6041 - DNA, 468 bp, Homo sapiens
  MAP TO AC004601.1; EXPRESSED IN BRAIN, SIGNAL = 8.4; EXPRESSED IN ADULT LIVER, SIGNAL = 7.6; EXPRESSED IN PLACENTA, SIGNAL = 7.8; EXPRESSED IN BONE MARROW, SIGNAL = 7.7; EXPRESSED IN LUNG, SIGNAL = 8.7; EXPRESSED IN HELA, SIGNAL = 7.2; EXPRESSED IN HEART, SIGNAL = 7.4; EXPRESSED IN FETAL LIVER, SIGNAL = 7.3
cgtaggtaatggcggtaaagagtttaaggctgcccttacgcagcaagtgctggctaaatgacagctcttgccactacattatcgtgctcgttataagcagcgatcctgagtctattactcacctcctgctatcccctttctgggcccttgcccagtgctccacctgggccagattgctcttcctttggctgtgtttttcagggttggtcctgggaggaaaggcccgctggtacccaccagtcccattctgttctcctgggccatatgaggcaggcagcattccattcttctctgcccgttggggctgtgcctgctggcctcttgggccagtgggtaaatccataaacaaggcatcctcctcggctggcgagtacggagacctggccttgctccggtcccgcttgccctccagtgggtccctctgggaacggtactgctctccctcctgctcctgcctctcgaagttga

SEQ ID NO: 6042 - DNA, 476 bp, Homo sapiens
  MAP TO AC005392.1; EXPRESSED IN LUNG, SIGNAL = 1.5; EXPRESSED IN FETAL LIVER, SIGNAL = 1.6; EXPRESSED IN PLACENTA, SIGNAL =   2; EXPRESSED IN BRAIN, SIGNAL = 1.9; EXPRESSED IN BONE MARROW, SIGNAL = 3.5; EXPRESSED IN ADULT LIVER, SIGNAL = 1.5; EXPRESSED IN HEART, SIGNAL = 1.8
cacaagctgtggaacctgagtctcccatgacaggagcagcctcttttctcctattgtggatcaagcctaggcctactctggtttgcctggggcagaaagtcatggccagctttgatgtctaggggtaaaggtctctgtacttggacctgagagggactgagaggcctggcctctggccatgtgtatttgggatggcagcctggctcacagaggaacagaggatactcacggaggagattcagggtgactgggtcactgcggctggcactcactgggttccgtatttcacattcatagggtcctgcaatatactttgtgacaccaaatataaagagggtcctgttggttttggacagctgcaacctgtgagtcatagggaggctctgaccattcatccaccactggtagcttgcggctggagtcgcaggatcacaggttaagatcacagcctccatggcctccctgggatttaagtt

SEQ ID NO: 6043 - DNA, 476 bp, Homo sapiens
  MAP TO AC003682.1; EXPRESSED IN PLACENTA, SIGNAL = 1.1; EXPRESSED IN LUNG, SIGNAL = 1.5; EXPRESSED IN FETAL LIVER, SIGNAL = 1.3; EXPRESSED IN BONE MARROW, SIGNAL =   1; EXPRESSED IN ADULT LIVER, SIGNAL = 1.3; EXPRESSED IN HEART, SIGNAL = 1.3; EXPRESSED IN BRAIN, SIGNAL = 1.6
gcataatgaaactcacaaagctgactctaacgttctactttacataaatgtgtggagaaagaaggtaatgtttactaggctctcgccaagggtagaggcattttgtatctgaataactctgactacctaggtgactagttgtacacaataccctccaaaaatctctgtatggtaccttaaaaaagcagcgaagctcctcccttgtccaaggaggctggagacaccacctctcagccttcccctccacctttctccatagcaacggggtcattcctccctgaggtccaggagaagggcgacctctgccagcccaagaagcggtgagaactacattacccagaggcccgtgagccaggttcttggcgtggagccaatgaggctcaggggagggacatttccgctctgtccaacttgtcggagcggaacttccggcgtcctccctgtggcgggcactttggcttgtgtcagttccatcc

SEQ ID NO: 6044 - DNA, 459 bp, Homo sapiens
  MAP TO AC003104.1; EXPRESSED IN PLACENTA, SIGNAL = 1.5; EXPRESSED IN ADULT LIVER, SIGNAL = 1.4; EXPRESSED IN LUNG, SIGNAL = 1.2; EXPRESSED IN HEART, SIGNAL = 1.4; EXPRESSED IN FETAL LIVER, SIGNAL = 1.5; EXPRESSED IN BRAIN, SIGNAL = 1.1; EXPRESSED IN BONE MARROW, SIGNAL = 1.4
ctgagcaaccttgcctgcctccccaataggcgagaagaggacgctcccagagaacctgaccctggaggatgccaagcggctccgtgtgatgggtgacatccccatggagctggtcaatgaggtcatgctgaccatcactgaccctgctgccatgctggggcctgaggtgggcagcccgacctgctgaccagttgggggacccccaccaacctgagaccccggctcaccacccctcttctgtgcccagacgagcctgctttcggccaatgcggcccgggatgagacagcccgcctggaggagcgccgcggcatcatcgagttccatgtcatcggcaactcactgacgcccaaggccaaccggcgggtgttgctgtggctcgtggggctgcagaatgtcttttcccaccagctgccgcgcatgcctaaggagtatatcgcccgcctcgtctttgacccgtg

SEQ ID NO: 6045 - DNA, 477 bp, Homo sapiens
  MAP TO AC005540.2; EXPRESSED IN LUNG, SIGNAL = 1.4; EXPRESSED IN FETAL LIVER, SIGNAL = 1.3; EXPRESSED IN BRAIN, SIGNAL = 1.6; EXPRESSED IN PLACENTA, SIGNAL = 1.4; EXPRESSED IN HEART, SIGNAL = 1.5; EXPRESSED IN BONE MARROW, SIGNAL = 1.2; EXPRESSED IN ADULT LIVER, SIGNAL = 1.3
cctcaaccttggcaaaataaactttctaaattaaccgagccctgtctcagaccttcagcgttcacagactataccgaatcgggctgttaatctttgaaagtgactggaaccctagagatctaaccaagatattgtcagggaactcagcagagagatcgtgaacatggcagaactgaaggcaagtgactgtagaaaaataaattatttcatgcctgtacttcctacgaacaaggattgtttagtaaactagatgtggtagccacgattttcatgatcaacagagtggcaacaggcaagactgaatgatggggctttggggaattgcactggcgatgaatcaccctgagattatgcaggtggggtttcccctgaagggactggaactgctcactgccagctgtcctcagaagaggtcagtcatggggcgggaaatcagaatgctgggactagagtcagtctgactggatttcccaggaa

SEQ ID NO: 6046 - DNA, 470 bp, Homo sapiens
  MAP TO AC004682.1; EXPRESSED IN PLACENTA, SIGNAL = 1.6; EXPRESSED IN HEART, SIGNAL = 1.5; EXPRESSED IN BONE MARROW, SIGNAL = 1.7; EXPRESSED IN ADULT LIVER, SIGNAL = 1.6; EXPRESSED IN LUNG, SIGNAL = 1.8; EXPRESSED IN FETAL LIVER, SIGNAL = 1.4; EXPRESSED IN BRAIN, SIGNAL = 1.6
ggcaaggttttcccaaagtctggattgtcagggaaattcatgccccatcctgtgctgatcatggctggcccatcaattcatgggattggaaagagaagaaatggagggagtgggtaggaaggagaaagcagggtgcagaaaaccaaccactgtcatttcccacccctctctgggagactaggcaaggtgaccgtccgtgtcaccctgggcagaggacaggaagggactggaaccctcctccattcaggactcagcagagagggtcaaagtctctgacagccattcgtcctctttgtcttttccggaagctcaatcacgtgacctcagagacaaagagcctgcagcaaagcttgacacagacccaagagaagaaagctcagctggaagaggaaatcattgcttatgaggaaaggatgaaaaagctcaatacggaattaagaaaactgcggggcttccaccaggagagtgag

SEQ ID NO: 6047 - DNA, 468 bp, Homo sapiens
  MAP TO AC005516.1; EXPRESSED IN PLACENTA, SIGNAL = 1.9; EXPRESSED IN LUNG, SIGNAL = 2.2; EXPRESSED IN HELA, SIGNAL = 2.3; EXPRESSED IN HEART, SIGNAL = 2.3; EXPRESSED IN FETAL LIVER, SIGNAL = 2.3; EXPRESSED IN ADULT LIVER, SIGNAL = 1.9; EXPRESSED IN BRAIN, SIGNAL = 2.5; EXPRESSED IN BONE MARROW, SIGNAL = 2.4
caattcacttctacgtgttacaaacactgaaatatattatttttgttgcgaacaatttaattaatctctttttaatattaggtagggtcagagtaacgaaacttagtctggggctaggtgggcaaacccttctgagtaccctacctgctctatgagagctgaggttttccactccaactggtgtgattagaaattcttcctggccctgtgtgactttcagcaactgttccttctaatcctttcaggtggctctacctccagccctgggtcatttccgcacaagcaagtgctcgtcagtactcagctacacacatgacagggtactgagagggcagggtgcaggtctccggagctccctctgcagctctcttccctggtattcttccatatgggctctcaccaccttgcatctctgcactcccagctctgcctcctcaacccagcaaaccactggctcagcctcagtct

SEQ ID NO: 6048 - DNA, 491 bp, Homo sapiens
  MAP TO AC004844.1; EXPRESSED IN BONE MARROW, SIGNAL = 4.2; EXPRESSED IN HELA, SIGNAL = 4.3; EXPRESSED IN FETAL LIVER, SIGNAL = 4.5; EXPRESSED IN ADULT LIVER, SIGNAL = 4.2; EXPRESSED IN PLACENTA, SIGNAL = 4.4; EXPRESSED IN LUNG, SIGNAL = 5.5; EXPRESSED IN HEART, SIGNAL = 4.5; EXPRESSED IN BRAIN, SIGNAL = 4.9
cctaaaccaagctttgtcccagaaaaaaaatcatttctgaaaagctgcaacacaataaaacattcttcaacattgttataaaattctcaagacccttacaaatgcacaaatgggttccggaagcttcaaaactagatgccctgactacttttattatgattcaaaaaatggtatgaaaataccgcattggaggtagttttatttttgattaaccctagaacagtcaatcaaccatgttaccctaaacagcactctggagtctgaggacccactattaaatttaaaggtacagataaatgtccaaactatggatgcccaaatgtggaatctgaagctgttaacatcatctctgtcatgtccccctctcatcatttttattgttgcaaagttagaagtagggtgagtcatctccctcccattcaggggccatgtcctcatctgcagcacagactctgcgaaggcatccagcaggtgctctctaattctgctgg

SEQ ID NO: 6049 - DNA, 467 bp, Homo sapiens
  MAP TO AC003685.1; EXPRESSED IN LUNG, SIGNAL =   1; EXPRESSED IN BRAIN, SIGNAL = 1.2; EXPRESSED IN BONE MARROW, SIGNAL =   1; EXPRESSED IN PLACENTA, SIGNAL = 1.1; EXPRESSED IN HEART, SIGNAL = 1.4; EXPRESSED IN FETAL LIVER, SIGNAL = 1.3; EXPRESSED IN ADULT LIVER, SIGNAL = 1.7
gggctgccagataaaatatagaactctcagtttaatgtgaatttcaggtaaacagtgaaactttttttgtataattgtgtcccagagactgcatgggacacgcttatactaaagaagtatttgttgtgtatctgaaattcacgtttatttgagtacctcgtactttttgggttgactttattttttagtatgggtttggattcacagcaaagttgagcagtaagtacgtaaggttctcaggtacccccttcctcaacaaatccccatgcatactttcaatattccatatcagactggtacatttcttaccattgatgagccaatactgatacaccattataacctgaagtccatagtttacattagggttcacaatgacaaatgtataatgacgagtatccaccatcgtagtatcacacacagaatttgggctgccctgaaaatcgtctgcatgccaccaattaatc

SEQ ID NO: 6050 - DNA, 408 bp, Homo sapiens
  MAP TO AC003117.1; EXPRESSED IN ADULT LIVER, SIGNAL = 6.8; EXPRESSED IN PLACENTA, SIGNAL = 6.9; EXPRESSED IN LUNG, SIGNAL =   8; EXPRESSED IN HELA, SIGNAL = 7.2; EXPRESSED IN HEART, SIGNAL = 7.2; EXPRESSED IN BRAIN, SIGNAL = 8.1; EXPRESSED IN FETAL LIVER, SIGNAL = 7.2; EXPRESSED IN BONE MARROW, SIGNAL = 7.8
tcctaactgcttcctgctgacagggggcactgttttgaggaaaatgacagtcagcgctccctcagagacctaagggttctcagcagaaggggccatcatccaagactccagttgcatgactgtttggagtttgatgacctgaaggcaagaagagacaaaccaggtcattagaaaacatgtattaaaatgagaaaagcagggggtaaggacagctcaaaaatcccgaggccttttaccattttgccaacatgttgggctcctgggttcccttcccctgagtccaatcctaagccaaccagtttaaggtttgggaaattaacttttcccagttcagaggatgcatccaaggggagtgtcccatagtatggagacacaattacctatcagtgaagagaggacagaggagga

SEQ ID NO: 6051 - DNA, 477 bp, Homo sapiens
  MAP TO AC005606.1; EXPRESSED IN LUNG, SIGNAL = 6.6; EXPRESSED IN HELA, SIGNAL = 6.1; EXPRESSED IN FETAL LIVER, SIGNAL =   7; EXPRESSED IN BRAIN, SIGNAL = 7.1; EXPRESSED IN BONE MARROW, SIGNAL = 7.6; EXPRESSED IN ADULT LIVER, SIGNAL = 6.4; EXPRESSED IN PLACENTA, SIGNAL = 6.8; EXPRESSED IN HEART, SIGNAL = 6.4
ctgcatacagcagatgctcagtaaaagcctcctggtccagggaagggccccgggcacccagggcagcagacccgagaccctgagggagcaagagctcctggcacacaaggggtgctcgggcgctccagcctggccggagggtgggaggtcagctcctgcacccacagctcggtctcatctcaggctccagagcagggcatggtcatgcggccccacctgggggcatccaggccaggtgcctgctcaccctcgttccggcgcgagtgccgtggcgcgtagctgaactgcaggtcgatgtggcggttctggcgtgcctcggcgcggctgcgactgtggcaggccgtcctgtgggccttgaggtcgatctcggtgcggaaggcgtgggtgaactgctccgtgctgcagcggccttcctcacacagaaagtgcttctcccggaagtgctcacgcaggtaggcatagtcgctggcaggagat

SEQ ID NO: 6052 - DNA, 468 bp, Homo sapiens
  MAP TO AC005527.3; EXPRESSED IN PLACENTA, SIGNAL = 1.4; EXPRESSED IN LUNG, SIGNAL = 1.7; EXPRESSED IN HELA, SIGNAL = 2.1; EXPRESSED IN FETAL LIVER, SIGNAL = 1.8; EXPRESSED IN BONE MARROW, SIGNAL = 1.6; EXPRESSED IN ADULT LIVER, SIGNAL = 3.8; EXPRESSED IN HEART, SIGNAL = 1.6; EXPRESSED IN BRAIN, SIGNAL = 2.3
ccccacctcagattcatagcatcacagcttggcaaggaagggaaactgccctgtctccccacctcccaagctgcagcggccatttggcctcattcacaggccctgacacacacctggtgtgcatgtttgcacacatgtgtatacaactctgctctgagcccatagggagggagaagccagaagccccagtctaggtgttggggcagctgcaaagcagcattgcagcagggaaattggggggcaggagggggtctgtcggagggaggcaccttgagcttgtatgtcctcagctcatagatgttgggacccattctgggctgtggctcattccagaagctgaactcgaggagcagctggtttctcctggacagcagcatctggctccgctcccttcggaactccaggtactcctgtgggcatggtggtaaaggcatggctaccaggaagtgcgctccatcctgacagtgt

SEQ ID NO: 6053 - DNA, 487 bp, Homo sapiens
  MAP TO AC002074.1; EXPRESSED IN HELA, SIGNAL = 4.7; EXPRESSED IN HEART, SIGNAL = 3.8; EXPRESSED IN BRAIN, SIGNAL = 4.6; EXPRESSED IN BONE MARROW, SIGNAL = 4.8; EXPRESSED IN PLACENTA, SIGNAL = 4.4; EXPRESSED IN LUNG, SIGNAL = 4.8; EXPRESSED IN FETAL LIVER, SIGNAL =   4; EXPRESSED IN ADULT LIVER, SIGNAL = 4.5
gcaaagcttttcttgcatgtctttaataaatatttgcttattaattaataaattagtattgtaggaggttctataatagctcccagtgggagtgatttcccacctactgatactcatgcccttgtgttatcccctctcctcaaccgtgggctggatttagtgacaggagtctaatgaacagtatacaggaaaagtgatgggatatcactcccaagattaggttacaaaaaatgtgacttccatcttctttgacaacagtccctctttctcagagcccttaatctaggggaagcaaatgattatgttgtgagtacccctatggagaagcccacatgcaagaaatggatgtcaccagccaagagctatcatgagtgtgccaacaaccacatgagtaactctggaaatggatcttccccaggtaaagccttgaagtggctagagccctaggcaacactttgattgctatactgtgagagactctgaacca

SEQ ID NO: 6054 - DNA, 498 bp, Homo sapiens
  MAP TO AC005294.1; EXPRESSED IN PLACENTA, SIGNAL = 1.7; EXPRESSED IN BRAIN, SIGNAL = 1.9; EXPRESSED IN ADULT LIVER, SIGNAL = 1.5; EXPRESSED IN LUNG, SIGNAL = 0.88; EXPRESSED IN HEART, SIGNAL = 2.1; EXPRESSED IN FETAL LIVER, SIGNAL = 2.2; EXPRESSED IN BONE MARROW, SIGNAL = 2.2
ttgagggggatgagactgagacacacacacacacacacacacccctatttttctacatctattatttccctggatgatgccatctcaagagtttgtatttgtagtgatggtttttgctgcagctctgggaactggctctagatatcaagaggctctcgatatctagagccagttccaaatgttattcagtaaggttatatttgacctgtgatctgagggactctgatctcagggactgtggaaagcttggggcctaggctccctcacctaggctatgatagagacctctggttcctctcttttatatcatccttcaggatgaggaagattcaggtctcagaattcctcagatggggtgatatgcttcctgaatccaacccttacgtagccacagatatcagtcaccaggtcagaggagccatatcatgtgggtgagtataggatccccgagtttagttctttttgatgtagatgattttcttctgtcttctgacttgc

SEQ ID NO: 6055 - DNA, 491 bp, Homo sapiens
  MAP TO AC005516.1; EXPRESSED IN LUNG, SIGNAL = 1.3; EXPRESSED IN BRAIN, SIGNAL = 1.8; EXPRESSED IN ADULT LIVER, SIGNAL = 1.4; EXPRESSED IN PLACENTA, SIGNAL = 1.5; EXPRESSED IN HEART, SIGNAL = 1.6; EXPRESSED IN BONE MARROW, SIGNAL = 1.4; EXPRESSED IN FETAL LIVER, SIGNAL = 1.6
ttgagttcttccattggcaactgggccatgctgctctaatagacaaaaacacattagtgtgtttgtaacacctaacaacccaaaataacctcatgctcatttaaaaaggatgaactgatgtgtacagttcatcctagtaagggcagactagaaaaaaatacaagaaacagtcagatcggacacacgagtaacggcaagtttgcagatgtttccatgtttctatcggtgaccatgtcaagaccatacttacggaggaaaaagccagccacctgttttgcttggcctgctaaattttcaatataaatcaatatcagggtttctcttcccaatacctgtaaatttgcagccagaagcatttctacccggcgacaagcaaggatgtcgaccatgcgagccagcacacggaaaggggtgcacagaagcctgtccacatacagcgtgagcacagctcccgactggctgagatggatcccctccaagcactgaagagt

SEQ ID NO: 6056 - DNA, 456 bp, Homo sapiens
  MAP TO AC004848.1; EXPRESSED IN LUNG, SIGNAL = 1.5; EXPRESSED IN HEART, SIGNAL = 1.5; EXPRESSED IN FETAL LIVER, SIGNAL = 1.5; EXPRESSED IN PLACENTA, SIGNAL = 1.7; EXPRESSED IN BRAIN, SIGNAL = 1.5; EXPRESSED IN BONE MARROW, SIGNAL = 1.6; EXPRESSED IN ADULT LIVER, SIGNAL = 1.5
attcagcctgctgacatctgctgcacatgcaaaatggattggactctgtaatccagggtgaaaacaaatgctttcttccttccttcctcctgctccctagtttttgttgagtaatgttctcattctttttgcattcacagattaaaattaataacagcatctgagtttgaagtaggtcccactgaatagtgaaccacaagcaaaataaactgaagaaattagtaatgaagcattttgaatagaaaggggtcatggacaaatataatttttaaaaagccagcgttacctcaggatgatgtccaatttcaatgtaggtgcaaattggatgaaaagcccccgttccacaggcgtacaagtgagtctgattatatgccttaagtaccttgatgaaattagcacattctttctgtaagacaaaaggaaaaccaaagagtttcagcaatcagcatgactgag

SEQ ID NO: 6057 - DNA, 421 bp, Homo sapiens
  MAP TO AC002119.1; EXPRESSED IN PLACENTA, SIGNAL = 2.4; EXPRESSED IN LUNG, SIGNAL = 2.9; EXPRESSED IN HELA, SIGNAL = 1.6; EXPRESSED IN FETAL LIVER, SIGNAL = 1.4; EXPRESSED IN BRAIN, SIGNAL = 3.2; EXPRESSED IN ADULT LIVER, SIGNAL = 1.7; EXPRESSED IN HEART, SIGNAL = 1.5; EXPRESSED IN BONE MARROW, SIGNAL = 1.4
ccccacatgccaaaaagagttaattgaacagagaaagaactagcaagatagaagttacaaaggcaggtgttaaacctcagtaataaaaccagaaatcaaaaatcctcatggagtaaaaactataacaaaattctttagcttttgtagcttccctgaaattgttattttgccacccctttagtaattagcaataaaaatccctagaatgagaaggacctagatttttaccttcagggtcagcaaggaagcacgaagttaaagaagcttcctcctgttctacagctgttcgtagggagagaagattctcaagggacagtgtgaatgacggaaatgttaaattgaggaggaggcggagcttgggtgtggaggcatttattgtttggtctgtccagtaatcccttcttctgggaccttcctctcc

SEQ ID NO: 6058 - DNA, 474 bp, Homo sapiens
  MAP TO AC000085.4; EXPRESSED IN PLACENTA, SIGNAL = 1.6; EXPRESSED IN LUNG, SIGNAL = 1.7; EXPRESSED IN HEART, SIGNAL = 1.5; EXPRESSED IN FETAL LIVER, SIGNAL = 1.4; EXPRESSED IN BONE MARROW, SIGNAL = 1.8; EXPRESSED IN ADULT LIVER, SIGNAL = 1.7; EXPRESSED IN HELA, SIGNAL = 1.6; EXPRESSED IN BRAIN, SIGNAL = 1.7
ctggatggtcagggaactgctcagtcactataaggtcagcagtggctgtgcccacggatggaggagcagaccctgcattggcctcatcctcctttatccccacactgtgttgctcccattccacctgccacttcatcctgcacatttgccccacagctctctcacagtttctcacctgcagaggaattgttctttccttctcccgtgagcagacacaaggttctctgccaggccaggaaagtccccacaatctaggtctcttcactgacacttgcactcagctgtcactctgtgtccacagggtctgcggaagagggagctgctgaaggagctgctaccagtcatcgggcagaacctccgattccagcgcctcttcaccgagtgtcaggaacagctcgacatcctgagggacaagtagcctgccccagcctgccctggctgcagcaagggcagggccacactctcgccgctgat

SEQ ID NO: 6059 - DNA, 463 bp, Homo sapiens
  MAP TO AC005611.1; EXPRESSED IN LUNG, SIGNAL = 2.7; EXPRESSED IN FETAL LIVER, SIGNAL =   3; EXPRESSED IN BONE MARROW, SIGNAL = 3.3; EXPRESSED IN PLACENTA, SIGNAL = 2.7; EXPRESSED IN HELA, SIGNAL = 2.4; EXPRESSED IN HEART, SIGNAL = 2.6; EXPRESSED IN BRAIN, SIGNAL = 3.2; EXPRESSED IN ADULT LIVER, SIGNAL = 2.7
tgtgatttctggcttgtgatatgtaatgtcagttttgagtcctgacattagtgctaagtagatacgttaccttgggcaaaactttgttggcctcagttttctcaagcatataaaaaagataatgatctatatcttgcatggttttatgaaactggtaataattatgtatattagatgttagcacctggtatggtagtaattatgagaattgcattattttaatttgaaagttaaattttcctctggtctttttagaatctggaggtgaactggatattgtagtgacctcaaataaagaagtaaaagttgctgctgtccgagatgccttccaggaggtctttggcttagctgtggttgtaggggaagctggacagtccaatattgccccacaaccagtgggctatgcagctggattaaaagtgagtaacagaacaccattttcaggacatggaaactggcattt

SEQ ID NO: 6060 - DNA, 497 bp, Homo sapiens
  MAP TO AC005531.1; EXPRESSED IN LUNG, SIGNAL = 1.6; EXPRESSED IN BONE MARROW, SIGNAL = 1.7; EXPRESSED IN PLACENTA, SIGNAL = 1.7; EXPRESSED IN HELA, SIGNAL = 1.8; EXPRESSED IN HEART, SIGNAL = 1.6; EXPRESSED IN FETAL LIVER, SIGNAL = 1.9; EXPRESSED IN BRAIN, SIGNAL = 2.6; EXPRESSED IN ADULT LIVER, SIGNAL = 1.6
attcccaaaccatctcctccaagaagcactgtcttcctaacctaccccaagtttgttctgagttctcacaacacttacaaaataatacctaagtaacatctctactctacttgcatggcttgatgaaggggacatgtatagtctgtgtgtgaatatattattttaagctgaactctcaacaactgacactatgtattttctacttatttagtcccccacaggattcttggaatgtctagaatctttctttaactaattagacgtgcttttaacaaggaatgtgcaaactgaatgcataaatgctctgacacgcatgctcacccaagatgctcatcaccaccaagatggcgaacagaaggaccgcgatggcacccagcaggaggcgtgtggtggtgtctaggagaagagagaggggttcaacatcccaccgcccatcccaccgccagtcccactgccagccccataccctgctaatgagaaacagggggaggtagagc

SEQ ID NO: 6061 - DNA, 461 bp, Homo sapiens
  MAP TO AC004584.1; EXPRESSED IN BRAIN, SIGNAL = 6.5; EXPRESSED IN ADULT LIVER, SIGNAL = 6.7; EXPRESSED IN LUNG, SIGNAL = 6.7; EXPRESSED IN BONE MARROW, SIGNAL = 5.5; EXPRESSED IN PLACENTA, SIGNAL =   6; EXPRESSED IN HELA, SIGNAL = 5.7; EXPRESSED IN HEART, SIGNAL = 5.6; EXPRESSED IN FETAL LIVER, SIGNAL =   6
tcaggagttttcagtgagccttcttgtgaccgtctggaaatataaagagactctggcaaaaggctagaaccccctcgccctctgatttagcctccttggctataccattgcctcagcctacctcagaagcacgccgaacccccaggtcacactgctggaccaaatccgcccttcactgctgagacatcagcccaaaaagcaagcaaagagccacacagaggagacttggctttgacctcaggccaggctgggaagctactttacctgaagccacatgaccaggggcagttctgagaagttcttgcaggagttggtggcataatagagccaccagaacatgtaggcatccttgcggaccgtcacataatcccatacttccttgccctcctctgtgggccagtcaatgacagctcctgaaacagaagttcaatttcactctccagaagagtgcctaatgtaca

SEQ ID NO: 6062 - DNA, 462 bp, Homo sapiens
  MAP TO AC005482.1; EXPRESSED IN LUNG, SIGNAL = 1.6; EXPRESSED IN FETAL LIVER, SIGNAL = 1.5; EXPRESSED IN BRAIN, SIGNAL = 1.6; EXPRESSED IN BONE MARROW, SIGNAL = 1.5; EXPRESSED IN ADULT LIVER, SIGNAL = 1.5; EXPRESSED IN PLACENTA, SIGNAL = 1.4; EXPRESSED IN HEART, SIGNAL = 1.5
taggcttagagctgggctccatcacgaatcagctctgtgacttttgcaagtgtcttcaccttgaccttgacttacagtgcctcagtttccccatctataaaggaagggtaataaaagtacccattgactgttgggaggtttgagcatggtcatccatatgaaatgattgacacagggcctggcagctgtcaagtgtccaataagcagagtgatcacttactctcttgtcctaattggggtaatttcaaaagcgataaaaaacactactaaaaattatatagagacacaaagtaaactgggatgcatgacctcctgtcaatgtgtgtcagccttgatgatgaggaggaggaggaagatatgatgacaatgataatgatgatgacgatgataatgatgacgatgacattctacttacctgagtcctcatttcccattctacaaaagaaagataataccgctaat

SEQ ID NO: 6063 - DNA, 457 bp, Homo sapiens
  MAP TO AC003692.1; EXPRESSED IN LUNG, SIGNAL = 3.6; EXPRESSED IN HELA, SIGNAL = 3.3; EXPRESSED IN BRAIN, SIGNAL = 3.5; EXPRESSED IN BONE MARROW, SIGNAL = 3.3; EXPRESSED IN ADULT LIVER, SIGNAL = 3.1; EXPRESSED IN PLACENTA, SIGNAL = 3.3; EXPRESSED IN HEART, SIGNAL = 3.1; EXPRESSED IN FETAL LIVER, SIGNAL = 3.1
aaagtctttcctgagatgcccatcatggttgtgctatgggaggaacgaaggcctgaattggagaggaaaacagaagcctggctccagtgtccagaaagaagtctaccttcctcccttcgaactccagaatcacctggtgctcccgggtagtaacagcagtctgagccactggagccagggagttgagccccaggacccatcagtcctgctggaccatttgtgagactggctctggactcagtgacctatgcttcccaggacagtctgccttccagtggtccccattgtatactggacagggttgaggtggcttcttcttgctgcctgggcagtcccttttgaagtgccctagtttgccacattggtagcaactagcaggtgtaccttggggatactgggttttatacaaagtggccaccagagtctctgcctttttcttgtgtttcctctccttccc

SEQ ID NO: 6064 - DNA, 489 bp, Homo sapiens
  MAP TO AC005658.2; EXPRESSED IN HELA, SIGNAL = 2.1; EXPRESSED IN BRAIN, SIGNAL = 2.2; EXPRESSED IN BONE MARROW, SIGNAL = 2.1; EXPRESSED IN ADULT LIVER, SIGNAL =   2; EXPRESSED IN HEART, SIGNAL = 2.3; EXPRESSED IN PLACENTA, SIGNAL = 1.7; EXPRESSED IN LUNG, SIGNAL =   2; EXPRESSED IN FETAL LIVER, SIGNAL =   2
tgacagatgagagtgccacaggccccttgcatccccagcgaaatttttcaggaagcaatgtggatttgcttaattgcctcccttcatccttacagcagtttgatggaggtggggccagcattatggcctttgctttgtggaggatggatctgtggttcagagaggccaggtgatttttccaaaggccacacagctggcttatggcagagctgtagctcaaatccaggtctcaatagcaaatccggtggtgttcacactcttgctgctcgcttgctcatagcctgggccagccgcacctggagggctgtgaacagtgattgtctgccagaggatgggtgccaggagggggatgagttttctaacagcaacgaaccatgttatcatggtgttcacccttctcagaagggaccagagtgtggacaagatccagggtgttgggatctggataggcaggtccaagggggtgtgcctgtgagggcaaggctctca

SEQ ID NO: 6065 - DNA, 476 bp, Homo sapiens
  MAP TO AC003950.1; EXPRESSED IN BONE MARROW, SIGNAL =   4; EXPRESSED IN PLACENTA, SIGNAL = 3.7; EXPRESSED IN LUNG, SIGNAL =   4; EXPRESSED IN HELA, SIGNAL =   4; EXPRESSED IN HEART, SIGNAL = 4.2; EXPRESSED IN FETAL LIVER, SIGNAL = 4.1; EXPRESSED IN BRAIN, SIGNAL = 5.2; EXPRESSED IN ADULT LIVER, SIGNAL = 4.1
cttcttggttgcccagtgtctgtgggaccctccctgcctggccctgaggtgagactgcccctaatggctgctcgtggtattgcaggacaacagccacaggggtgtcgaacactttctgttgttaaagtagtccttcaacctctaccttctgggtgccatgttgtcttgagttgcccttttcaaagatatgctagcccagagacttgcccttgggtctcgggacttattcaaagatgagataagaaggattgtttcagtgaccgctcccccttcccctctacagctcatgctgcctgatggcatcaccgtggaggtcattgtggtcaaccaggtcaatgccgggcacctgttcgtgcagcagcacacacaccctaccttccacgcgctgcgcagcctcgaccagcagatgtacctctgttactctcagcctggaatccccaccttgcccaccccagtggaaagtaagcagtgccctg

SEQ ID NO: 6066 - DNA, 461 bp, Homo sapiens
  MAP TO AC005540.2; EXPRESSED IN LUNG, SIGNAL = 3.1; EXPRESSED IN HELA, SIGNAL = 3.4; EXPRESSED IN BRAIN, SIGNAL = 3.3; EXPRESSED IN BONE MARROW, SIGNAL = 3.2; EXPRESSED IN ADULT LIVER, SIGNAL = 2.4; EXPRESSED IN PLACENTA, SIGNAL = 2.9; EXPRESSED IN HEART, SIGNAL = 2.7; EXPRESSED IN FETAL LIVER, SIGNAL = 2.9
aaagggtccctgggatctaccctagatagacagaatcctagagcctaggggtgcagtccaagactctgcacctccaggtagtgcttgcatatactaaagtctgcgaccctgtattctaacagggatcagccacagctgtacgtggacagacttcctccccatatttaacagagcaggagaaggccattcgtgccttgagaggagcagtctacgcttgccggtatttttacaggaatgtggtaaaacagctgctacaaacctacccccaacattttttttggccacaccatacccagagcagccaacagcattactgaagctggcagatgcataactctctgcttcctgatgaagatgaggaaaagaagtgccttcctggatcagggagagggagatgagctgaatattaatattgcacttaatactggtgaaatcatgatccaggccctcaggcagtatat

SEQ ID NO: 6067 - DNA, 448 bp, Homo sapiens
  MAP TO AC002302.1; EXPRESSED IN PLACENTA, SIGNAL = 1.9; EXPRESSED IN HELA, SIGNAL =   2; EXPRESSED IN BRAIN, SIGNAL =   2; EXPRESSED IN BONE MARROW, SIGNAL = 2.1; EXPRESSED IN ADULT LIVER, SIGNAL = 2.2; EXPRESSED IN HEART, SIGNAL = 2.1; EXPRESSED IN LUNG, SIGNAL = 2.1; EXPRESSED IN FETAL LIVER, SIGNAL = 2.2
cgatgcaaatgaggagggcggggctggcccggggctccgcctccctcccccgcagctggggccagcggtgccaagcgcagctggacgagcggcagcagctgggcgagtgacagccccggctccgcgcgccgcggccgccagagccggcgcaggggaagcgcccgcggccccgggtgcagcagcggccgccgcctcccgcgcctccccggcccgcagcccgcggtcccgcggccccggggccggcacctctcgggctccggctccccgcgcgcaagatggctgacccggctgcggggccgccgccgagcgagggcgaggagagcaccgtgcgcttcgcccgcaaaggcgccctccggcagaagaacgtgcatgaggtcaagaaccacaaattcaccgcccgcttcttcaagcagcccaccttctgcagccactgcaccgacttcatctg

SEQ ID NO: 6068 - DNA, 473 bp, Homo sapiens
  MAP TO AC005548.1; EXPRESSED IN BONE MARROW, SIGNAL = 2.2; EXPRESSED IN PLACENTA, SIGNAL = 2.7; EXPRESSED IN LUNG, SIGNAL = 2.5; EXPRESSED IN HELA, SIGNAL = 2.5; EXPRESSED IN HEART, SIGNAL = 2.2; EXPRESSED IN FETAL LIVER, SIGNAL = 2.4; EXPRESSED IN BRAIN, SIGNAL = 2.8; EXPRESSED IN ADULT LIVER, SIGNAL = 2.2
caaagtcctgacccacatccattgctgaattttgtttataaaagaaaacaaaagcacaaggtcgtgacttgcccagttgtgagatttaattatttgtaggaagcactggaatgccagtatccagattgtgtttcttcggttgtcttcaggaaaattactgacaactgtatgtgtaaagtgattcagaaatcgacttgtcttaaggtaggaggcaggacagaataaagcaagactcctttctattctgttggcttacctccatggtgccattggatctacttctagccattcattccagggttttatcaccataattaacattgctgtgtggaaataataagcctgtaggaaaccaggggagagaactaaggtactaatgagcacatcaattacaataatgataaatttgctgtcattccaaccattgatcttcacatcactcagctgttgattgcaagtgagcagaaggaagg

SEQ ID NO: 6069 - DNA, 466 bp, Homo sapiens
  MAP TO AC002087.1; EXPRESSED IN LUNG, SIGNAL = 2.9; EXPRESSED IN FETAL LIVER, SIGNAL = 3.1; EXPRESSED IN BRAIN, SIGNAL = 3.1; EXPRESSED IN BONE MARROW, SIGNAL = 3.2; EXPRESSED IN PLACENTA, SIGNAL = 2.9; EXPRESSED IN HELA, SIGNAL =   3; EXPRESSED IN HEART, SIGNAL = 2.9; EXPRESSED IN ADULT LIVER, SIGNAL = 2.8
gttctaaggaccatggaggcctggtgtgacattagttggcacataactggtatttcctgcagtcagagaaaaattagtatcaaagtggtatttaaggaagttctcctcagtatcctggcccacagacttcagaagtaaactcatttgggatactcaacaaccagttatggggatggcacctggagaaccagcgtcactctgtattagttcattctcacactgctaataaagacatacctgagactgggtaatttataaaggaaaaagatttaactgactcacacttccacagggctgtggagatctgaagaaacttacaatcatggcagacggggaagaaaatatgtccttcttcacatggtggcaggaaagagaagaatgagcaaaagtgagaaaatcctcttataaaaccaccagattttgtgagaactcactcactgtaatgagaacagcatgagggtaacgg

SEQ ID NO: 6070 - DNA, 495 bp, Homo sapiens
  MAP TO AC002461.1; EXPRESSED IN LUNG, SIGNAL = 1.8; EXPRESSED IN BRAIN, SIGNAL = 1.5; EXPRESSED IN PLACENTA, SIGNAL = 1.4; EXPRESSED IN HEART, SIGNAL = 1.3; EXPRESSED IN BONE MARROW, SIGNAL = 1.5; EXPRESSED IN ADULT LIVER, SIGNAL = 1.3; EXPRESSED IN FETAL LIVER, SIGNAL = 1.4
ttcctcatctgtaaagtaagaatgtgaaagtagatggtctttataatgcatctcaatcctgctattttgagaatgcctttcttgtacaatagtagtaactattatgggacaattaactttaggcagttacctctatcctcaaagactgaatcatcatgtagccagtagtttggaaaagaagacattttgctaataaaagaaggaaataggtgaaacataaaacattgaaactgagagcaatctgacttcagctttttctatttccacagataaaatttggatgtttgttgttgttgctggatttgaaggaaaggatgctctttatgctaagatcactcctcattattctcaagaagaaaaaatattgtgtgcacattttggagaatggaaattgggggtcccttctatgttggtcatttttgcttctgcataaaataatagagataattagtcatcaccttgatgtagacaatgtgagttcataggcagtggcct

SEQ ID NO: 6071 - DNA, 475 bp, Homo sapiens
  MAP TO AC005726.1; EXPRESSED IN PLACENTA, SIGNAL = 5.7; EXPRESSED IN LUNG, SIGNAL = 7.2; EXPRESSED IN FETAL LIVER, SIGNAL = 6.2; EXPRESSED IN BONE MARROW, SIGNAL =   7; EXPRESSED IN ADULT LIVER, SIGNAL = 6.6; EXPRESSED IN HELA, SIGNAL = 5.7; EXPRESSED IN HEART, SIGNAL = 6.1; EXPRESSED IN BRAIN, SIGNAL = 6.7
ttagtgtcccagccttcctctagacggcagtaccagcccccaagcaggagtgcagatgagagtgcgaggtttcaagctgaccctaggaaaataaaccatatccctgtagaaagacttccatagatcctggatgaactccaggcatcttccttggtagatggaaggcacagtaaggcccagcaccctttccaccaatgcctaggacttactggtataccctcttgtcccttctccttcctaggtgtacaaggctgtagctgccgtccagaagtcggcagaagagttggcgtctgggcacctggcatctgcctttgtcgccagccaggaagctgtgacatcctctgagcttgccttctttgacccgtcactcctccacctcctttatttccctgatgaccagaagtttgccatctacatcccactcttcctgcctatggctgtgcccatcctcctgtccctggtcaagatcttcctg

SEQ ID NO: 6072 - DNA, 471 bp, Homo sapiens
  MAP TO AC003681.1; EXPRESSED IN LUNG, SIGNAL = 2.5; EXPRESSED IN FETAL LIVER, SIGNAL = 2.6; EXPRESSED IN BONE MARROW, SIGNAL = 2.6; EXPRESSED IN PLACENTA, SIGNAL = 2.6; EXPRESSED IN HELA, SIGNAL = 2.5; EXPRESSED IN BRAIN, SIGNAL = 3.1; EXPRESSED IN ADULT LIVER, SIGNAL = 3.1; EXPRESSED IN HEART, SIGNAL = 2.8
aattgttgctttattcatccaagttttatgatattttttgttttactacgaacattaggaatgttagcctttgatactgtttttgcagaaacaggttaagactaacaggagttttacaaaggaactgtcaaattgggatttgactagtgggaattggctgggtgataatcaactttttcttggctgactctgatcagcttcttaggcctgtgtatatacaatacctttgtgaggatatggccgattaggggaaaaactattgccaattttgcctcccctcctcttttttttttcttcttccccctcttcccccccacccccagacttcaccataagggaaagaagagagccttgttggacactgaagaagggacggggatttctcctcctaatctgggcctcttgtcatggtaagtacaaggaaataagagtaaaaaaaaaaacaaaaaaccctgtgtcctgacaattaag

SEQ ID NO: 6073 - DNA, 405 bp, Homo sapiens
  MAP TO AC005663.1; EXPRESSED IN BONE MARROW, SIGNAL = 1.5; EXPRESSED IN PLACENTA, SIGNAL = 3.4; EXPRESSED IN LUNG, SIGNAL = 2.9; EXPRESSED IN HELA, SIGNAL = 2.3; EXPRESSED IN HEART, SIGNAL = 1.5; EXPRESSED IN FETAL LIVER, SIGNAL = 1.5; EXPRESSED IN BRAIN, SIGNAL = 3.3; EXPRESSED IN ADULT LIVER, SIGNAL = 9.4
cagccctatctgggcatatcccagggttcccagccccctggaaatggggtgataacagcttctcctgtaagggctttgatgcctggtcctgggtccctgtcccagagctgagcacctgctggcccggaccccacctttcttgtcgcccacgttcatggcccactccttctgctcgcagtaggtgtcaatggcctccagcacgctctgtgcgttcccgggctccgcatgctgcagcacgtggttcaggatgcgctgctccttggtgtcacccatgagcaggttgtggatgggctgcaggatgaactcgttccagccgataaggcacaggccccagccccagtgcctcagaagcagcagcagcaccaccagcagcaccaggcccagcaacacagctgccaacagcag

SEQ ID NO: 6074 - DNA, 445 bp, Homo sapiens
  MAP TO AC005669.1; EXPRESSED IN LUNG, SIGNAL = 3.5; EXPRESSED IN FETAL LIVER, SIGNAL = 3.4; EXPRESSED IN BRAIN, SIGNAL =   4; EXPRESSED IN BONE MARROW, SIGNAL = 3.5; EXPRESSED IN PLACENTA, SIGNAL = 3.5; EXPRESSED IN HELA, SIGNAL = 3.3; EXPRESSED IN HEART, SIGNAL = 3.7; EXPRESSED IN ADULT LIVER, SIGNAL = 3.6
cctaattttctcaagcccccagacttcagctttcccccaagagatgcactgtggcgataaattctgctgtggttgagggtgatttgatgagcctaggcctgccattccttgctgccacctggctgcttctccgtctcagtcagtaccagtaagcgatgagcccctcagataaccccaggtgggggccacaggctgacatcacttccttacgtgggcaactgataaacaccagccaaatcccaagctcccactatagaaaggatttctacaggaaatagttggccctgggaagcaaacaaagccctctgcagaacatggaagccagatttcagatgctggttgcaagtcgcttttcttgttataaagcgcctggtagaactgcctttcttttctttgtctttcatctttgcctttgcaatctttgggggcttcactccatttgcta

SEQ ID NO: 6075 - DNA, 470 bp, Homo sapiens
  MAP TO AC005808.1; EXPRESSED IN HELA, SIGNAL = 4.2; EXPRESSED IN FETAL LIVER, SIGNAL = 4.3; EXPRESSED IN BRAIN, SIGNAL =   5; EXPRESSED IN BONE MARROW, SIGNAL = 4.6; EXPRESSED IN ADULT LIVER, SIGNAL = 9.9; EXPRESSED IN PLACENTA, SIGNAL = 4.4; EXPRESSED IN HEART, SIGNAL =   4; EXPRESSED IN LUNG, SIGNAL = 4.7
tgagtcgctcaatcatcagctagatcgccccgtgtagacaaagcaagtggaattatttgaagagtataccttgagctgggcaatcctcatagaaggtcggggacgacctgcccttcagtgttcctggagcatcttctccaaagtggaggtcgagccaggcctaggaggaaagagagggcaactgcggacgaccccaccgcagaagaggtgaaaccgacgggctccaggtaggtgtgtcctccccaaccacaccctcccacagggcccggagactggggaaggccggagatgagattagggtcagagccacacccctgacccgcgtacaggacaaactgaagccacgcgtctacactggcgctccgaactgcgttggcccaaagcttcttcaccgcttccagcggagggcttaaagcggtccccccagccctcacacagcgggttttctcagaacccagtctccagagacc

SEQ ID NO: 6076 - DNA, 457 bp, Homo sapiens
  MAP TO AC003689.1; EXPRESSED IN PLACENTA, SIGNAL = 2.1; EXPRESSED IN LUNG, SIGNAL = 2.2; EXPRESSED IN FETAL LIVER, SIGNAL = 2.7; EXPRESSED IN ADULT LIVER, SIGNAL =   2; EXPRESSED IN HELA, SIGNAL = 1.8; EXPRESSED IN HEART, SIGNAL = 3.1; EXPRESSED IN BRAIN, SIGNAL = 1.9; EXPRESSED IN BONE MARROW, SIGNAL =   2
ctcccaaacctgccctccaggccccgcccaccaggtctctggtccctcccaccagcctgcggctctacctaacccatctgcagtcctggggggattcccagtcttgcctaccgggctacagccctctcactgggtccacaacacgctcacaactctccggccagtccaaccatcaccccaaccctcccttcctggtcgggtgccccagcatccacaaccccctcccacccctagagaaccgcgcgctgcgcctggtggacggtggcggcgcctgcgccggccgcgtggagatgctggagcatggcgagtggggatcagtgtgcgatgacacttgggacctggaggacgcccacgtggtgtgcaggcaactgggctgcggctgggcagtccaggccctgcccggcttgcacttcacgcccggccgcgggcctatccaccgggaccaggtgaactgctc

SEQ ID NO: 6077 - DNA, 444 bp, Homo sapiens
  MAP TO AC002123.1; EXPRESSED IN PLACENTA, SIGNAL = 2.4; EXPRESSED IN LUNG, SIGNAL = 2.3; EXPRESSED IN FETAL LIVER, SIGNAL = 2.5; EXPRESSED IN ADULT LIVER, SIGNAL =   2; EXPRESSED IN HELA, SIGNAL = 2.4; EXPRESSED IN HEART, SIGNAL = 2.3; EXPRESSED IN BRAIN, SIGNAL = 2.5; EXPRESSED IN BONE MARROW, SIGNAL = 2.6
tgctgttattgacaggaagggcaacaccagctggtctcatgagatctaacagagacaggctgatccagagcctaggtgattcaaaccctgcattatgtaacaaaactgtagaaaatgctagttctttttttaaatctcttatattcttctggtacttatgttttcaaataaatgctattttgagaaaattactaccttgcattttaagttagtttagtttgctttcatgacattttctcttgtggatttccatcatcatagtgactatgatgtgtccctccctgcagtgtgcatttgatcctctcattcatcctatccatatggagaacacctacttggctttcaaaatgcagttccagcatctcctcctccattttctgggggattggactacttacccttttgggggctcgtattatgtcctgatactgctctgcaatcaca

SEQ ID NO: 6078 - DNA, 465 bp, Homo sapiens
  MAP TO AC005815.1; EXPRESSED IN LUNG, SIGNAL = 6.4; EXPRESSED IN FETAL LIVER, SIGNAL = 7.4; EXPRESSED IN BONE MARROW, SIGNAL = 6.5; EXPRESSED IN PLACENTA, SIGNAL = 5.7; EXPRESSED IN HELA, SIGNAL = 6.6; EXPRESSED IN HEART, SIGNAL = 6.3; EXPRESSED IN BRAIN, SIGNAL = 7.1; EXPRESSED IN ADULT LIVER, SIGNAL = 6.7
ttggataagcagccacacagcttgctgctgtgtgcatttattcatttattcattcaacagatattatctatcatatacccagcattgtgctggaggttgtggacagtagtgaacatgagagacaagatccctcccctgccagaccttcccctcaccccctgccctttgagatggagagggtgtccaggcctccccccttcaccctctgaggtggggaggcgtccagggcctcgcatctcagcatgggactgataggcttgccctgacctctcgcaggcatgaacactgctgtctgggccgtggcacacatgggcatttgtgtgggcaccaaagtcttcctcatctgcgaggtaaggctgaggtgagctctgtgtatgtggggagcaggagcctcctggggtgcaggctggggtctggtctgtgtgggtcaccctgggagccttcagatgaccctggtggagctaa

SEQ ID NO: 6079 - DNA, 478 bp, Homo sapiens
  MAP TO AC002288.1; EXPRESSED IN PLACENTA, SIGNAL = 4.1; EXPRESSED IN HEART, SIGNAL = 5.2; EXPRESSED IN FETAL LIVER, SIGNAL = 4.7; EXPRESSED IN BRAIN, SIGNAL = 5.4; EXPRESSED IN BONE MARROW, SIGNAL = 4.6; EXPRESSED IN ADULT LIVER, SIGNAL = 4.6; EXPRESSED IN HELA, SIGNAL = 4.8; EXPRESSED IN LUNG, SIGNAL = 4.5
gaggccgacctgtttacctacatctttaaaggtaaattctgcctttaattggtgccaataattacctggtgccaatataattataaactatttacatagacagtacttgagcatagggatatgtgccaaataagatgttttcacctgtaagtaagaggaaaccttgacacaatatgtttaaacaataaggacacttattatttcataaatcattaggtcagaggtaggtaggatcctgggttagtaaaatcagggctctgtctcaagttctctgaggttcggttcactctgcttttctctgcatgcagactcacattagcttccatcgtggtaacaagacaatttcctgtatcatcactagaggcaactagggcaactggtttttcatttttatatcctgtaagaaaggaaaaaaattctcagccacaaaactaaaggtcatcctagcaaccttgtgtctgccccacacctttaacag

SEQ ID NO: 6080 - DNA, 474 bp, Homo sapiens
  MAP TO AC003077.1; EXPRESSED IN PLACENTA, SIGNAL = 1.2; EXPRESSED IN LUNG, SIGNAL = 1.4; EXPRESSED IN FETAL LIVER, SIGNAL = 1.4; EXPRESSED IN ADULT LIVER, SIGNAL = 1.4; EXPRESSED IN HEART, SIGNAL = 1.6; EXPRESSED IN BRAIN, SIGNAL = 1.3; EXPRESSED IN BONE MARROW, SIGNAL = 1.4
ttcagccaggagttctcaaagactggtctaagaaccaccagcattagaattgttacaaaaaagctgattttaggacctcctcccagaccaactgagtcagaattcctgagctgggcaccagaaatctgcttggttagggagcactccatgtcactctgatgcacgtggagctgcagaaccactagactaaatgatttatatagtcccttctgtttctgtcacttgacactattctgagtaaatatttaccaagggctgtgccccaaggggctcgcagtctatctgaggagttagcatgtaataagaattgcatggtaccttgaattcattctctttatcttttgtgcctttgtgaaatggtcggtcatagcggaatttccagatgtgattcactttatagaagcttttgatgttgtccggaacaccctctctctgcaggacctcctggctctctggaatgggagtcacagcata

SEQ ID NO: 6081 - DNA, 468 bp, Homo sapiens
  MAP TO AC002526.1; EXPRESSED IN LUNG, SIGNAL = 1.6; EXPRESSED IN PLACENTA, SIGNAL = 1.5; EXPRESSED IN HEART, SIGNAL = 5.9; EXPRESSED IN FETAL LIVER, SIGNAL = 1.7; EXPRESSED IN BRAIN, SIGNAL = 2.6; EXPRESSED IN BONE MARROW, SIGNAL = 1.6; EXPRESSED IN ADULT LIVER, SIGNAL = 3.7; EXPRESSED IN HELA, SIGNAL = 1.9
ctccaaaccctttgaatccccctaaaaataatttactagccctcaaattgtcacattttatgcatctctctttccccaatgaataatggtatataacatctgtacaccatttggttattgggaaatcattctcctctaattcctcgatgctatgctaaaatacaatttcgtatgtcttttctgccactaatctacctttcgtcagttgatgtttcagtagagttttagagggtaaaagctgagttttatcttcaccccttcagttttggcacgatgagcaaggataactcaaaaccactctgctcttctggaagccacagtcaagggaacccaggacctgacaagctggcagaaggacaagaaattcttgccagccagactcctggtctatctctgtggaatccagtagagctgatggtaagaatcactgtgtctgtttttccttttgcaaatttaagattaatagga

SEQ ID NO: 6082 - DNA, 500 bp, Homo sapiens
  MAP TO AC005837.1; EXPRESSED IN LUNG, SIGNAL = 6.4; EXPRESSED IN HEART, SIGNAL = 6.1; EXPRESSED IN FETAL LIVER, SIGNAL =   6; EXPRESSED IN BRAIN, SIGNAL = 6.5; EXPRESSED IN HELA, SIGNAL = 6.1; EXPRESSED IN BONE MARROW, SIGNAL = 5.9; EXPRESSED IN PLACENTA, SIGNAL = 6.5; EXPRESSED IN ADULT LIVER, SIGNAL =   6
acctggagaaacagctcctgggctattcctgggcctgttcagcataggacagtgcatgggctgggtgcccacatctgctgggaaagagggtgggcatgagtatgggtgcatgcagttatgcgtgcgtatccagggacctgcacccagacccctagggacggagccagggaaaagaacccccacccctcaacacagaattagccatgagaagaagcctgggcaacagcaactacaggccgtgtttctcctccaaccgtgatgtaggtgagtgcttatggcttcatcactgagggccatgagcgcttttctgatcactactatgatacatcatggaagcggctgatcttttacataaaccatgacttcaagctggagagagaagtctggaagcggctacacgatgaagggataatccggctgtaccagcgtcctggtcccggaactgccaaagccaagaactgaccggggccagggctgccatggtctccttgcctgctcca

SEQ ID NO: 6083 - DNA, 456 bp, Homo sapiens
  MAP TO AC005911.6; EXPRESSED IN LUNG, SIGNAL = 1.7; EXPRESSED IN PLACENTA, SIGNAL =   2; EXPRESSED IN HEART, SIGNAL = 1.7; EXPRESSED IN FETAL LIVER, SIGNAL = 1.9; EXPRESSED IN BRAIN, SIGNAL = 1.6; EXPRESSED IN BONE MARROW, SIGNAL = 1.7; EXPRESSED IN ADULT LIVER, SIGNAL = 1.8; EXPRESSED IN HELA, SIGNAL = 1.7
tgtcagaagaagagggtgggaactgaaaatagtcaaaaagaaacaaacagtcatctatggccatctatggcagctagtattttatatttaattatcttctttttctcaggcaacagtataaatactaccattgctgacaattaccaacattcagatgtaaaagatgctaaacactgtcacctctgtgaggccctaagccatgagtcattttcagtcatgtagattgttacccacaatgaaaagaaaggaaaagattacaattgagtaaggagacaaattgccttaaaatcattaccagtcctcaccatgcttttggagacgctcctgaagtcctggcttggaagcagtatccacggtgttttcagcatcttcttccacaacagaggagcttactgatggagcatgaacttcgtctggtttcaggacagcagctggaccatcaatacctaagggcca

SEQ ID NO: 6084 - DNA, 465 bp, Homo sapiens
  MAP TO AC005598.6; EXPRESSED IN LUNG, SIGNAL = 3.7; EXPRESSED IN FETAL LIVER, SIGNAL =   7; EXPRESSED IN BONE MARROW, SIGNAL = 6.4; EXPRESSED IN PLACENTA, SIGNAL = 4.7; EXPRESSED IN HELA, SIGNAL = 5.2; EXPRESSED IN HEART, SIGNAL = 5.2; EXPRESSED IN BRAIN, SIGNAL = 5.6; EXPRESSED IN ADULT LIVER, SIGNAL = 4.8
tgacaaaacaatgcaaacctggccttccttgaccaagcagtataatccaaagatgatcaacattgccagatggatatgcaccagaacttttgggtacagaccagacagagatggatgtgaaattccagaccaatttgttgtaggatatgtccttgactataattaatactttaaggatttgaatcatgtttgtgtcattagtaaaattggaaaagcaaaatacaaaggcaaaaatgagggtcaagtagagtagcagagtttgggaacatctggagtctcattgacattgccagtaaaagtgtcaaatgttgcatttctgtggtcatctgcatagtagagctttttgcatggatctttgggaattttatctgttgcatattttagatataacagttgctgccatcctaaactcattgttagcactaagaaccaatagatcatcagttccctttggataggttgttg

SEQ ID NO: 6085 - DNA, 470 bp, Homo sapiens
  MAP TO AC002127.1; EXPRESSED IN PLACENTA, SIGNAL = 3.3; EXPRESSED IN HEART, SIGNAL = 3.4; EXPRESSED IN BRAIN, SIGNAL = 3.8; EXPRESSED IN BONE MARROW, SIGNAL = 3.8; EXPRESSED IN ADULT LIVER, SIGNAL = 3.4; EXPRESSED IN LUNG, SIGNAL = 3.4; EXPRESSED IN HELA, SIGNAL = 3.5; EXPRESSED IN FETAL LIVER, SIGNAL =   3
tgacctcctttagggactgtgactgtgtcacatcgtcgagatacataactggaacttttatcactgaaacatgccattgcataaaaagcctcattggaatgttatgagaaatgactataattttcatttgttgaataaaaaatactgtttcatctttgacatggccaatataatctaaaagaactttgtagagagtgtcgctggaggactcgaggatatgcagaatggaagtgggatagatgagcagcaatcctgtcactgcttctcctaggtgatgtttcaaaactgactgaaacatttgttcatagtagtcagcaacatcttttctttctacatttgcttgtatcttggccactagaaacatcctatcaagaaggaatttctttaggtgtagtcgttgtttctcttcttgaaagtgcaggtaattgctacgtgggacttggagaaaaagaagaggttccagtggcaaa

SEQ ID NO: 6086 - DNA, 452 bp, Homo sapiens
  MAP TO AC005918.5; EXPRESSED IN PLACENTA, SIGNAL = 2.8; EXPRESSED IN LUNG, SIGNAL = 3.3; EXPRESSED IN HELA, SIGNAL =   3; EXPRESSED IN FETAL LIVER, SIGNAL = 3.1; EXPRESSED IN ADULT LIVER, SIGNAL = 2.9; EXPRESSED IN HEART, SIGNAL = 2.6; EXPRESSED IN BRAIN, SIGNAL = 3.1; EXPRESSED IN BONE MARROW, SIGNAL = 2.9
tcattctttctcctgctggcaactgcagcgagggcctcagaaccacagactgtcagccacagaagggtccctggggagtctgacctgcctaggatgcagatgaagatgctgaggtctagagagctaacttcaccacagcctctgcgccgcttcgtggcagtgctggtggaggaagagaaggacgctctgttctctacagaggccctgaaactagatgctggatcatcccgtacgtttccctgtgctaaggttgccccatctgggctgtaatctttgactaacagcaggaggatgacagagcttttagaattcaaaagcaacttggggatagtctcatcaaggctgcccatgttacagatgaggagaatgagcccagggggcaccgcgatatgtctaaatcagttttccatcctgagctctgaatccagaactccagcctttgaacctagtgc

SEQ ID NO: 6087 - DNA, 457 bp, Homo sapiens
  MAP TO AC005010.2; EXPRESSED IN PLACENTA, SIGNAL =   5; EXPRESSED IN LUNG, SIGNAL = 5.4; EXPRESSED IN HELA, SIGNAL = 5.4; EXPRESSED IN HEART, SIGNAL = 4.6; EXPRESSED IN BRAIN, SIGNAL = 4.8; EXPRESSED IN FETAL LIVER, SIGNAL = 4.3; EXPRESSED IN BONE MARROW, SIGNAL = 4.2; EXPRESSED IN ADULT LIVER, SIGNAL = 4.5
ttctttgctacactcacgccaatacttctggccaccaaatgtgtgtatattttcccatgcaccgtttctcccactaccaggacaccaactgggcgtcctctaattcattgctgtcctgaccctgaccacctgcacttccctcagaccccgcaggttaaggacgcagccccgcaagaccagggccaatcccaagtctggcttctggcccgctggctagagatcatgggttcccatggctctacctccagttcagtgatttgcttgaatggctcacagaactcggggaaacactttacttgtgtttacccacactatgtaaatgctcccactcaggcacagccgaacgaaggggcacatggggcgaggcagaggccagggccatgtggactctccgtgccctctctgggcaccgcctccctgtgttcagccctctgcaagcactccaaaacccttggta

SEQ ID NO: 6088 - DNA, 487 bp, Homo sapiens
  MAP TO AC004918.1; EXPRESSED IN PLACENTA, SIGNAL = 2.9; EXPRESSED IN BONE MARROW, SIGNAL = 2.8; EXPRESSED IN ADULT LIVER, SIGNAL = 3.9; EXPRESSED IN LUNG, SIGNAL = 3.5; EXPRESSED IN HELA, SIGNAL = 3.3; EXPRESSED IN HEART, SIGNAL = 2.9; EXPRESSED IN FETAL LIVER, SIGNAL = 3.3; EXPRESSED IN BRAIN, SIGNAL =   3
cggtacttctccctgtcagcactgttgatcttcagcagcggctgcaggtggtcgtggtgtgtcttcacattctggttatccacgtagacgtcatacagctcccgcttctcctcgaatatcttctctgtggtgcctgtggaacccggggttagagaggtgggaacccacccgaccccactgggaaacaaggcgcccaggagccctgtgtctgggaggagcagggctgggacctgagggcaagatgaggggagggccccgtactcacaggccacataggacacctctacctccaggctctcgatgtcagccacgttcacgtagaagaaaggtttggactcaggaatggtgcccccgatgccaggcagtgaaacgttggccaagcagcagcagcagtacactgtggggatagaggaggtgagcggggagggtctgcccctccacagcccttcctccctcggagcctgcggctcaacacctctgctccagg

SEQ ID NO: 6089 - DNA, 461 bp, Homo sapiens
  MAP TO AC003667.1; EXPRESSED IN FETAL LIVER, SIGNAL = 2.5; EXPRESSED IN BRAIN, SIGNAL =   3; EXPRESSED IN BONE MARROW, SIGNAL = 2.8; EXPRESSED IN ADULT LIVER, SIGNAL = 2.7; EXPRESSED IN PLACENTA, SIGNAL = 2.9; EXPRESSED IN LUNG, SIGNAL = 2.6; EXPRESSED IN HEART, SIGNAL = 2.8; EXPRESSED IN HELA, SIGNAL = 2.9
gccatgtcggttgactcttctgttcatgaagatttctctgtagcacatgatgctgtttgataacatcttactcacagtagaacatcttttgaatttagagtcaatcctctaaaacccagctattgctttatcaactaagcttatggaatatcctaaagcctttgttgtcattttaacagtgttcacagcatcttcaccaggagtagattccatctcaataaatcactttctttgctcatccataacaagcaactcctcatccattcaagttttatcatgaaattgcagcaattcagtcacatcttcaggcaccacttctaatcctcttgctatttccaccatatcttcagttaattcttccactgaagtcttgaacccctcaaagtcatctatgaagtttggagtcatcttcttccaaactcctgttaatgttgatgttttgaacacctcccatgaatcat

SEQ ID NO: 6090 - DNA, 422 bp, Homo sapiens
  MAP TO AC002490.1; EXPRESSED IN LUNG, SIGNAL = 2.2; EXPRESSED IN BRAIN, SIGNAL = 2.3; EXPRESSED IN ADULT LIVER, SIGNAL = 1.7; EXPRESSED IN PLACENTA, SIGNAL =   2; EXPRESSED IN HELA, SIGNAL = 1.9; EXPRESSED IN HEART, SIGNAL = 1.7; EXPRESSED IN FETAL LIVER, SIGNAL = 1.8; EXPRESSED IN BONE MARROW, SIGNAL = 1.9
aactggagcaggtgtggggcaggtgggcccatgggctgcaggggaggaacccgggggtgggtcagagcagcacaggtcaccagtgcttctgagcagaaagaggagacctgaggaaagaagaaagggcaagtgtgagcaccagaaatactgggagtctcttggaaacaagagactccaggaaccaaagaggggcttggcccatcacagttacctcaaggctatcttctcgctggccgagggagaaggcttgcagggcacaggcaagaggaggtgggcagcgaggagacggggccagcagcagcgccagcagcaggcagtagagttcacggcggcagcgggagctcgtgtacggggagctgcctaggacctcaccctgctgtacacccatgaccagggggaggaccaggtcatgcagtctctga

SEQ ID NO: 6091 - DNA, 480 bp, Homo sapiens
  MAP TO AC005226.1; EXPRESSED IN HEART, SIGNAL =   6; EXPRESSED IN BRAIN, SIGNAL = 7.4; EXPRESSED IN PLACENTA, SIGNAL = 7.2; EXPRESSED IN LUNG, SIGNAL = 8.1; EXPRESSED IN FETAL LIVER, SIGNAL = 6.4; EXPRESSED IN BONE MARROW, SIGNAL = 7.1; EXPRESSED IN ADULT LIVER, SIGNAL = 6.5; EXPRESSED IN HELA, SIGNAL = 6.8
tacatcagccttggggaatgctcatttcacagtagaataggcagttttcaggagaacagaagcccagatgggagaagcagaatacaaatcataattccaaagtggaaaattcaactttgatgtgcacttgacagatgcaagagaaacaaatcccaagtatttgaagaggaaagttgccatggcatttttgcaaaacaccaccagagagaaggaaaattctgtggtacacatattttcccttttcttgctttttcttcattaggcaagaacttcagaagagctctggaaggagaaaatcggatgtcaagaagaccccttcagagttgggttcccaggaggaacagggggcatgtcacgtgatagcagtgattctaggtccccactccatgcaccacagcaactgtggggaggctcagctctgctcctcccacccgatgggggacagacagtagcattctcagccactgcctaattaccagc

SEQ ID NO: 6092 - DNA, 466 bp, Homo sapiens
  MAP TO AC004468.1; EXPRESSED IN PLACENTA, SIGNAL = 1.8; EXPRESSED IN LUNG, SIGNAL = 1.8; EXPRESSED IN HEART, SIGNAL = 1.7; EXPRESSED IN BRAIN, SIGNAL = 1.5; EXPRESSED IN BONE MARROW, SIGNAL = 1.7; EXPRESSED IN ADULT LIVER, SIGNAL = 1.9; EXPRESSED IN HELA, SIGNAL = 1.6; EXPRESSED IN FETAL LIVER, SIGNAL = 1.7
gcatttaaaaagcaacatgaggtgatatactaatttactccttccagtaatctagaagagctttaatacaatattaatttggtgtggattttgaccgctatttgaaaattgatgtatgcatgaggaagttaaaatgaaaactccctattgtctgtatctgctgttcctgtgtttgataatgccagtggacagtcctagcattttaaatatttcattcgattcatcatttaatgtactggaacaatctgcaaagacattaattgtgtaacacccaatttattttattgtgcagcatttggaagctcctgaagacaagtcatttggcagttcattgatggagagtgaagtaaacctggaccgttatcaaacagctttagaagaagtattatcgtggcttctttctgctgaggacacattgcaagcacaaggagagatttctaatgatgtggaagtggtgaaagaccag

SEQ ID NO: 6093 - DNA, 463 bp, Homo sapiens
  MAP TO AC004976.1; EXPRESSED IN LUNG, SIGNAL = 2.4; EXPRESSED IN PLACENTA, SIGNAL = 2.2; EXPRESSED IN HEART, SIGNAL = 2.4; EXPRESSED IN FETAL LIVER, SIGNAL = 2.1; EXPRESSED IN BRAIN, SIGNAL = 2.4; EXPRESSED IN BONE MARROW, SIGNAL = 2.1; EXPRESSED IN HELA, SIGNAL = 2.2; EXPRESSED IN ADULT LIVER, SIGNAL = 2.1
agcagggactggtgaacatcagtctctgtgtgcaaatctccaaggggtctgtctcagagcctggagagagcagaggggatctgttctcagagtgggggcaagaatggggtggagttgcagaagttcaacattaggaagagcttgtaagagtaaaagctgctcaagaagaagagggctgctttagcaggtagtgagcttcctgacaaaggaggggtccaagcagagaccagacagacagatgggtgcccccggagcccagagccccccaggtatagccccgagtctccccgagcaatgacctcattgctctcgtgcacttcatggtcaacgagctgcagcaggaaccacatgacatttcgcaggataaaggtggtgatgaggttccagtgaatcacattccgcagacagcgaatgctcctgtgggaggtgcaggtcaggggtcagccaggttcaggggtcaact

SEQ ID NO: 6094 - DNA, 450 bp, Homo sapiens
  MAP TO AC005332.1; EXPRESSED IN HEART, SIGNAL =   2; EXPRESSED IN ADULT LIVER, SIGNAL = 1.2; EXPRESSED IN PLACENTA, SIGNAL = 1.3; EXPRESSED IN LUNG, SIGNAL = 1.5; EXPRESSED IN FETAL LIVER, SIGNAL = 1.2; EXPRESSED IN BRAIN, SIGNAL = 1.7; EXPRESSED IN BONE MARROW, SIGNAL = 1.2
aacctttatcattcattggtgttgctatgaaacaaaaagaaacaaaatgttatcttttaagtcagtttggctacaaaacttgtaccgccgcaatgaatatcaaaaacgatcctaaaacggcccatctgaatcagacccatagcctggactattcctgacaagagcgccactgcaaaactgaaccaaaaccagcacattaccagtatttaccaatggactgtatataaatgctgcgtttgtttggagagggtgtctttctgtaaggatcactgaagaactgttcaaagtcttggggagcctcagggtgggaggtgatccaatctgatggagaatgcaaggtaatgggtccaaagagatcactggctggctggaaggcttcattcattaaacgttgttccccagcatttaatttctcatactgtgatacaagcactgggttctttgagatga

SEQ ID NO: 6095 - DNA, 481 bp, Homo sapiens
  MAP TO AC004585.1; EXPRESSED IN PLACENTA, SIGNAL = 4.7; EXPRESSED IN LUNG, SIGNAL = 5.1; EXPRESSED IN HELA, SIGNAL = 4.3; EXPRESSED IN HEART, SIGNAL = 4.2; EXPRESSED IN BRAIN, SIGNAL = 4.7; EXPRESSED IN BONE MARROW, SIGNAL =   4; EXPRESSED IN FETAL LIVER, SIGNAL = 4.6; EXPRESSED IN ADULT LIVER, SIGNAL =   5
agctgtctctggtcagggtgcctcagcagagtctaggaaaagccaaagcccatctctggtgacagctctgaggtccgacagtggggagaggtggtgggtggggggaaggagttgggcttgctcaactgccgtgcctgtagggcggagggagtccatcctggcacggggcacagcaatcggacccaagcccaaagagatgcttagctcttcacttgtggagcctattttccagagaaatttaattccacattgttttttctctgctctgcagacgcctcggagttctgtgccaggaaccgagctgaggaactcagctgaggaaaccacgggaatctcatttgaagaggaatttggcccctggagccccctccccactcactggtgggagggtgccaagacttcagtcgccgccgccacaccagcaaaccccaaaccacaggaatgcaatggggtcacctggggacagagggagatggatgga

SEQ ID NO: 6096 - DNA, 484 bp, Homo sapiens
  MAP TO AC004381.1; EXPRESSED IN HELA, SIGNAL =   4; EXPRESSED IN BRAIN, SIGNAL = 4.8; EXPRESSED IN BONE MARROW, SIGNAL = 4.7; EXPRESSED IN ADULT LIVER, SIGNAL = 5.3; EXPRESSED IN HEART, SIGNAL = 4.7; EXPRESSED IN PLACENTA, SIGNAL = 4.9; EXPRESSED IN LUNG, SIGNAL = 5.2; EXPRESSED IN FETAL LIVER, SIGNAL = 4.6
tcattgtaaagcagctcatgcattatgattacatttttataaaaattaaatatatacctgaatctatatcaaaagtatggaacgacatttactaaaatgtaaaaaagcaatcatctctgggtgataggattatgactaatttttaattcttatttgtcactttggacactaagcatatatatattaacagtaattttaaaaaatgttatttttaaaatcactttccagagaggaaaacttgttaatatcctagcctgtccatttctctttttttaatgaaagcttttcgggaatcacgaagaagattcttaacccagtgacgaccaaactcaaagatgtacagaggcagttaaaagcactgcttcctcctgatgctgtgttagtgggccactccttagatttggatctcagagcactgaaagtgagtatctgatttaggactttgcattttcagtataaatgcctgttccatttatctcaaatc

SEQ ID NO: 6097 - DNA, 450 bp, Homo sapiens
  MAP TO AC004883.2; EXPRESSED IN HEART, SIGNAL = 1.5; EXPRESSED IN BRAIN, SIGNAL = 3.3; EXPRESSED IN BONE MARROW, SIGNAL = 1.7; EXPRESSED IN PLACENTA, SIGNAL = 2.2; EXPRESSED IN LUNG, SIGNAL = 2.4; EXPRESSED IN FETAL LIVER, SIGNAL =   1; EXPRESSED IN ADULT LIVER, SIGNAL = 1.1
ttggcaatttgaaagttatttgagaaggggaaatttataatgacaattcaaatgaagcaaactaaaaaataatgaagaaagacagaggaaaaagcagtattcacttgaacacatcccaaacaaagaaaatttcaaatgtaacaaggaaaaagcctgctaaagctcacaatacagaaataactattgatactcaaaatagctttaaagccctgctcaccttttgaatgttgggaattgaccaggaggtgactgtaactgtaagatggttcttccagtaatgaccattttctttttcaagatgatgattattctccaccgtctaagagaccaaaggccaatgagctaccgcagccaccagtcccggaacccgccaatgctgggaagcggaaagtgagggagttcaacttcggtaagttctcagcgaacgacgtgaccttttccttcatcttc

SEQ ID NO: 6098 - DNA, 485 bp, Homo sapiens
  MAP TO AC005926.1; EXPRESSED IN BONE MARROW, SIGNAL = 1.8; EXPRESSED IN PLACENTA, SIGNAL = 1.7; EXPRESSED IN LUNG, SIGNAL = 1.8; EXPRESSED IN HELA, SIGNAL = 1.8; EXPRESSED IN HEART, SIGNAL = 1.6; EXPRESSED IN FETAL LIVER, SIGNAL = 1.6; EXPRESSED IN ADULT LIVER, SIGNAL = 1.4; EXPRESSED IN BRAIN, SIGNAL = 1.4
tcccctgaacaaatagctcctgaaaaacaaaatcgtccaaacacaccagagcagagatttgcacagattaatgccagcctgctggttgctacaggattagtgaagacataaccttctaaagcaggcacagcctttttcatttgatttgttccgtgtcctcagaccactgtgacacctagacaaaaggacacttatcaactgcacctgtcatgtgctgagtttgtccacaactgcaatttggatatttacactgactcattgtgcgatgaccttggccagttggacacctgttctgcggaatccattatctgctccaactcagggtgggagtaaagctgctctgcctgcctgaatgcaaccttcaacttcaaagtaatgcagtttttactaaaggatgtaggagtgaagtacaggtagggataaagctgggtaaaattgtaaaattgaccttttcgcagcaagctgctcttgacctgggaagcctt

SEQ ID NO: 6099 - DNA, 481 bp, Homo sapiens
  MAP TO AC004923.2; EXPRESSED IN PLACENTA, SIGNAL =  14; EXPRESSED IN LUNG, SIGNAL =  16; EXPRESSED IN HELA, SIGNAL =  13; EXPRESSED IN HEART, SIGNAL =  13; EXPRESSED IN BRAIN, SIGNAL =  12; EXPRESSED IN BONE MARROW, SIGNAL =  13; EXPRESSED IN FETAL LIVER, SIGNAL =  13; EXPRESSED IN ADULT LIVER, SIGNAL =  14
tggagctgtggctcaaggccgggctctggcagtggggccaggtttcaggcgcgggtccagagttgtggcccagccttgggccctccagtgaggaggggtcttggcccaggtgggctgtggtaggggcagcaggactcaccgatgtagcgatcgctctcatcgctctggcccccaatggccacacgccgcagcccagcaatgcccgcagccgctggaactgtttctggttgatgatgcggcccaggtttggggagctctgggggtcgtcgccatagaaacgggtgatggtgctctgcagggcaggcagcagcctctcctgcatctcagggctgcataggacgtagtcgggggccacgcaggtctggccggcgttgaagtagcggaaccaggccacgcggttggccacggtctgggggtcgcagttgtcgtccacgtagcaagggttcttgccccccagctccagggtgacaggtgtcaggtg

SEQ ID NO: 6100 - DNA, 455 bp, Homo sapiens
  MAP TO AC006288.1; EXPRESSED IN PLACENTA, SIGNAL = 1.2; EXPRESSED IN BRAIN, SIGNAL = 1.3; EXPRESSED IN ADULT LIVER, SIGNAL = 1.2; EXPRESSED IN LUNG, SIGNAL = 1.6; EXPRESSED IN HEART, SIGNAL = 1.4; EXPRESSED IN FETAL LIVER, SIGNAL = 1.3; EXPRESSED IN BONE MARROW, SIGNAL = 1.3
tgttttctaatgatgcctgctcttcttattttgaggtgcaattgtgaagatcaaataaatgttgaagcactttgtcaactattgaaaacttcacaaatgtaactaaaggggatgtttggaaaagcacttcaaattgtaattaaataagtgaaaagaatctggtagcaaagactttttaaagacgatgtcaaatttatgaggactggctcaaatatattccagaatcctctggtattgtaaatacatgtacttaataaagaatgttgactcaactcttttattgcaaatctaccatgtgcaagtctttatgctagtgtccgtgacagctggtaaaatacagaatgttgatgtttcatgttctgtgcaagttcagaatcaaattggaaaagaaggcaaggtaaagtaatatttaaatgcttgcattgtggtagatgttctgcatactaaatttcaca

SEQ ID NO: 6101 - DNA, 465 bp, Homo sapiens
  MAP TO AC006312.8; EXPRESSED IN PLACENTA, SIGNAL = 1.7; EXPRESSED IN HEART, SIGNAL = 2.1; EXPRESSED IN ADULT LIVER, SIGNAL = 2.3; EXPRESSED IN LUNG, SIGNAL = 2.8; EXPRESSED IN FETAL LIVER, SIGNAL = 1.7; EXPRESSED IN BRAIN, SIGNAL = 2.2; EXPRESSED IN BONE MARROW, SIGNAL = 1.9; EXPRESSED IN HELA, SIGNAL = 2.3
tcagcaaagacgaaggagtgcccgttgtcagccacccacagttgtcgctatcggaaagtggtttggaagattggctaacatccgggtgcgaggaatcatcagcagggaggccaagtttggggagcttgagaggaggtatggaccaagaggagggtttttttgagaatccagaggcttttattgtctgcgtcctttctcagctgaacccccgcccccagagcccccagcagggccctccgaggtggagcagcagctacaagcggaggctgagcacctgcggaaggagctggagggtctggcaggacagcttcaagcccaggtgcaagacaatgagggcttgagtcgcctgaaccgggagcaggaggagaggctgctggagctggagcgggcggccgagctctggggggagcaggcggaggcgcgcaggcaaatcctggagaccatgcagaacgaccgcactaccat

SEQ ID NO: 6102 - DNA, 467 bp, Homo sapiens
  MAP TO AC002355.1; EXPRESSED IN BONE MARROW, SIGNAL = 0.86; EXPRESSED IN PLACENTA, SIGNAL = 0.77; EXPRESSED IN LUNG, SIGNAL =   1; EXPRESSED IN HEART, SIGNAL =   4; EXPRESSED IN FETAL LIVER, SIGNAL = 0.78; EXPRESSED IN ADULT LIVER, SIGNAL = 0.7; EXPRESSED IN BRAIN, SIGNAL = 0.91
  unsure 32
  unsure 35
  unsure 308
  unsure 312
  unsure 315
gacctagggctccaccagacacgccagtgggnttngtgacaaggcctgggaggagaacattcttatctttccagcttggtcctgcgcaccccgtcacaagggaataagcagtttcttaagaagcatttagtgcagcatggtgggcccttcacagacccccgggaacctctcagggtgtggaagagatgtttctcctggatgctccagggcagggaaggacagcaggagctgcaggaggagaaactgtctgggactctggccaagtgtgagctggggagggcaggggctcagagccgggctgggcgcancatncangacacaagcacagcacagggtggagcagtccagcttggccggggtccccggggatccagccttcttgttgaccttgggcagcagcagaacaaaggacatagccagggcacagtggtagaagctgtggacgtaagtgtagtcccagtcctgcg

SEQ ID NO: 6103 - DNA, 472 bp, Homo sapiens
  MAP TO AC005868.1; EXPRESSED IN PLACENTA, SIGNAL = 4.7; EXPRESSED IN HEART, SIGNAL = 5.2; EXPRESSED IN BONE MARROW, SIGNAL = 4.4; EXPRESSED IN ADULT LIVER, SIGNAL = 5.5; EXPRESSED IN LUNG, SIGNAL = 5.7; EXPRESSED IN HELA, SIGNAL = 4.6; EXPRESSED IN FETAL LIVER, SIGNAL = 4.6; EXPRESSED IN BRAIN, SIGNAL = 5.2
actttcagagcaggagcaggaggccagaggagagtgtgagtctaacatctgcacagtgagaagtccaggagaagcaaaaatgagatccaggctggagcggctgtgccagagtaactgttccagcgggtgtgggggagggtcccccaaaaagacttacctggactgaatgggaaataatagaaaataggagcaagagactgtcactttataataggttctgttatgacctcctacaacaatatgttagaaattatgatttctaatatgtctatgatacagatagacatatagttagaaaactaaataaagagacagattttgagctaggtatacttacagatacagacattgatatcatagataaacatgttctttatttttatattgtcaatgtttgtgttgctggaaaaaggggtccctatgatccagacctcaagagagggttcctggacctcccacagaaagggattca

SEQ ID NO: 6104 - DNA, 428 bp, Homo sapiens
  MAP TO AC005010.2; EXPRESSED IN PLACENTA, SIGNAL = 3.4; EXPRESSED IN LUNG, SIGNAL = 4.2; EXPRESSED IN HEART, SIGNAL = 3.8; EXPRESSED IN FETAL LIVER, SIGNAL = 3.6; EXPRESSED IN BONE MARROW, SIGNAL = 3.5; EXPRESSED IN ADULT LIVER, SIGNAL = 3.6; EXPRESSED IN HELA, SIGNAL = 3.8; EXPRESSED IN BRAIN, SIGNAL =   4
gtagagctcagcgttttgggaagagcagtgggacgggacggcaccagcgggcatggacctgggatgtcagaggctctcacagccaagctgctggcttccaggcaccacagccactgagtcctgtctgcacccagaccccgttcctgagctccagggtgggcctggcactctgcattctgaacgggcaatgctgaggctgagggtccctgggccacacttggaaaggtcaaggcttcagcagaaggtgggagcagggggtgtgcagatgacaccagctgccaggacaagccttgctgtaaggatgcaggatgcgaatgggagaggcaccaagggccgcagagaaggagccgtgctgcactgggctgccgtgaagacgaggtgggcggcctcggtggctgtgactgtagcggagctgtgagggtgaagac

SEQ ID NO: 6105 - DNA, 480 bp, Homo sapiens
  MAP TO AC006237.1; EXPRESSED IN LUNG, SIGNAL = 1.6; EXPRESSED IN FETAL LIVER, SIGNAL = 1.9; EXPRESSED IN BRAIN, SIGNAL =   2; EXPRESSED IN BONE MARROW, SIGNAL =   2; EXPRESSED IN PLACENTA, SIGNAL = 1.7; EXPRESSED IN HELA, SIGNAL = 1.9; EXPRESSED IN HEART, SIGNAL = 2.2; EXPRESSED IN ADULT LIVER, SIGNAL = 1.8
gctcaccattctgcaccagtgcccactgcagggcctggcacacattgaacggtcaccaaatatttgttgaataaactagcacaccaatgaatggattcctggaacggctctaagcagagtggcccaaggtgcagtgtggagctcccaaactcagtgatggggccctggcaatagggcccaagctacagcagtttggaatccagcctctcccctacccatccgtttccccactaacccatgccccccagggtcctcctacctggagcgtattgacagggaaggcgctgatgggtggaaagtcgaggatctggaggtcgtgcacgtggccgttcatgacgacagcaggcaggtaaaggcggcgggcggtggtggggacgcagacctcgctgaactcgttgtacaagaactggcgcacgatggcactcttgcccacacctcgcgcccccagcacggccacccggtaggtggagaccatgcctc

SEQ ID NO: 6106 - DNA, 464 bp, Homo sapiens
  MAP TO AC004819.1; EXPRESSED IN LUNG, SIGNAL = 2.8; EXPRESSED IN BRAIN, SIGNAL = 3.3; EXPRESSED IN BONE MARROW, SIGNAL = 3.3; EXPRESSED IN PLACENTA, SIGNAL = 2.6; EXPRESSED IN HELA, SIGNAL = 3.1; EXPRESSED IN HEART, SIGNAL = 3.1; EXPRESSED IN FETAL LIVER, SIGNAL =   3; EXPRESSED IN ADULT LIVER, SIGNAL = 2.3
atagacgtgagccattgtgcccagccagaaatatgattttaattccatagtatatagtatatgttattgtgagtagaatatgtttattctgtaagtagcaaattgactccttcaacagttttaatagttttctagttgttttgtctttagtttcccaggcaaataatgctgttgtcttcaatcacagtattgattagttcatcccattcttcatattgatcattgtttttggatattaaataatactactgtaataattaagaaagatggaaagcctcaccaatttgcatgtcattcttgtgcagggaccacgctaatcttctctgtattgttccaattttagtatatgtgctgctgaagcgagcactccatttctgtaaagcttaaaaaatggacaaaactaacagatgggaatggaaatcagaataatggttatctttggtggtgaggacaggggagattgt

SEQ ID NO: 6107 - DNA, 472 bp, Homo sapiens
  MAP TO AC005282.1; EXPRESSED IN PLACENTA, SIGNAL = 7.5; EXPRESSED IN LUNG, SIGNAL = 6.9; EXPRESSED IN FETAL LIVER, SIGNAL =   6; EXPRESSED IN BRAIN, SIGNAL = 6.9; EXPRESSED IN ADULT LIVER, SIGNAL = 5.2; EXPRESSED IN HELA, SIGNAL = 5.6; EXPRESSED IN HEART, SIGNAL = 6.1; EXPRESSED IN BONE MARROW, SIGNAL = 6.4
aagacagcgactgtgggaagggcgctctgttccgcacatcagatcagcagagaaggaaagttacacaacacccaggaagtgcatcaagactgcgtggtgtaggctgctcacagcggcacactacgccggctgataggcaacattcatcttctaaaagccaagctcctgaaaacaggcacacgaatgacccagccgtcacttcagaagctcggcctgaggcacaagcattccgagatgctgccacgtgagctaccccagcggcaccgtcacagcagcaccgcctggaagagggagcaccgggcactgggctacgaggaacagggtaccacctcgatgagggagcaccgggcactgggctacgaggaacagggcaccgcctcgaagagggagcaccgggcactgggctacgaggaacagggcaacgcctcgaagagggagcaccgggcactgggctacgaggaacagggcagtg

SEQ ID NO: 6108 - DNA, 455 bp, Homo sapiens
  MAP TO AC005294.1; EXPRESSED IN BRAIN, SIGNAL = 4.6; EXPRESSED IN BONE MARROW, SIGNAL = 4.2; EXPRESSED IN PLACENTA, SIGNAL = 4.4; EXPRESSED IN ADULT LIVER, SIGNAL = 3.8; EXPRESSED IN FETAL LIVER, SIGNAL = 4.1; EXPRESSED IN HEART, SIGNAL = 4.5; EXPRESSED IN HELA, SIGNAL = 4.3; EXPRESSED IN LUNG, SIGNAL = 4.7
tttccctctgtcctctcagcttacgtaaaacacataagataaaatcaaggtccctcttttaaaattatttcgctgaactgttgagtcagcaacactgcgtgaatttgcatctctacttttgcaagagctatttatttacagagcactgtcttgtgaagatgttttgtgggatgtatgaccatcaaatcactgtaatcctgataataactagagtcaggagtatgaaagtgggaaggttggcccctggttgtattctgactgctcaaatcagtcctgtaaaattgaaataaacctacctgagccagctcctatccacctgataggatacaaagaagactcactggcctgtgggttcttacgtacaagctgctgtttttcccctctaccgatcatgggaatttccagttcaggagttttgttggcatgccgtcctggacagagtgagagcaggagga

SEQ ID NO: 6109 - DNA, 373 bp, Homo sapiens
  MAP TO AC002476.1; EXPRESSED IN LUNG, SIGNAL = 6.5; EXPRESSED IN BONE MARROW, SIGNAL =   5; EXPRESSED IN PLACENTA, SIGNAL = 5.5; EXPRESSED IN HELA, SIGNAL = 5.4; EXPRESSED IN HEART, SIGNAL = 6.3; EXPRESSED IN FETAL LIVER, SIGNAL = 6.2; EXPRESSED IN BRAIN, SIGNAL =   7; EXPRESSED IN ADULT LIVER, SIGNAL = 7.8
cgtcttcagatcatttgcccttaatcaagtcctacaaaaactcccaagaaccaatgaatcagaagaaatattcattctaacactaaacagaataacttctgagtgtgtatgcttaaaaaaaatcccagagtttcagcattaagtcagtcaacgtggaatttcatttgtatacgtgtatctaaaggataaagtcaattaaattcctactataaaactcaaagaaaaattaaaatatatacttacataagttttatttgtagtttcatagcgtactgtgaaattcatctgccattttgcataaaggcaagtggcattttctgaatctgtcaaattaagttccaatgcataagaccgcacagctcctggattcatt

SEQ ID NO: 6110 - DNA, 496 bp, Homo sapiens
  MAP TO AC005747.1; EXPRESSED IN ADULT LIVER, SIGNAL = 9.5; EXPRESSED IN PLACENTA, SIGNAL = 9.2; EXPRESSED IN LUNG, SIGNAL =  12; EXPRESSED IN HELA, SIGNAL = 8.8; EXPRESSED IN HEART, SIGNAL =   8; EXPRESSED IN BRAIN, SIGNAL = 9.5; EXPRESSED IN BONE MARROW, SIGNAL = 9.2; EXPRESSED IN FETAL LIVER, SIGNAL = 8.7
ttctacctcctgatcctgggactggtgaacaacgcacgttcgccctctccatatactacatgatttatttttgttaccctgatgacacctcagctcccaaggttaccatccaaaaagagtctgactcaatccgcctgtctttaggcagccactatctacccgggcctgcatctccagagctcgcctctcctgaattccccatactggtacctactttgtagcttttttttttttttttaagtaaaaaattgtatctgccttctataaaagtaaaatgtgttcattttaggaaatttgaaaaataacaacaagtgtaaagaaaataaaatgacccatgatcttagaccaaaggttctcaacttcagcacgattcatgttttcaagttgagcacttctttgctgtggtgtcccatgccttgcgagatactcagcgtcatccctggtgtcacctactagttgccagtagcaccccccctccccaggcgtgacaatccaa

SEQ ID NO: 6111 - DNA, 470 bp, Homo sapiens
  MAP TO AC002288.1; EXPRESSED IN ADULT LIVER, SIGNAL = 4.5; EXPRESSED IN PLACENTA, SIGNAL = 4.6; EXPRESSED IN LUNG, SIGNAL = 4.4; EXPRESSED IN HEART, SIGNAL = 3.9; EXPRESSED IN BRAIN, SIGNAL = 4.3; EXPRESSED IN HELA, SIGNAL =   4; EXPRESSED IN FETAL LIVER, SIGNAL = 4.1; EXPRESSED IN BONE MARROW, SIGNAL = 5.3
aatagtcagccctggaggaagttctctattctttggagtaactggtaataaacgagaatacctctccaagaggcttagatgagatgctagcttttagaaaggaactaacctctaaagtccctttcaactaagattctatgattctatgacaatgattctctccaggtatcccgctaggagacacaccacaaaagggggcattttacagggcataccacaaagatgccatttctagtggtcaaggaacaaaaagcaacatctctgtgtggtcagttgcaaatgattggaacaaggggaatacgaaaagaaaaagtcagtggtttccttttgtcgttgtctaagaaaaataataggcatcaaatatctcctgtgttctgggcgccatatttaatagcattagcaatagaagaagatggagaaagagatagagaaggagaaagagaaggagaagggaaaggagaaggagaagg

SEQ ID NO: 6112 - DNA, 441 bp, Homo sapiens
  MAP TO AC004918.1; EXPRESSED IN LUNG, SIGNAL = 1.9; EXPRESSED IN HELA, SIGNAL = 2.1; EXPRESSED IN ADULT LIVER, SIGNAL = 2.1; EXPRESSED IN PLACENTA, SIGNAL = 1.9; EXPRESSED IN HEART, SIGNAL = 2.1; EXPRESSED IN FETAL LIVER, SIGNAL = 2.3; EXPRESSED IN BRAIN, SIGNAL = 2.3; EXPRESSED IN BONE MARROW, SIGNAL = 1.8
ggtaactattgcggctttgcataaacaaagatcatgtacctgtcaaaaaatgacttaattttaaaaagtgatggtagtattaaatccaaactgaaggcagaatataccccagctttcattatagagtgaagactcatcatgcaggacgttggctgaaacgaaaggacaccacccgaggcgtgaaacatcgccatggatgttcttggaaagacatctgctgctctggcacgcaaatgctgtctccgagggctcgtgccatatgcaccagctggtggatcctgctgcctccctgcacatgtacggaagccacgtaccgaacctggttctccaagaagtgcatgtagcggtaaagcagtgtgtaggagggagagaggatgcccacagacttcatccgcgcgccacgttccagctcgctctccacgggcatgttggcaaagcagg

SEQ ID NO: 6113 - DNA, 454 bp, Homo sapiens
  MAP TO AC000062.1; EXPRESSED IN PLACENTA, SIGNAL = 1.4; EXPRESSED IN LUNG, SIGNAL = 1.5; EXPRESSED IN FETAL LIVER, SIGNAL = 1.6; EXPRESSED IN BRAIN, SIGNAL = 1.7; EXPRESSED IN BONE MARROW, SIGNAL = 1.4; EXPRESSED IN ADULT LIVER, SIGNAL = 2.2; EXPRESSED IN HEART, SIGNAL = 1.5
taaataaaccgggatctgccccctcgcctgatgaagatgttgagcatcttacagtataagaagggtaaaggagaagaaaattggatcctttgccaaatcccaaacaccaaatccttacaaaatcatggctgttgtacttgaactgatttaaaggattccattgctctgctcaatcactcccagatgctggaggcccccattacagggactttcctacccaatatttgataaaccacttatgttatcttcttagattccctgctgtaaagaagaaatttatggcggagctaaaagaattacggcacaaagagcagaacccatatgtggttcaaagcattatcagcttaataatgggcatgaaattctttcgaattaagatgtatccagtggaggattttgaggcctctcttcagtttatgcaggtaatgtcttaggcaggagagctaaggtgctc

SEQ ID NO: 6114 - DNA, 473 bp, Homo sapiens
  MAP TO AC005016.1; EXPRESSED IN HEART, SIGNAL = 2.2; EXPRESSED IN BRAIN, SIGNAL = 0.91; EXPRESSED IN BONE MARROW, SIGNAL = 0.92; EXPRESSED IN PLACENTA, SIGNAL =   1; EXPRESSED IN LUNG, SIGNAL = 1.2; EXPRESSED IN FETAL LIVER, SIGNAL = 0.98; EXPRESSED IN ADULT LIVER, SIGNAL = 0.89
ctggacctctaacagccactgaaaactgagaaacttctttgctataaaagaagaatcaggatccagttgttattatatatcccttaatcttcatagacccatgagttgttttgaagagcacttgacatctcttagcaactgtagttcatacatgtaaatctttctgatgctctggatttatactacagcaaacccatccagaaggagagaggctaaagtgtacttaactagggatttgggaagaatagggccaactggacagcattggttaagtgccagaagaaacactagtgttttcagatacagagtgtgatgattaactttatgtgtcaacttgactgggctatggtgtgcccagatgtcaaacatatggtttactcgcatgttgttgcaaatatttgcatctgtgttcattaaggacattggcccatagttttccatttttgttttgtccttgtctggttttggcatca

SEQ ID NO: 6115 - DNA, 455 bp, Homo sapiens
  MAP TO AC005659.2; EXPRESSED IN PLACENTA, SIGNAL =   4; EXPRESSED IN LUNG, SIGNAL = 3.7; EXPRESSED IN HELA, SIGNAL = 4.2; EXPRESSED IN FETAL LIVER, SIGNAL = 4.2; EXPRESSED IN BRAIN, SIGNAL =   5; EXPRESSED IN BONE MARROW, SIGNAL = 3.9; EXPRESSED IN ADULT LIVER, SIGNAL = 4.1; EXPRESSED IN HEART, SIGNAL = 3.9
ccaatatcccaaaatgggccatggcaaataattcattagcatcctctccttcccacccaggcccccagtgcctcatcaggccctgcaaagccaagagccatcactttgctggtatccctgttgtagtttctgaggaaacaggaaacctgagtttttgtttctacacaacagcctcagccattttttccaatatttttgtggtgcctggaatggcccatggatgtcatctaagcggaaggggtcactcagaggagaaatagaaatagtctctgtctccaagagccagacctgccttgctcacctgggaccacacgcgctgcagagcaggaggcatgccctctgagatggccagaaagtctacaagtctgtctgtttcagccccaacagccccgggctcccaggccaggtggaattctgccattcactaataatagcatcaccagctcagcagcaaa

SEQ ID NO: 6116 - DNA, 482 bp, Homo sapiens
  MAP TO AC005358.1; EXPRESSED IN BONE MARROW, SIGNAL = 1.1; EXPRESSED IN PLACENTA, SIGNAL = 1.2; EXPRESSED IN LUNG, SIGNAL = 1.3; EXPRESSED IN HEART, SIGNAL = 1.4; EXPRESSED IN FETAL LIVER, SIGNAL = 1.3; EXPRESSED IN BRAIN, SIGNAL = 1.1; EXPRESSED IN ADULT LIVER, SIGNAL = 1.2
tgggtattgtagaattccatttgtgatgttttgaagctaattgtataatgaatacacttttaaaaatattgtcgttaaacagcacactaaccacattctgatttctttaggtctctgaattaagacaacagcttcgaattcggggcttgcctgtgtcaggcaccaaaacggctctcatggaccggcttcgacccttccaggactgctctggcaacccagtgccgaactttggggatataacgactgtcacttttcctgtcacacccaacacgctgcccaattaccagtcttcctcttctaccagtgccctgtccaacggcttctaccactttggcagcaccagctccagccccccgatctccccagcctcctctgacctgtcagtcgctgggtccctgccggacaccttcaatgatgcctccccctccttcggcctgcacccgtccccagtccacgtgtgcacggaggaaagtctcatgagc

SEQ ID NO: 6117 - DNA, 464 bp, Homo sapiens
  MAP TO AC004841.2; EXPRESSED IN PLACENTA, SIGNAL = 4.6; EXPRESSED IN LUNG, SIGNAL = 4.9; EXPRESSED IN HELA, SIGNAL = 4.6; EXPRESSED IN FETAL LIVER, SIGNAL = 4.8; EXPRESSED IN ADULT LIVER, SIGNAL = 4.7; EXPRESSED IN HEART, SIGNAL = 3.6; EXPRESSED IN BRAIN, SIGNAL = 4.8; EXPRESSED IN BONE MARROW, SIGNAL = 4.2
cagggagggagtttcagagggctgcaggactgcgaggagtaggtggcctgggctgggtctcctcacagcagcaaagctcggggacaacagaaatcacggcagacagcactgtgagccgcggtctcatctctgactagtccacgagagctgaggcttagggcagggcctgcgacacagctagatggtggtgtgttacagaaacgacaaggcaggggtttctgtcaccgggagagctcagccacgttcagggctaccttggcgtgggcacggtcactgcttctgtctcattttcttccagcaacttcgtgtacgacgacgggaaccaacccctcctaccggcaaagagggagaaaagaccctatcagcagtagacatgtggacggcaacctccctgaacaacctggtgagagctcagggcagacaggtccactgctccagaaacgcccatgtgtggaggaaatgaa

SEQ ID NO: 6118 - DNA, 465 bp, Homo sapiens
  MAP TO AC005899.1; EXPRESSED IN PLACENTA, SIGNAL = 1.7; EXPRESSED IN LUNG, SIGNAL = 1.5; EXPRESSED IN HEART, SIGNAL = 1.5; EXPRESSED IN FETAL LIVER, SIGNAL = 2.5; EXPRESSED IN BONE MARROW, SIGNAL = 2.3; EXPRESSED IN ADULT LIVER, SIGNAL = 1.4; EXPRESSED IN HELA, SIGNAL = 1.7; EXPRESSED IN BRAIN, SIGNAL = 1.2
tgcagtcttatttccactgctgtgttgtgggtgtgactttaacctagcatcttttgatatttttatgggttatcttgaattttgtggaatgtttatcacattaactttgtattaatttcatttaaagtttggtcctttatttaatgttgatgccttgttttaagttaaactgttgtagatatagttaatttaaggttttgaagtttcgttgatgaagtattgtattttacaggctcaggcagctgtccaaggacctgttggtacagatttcaaacccttaaatagtacccctgcaacaactacagaacccccaaagcctacattccctgcttatacacagtctacagcttcaacaactagtacaacaaatagtactgcagctaaaccagcggcttcaataacaagtaagcctgctacacttacaacaactagtgcaaccagtaagttgatccatccagatgagga

SEQ ID NO: 6119 - DNA, 480 bp, Homo sapiens
  MAP TO AC005509.1; EXPRESSED IN LUNG, SIGNAL = 5.6; EXPRESSED IN HEART, SIGNAL =   7; EXPRESSED IN FETAL LIVER, SIGNAL = 8.5; EXPRESSED IN HELA, SIGNAL = 5.7; EXPRESSED IN BRAIN, SIGNAL = 6.8; EXPRESSED IN BONE MARROW, SIGNAL = 6.8; EXPRESSED IN ADULT LIVER, SIGNAL = 7.2; EXPRESSED IN PLACENTA, SIGNAL = 6.2
tcttccccattttcatcacacttattggatgactaaaagaagaatgagacaatggatctggagctagaaattatatcttattagctcagagtatgaggagataaataaaattttaaacttaatatacttttctaaacataaatgagaaacaattgaaaacgtaggtggttaaaacttagacaataaattgaaatgaagtgaaattctaataagacaaggaacaaatgttctgttgttcttttttcttttgtggttgctttttaggcataatttgtttgcaatgtccctttttggtgaccgtatcttctattcaacatggaaaatgaagacaatttggatagccaacaaacacactggaaaggacatggttagaattaacctccattcatcatttgtaccacttggtgaactgaaagtagtgcatccacttgcacaacccaaggcagaagatgacacttgggagcctggtgagtcatcgtt

SEQ ID NO: 6120 - DNA, 450 bp, Homo sapiens
  MAP TO AC003077.1; EXPRESSED IN LUNG, SIGNAL = 2.4; EXPRESSED IN HEART, SIGNAL = 3.7; EXPRESSED IN FETAL LIVER, SIGNAL = 3.4; EXPRESSED IN BRAIN, SIGNAL =   6; EXPRESSED IN BONE MARROW, SIGNAL = 2.2; EXPRESSED IN HELA, SIGNAL = 3.8; EXPRESSED IN PLACENTA, SIGNAL = 3.6; EXPRESSED IN ADULT LIVER, SIGNAL = 3.4
aaaatcacagattccccagcctcatgccagacaaggcacgaatcagaatggctcattcagaatcaaaatgaatcagaatggctaggagtggcacctaggaatctgcattttaacaagcttttgggtgtttctaatatacattaagatgtgaggatccctgcttaaggaggtgggcattcataaactagaaatgaaagggaaagggacatcaacaccatcaccccaggagggaccccgggcggggcagggccacttactttgcctctgtcaaagttctggatgatggtgaggtgcaggtgctctttgcgctgccattctgtttgcatggggtaggtcaggaactccctgaggggccgatcagaccattccagtagctcgtcatataagaggagggtatatgcagcttctgcaagtcacgtgagaagacaatgattgagacaggaccccaag

SEQ ID NO: 6121 - DNA, 479 bp, Homo sapiens
  MAP TO AC005207.1; EXPRESSED IN PLACENTA, SIGNAL = 1.4; EXPRESSED IN LUNG, SIGNAL = 1.5; EXPRESSED IN HELA, SIGNAL = 1.9; EXPRESSED IN HEART, SIGNAL = 3.8; EXPRESSED IN FETAL LIVER, SIGNAL =   2; EXPRESSED IN BRAIN, SIGNAL = 2.5; EXPRESSED IN BONE MARROW, SIGNAL = 1.4; EXPRESSED IN ADULT LIVER, SIGNAL = 2.1
tgtgagtttcaaagggagtcagtccctaatttacaggtttcctttgttcactttctagatgtgtacttttgagggacatgaggttaggcaacattacagcaacacacactggggctattaatcccatttaggtctgtactaaagaggatgggtagaaacacatatgtatataccttttctttacctagaagtgccatccattgtccttgaattattatgattaaagttactgttgcatttaggaggctccttgaaagtaacaccttttccaaggacaatggcaacaatgtcaatgtcaacactgagtctaattttgaccacatttatagtggtatagtgtcaatactgcattttcatgacaaccacactccactgttgaaacactgtgccagtgagaagtgcaacatccagtgggcagatgaaaatgatgcatggccaagttcagtgtttacagataaaactgctgtggttcaagtgct

SEQ ID NO: 6122 - DNA, 458 bp, Homo sapiens
  MAP TO AC002076.1; EXPRESSED IN PLACENTA, SIGNAL = 3.2; EXPRESSED IN LUNG, SIGNAL = 3.2; EXPRESSED IN HELA, SIGNAL = 3.5; EXPRESSED IN FETAL LIVER, SIGNAL = 3.2; EXPRESSED IN BRAIN, SIGNAL = 3.5; EXPRESSED IN ADULT LIVER, SIGNAL = 3.3; EXPRESSED IN HEART, SIGNAL = 3.3; EXPRESSED IN BONE MARROW, SIGNAL = 3.7
tgaagagtttagacaagagtcaacagatatttgttgagcatttatgatgatcagagtgggagggcattgtgctagaagccaaactttggtacaactttcagactcccttccagaccaaataatagataattttaatgtttttttttaaagtgtgacaatcaattagtatttctgagtattctgatcactgaagtatacaaaatagcactgtaaatgtgagacagcaacaagaaaacactgaccacaaaagtggttactgatttaggtaattacaacttgtcatttgttacagaagcagaggcaagttttctcttagtcattaacacaatggtagtgaaatgtgactcatgtaaactcaacaggatgccagaaggacctgatgtaggtgatggagatttctctctcatgtgtgctcaccttgttaaagaaaagactgtggtgttgagtcttcatgatga

SEQ ID NO: 6123 - DNA, 497 bp, Homo sapiens
  MAP TO AC005284.1; EXPRESSED IN PLACENTA, SIGNAL = 1.8; EXPRESSED IN HEART, SIGNAL = 1.9; EXPRESSED IN FETAL LIVER, SIGNAL =   2; EXPRESSED IN BONE MARROW, SIGNAL = 1.9; EXPRESSED IN ADULT LIVER, SIGNAL = 2.1; EXPRESSED IN LUNG, SIGNAL = 2.4; EXPRESSED IN BRAIN, SIGNAL = 1.9
ccattcacaaagccttcacctttatgatataataatctcccaaaaatcatgccttctatactatcaccttgtgggtttggatttcaacatgtgcatttagggatggcgagatacaaacatttcatctataatagtatactcttcctgtcttctatctctctctctaccctgatacttccatcactgattaatttggttacactattttccattgtttctcttgggattaaccttataaatggaatcatacttacagttctattattttatgtatcacctctatgtactgtttttttgacagccctccctaccctgttatgaacgacaaggaggtcagcccacatatgtgatcccccactttctttccacatcccaattcatgagtttcgtgaattacattattatgtattatcaaggtaagcataagtttatatttcccaaaactatttagctttagttttgcattgtatgttgatgcatgaaatcaatggttttcc

SEQ ID NO: 6124 - DNA, 473 bp, Homo sapiens
  MAP TO AC004763.1; EXPRESSED IN PLACENTA, SIGNAL = 8.9; EXPRESSED IN HEART, SIGNAL = 7.2; EXPRESSED IN ADULT LIVER, SIGNAL =  13; EXPRESSED IN LUNG, SIGNAL = 7.9; EXPRESSED IN FETAL LIVER, SIGNAL = 8.2; EXPRESSED IN BRAIN, SIGNAL = 7.1; EXPRESSED IN BONE MARROW, SIGNAL = 7.6; EXPRESSED IN HELA, SIGNAL =  11
agggccacttaataggggtgtgtgtgtgtgtgtgtgtgtgtgtgtgtgtgtgtgtgtgtgtgtgtaaagacccctgaaatccaatttgaggtcaaccacctatgctgtctttacaccacatgagctagcctggacctgcccacctatttgctctgtgtctcaagccacttcccttcccatccccacaatcctcaccaccgactctggctcttggcaggtaggcttctggggctgcttggctctacatcatttgagtcactctgtccttatcaactttcatccccacagtatttttcctgtgaacagccatgcaaccaaaccacggcaggcaacgcgctgacatttctgaagagtcttctggaaattttccagaaagaaaagatgagagggatgagaggcaagatatgaagatgaaatattatttatcctatttattaaatttaaaaagctttctctttaagttgctacaattt

SEQ ID NO: 6125 - DNA, 369 bp, Homo sapiens
  MAP TO AC004072.1; EXPRESSED IN BONE MARROW, SIGNAL = 1.5; EXPRESSED IN HELA, SIGNAL = 1.9; EXPRESSED IN FETAL LIVER, SIGNAL = 2.2; EXPRESSED IN ADULT LIVER, SIGNAL =   2; EXPRESSED IN PLACENTA, SIGNAL = 1.7; EXPRESSED IN LUNG, SIGNAL = 1.8; EXPRESSED IN HEART, SIGNAL = 2.2; EXPRESSED IN BRAIN, SIGNAL = 3.3
tcaacatttgcttattgactattttctttctaaaatgtaaatgacctctttaaaagaacaaatttatcagaatgcacctaggtatttctattgtcttattattttttggctaaatttgaggctagcataaaaattgtgtagcatctttataacaataaagataacatgacattcaaaatcagaagattcaatttttagtcctggttccacacacaagtagctgtatgatcttattaaaacaaactttaggaggcactaaatccacggcattaactacccttattgatgataatgatgataataatgatggtgacatttacaggagcattgatactacggtcgtcactgccattgccatcatcaccttgt

SEQ ID NO: 6126 - DNA, 475 bp, Homo sapiens
  MAP TO AC003954.1; EXPRESSED IN PLACENTA, SIGNAL =  12; EXPRESSED IN HEART, SIGNAL =  10; EXPRESSED IN ADULT LIVER, SIGNAL =  12; EXPRESSED IN LUNG, SIGNAL =  13; EXPRESSED IN FETAL LIVER, SIGNAL =  11; EXPRESSED IN BRAIN, SIGNAL =  12; EXPRESSED IN BONE MARROW, SIGNAL =  11; EXPRESSED IN HELA, SIGNAL =  11
cacacaacagatgcattccccccatacctgaaaggtttgtctcttaggcatgctaattatcatttgactggataacattgaatgtattggttcaaatatgatggattaattttttttattcttttgaaccccctattttttatgtgtgtaacttcccctgcccctgcctagacctggttaaccatttctgtgagcaggtcctcaattttttactttgtccctactttcctgtcgtagccccatcttcccctggtgtcgactccgtccccttgcagcgcacaggcagccagcacggcccacagaatgccgccgcggccaccttccagagggccagctatgccgccggcccagcctccaattacgcggacccctaccgacagctgcagtattgtccctctgttgagtctccatacagcaaatccggccctgctctcccgcctgaaggcaccttggccaggtccccgtccattgatag

SEQ ID NO: 6127 - DNA, 467 bp, Homo sapiens
  MAP TO AC005692.1; EXPRESSED IN LUNG, SIGNAL = 2.9; EXPRESSED IN BRAIN, SIGNAL = 2.8; EXPRESSED IN PLACENTA, SIGNAL = 2.9; EXPRESSED IN HEART, SIGNAL = 3.6; EXPRESSED IN FETAL LIVER, SIGNAL = 3.1; EXPRESSED IN BONE MARROW, SIGNAL = 2.8; EXPRESSED IN ADULT LIVER, SIGNAL =   3; EXPRESSED IN HELA, SIGNAL = 3.3
ctggcacaaaggaggcatagaagaaatggccacgatattgtgatgatctgtccctgtgcttaggatctaaactgctgtggcctgtttgtgcacacaaggatagagtcaccacaggggatcctccctctgcaaagattgtgtgctcctatctgagaagggcaggttgccttcctgctcctggagggccactccctctctgcacccaccccagggctggggtataccctggccctcagtcccaggctctgctgctgactgttgctcgcctgcttccccacagacctgcgcagaatgacggctggcttcatgggcatggcggtggccatcatcctctttggctggatcatcggcgtgctgggctgctgctgggaccgaggccttatgcagtacgtggcagggctgctcttcctcatgggaggtaaggctacgggctcggcttgtgggtggcagtggacagggtcctgttt

SEQ ID NO: 6128 - DNA, 486 bp, Homo sapiens
  MAP TO AC006330.2; EXPRESSED IN PLACENTA, SIGNAL = 1.8; EXPRESSED IN LUNG, SIGNAL = 2.4; EXPRESSED IN HEART, SIGNAL =   2; EXPRESSED IN FETAL LIVER, SIGNAL = 2.1; EXPRESSED IN BONE MARROW, SIGNAL = 1.9; EXPRESSED IN HELA, SIGNAL =   2; EXPRESSED IN BRAIN, SIGNAL = 2.1; EXPRESSED IN ADULT LIVER, SIGNAL = 2.3
ttccaataatattagccctgtggatacaagaaataaggaattgtgtttgggctatcatggaagctctctggatcttagaccatgacttacgctgagaggtaaagacttgagctttttgtttttctctctgtgttgagtgcagcggtccccaatttttgggggagcagggaccagttttgtggaagacagtttttccatagactgggggcagcaaaggtcagttttgggatatatcaagcacattacgtttattgtgcactttatttctattattattacattgtagcatataacgaaatacttatataactcaccataatgtagaatgactgggagtcttgaccttcttttcctgcaactagatggtcccatctgggggtgatgggagatagtgacagatcatcaggcattagattctcctaaggacagagcaagatagatcccttgcatgcacagttcacaatagggttcgtgctcacatgagaa

SEQ ID NO: 6129 - DNA, 453 bp, Homo sapiens
  MAP TO AC000100.2; EXPRESSED IN LUNG, SIGNAL = 1.6; EXPRESSED IN BRAIN, SIGNAL = 1.7; EXPRESSED IN BONE MARROW, SIGNAL =   2; EXPRESSED IN PLACENTA, SIGNAL = 1.6; EXPRESSED IN HELA, SIGNAL = 1.7; EXPRESSED IN HEART, SIGNAL = 1.6; EXPRESSED IN FETAL LIVER, SIGNAL = 3.7; EXPRESSED IN ADULT LIVER, SIGNAL =  11
aaagatgctcaaaaccaccgatcatcagggaaatgcaaattaaaaccaaaaatgagccctcctctcacacatgttggaatagctattattatcaggatgaaagatgacaagtgttttgagaatatggagcacagagaatccttgtgcactgttggtaggaatgtaaattagtattttaaattgttaacatggtgatgtctttttaataaaacaggtttgtgctttaagatgcattaatatgagttgctttctgttagtcaaagtttaatgaaaaagactttagttaccttaaattaatataaactggagcatgctcataagacttctctttcagattctcattaagtacagaatgaaacctgtggtaagtaccaattctgaaaaataaaaaaaagttcaccgataatgtgtatgctagattacaaacacttgttaaattaaaggcataggttc

SEQ ID NO: 6130 - DNA, 474 bp, Homo sapiens
  MAP TO AC002504.1; EXPRESSED IN PLACENTA, SIGNAL = 5.6; EXPRESSED IN LUNG, SIGNAL =   6; EXPRESSED IN HEART, SIGNAL = 6.1; EXPRESSED IN FETAL LIVER, SIGNAL = 6.5; EXPRESSED IN BONE MARROW, SIGNAL =   6; EXPRESSED IN ADULT LIVER, SIGNAL = 5.6; EXPRESSED IN HELA, SIGNAL = 6.6; EXPRESSED IN BRAIN, SIGNAL = 7.1
accccttcctggtttttctcttccccctttaggcacctgggccacccacgttaggcctcacattaaactgttaccctgtttctgtcaatactatatccaccactttagaactcaagggaaaatacaggtgttaactggtggaggccagttaatgtggccagtaaaaccctgattccttttcctgctttgattttgagagtcagcctatcagtaacgacgccatcacctcaggtgctgcaggtcaggtgcccaataacaactgttaaaagattccaacatgccattaggcaagagccagagaagatccgcagccatcccatccctgtccacagagatgccactggccctggtaactgctgtctccgccaccagcaccacaaagccaacctttgtcgagatcggggaggaaatgctcttcctacacacaagtgcgtcactgaaatatactctaatggcttgaagtatcacccagaa

SEQ ID NO: 6131 - DNA, 495 bp, Homo sapiens
  MAP TO AC005180.1; EXPRESSED IN PLACENTA, SIGNAL = 6.1; EXPRESSED IN HELA, SIGNAL = 9.4; EXPRESSED IN HEART, SIGNAL = 4.4; EXPRESSED IN BONE MARROW, SIGNAL = 6.2; EXPRESSED IN ADULT LIVER, SIGNAL =  11; EXPRESSED IN BRAIN, SIGNAL = 1.8; EXPRESSED IN FETAL LIVER, SIGNAL =   6; EXPRESSED IN LUNG, SIGNAL = 3.8
ctcacatgctgactgaagggtttcttttgccatggctcaacagctttagaggcacatcttcagtagggtaatatctaggcattttgtgaagtttaaccacctgggtaccactgttcttgtcaacaccaactggttttgtaacagttgcaagaaacttctttttcttttcaaccttggatttagcagctgaatacttcttcctggacgtggtctttctggaatacatagcagatcgggaatatctgcaattcctctgacaaggacaggattgcagctgcaatggggcttccctgtcttagacgttttagccttgaggttgccccttttcaccttgccaccagcatcagctttcttggccttaggtttcttctctttagtatctggcttctcagctttctcacccatcatcttgcaagatgggaaagactccactttttggctatatgattaatattgctataagcattcatttacaagttttcatgtggctgtgtt

SEQ ID NO: 6132 - DNA, 459 bp, Homo sapiens
  MAP TO AC004855.1; EXPRESSED IN PLACENTA, SIGNAL = 1.9; EXPRESSED IN LUNG, SIGNAL = 2.7; EXPRESSED IN HEART, SIGNAL = 1.6; EXPRESSED IN BRAIN, SIGNAL = 1.7; EXPRESSED IN ADULT LIVER, SIGNAL = 1.6; EXPRESSED IN FETAL LIVER, SIGNAL = 1.7; EXPRESSED IN BONE MARROW, SIGNAL = 1.5
tttcctctcaaccaaatgacgctacagtttatggatctttatctagaagttctgaatataccagttggccagttcaattcactgattagacaaaaaagatataaataaattctgaaacataatttcttctctcattttctgtctactaaaaaatgagtcattagattgctttgaaacatgagtgtttcacatactattcaaaagacttctcagttataaataaataaagaagctaaatataaaccacatccatacctctcacagctgactgggaaggctgagtcaaaacttttatgtctaatgcactgttgatattttcttctaaagtagcacaatatccatccacaacactggtaatagtatccttcaaagttccaagattatagaaaacctgaagagctgttccgacttgagttggattcttaaaaaaaggtggggtggggtggaaacagatataaa

SEQ ID NO: 6133 - DNA, 410 bp, Homo sapiens
  MAP TO AC002081.1; EXPRESSED IN LUNG, SIGNAL = 1.3; EXPRESSED IN HELA, SIGNAL = 1.7; EXPRESSED IN BRAIN, SIGNAL = 1.7; EXPRESSED IN BONE MARROW, SIGNAL = 1.5; EXPRESSED IN ADULT LIVER, SIGNAL = 1.3; EXPRESSED IN PLACENTA, SIGNAL = 1.4; EXPRESSED IN HEART, SIGNAL = 1.6; EXPRESSED IN FETAL LIVER, SIGNAL = 1.4
tctttaacagctgcagagttgcatagtattctatcactttgacagatgaaaatatctaactccttactgatgatgtttgacaaccaacgaaaacaatgctgcagtgaatattattgtatctatatcatgtgcttctaagagtatttctgttggataaatacccactgagatataaacatgcaaaataacagcttgcgtgaatgctattattaggttaatatgccctctactttataaacacccagtaacaccaggttaaaattctactctcaccttggttgccaaagatttgagttttcctagtagtgactgtttattggaatatacaacttcctcttcattatcttctccttccatgatagcacaactgtctgcagccgggagttcacactcttttgagttagtcgtca

SEQ ID NO: 6134 - DNA, 459 bp, Homo sapiens
  MAP TO AC004954.1; EXPRESSED IN LUNG, SIGNAL = 1.7; EXPRESSED IN HELA, SIGNAL = 2.1; EXPRESSED IN FETAL LIVER, SIGNAL = 1.6; EXPRESSED IN BRAIN, SIGNAL =   2; EXPRESSED IN BONE MARROW, SIGNAL = 1.6; EXPRESSED IN ADULT LIVER, SIGNAL = 1.6; EXPRESSED IN PLACENTA, SIGNAL = 1.7; EXPRESSED IN HEART, SIGNAL = 1.7
gagagctgcatggcttggttaataagaataggtgaaccagatttgctcatgagtgacttcgtgtcagccttggtcctccataaaactcccgtaaactttctgaactgttgaagctaaaaagggttaaggaagagagaatgactatcatgatgctgctccataatcaagtgctgaatgctggagctaaggcctgccacactggtagttttggtagttgaaagtaataacatatgcttatccttttcaattatagtccagccatcaaggtgctggtggctggaattacatttttccattggtggtcaggggactcttgctgcctcccactaccaccacatcaaacaaggtcagagcgtagtaggaggctgtgcccattcatcaggttccagtgtggcagacaggtcagcaagtgggtacctcttaggaattacgcagtcacctgatggcgttttagaaaca

SEQ ID NO: 6135 - DNA, 462 bp, Homo sapiens
  MAP TO AC003958.1; EXPRESSED IN LUNG, SIGNAL = 3.4; EXPRESSED IN HEART, SIGNAL = 2.6; EXPRESSED IN FETAL LIVER, SIGNAL = 2.4; EXPRESSED IN BRAIN, SIGNAL = 2.7; EXPRESSED IN HELA, SIGNAL = 2.7; EXPRESSED IN BONE MARROW, SIGNAL = 3.1; EXPRESSED IN PLACENTA, SIGNAL = 2.7; EXPRESSED IN ADULT LIVER, SIGNAL = 2.6
taggactcaggtgaagtggctaaataacaaatggaaaaatcagcaaaggaggtaaaaaggaggaatacttgacatggttgccacacccactgctaacagaatataaagccctggaaaggaccaaggcttatcccagggaaaaggaatcaggttttgaaactgacttccagagctccactgcctccctgcaccatgccctacaacttctgcctgcccagcctgagctgccgcaccagctgctcctcccggccctgtgtgccccccagctgccacggctacaccctgcccggggcctgcaacatccctgccaatgtgagcaactgcaactggttctgcgagggctccttcaatggcagcgagaaggagactatgcagttcctgaacgaccgcctggccagctacctggagaaggtgcgtcagctggagcgggacaacgcggagctggagaacctcatccgggag

SEQ ID NO: 6136 - DNA, 493 bp, Homo sapiens
  MAP TO AC002523.1; EXPRESSED IN HELA, SIGNAL = 9.3; EXPRESSED IN HEART, SIGNAL =   8; EXPRESSED IN BRAIN, SIGNAL = 9.4; EXPRESSED IN BONE MARROW, SIGNAL = 8.6; EXPRESSED IN PLACENTA, SIGNAL = 7.2; EXPRESSED IN LUNG, SIGNAL = 8.8; EXPRESSED IN FETAL LIVER, SIGNAL = 8.1; EXPRESSED IN ADULT LIVER, SIGNAL =   7
cagaaggctattggcaggactggggagtccacgccataaaaaaggggaagatgctccctccacaggtaatcaccccatgagataaaaaggagccccagcaggtgacttgcatgcagatgtggattgatttaatttcagatgggattgctcaagagaaaattggcaggcaacccaatggaatgctgttggctctgtgcaggcaattgtccccagagcaacaattccggaaaatgcccaagagggggcaaaacaatgttgctcaacctaatcccactgggacgcttcaactcaaggactatttgcaggcaggtgaagatatggagactttcctgtttgattatggaactgaccaaggtgcctggctctgggggacaccagatgaccagaggccatatgtagagctggcaatccactggtcccccacgaatgtacagtgggtcctagcacaggtagatactggtgcagactgcagtcttgtttatgggaacctggg

SEQ ID NO: 6137 - DNA, 487 bp, Homo sapiens
  MAP TO AC005369.1; EXPRESSED IN LUNG, SIGNAL = 3.9; EXPRESSED IN FETAL LIVER, SIGNAL = 4.4; EXPRESSED IN PLACENTA, SIGNAL = 4.6; EXPRESSED IN HELA, SIGNAL = 4.4; EXPRESSED IN BRAIN, SIGNAL = 4.5; EXPRESSED IN BONE MARROW, SIGNAL = 4.1; EXPRESSED IN ADULT LIVER, SIGNAL = 5.1; EXPRESSED IN HEART, SIGNAL =   4
gaaagcagcctcagaaggggaggtttttctttattgggaactcaggtgggcagggtcctgtgactccagtgatacactgaggcagaagcaatatgccacagcattacctctgcaatctgtgccctctcccaaagtagagggaaaccatgagcccccaccctctatccctccccattgacactcttaagaactttcccattacccaaaaagaaatgaccccctactacacacacacacacgcaaagttaggtccagcataggccaaagtcaggccaagcacagaaagcctcagtaactcttcttggtggaaccaaagccagagaagcccatcacagctgccatctcatcgtcctcctcaaatgtcaagtcctcctcagccctccttttcttctccttctgtttctctttcttgtacgctttggccttttcctcctggagggaaaaatcactcagaatcagtttagactcctcagccaaatgttgtttg

SEQ ID NO: 6138 - DNA, 471 bp, Homo sapiens
  MAP TO AC000134.14; EXPRESSED IN PLACENTA, SIGNAL = 1.9; EXPRESSED IN BRAIN, SIGNAL = 2.2; EXPRESSED IN ADULT LIVER, SIGNAL = 1.8; EXPRESSED IN LUNG, SIGNAL = 1.8; EXPRESSED IN HELA, SIGNAL = 1.7; EXPRESSED IN HEART, SIGNAL = 1.9; EXPRESSED IN FETAL LIVER, SIGNAL = 3.2; EXPRESSED IN BONE MARROW, SIGNAL = 2.4
aaaagaggtcaatgcaagggaacaatctctacttccataggttcttcaggtctctacactctcctttaaactgatcacatacctgttatcgtcttcccgaagggtcccatttaagcgagccaactcccgaagctgcatcttccgtagatcattctggtcctctggagtctcgataccctgcttcaggatgtttcttatctagtgaaaatgcaatggacagttaagtgcttagggcctccacctaggtttctgccaggaggcttcctttctgggctcaccgctcacctgttccactgcctttttgacgttctccattgtattggcagtaaccagggcatgaagtggctcatcttctcctggcaacatctggccatctttgcgcccaaccttcccttctttcacagaccctttcccccggatcataatcttggcattgcactccttctctatgttcttcagggtgttccctct

SEQ ID NO: 6139 - DNA, 477 bp, Homo sapiens
  MAP TO AC005384.1; EXPRESSED IN FETAL LIVER, SIGNAL = 2.8; EXPRESSED IN BRAIN, SIGNAL = 3.1; EXPRESSED IN BONE MARROW, SIGNAL = 2.7; EXPRESSED IN PLACENTA, SIGNAL = 2.8; EXPRESSED IN HELA, SIGNAL = 2.8; EXPRESSED IN HEART, SIGNAL = 2.6; EXPRESSED IN ADULT LIVER, SIGNAL = 2.6; EXPRESSED IN LUNG, SIGNAL = 2.9
cagcttggtttcttgctctgagagatgccctcctgacagctcctttgtagatggttcctctcttttctagcatgccaaaggatttcaccgtcatattcagctcagtcaggcagaactctgggctgctgtgtaaaaaccctttgtgtccagaagggttcagtggagcttttctcttaccaagtaggggcttggggagagtgccacaggtcaacctctggtgcttagaatgctggctggtgccttgatgtgggccatctcaggggcagcccccctctgctctttctgatatgtaatcatttgccacagggagaactaaatgatgacaatgacagtgtccctgggctaacccttagaatcggaaaagccggcaagctggaagtttcaggtcccgggaagcacccagcagtcggaattcctattggagagttagctggcttcatctaacagcttggagagggaatgccacctctccaagaa

SEQ ID NO: 6140 - DNA, 492 bp, Homo sapiens
  MAP TO AC005591.1; EXPRESSED IN LUNG, SIGNAL = 6.7; EXPRESSED IN HELA, SIGNAL = 6.7; EXPRESSED IN FETAL LIVER, SIGNAL =   8; EXPRESSED IN BRAIN, SIGNAL = 6.9; EXPRESSED IN BONE MARROW, SIGNAL = 6.4; EXPRESSED IN ADULT LIVER, SIGNAL = 6.7; EXPRESSED IN PLACENTA, SIGNAL = 6.3; EXPRESSED IN HEART, SIGNAL = 7.2
tgcagttgaatcaccacctcaaaatgctacaaaatctaccctttacaacaatagtagtacaaataaacgtttagacacttcacgctcaaagagggcttttgctcgggctttttatttcacaattgatgcttaaaagtgcttttaaaggcaatattgcaactacatttatttatttatttatttgctgcagaaatgaagttatttattaaaacacacccatggtagcaagttctgatgggtctgaagaggaggcaggagcaaggtgttgagcttctaaacatcgtcctgccagggagggaccctgacaggtgcttggctgacatgctgtggccgaggcaggaaggaagttgcagaattccacgaaggcagaagactaccagtaggcaggtcccatgtcatcacacccgtgagagtggcagtggtctggtggccacagagatgtctgacagcgtgggtctggagccggtgatcggctggctttgagaggttcct

SEQ ID NO: 6141 - DNA, 469 bp, Homo sapiens
  MAP TO AC004770.1; EXPRESSED IN LUNG, SIGNAL = 3.1; EXPRESSED IN HEART, SIGNAL = 3.1; EXPRESSED IN FETAL LIVER, SIGNAL = 4.2; EXPRESSED IN BRAIN, SIGNAL = 3.6; EXPRESSED IN HELA, SIGNAL = 4.6; EXPRESSED IN BONE MARROW, SIGNAL = 3.4; EXPRESSED IN PLACENTA, SIGNAL =   3; EXPRESSED IN ADULT LIVER, SIGNAL =   4
tggaaagcaactggtttgtgtgggtgacacagatgaaccatattcccatgcacattgatcatgaccggaacatggactgggtttccacccaggtaagggacagtcactcagaagactggagcataacacaactattgaaaaggatgcgtaggtgaaaacagcaaaaacaaaaagtcccccaaacagcattttctcattagcctgaggctcttgttctgcaaccatgtgaagggagtgaccaagacagtctcatgtcccttcctcagccagctttacctggagaatgctgggctggcctttccatctgatattcaacatgctctcccctgaccttttccgccagctccaggccacatgcaatgtccacaagtctgccttcaatgactggttcagtggacacctcaacttccagattgagcaccagtgagtagggagcctggggaagcagggtcctggggagggtgtaagt

SEQ ID NO: 6142 - DNA, 482 bp, Homo sapiens
  MAP TO AC004081.1; EXPRESSED IN LUNG, SIGNAL = 2.2; EXPRESSED IN HEART, SIGNAL = 2.3; EXPRESSED IN FETAL LIVER, SIGNAL = 2.5; EXPRESSED IN HELA, SIGNAL =   2; EXPRESSED IN BRAIN, SIGNAL = 2.3; EXPRESSED IN BONE MARROW, SIGNAL =   2; EXPRESSED IN ADULT LIVER, SIGNAL = 1.9; EXPRESSED IN PLACENTA, SIGNAL = 2.1
gatttctaccgctccacgacgcccagcgaggacatctggaagaaattcgagttggtgccgccgccctgggacttgggtcccgcagccgggaacccagccctcagctttggtctcctggaaccgtggccggtagggtgcgctggggacgagacggaatcccaggactactggaaagcttgggacgcgaactacgcctccctcatccgccgtgactgcatgtggagcggcttctccacccaggagccgctggagagagcggtgagtgacctgcttgccgttggcgcgccctcgggatactcgcccaaggagttcgccacccccgactacactcccgagctcgaagccggcaacctagcgcccatcttcccctgtttgttgggcgagcccaagatccaggcctgctccaggtctgagagcccaagcgactccgagggtgaagaaatcgacgtgacagtaaagaagaggcagtctttgagtacgcg

SEQ ID NO: 6143 - DNA, 482 bp, Homo sapiens
  MAP TO AC004865.1; EXPRESSED IN PLACENTA, SIGNAL = 1.5; EXPRESSED IN BRAIN, SIGNAL = 1.6; EXPRESSED IN ADULT LIVER, SIGNAL = 1.1; EXPRESSED IN HEART, SIGNAL = 1.5; EXPRESSED IN LUNG, SIGNAL = 1.6; EXPRESSED IN FETAL LIVER, SIGNAL = 0.95; EXPRESSED IN BONE MARROW, SIGNAL = 1.1
tctctccagtcatgttgggctgcctgctgccaggactctgcctgccatgtcttttggtggctagaagggatgtgcattcaggcagactgcagcaggccccagagctgccgggcttttaggacacactcctccaattccatgctggtgtttttaaaaaaattccaaactgcagatgatttgggctttctacctgaagatgatgtaccacatcttctggggctaggttggaactgggcatcttggaggcagagcccacccagagctgcactcagacctgctgtatcttccagtgaccagcagagcttaatcaggaagcttcagaagagaggtagtcccagtgacgtagttacacctatagtgacacagcattctaaagtgaatgactccaacgaattaggtggtctgactaccagtggctctgcagaggtaagcatgctatgaataaggagcagagaaatggttaaatctgctcttacatttgg

SEQ ID NO: 6144 - DNA, 478 bp, Homo sapiens
  MAP TO AC004861.1; EXPRESSED IN PLACENTA, SIGNAL = 3.7; EXPRESSED IN ADULT LIVER, SIGNAL = 4.5; EXPRESSED IN LUNG, SIGNAL = 4.3; EXPRESSED IN HEART, SIGNAL = 3.5; EXPRESSED IN FETAL LIVER, SIGNAL = 3.8; EXPRESSED IN BRAIN, SIGNAL = 4.3; EXPRESSED IN BONE MARROW, SIGNAL =   4; EXPRESSED IN HELA, SIGNAL = 4.3
ttcatgcctgctaatacaatatccattctgtagcccatgtatcaagaagtaattttgactttcaagtctcgttgtttaaaaaatacattttataatgctatagctgccattcatagttcctctgttgaatctgggcaaagtaaatagaaaaccttctgaaaaggattcaccattctagatgccacccaagaacagatgtgtttcatgggaggaggttaaaatatcaacatcaataggagtttggaaaaagttgattccaaccctcatggatgactttgaaatgttcaagacttcagtggaggaagccacttcagatgtggtagaaatagcaagaaaactagaagtagaagtagagcctgaagatgtgactgaattgctgcaatctcataataaaattagagcagatgatgacttgcttcttatggatgaacagagaaagtggtttctagagatagaatctacttccagtgaagtgacg

SEQ ID NO: 6145 - DNA, 474 bp, Homo sapiens
  MAP TO AC005216.1; EXPRESSED IN FETAL LIVER, SIGNAL = 2.1; EXPRESSED IN BRAIN, SIGNAL = 1.2; EXPRESSED IN BONE MARROW, SIGNAL = 1.6; EXPRESSED IN ADULT LIVER, SIGNAL = 1.9; EXPRESSED IN PLACENTA, SIGNAL = 1.7; EXPRESSED IN LUNG, SIGNAL = 1.5; EXPRESSED IN HEART, SIGNAL = 3.6; EXPRESSED IN HELA, SIGNAL = 1.8
cagcatcagcaaacagcactaaaaaaagaataaggtcacctttgaaagacccggagagaatgtgagtgcagtcagattaggaaagcgcttgtctattctgggatatcaggaagcactgcttacccagccccacccaacctactgccagccgcccctgctgctgatctctctgtcctataattccccagatggatccctgcagagacccctccagtccgggatccccactctcgtggtaggctccctcagacgcagccccaccatggtccttcggcctcagcagttccaattctaccagccacaggggatcccctcctccccctcagccgtggtggtggagatggggtccaagcctgccctcacgggggagcccgccctcacgtgcatcagcaggggcagtgaggcccggatccactccgcggccagctccctcattatggaagacaaagaaatccccatcaagagtgagcctct

SEQ ID NO: 6146 - DNA, 499 bp, Homo sapiens
  MAP TO AC006203.1; EXPRESSED IN PLACENTA, SIGNAL = 2.6; EXPRESSED IN LUNG, SIGNAL = 1.6; EXPRESSED IN HEART, SIGNAL = 2.8; EXPRESSED IN FETAL LIVER, SIGNAL = 4.2; EXPRESSED IN BONE MARROW, SIGNAL = 3.3; EXPRESSED IN ADULT LIVER, SIGNAL =   3; EXPRESSED IN HELA, SIGNAL =   3; EXPRESSED IN BRAIN, SIGNAL = 3.5
aggatacagaatgggacatggaaaattttacttaatcaacctacacccactccttgatacaatcgtgtccaatgcatactagttctttgtcgacaaacttattaaacatttgaaaaatctccttatgtaaagggaggttataagtttgtaacaaactgaaaatcaatgtgttttctgacacctgttgacattcatgatgagaattaggtgctttcctctcccagcttcattcagatatggacaggggagacggatccatcaaatacatcctctcgggagaaggtgctggcatcgtgtttaccatcgacgacaccactggagacatccacgccattcagaggctcgaccgagaggaaagagcccagtatactctaagggctcaagccctagacaggcggacgggcaggccaatggagcccgagtcagagttcatcatcaaaattcaagacatcaatgacaatgagcccaagttcctggacggaccttatgtggccactgt

SEQ ID NO: 6147 - DNA, 468 bp, Homo sapiens
  MAP TO AC004958.1; EXPRESSED IN LUNG, SIGNAL = 1.8; EXPRESSED IN FETAL LIVER, SIGNAL = 1.7; EXPRESSED IN BONE MARROW, SIGNAL = 1.6; EXPRESSED IN PLACENTA, SIGNAL =   2; EXPRESSED IN HELA, SIGNAL = 1.9; EXPRESSED IN HEART, SIGNAL = 1.7; EXPRESSED IN BRAIN, SIGNAL = 1.9; EXPRESSED IN ADULT LIVER, SIGNAL = 2.2
ccaatttacgaaataattgcatcaaattgaaattttttactgtgcttggcatatgaaacagtttatggtttttatgacctagttgaaaataccttggtggcatgtgcctatagtcccagctgttcagaaggccaaggcgggaggatcacttgagaacagggggttgaggctgcagtgagctatgattgtgccactgcactctagcctggataacacagtgagaccgtgtttcttaaaacaaatttataaataaaaatactttgttctcttctagcgagttgaagaatttctcagcaaagatatcagttatcttatttcaaataagaaggaagctaaatttgcacaaaccttgggtcgaatttctcctgtaccaagtccagaatctgcatatactgcagaaaccacttcacctcatcccagccatgatggaagttcatttaagtcaccagacacagtaagtctcttaaa

SEQ ID NO: 6148 - DNA, 467 bp, Homo sapiens
  MAP TO AC005320.1; EXPRESSED IN LUNG, SIGNAL = 1.3; EXPRESSED IN FETAL LIVER, SIGNAL = 1.1; EXPRESSED IN BONE MARROW, SIGNAL = 1.1; EXPRESSED IN HEART, SIGNAL = 1.4; EXPRESSED IN BRAIN, SIGNAL =   1; EXPRESSED IN ADULT LIVER, SIGNAL = 1.2; EXPRESSED IN PLACENTA, SIGNAL = 1.1
agcctgagctcctggagagcctgggccacactctcactctgcccctgtgacacctcagtcatgctccctctctgggctcagtttcctcctctgcaaactgaagcactgcactagctgagcttggctgtgccaaagagcccaaagaccttgatacttaagttcatctgcatctttttgcagcctgatgcttgcttcactgcccacattcaggcctcatgtatgaattaaccatgctcctctctgggtgctggcaatgagggaaaataaagtgtcatggtttcactttttataatagatctgacagcccttcggaaacctcaccataaaaagaaaccagctgttgccagaggtaataacctaatggccaatcttgcagagacaatgaccctaaagagatacggcaatggccaccaagaagaggtagatcaaatttaaagtgggagaggggaagattaactttatgggaa

SEQ ID NO: 6149 - DNA, 471 bp, Homo sapiens
  MAP TO AC004097.1; EXPRESSED IN BONE MARROW, SIGNAL = 6.9; EXPRESSED IN HELA, SIGNAL = 7.7; EXPRESSED IN HEART, SIGNAL =   7; EXPRESSED IN FETAL LIVER, SIGNAL =   6; EXPRESSED IN BRAIN, SIGNAL = 7.7; EXPRESSED IN ADULT LIVER, SIGNAL = 6.4; EXPRESSED IN PLACENTA, SIGNAL = 6.5; EXPRESSED IN LUNG, SIGNAL = 7.4
catgagctagcctgttgaatgtagagatgacacagggttcagtgactccctttactttaggcaacagccaaccaaccacgagacatgtaaggctatccttgaccagccattaccagatgaccttgccagctgactgtagacataagatgagatcacccaaactttgcccagatcaatagaacttccctgcttacccatagacttataagcaataataaaagtgtattgttttaaaccgttgaatattaggggagtttgtttcttagtaataggtagctgatacaactgacaactacctacgtttcctttctgcaaaagaagatcatagtcatagtctgcaacaggactaagtgaattttgtgtagtcctggcaaagtcgttctgaggcatccattcatctgcatgtgataagaagaaaacagaattactttgttttcaacagcttgcattagatttccacttgggaaggaa

SEQ ID NO: 6150 - DNA, 477 bp, Homo sapiens
  MAP TO AC003964.1; EXPRESSED IN PLACENTA, SIGNAL = 1.6; EXPRESSED IN LUNG, SIGNAL = 1.9; EXPRESSED IN HEART, SIGNAL = 1.5; EXPRESSED IN BRAIN, SIGNAL = 1.6; EXPRESSED IN ADULT LIVER, SIGNAL = 1.4; EXPRESSED IN FETAL LIVER, SIGNAL = 1.4; EXPRESSED IN BONE MARROW, SIGNAL = 1.6
tccatgtcttcctgagcttagtctagaatcccttattttgtctaaaatagattctagatcttgggagaaggataaatctagttatatggaatagaatcctttgttgagatatttgttccaagcatttggatttcggaagatcagtattttctaaaccttcctgtatttgaaaaagcttaaaaaaaattatgacctgtattcaggaattaactgtatttgttctaagacatttttgtttcactcttaggtgagaaaaaaaaattactaaaaatgacaagtagaagacttgaggagtccatgggggctgttcagatgggattggtcaatatgttcaaaggatttcaaagcaaggttttgccacccctgagtccaaaggtggttacagaagaagaagtaaaccgaatggtaatgtatccgggaattaatatgtaaaatacttaatgcaatctccttaggagaatgacagttgctacttgg

SEQ ID NO: 6151 - DNA, 472 bp, Homo sapiens
  MAP TO AC004578.3; EXPRESSED IN PLACENTA, SIGNAL = 8.7; EXPRESSED IN LUNG, SIGNAL =  11; EXPRESSED IN HEART, SIGNAL = 9.1; EXPRESSED IN BRAIN, SIGNAL =  11; EXPRESSED IN BONE MARROW, SIGNAL = 9.4; EXPRESSED IN ADULT LIVER, SIGNAL = 9.3; EXPRESSED IN HELA, SIGNAL =  10; EXPRESSED IN FETAL LIVER, SIGNAL =  10
gagctgctgctgtctctgcttccaggcccacagctcctccctgctgtgctctgatggatgcatgcccccaccccaaccagcgggaagacaaatgtgccctaggtatgcaggcggtgccttcctccaaagcctggcctctggtttaaagcacagaatggtgtcaggtagcaccgggaagggtggcagtgagagctgggagggaaacatctcacactccggcctgggccaaagtaggagacagcagggcagggcagcagcttccttgctctgcagagtgagcggcacaaggcgagagccagagtggcggccacccccagccagcacctaccttcctcttgttggtcgggcagatgtagaaattgtcgatgacggtggtgacaccaggctggagggtgagcttggtgtaggacgtcccgaaatctgatgacctgggggaaaagggggacagccgtcagccatgtaccctccaagt

SEQ ID NO: 6152 - DNA, 448 bp, Homo sapiens
  MAP TO AC005701.1; EXPRESSED IN ADULT LIVER, SIGNAL = 6.9; EXPRESSED IN PLACENTA, SIGNAL =   8; EXPRESSED IN LUNG, SIGNAL = 7.5; EXPRESSED IN HEART, SIGNAL =   7; EXPRESSED IN BRAIN, SIGNAL = 7.8; EXPRESSED IN HELA, SIGNAL = 7.8; EXPRESSED IN FETAL LIVER, SIGNAL = 7.2; EXPRESSED IN BONE MARROW, SIGNAL = 7.7
ctgtggtcagagctcattggtggaatgagaatacaaagggctgtgcttcctcatcacatgaaagccttatagggaggccaaaaaactccagggttcaaacgtccaactttaccacgaaggagcaaactgagacctcctgatctgggctccgagacctggggaagctgggtcagggtggcacggatgcgtcttagccttgatttggtgccctgagttcctatcccccacccccacccccaggaagccgggtggaactgtaccttgtaatccatctgctccgagcagttgaacacatagaccaggatgcccagtgcgcggcccaggtccttggtggtctcggtcttgcctgtgcctgcaggtcctgcgggagccccactcatggtcaggtgcagggactgggtgagggtgatgtagcacctgccaaacacgggagggcataggtcatcat

SEQ ID NO: 6153 - DNA, 465 bp, Homo sapiens
  MAP TO AC005539.1; EXPRESSED IN LUNG, SIGNAL = 1.1; EXPRESSED IN FETAL LIVER, SIGNAL =   1; EXPRESSED IN BRAIN, SIGNAL =   1; EXPRESSED IN BONE MARROW, SIGNAL = 0.95; EXPRESSED IN ADULT LIVER, SIGNAL = 1.3; EXPRESSED IN HEART, SIGNAL = 1.3; EXPRESSED IN PLACENTA, SIGNAL = 1.1
gaattctcaacacccagcagtattgtcaataaaattatatttatctccaggggccagagtagccaaataacatgtttgcattagatttagtttgggaacctttatgtcttgttgaggtggaaatgattgttcatgatatacacattccaaattgtttcagagaatgagtgtgacttcagttcctattgggactgtgctagccaaaggtgtatagattattttggcaaggtaagaagaaaaattagtagagaaaactcaatcatttttcctgaaattagaaatgtttttacctttacatctccaaacattgctggtaggttgtgtgtttttgttcccaaatccaagtgatagagaatgtcttcatccatcaaatccaagtaaggatttttaacgtgaacaaacctttttctggaaaaaaaaattatacaaagaagatataaaagaattttgagagaaagctcacaa

SEQ ID NO: 6154 - DNA, 470 bp, Homo sapiens
  MAP TO AC005185.1; EXPRESSED IN ADULT LIVER, SIGNAL = 3.2; EXPRESSED IN PLACENTA, SIGNAL = 3.6; EXPRESSED IN HEART, SIGNAL = 2.7; EXPRESSED IN FETAL LIVER, SIGNAL = 2.9; EXPRESSED IN BRAIN, SIGNAL = 3.2; EXPRESSED IN BONE MARROW, SIGNAL =   3; EXPRESSED IN LUNG, SIGNAL = 3.6; EXPRESSED IN HELA, SIGNAL =   3
aaggaagggctgacagaatgcagtctgaaactcactgtaggggttctgtggttcttctctggtgtctcaggggaaaggataaccaggacgacaggagccttgtggctttctagaacagtgccttcagggaaacttgcaaaggcaggcttccttcagtaaagctaagatggggtcttccagctgaaggtgctcacagatctcattctcccatctccaggtatactaaccatctattcttctgcccacatttcttggtttacccagccatcatgcctcgtggtcagaagagtaagctccgtgcccgtgagaaacgccgcaaggcccgagatgagacccggggtctcaatgttcctcaggtcactgaagcagaggaagaagaggccccctgctgttcctcttctgtttctgggggtgctgcttcaagctctcctgctgctggcattccccaggagcctcagagagccccaacc

SEQ ID NO: 6155 - DNA, 487 bp, Homo sapiens
  MAP TO AC005598.6; EXPRESSED IN PLACENTA, SIGNAL = 3.4; EXPRESSED IN LUNG, SIGNAL = 3.9; EXPRESSED IN HEART, SIGNAL = 3.1; EXPRESSED IN BRAIN, SIGNAL = 3.9; EXPRESSED IN ADULT LIVER, SIGNAL = 3.6; EXPRESSED IN FETAL LIVER, SIGNAL = 3.6; EXPRESSED IN BONE MARROW, SIGNAL = 3.5; EXPRESSED IN HELA, SIGNAL = 3.7
agccaaggaatgtgggtggcctttaaaagataaaaaactcaaggaaacagattgtaccctgaaactcctagaaaagaacatagccctgccgacatgttgattttcgtccgctgagacctgtgtagggcttctaagtactcaggaggctgaggcaggaagattggcttgaccccaggaggttaaggctgcagcaagccatatttccagtactgtactccagcctgggcgacaggacaaaaccctgtctctaaaaaaagaagaagaagcagaagcagaagagaagaagaagtggaagtggaagtggaaatggaagaggaagcattagcagcagcagaagaaggagaaggagaaggagaggaagaagaagagaagaaggaggagaagaaggaagaagcagcagacactgcatggcaggattgaggacccaatcagaataaatttgtgtgagatgataaatttgtcttgttctgggccactaaatttgtga

SEQ ID NO: 6156 - DNA, 475 bp, Homo sapiens
  MAP TO AC004069.1; EXPRESSED IN BRAIN, SIGNAL = 1.3; EXPRESSED IN LUNG, SIGNAL = 1.6; EXPRESSED IN FETAL LIVER, SIGNAL = 1.3; EXPRESSED IN BONE MARROW, SIGNAL = 1.3; EXPRESSED IN ADULT LIVER, SIGNAL = 1.6; EXPRESSED IN PLACENTA, SIGNAL = 1.3; EXPRESSED IN HEART, SIGNAL = 1.4
tgtaccttaaataagtctctgaaccctaaagctcaacctttccagatcagtgaattttctccactccagttatcagtcatggtcccaaggtatgggatccaaccggctgcaacccagcattctcatgagaataaaaagggagagaagcattgcacaacaagaatgtctggtatctagaattacataaggttagaaattcaaatacaatcaaccccaagtaattcaccctgtgtgtccaaaactacaagtcatagttccatagggactagtgttaaaaatctgcactcattttacctgtaagtggtttgtagaagttctgctggtatttgtaaatacttgcagccatgtgtagcaaagatggagagccatcatcattctgaccctgtttctcactttgtcctggcattatgaagactgctgcaaagcaatttccttttcaaccttattttacatcttcaacatgccacagtatcag

SEQ ID NO: 6157 - DNA, 499 bp, Homo sapiens
  MAP TO AC002525.1; EXPRESSED IN PLACENTA, SIGNAL = 4.1; EXPRESSED IN HELA, SIGNAL = 4.3; EXPRESSED IN HEART, SIGNAL = 3.7; EXPRESSED IN BONE MARROW, SIGNAL = 4.6; EXPRESSED IN ADULT LIVER, SIGNAL = 4.2; EXPRESSED IN BRAIN, SIGNAL = 5.3; EXPRESSED IN FETAL LIVER, SIGNAL = 3.5; EXPRESSED IN LUNG, SIGNAL = 5.3
tgctcaaggtttttctgtttttctctttaatcatttcataatcactcagtctaagctgtatggtgacagtattttgttcataattaatcatatatatttgctaataaatgaatcagtggggaaaacaggaaggaaagaaactagagactccaggttcactgggacaagcagtgtacccctactcttcaaagtacaaccctaaacaggccatccagtcataataccaccacttgggacccattcctgatgaattcagtaaatcacaaaggtgctcatctttgtcttgaagtcagtcttgatgtttgtgctattaatggagcacaatctgcagctggcccagatgttgctgacaccagccctgcctgcctctgtcagcatagcaaagattctagcaaatctgtaatgttgtccatgcaccttggtgcagagagtcacatactgctccctaaaaggaaaatgatatggttccttctgtgttgtatttgctggaaaaggctgg

SEQ ID NO: 6158 - DNA, 479 bp, Homo sapiens
  MAP TO AC006312.8; EXPRESSED IN PLACENTA, SIGNAL = 2.1; EXPRESSED IN LUNG, SIGNAL = 2.3; EXPRESSED IN HEART, SIGNAL = 2.2; EXPRESSED IN BONE MARROW, SIGNAL = 2.3; EXPRESSED IN ADULT LIVER, SIGNAL = 1.9; EXPRESSED IN HELA, SIGNAL = 2.5; EXPRESSED IN FETAL LIVER, SIGNAL = 2.2; EXPRESSED IN BRAIN, SIGNAL = 2.2
ctcctgttagcagtcaccctgaagtcctagcccccagcctcattcctgccccctttggcagaacaccccacaggacgggacctcagagatcacaggatccacctgcccccattgtagggatgctagactaaggcccaacagggaaagggactttctcagagtcatggaacgagttagggacaaagctggaaccccaaggccaatgcccgctccgtccagggcctagggaaaggggcaccgtggggaggcagggagccccggcagcaggtgggtggaacagttccccagccctcacctagtgcttctaagatcaggtggatgaagttgaccctctcgtcttccagcccctggtgggatttcaccggcacattcatgtacccataacggtgctcattgcacacgtggacggagacccctgcagagacaggctgagtgagagctgcagtggagggtggggctctcagaacccagctgaaagg

SEQ ID NO: 6159 - DNA, 463 bp, Homo sapiens
  MAP TO AC005815.1; EXPRESSED IN PLACENTA, SIGNAL = 1.2; EXPRESSED IN LUNG, SIGNAL = 1.2; EXPRESSED IN HELA, SIGNAL = 1.8; EXPRESSED IN HEART, SIGNAL = 1.6; EXPRESSED IN BRAIN, SIGNAL = 1.4; EXPRESSED IN FETAL LIVER, SIGNAL = 1.8; EXPRESSED IN BONE MARROW, SIGNAL = 1.7; EXPRESSED IN ADULT LIVER, SIGNAL = 1.4
cgcttctgctttttcttgatggttttgacagtaacattctttcctttcttccagtcaatagtacacccatcgcagtccatgatctcaggacctgcaaatgaaaagggatcagccttatctggttctgatttcatcttgcaggtttttgtcaggactgagttggcaaagcagtcattgggttgaaagtggaactcttaatatgaaagacataggctgtccagggtcagaaaacttcactttaatatcctgcaggtatttcaagattggttcatcatattcctggactaattcacttagcatatctacatttctaaagatggtaaaccagaactctggaattcctttgggatttggctcttcagctgttgctgctgctttttctgttatgactactttatttttcctgtctccagccaatttctcctcctcttcattttcacggtgccattctgattccatatca

SEQ ID NO: 6160 - DNA, 386 bp, Homo sapiens
  MAP TO AC006443.1; EXPRESSED IN BRAIN, SIGNAL = 2.4; EXPRESSED IN ADULT LIVER, SIGNAL = 2.3; EXPRESSED IN PLACENTA, SIGNAL = 2.3; EXPRESSED IN LUNG, SIGNAL = 2.7; EXPRESSED IN HELA, SIGNAL = 2.7; EXPRESSED IN HEART, SIGNAL = 2.4; EXPRESSED IN BONE MARROW, SIGNAL = 2.5; EXPRESSED IN FETAL LIVER, SIGNAL = 2.4
gacatactgtgccaactgaaccatttaattatctgcaaaaatgatgaatcaaaacaatagtttgcaaaaataaatgactaacctctgattaaaatgtctgtcctcattaaatccaaagaaaaggtatgatctctttttaaaaaatgtagcctgaagaaacaagcagtccccccgcatctacagccgtacccttcacagtggcagtgacctgccatgagacgggacatctgaggatgttgtctaatctactctctccaaccctgagaaaagacggtgtgcccctgtggccttcgagcctctgggtgccgccggcctggcagcaagtgagctcagggacaggggacttccagatgatgtgctcggtgggtggtgtgattctggagcaa

SEQ ID NO: 6161 - DNA, 467 bp, Homo sapiens
  MAP TO AC005684.1; EXPRESSED IN PLACENTA, SIGNAL =   9; EXPRESSED IN BONE MARROW, SIGNAL = 7.8; EXPRESSED IN ADULT LIVER, SIGNAL = 8.2; EXPRESSED IN LUNG, SIGNAL = 7.8; EXPRESSED IN HELA, SIGNAL = 8.1; EXPRESSED IN HEART, SIGNAL =   8; EXPRESSED IN FETAL LIVER, SIGNAL = 9.1; EXPRESSED IN BRAIN, SIGNAL = 9.2
aatgtgagctggctctgtctcctatggacgaaaggtcacaggctttagagcatgggcttgatgagagctgtttctacagctcagaggaccgttaagcttctgaatgtagctctgctccagacagccgaggctgctaagaaatattatatccacgtgtagcgtattacatctaattttccttttaaaagtgtgtttgttatagccatgttcaaatacacttaaaacatcaactctgggtccccccagcatctctgtcatcagaaaaagtaaaagtctgtgggtgctcatccatttgaaagagtctctccatcagaggggaatcaaaggccacccaggcatcttccctcccctccaccacatcccaacccactttctcagggctcacgatggttggacacaacacctgcttctcgatctgcatcctcccctggaatgctgtgagagctggccacattgcagtccctact

SEQ ID NO: 6162 - DNA, 476 bp, Homo sapiens
  MAP TO AC004390.1; EXPRESSED IN PLACENTA, SIGNAL = 1.5; EXPRESSED IN LUNG, SIGNAL = 1.7; EXPRESSED IN FETAL LIVER, SIGNAL = 1.4; EXPRESSED IN BONE MARROW, SIGNAL = 1.5; EXPRESSED IN ADULT LIVER, SIGNAL = 1.8; EXPRESSED IN HEART, SIGNAL = 1.7; EXPRESSED IN BRAIN, SIGNAL = 1.7
cacatatagccttcctcccgtatttatgcttttaaaaaaagcttccacctaatacggtgcaaatatacctcatataaccaaacatgcacccatcccctttccagagtgagaaaaccaaaaacataaattagaatgctttcaggggcaagcaatacaaaatccaactcaaactgtcttgaatagtaaatgcaattcattggctcacttaactgaagagtccacaggcagggagatttcaggcatggcatgatccggaatatggttccatttctgtgattctcttggctctgcctcctccatttttcagctccatcctcaggtaggccttccacatgttcacaagatggctaacagcagcaaccaggctacatgcttctttgttcttatccaagggaagataggtcatctcctccctcaaaagctgaataaaagtcctaagcctcattgtgattgggtcatccctgaaccagtcatca

SEQ ID NO: 6163 - DNA, 464 bp, Homo sapiens
  MAP TO AC005196.1; EXPRESSED IN HEART, SIGNAL = 3.6; EXPRESSED IN ADULT LIVER, SIGNAL =   4; EXPRESSED IN PLACENTA, SIGNAL =   6; EXPRESSED IN FETAL LIVER, SIGNAL = 3.8; EXPRESSED IN BRAIN, SIGNAL = 4.2; EXPRESSED IN BONE MARROW, SIGNAL = 4.2; EXPRESSED IN LUNG, SIGNAL = 4.6; EXPRESSED IN HELA, SIGNAL = 3.7
aagaatccctagactccaagctctgttgcctcacctcagggaaccaagatcctaccaaattcccacttcctatgaagtagccttgttgtctgaggtattacccagagttctttgtctcatgaccaagaaaaataaggagcatggacaccaaaggtgaggttggagtgacagtttaataagcaaaagaggaatcactctatagcagaaagggagcccaaaagagggttgccagctataaggctgagtttagggactttatggactggaatggagaggaataagctgactggtctacaggtcattttggagaaagcacaagttagaacgatgtatgatagtgtaaagaaccaattggaggcagaggtgaagtcttggcctggcaccttggccccggaccagtcaggtattgaagtgatgactcaccctatgtaaatgaatacttagcccacagccaattatagaaa

SEQ ID NO: 6164 - DNA, 448 bp, Homo sapiens
  MAP TO AC004549.1; EXPRESSED IN PLACENTA, SIGNAL = 6.4; EXPRESSED IN LUNG, SIGNAL = 7.5; EXPRESSED IN HEART, SIGNAL = 6.9; EXPRESSED IN FETAL LIVER, SIGNAL = 5.8; EXPRESSED IN BONE MARROW, SIGNAL = 6.1; EXPRESSED IN ADULT LIVER, SIGNAL = 6.6; EXPRESSED IN HELA, SIGNAL = 6.4; EXPRESSED IN BRAIN, SIGNAL = 6.6
ttgtgattggatttgggaggttttaagggggaaaaacggttttgttaatctaattgtaaaattgaatttagaggctctataaatgggttacacaattgtctacagcaagcatttagaagcagagaaatgtttctggagtaaagacttttaaggtaggttgtttagtatgaatatcagctaactagataaatggaaccttgtcatatatggacaagttgttgttctacatttattagaaacatgtaattctttcatttttctctttaagctttgatgttcacaagaagtgtcccctctgtgagttaatgtttcctcctaactatgatcagagcaaatttgaagaacatgttgaaagtcactggaaggtgtgcccgatgtgcagcgagcagttccctcctgactatgaccagcaggtgtttgaaaggcatgtgcagacccattttgatca

SEQ ID NO: 6165 - DNA, 481 bp, Homo sapiens
  MAP TO AC004994.1; EXPRESSED IN PLACENTA, SIGNAL = 2.7; EXPRESSED IN LUNG, SIGNAL = 2.5; EXPRESSED IN HEART, SIGNAL = 3.1; EXPRESSED IN FETAL LIVER, SIGNAL = 2.9; EXPRESSED IN BONE MARROW, SIGNAL = 2.1; EXPRESSED IN ADULT LIVER, SIGNAL = 3.3; EXPRESSED IN HELA, SIGNAL = 6.2; EXPRESSED IN BRAIN, SIGNAL = 2.5
ctccattcgccttctctcccaccacagtgggtgccacaaacccatagaagatttgatggacgtggacatgagccctctaaggcctcaaaattaactttttaattgtgaactaaagctgacaaatattatcactttaatgtggatgatgatgaaaatgagcaccagttttctttaagaatggccagttcaggagctggtacctatgatgaattgcacatcgttgaagcagaagcaatgaaatataaacgcagtccaaataaaagtaacactggcaactttgaaaatgtctgtacagccaacagtttcctttgtgggctttgaaataccaccacctatggtcttatggttgaagcatagttcagggccagtgcatattaatgggcagcacttaacagctgtggaggaagatgcacagtgagaagatgaagaggaggaggatgcaaagctcttaagtatatctggaaagcgagctgcctctaga

SEQ ID NO: 6166 - DNA, 460 bp, Homo sapiens
  MAP TO AC005610.1; EXPRESSED IN ADULT LIVER, SIGNAL = 6.5; EXPRESSED IN PLACENTA, SIGNAL =   6; EXPRESSED IN LUNG, SIGNAL = 5.8; EXPRESSED IN HELA, SIGNAL = 5.9; EXPRESSED IN HEART, SIGNAL = 5.6; EXPRESSED IN BRAIN, SIGNAL = 6.8; EXPRESSED IN BONE MARROW, SIGNAL = 5.2; EXPRESSED IN FETAL LIVER, SIGNAL = 6.4
gcgacactgcttcattgttccattatttaccagtgggcttcttggaagaatgcagatgtgatgaccaaatagaaaaccttgttgaaaggagtaagttgctttttgggaaaaattaagcatctgcattagaaagatttgtgcctacaataaaacgaaaataaaaaagggttttggagaaaaggcatcatcacaataggctggagataactttaaatatactgaaaatgcttaatctctttttcacagaacagaggtgctgaaaaacctttgcttgggagcctccaaggaaccgaaagaagcccatgaaagaactgaggctaagagcagcaacacggctactgctatgaagcacgaggacaatgatggcagtgaattaactcagggcctgccaagttccaactattattctaagtattctctgtgtcttcaatggcttctaacaacagccctaggaggtcaa

SEQ ID NO: 6167 - DNA, 405 bp, Homo sapiens
  MAP TO AC004084.1; EXPRESSED IN PLACENTA, SIGNAL = 3.8; EXPRESSED IN LUNG, SIGNAL = 3.1; EXPRESSED IN FETAL LIVER, SIGNAL = 3.7; EXPRESSED IN BONE MARROW, SIGNAL = 3.5; EXPRESSED IN HELA, SIGNAL = 3.3; EXPRESSED IN ADULT LIVER, SIGNAL = 3.7; EXPRESSED IN HEART, SIGNAL = 3.1; EXPRESSED IN BRAIN, SIGNAL = 3.7
gaagtacgtggagctggaccccagcaaagtggaagttaaggatgtagggtgaggccgggggtaactccgggggttgcggggtgcagcggcagcgggttgggatcaggccctgtcagcatgtgtgtttgtgcttctgcccacccgtgtattgtcccctgtgtccgtgtcctggctgctgtgagagccactgttcctgtcgtggccctggcgctgaccgcgacctcctctgccaacccgccccgttccacgcaggtgctccgggctgcaccgcccgcagaccgaggccgaggtgctggagcagagcgcgcagacgctgcgcgcccacctgggggccctgctgagcgcgctcagccgctcggttcgcgcgtgccccgccgtggtgcgcgccaccttccgccagctctt

SEQ ID NO: 6168 - DNA, 468 bp, Homo sapiens
  MAP TO AC004904.1; EXPRESSED IN PLACENTA, SIGNAL = 7.5; EXPRESSED IN HEART, SIGNAL = 5.6; EXPRESSED IN FETAL LIVER, SIGNAL = 4.9; EXPRESSED IN BRAIN, SIGNAL = 8.1; EXPRESSED IN BONE MARROW, SIGNAL =   5; EXPRESSED IN LUNG, SIGNAL = 6.3; EXPRESSED IN HELA, SIGNAL = 6.3; EXPRESSED IN ADULT LIVER, SIGNAL = 5.4
agctgctgtcctgctactggagagaagtccctttgccaaacagcatgtacagccaaagagctggcccttaaaaagtgcttttatcaactctttttgtttttttagtcatcctatgtaattgtgtaaaatccgtggcttccttcaggttagatacaattaggtacagttctccctccccttctttttaaggcaccgcacgtggtattgttgtctacactggggatcgcactgtgatgggaagaattgccacacttgcttctgggctggaaggaggccagacccccattgctgcagaaattgaacattttatccacatcatcacgggtgtggctgtgttcctgggtgtgtctttcttcatcctttctctcatccttgagtacacctggcttgaggctgtcatcttcctcatcggtatcatcgtagccaatgtgccggaaggtttgctggccactgtcacggtaagaggca

SEQ ID NO: 6169 - DNA, 483 bp, Homo sapiens
  MAP TO AC005479.2; EXPRESSED IN LUNG, SIGNAL =   3; EXPRESSED IN HELA, SIGNAL = 2.2; EXPRESSED IN HEART, SIGNAL = 2.3; EXPRESSED IN FETAL LIVER, SIGNAL = 2.1; EXPRESSED IN BRAIN, SIGNAL = 2.3; EXPRESSED IN PLACENTA, SIGNAL = 2.7; EXPRESSED IN BONE MARROW, SIGNAL = 2.3; EXPRESSED IN ADULT LIVER, SIGNAL = 2.6
tgtttggggacaaagtagggcaggggagaggtggggagaggaatgttgccaggatctcccagagggtaccagtccttgcatgctcccagagacaaagccagccaggctttagctggcaggagctagaacccagctccttctctccctcctccctgacagaggtctatgctcagctgtgcaacgtggctcgcattgaggcagagcgggaggccggggtccacttccggccaggctatgagtatggccccgggcccgatgacctgcactacagcatctatggcccagatggggcccccttctacaactacctgggccccgaggacaccgtccctgagcctgccttccccaacacagccggtcactcagcggaccgcacacccatccttgagtctcctttgcagccctcagaactccagccccactacgtggccagccatccaggtctgtgttgctgcaaaactggggaagaggtgggcaccaaag

SEQ ID NO: 6170 - DNA, 459 bp, Homo sapiens
  MAP TO AC005209.1; EXPRESSED IN ADULT LIVER, SIGNAL = 2.7; EXPRESSED IN PLACENTA, SIGNAL =   3; EXPRESSED IN HELA, SIGNAL =   3; EXPRESSED IN HEART, SIGNAL = 2.8; EXPRESSED IN FETAL LIVER, SIGNAL = 2.7; EXPRESSED IN BRAIN, SIGNAL = 3.3; EXPRESSED IN LUNG, SIGNAL = 3.4; EXPRESSED IN BONE MARROW, SIGNAL = 3.3
acagagggcattgaggtgagagagaaaaggagacactcctaaaagtccttcccagatgagggtacaatgaattccctgtccaggatgttagggttaaagatcaagcttgaagcataagtttccacatggtggaggaatggctggggtgaggggtgagcagttgcctccaatcttcaacacaagataatcttttcatttcttgctctttggttttagcccacagtaaagcagtcgattagcaaattcatggcctttgtccacacaagtgtcaaccaaacatcccagtcttatctgagcaatgaacagcgctacaactatacaactcccaagtcctttctggagttcatcagactctaccagagcttgttgcacaggcacagaaaagagctcaagtgcaagacagagcggttggagaacgggctgctgaagctgcatagcacctctgcccaggtgagcaat

SEQ ID NO: 6171 - DNA, 427 bp, Homo sapiens
  MAP TO AC004552.1; EXPRESSED IN PLACENTA, SIGNAL = 1.4; EXPRESSED IN LUNG, SIGNAL = 1.8; EXPRESSED IN FETAL LIVER, SIGNAL = 1.3; EXPRESSED IN ADULT LIVER, SIGNAL = 1.6; EXPRESSED IN HEART, SIGNAL = 1.5; EXPRESSED IN BRAIN, SIGNAL = 1.5; EXPRESSED IN BONE MARROW, SIGNAL = 1.6
ttacatgaggcttccgactgcagagactctcaattcatataccaaattttcatcaaatatttgatctgtatttagattttgtaaaccttatagttgaaaatgtagattcactttccaaacatacttggaagttttcccataattgaatcaagtacaagttttaaaatttaaattaattaaaagtacatgaaatttaaaattagttcctcagtcttgcttgtcacatttcaagtgcttaatagccatgtatggctagtggctattgtgtgggtcagcgcagttctagagggacaggagcaaagcagattatggggacagagcatcaggcatgacctgggtttggggcacacaggtggagtgagatttatgatgctgattgcatgtagtgggctggagcttcttgagatcctcatggcctatggtcatc

SEQ ID NO: 6172 - DNA, 479 bp, Homo sapiens
  MAP TO AC005005.1; EXPRESSED IN PLACENTA, SIGNAL = 2.9; EXPRESSED IN LUNG, SIGNAL = 2.9; EXPRESSED IN HELA, SIGNAL = 2.9; EXPRESSED IN FETAL LIVER, SIGNAL = 2.7; EXPRESSED IN ADULT LIVER, SIGNAL = 2.4; EXPRESSED IN HEART, SIGNAL = 2.9; EXPRESSED IN BRAIN, SIGNAL = 3.1; EXPRESSED IN BONE MARROW, SIGNAL = 2.8
accaaactccaggggcttcgggcaggacccaccctgcttttccacaagccttcctctttccatttccctggtctgggcatcagagggcctctttcctaacccttttctccagaccccagagcagcaaggagagccctgggtgtcaggaggctcagagactagccctagctccatttcccctctgccattgacatagggcaaattcaaagattaaaaactgcttgagaacttgagtctttggctgtagaaatagaagtggcattattagtctaccaggagccacattctgtagttagatctcctgctgagcctcttgatcctcctttaatgctccctgtccacccaccctcttcattctatcttgtgagttagactcccagagactgtcaatggccccaaggcccaggccagccctaagagggaaggaagggatgtgagctaagttctctgagttagagccaacacaaacagcccaggtt

SEQ ID NO: 6173 - DNA, 374 bp, Homo sapiens
  MAP TO AC005630.1; EXPRESSED IN PLACENTA, SIGNAL = 8.2; EXPRESSED IN HEART, SIGNAL = 7.5; EXPRESSED IN BONE MARROW, SIGNAL = 7.9; EXPRESSED IN ADULT LIVER, SIGNAL = 8.7; EXPRESSED IN LUNG, SIGNAL = 9.7; EXPRESSED IN HELA, SIGNAL = 8.6; EXPRESSED IN FETAL LIVER, SIGNAL = 8.3; EXPRESSED IN BRAIN, SIGNAL = 7.5
cttagcagatggtggttggctccgcctgcttttccaccagtctgtggcctacagtttaaatgctgggaaaaaggacgtgagatttgatgctagggaaggaggcatggggttctaggcaagggagacagtctcttaggcctggagcaaggggccaggggcctgggcaggccacagagccccacagtgtcctcgctaccctattaatgggccaggaatctggaagccagccaccacatgtcctcatgcccagggtcttccggcaggtggagctgaagagccaagaggctccgagtctgcagcagcagccagaccagtagctggagccccagtcccacaaggagcttggatgtgcggacaagcagggtggtgagtag

SEQ ID NO: 6174 - DNA, 491 bp, Homo sapiens
  MAP TO AC004943.1; EXPRESSED IN PLACENTA, SIGNAL =   5; EXPRESSED IN BRAIN, SIGNAL = 4.9; EXPRESSED IN BONE MARROW, SIGNAL = 4.4; EXPRESSED IN ADULT LIVER, SIGNAL =   5; EXPRESSED IN LUNG, SIGNAL =   6; EXPRESSED IN HELA, SIGNAL = 4.8; EXPRESSED IN HEART, SIGNAL = 4.3; EXPRESSED IN FETAL LIVER, SIGNAL = 4.4
acctggcacatgggaagcttcattaaatacacattagaaaacatagaagcacatgtacaaacaagaccacatcaatcattcagtagcaactcagagcgtcgtgctctcttgtctttgtaggaagtcttgagggggcgttcatcccccttcttaggaagatgtgaaagtattcccgggccacccaaacagtttaagcattgtatcttggcaacagactgtcatgtatcgatagacacacaagtaaagctttgaaatctttctctaaacttgtgaatgaagcaccaaataccatggacagagcagcagttgacctctcaggtggcccacactcttgggcctcactgcatggccacccatgttatcgatcagttgatcacatactggcacatcaggaccaccaattccaatcccaacagctatggcctatatcagaatccaaccaagaatgaaagccatcaatcatctacatagcaggctatttggaaacatcc

SEQ ID NO: 6175 - DNA, 448 bp, Homo sapiens
  MAP TO AC001237.1; EXPRESSED IN PLACENTA, SIGNAL = 1.3; EXPRESSED IN LUNG, SIGNAL = 1.4; EXPRESSED IN FETAL LIVER, SIGNAL = 1.4; EXPRESSED IN BRAIN, SIGNAL = 1.1; EXPRESSED IN BONE MARROW, SIGNAL = 1.3; EXPRESSED IN ADULT LIVER, SIGNAL = 1.4; EXPRESSED IN HEART, SIGNAL = 1.4
ctctccagaagcaagcacggcctgccccacagccgggcactgcagaggagcttatgtagacagagcatggtggtcagattgggcatttagaagtcactggagaccctgatcctttagccacccccacccccggccaggctcagtgagcatgcctctggtgctcaggtcactcgggcttatggactgacagaggagctgcagacatgggtggtttgggtactcacaggactaccatggtggggctccatgttgatctgtgctgcctgccctcaatcagctgaagcttcttcacgtggcggctgaatttaatgcagaaagtgcacactaagagctccatgtctgtttctacacacatgcccatttcttcgaaatgggccatcacttgtgtcaggaacgttttgttccgagtctcgtacaagcagtggagggactccagagagtgtggctg

SEQ ID NO: 6176 - DNA, 364 bp, Homo sapiens
  MAP TO AC004451.1; EXPRESSED IN PLACENTA, SIGNAL = 5.7; EXPRESSED IN LUNG, SIGNAL = 7.1; EXPRESSED IN HEART, SIGNAL = 5.5; EXPRESSED IN FETAL LIVER, SIGNAL = 5.6; EXPRESSED IN BONE MARROW, SIGNAL = 5.6; EXPRESSED IN ADULT LIVER, SIGNAL = 5.5; EXPRESSED IN HELA, SIGNAL = 6.1; EXPRESSED IN BRAIN, SIGNAL = 6.3
tggcatattcatcacctcaaacagttatcatttctttatgttgggaacagtcaaaatcctctttcctagctattttgaaatatacagtaaattattgttaactgtggtcaccgtgctgtgctatagaacacaagaacctattgctcctatctaactgtagttttgtacccattaatgaaccactccctatcctgtcctcccgcctaccctttccagtttggcaattactattctactctctaattccatgagatcacctctttaagctcccacatacgagtgaaaatgtagtatttgtcattctgtgcctggcttacttcacttaacataatgtcctccaggctcatccaagttgctgcaaatg

SEQ ID NO: 6177 - DNA, 495 bp, Homo sapiens
  MAP TO AC005038.1; EXPRESSED IN PLACENTA, SIGNAL = 1.5; EXPRESSED IN HEART, SIGNAL = 1.7; EXPRESSED IN BRAIN, SIGNAL = 1.7; EXPRESSED IN BONE MARROW, SIGNAL = 1.4; EXPRESSED IN ADULT LIVER, SIGNAL = 1.8; EXPRESSED IN LUNG, SIGNAL =   2; EXPRESSED IN HELA, SIGNAL = 1.7; EXPRESSED IN FETAL LIVER, SIGNAL = 1.6
tgcagtagagaggatggctgagctggtgctagactagtgttcctgactggggaatgcagcgagggggagggaggtgcaggaccagggcacggagagtcccttggaaggaaagttcagggagaaggccctgggttcagtgggaggctgtggagagggcacgtaggatgcttggtgtcaggaccttctggggagttctgggcagccagaccagccactggctcctccctttactactcatttatgcacctccccctcatccccacccagggattgcccccacacccagccccgaacctctttgatggctgccatgcgaacggtctcatagtagtgcaggggtgcgttgggtgtgctcatgtcatagccaaatcctgcgactgccacctcgtcacagccgtgtagtgccatggtcactgccacactgccaagggtagggatgttctagaagacgggggcaggggtgagagaaggcatgcagagttcagctggagggct

SEQ ID NO: 6178 - DNA, 463 bp, Homo sapiens
  MAP TO AC003958.1; EXPRESSED IN LUNG, SIGNAL = 2.6; EXPRESSED IN HELA, SIGNAL = 2.4; EXPRESSED IN ADULT LIVER, SIGNAL = 2.3; EXPRESSED IN PLACENTA, SIGNAL = 2.6; EXPRESSED IN HEART, SIGNAL = 2.2; EXPRESSED IN FETAL LIVER, SIGNAL = 2.6; EXPRESSED IN BRAIN, SIGNAL = 2.4; EXPRESSED IN BONE MARROW, SIGNAL = 2.4
agggcgtttgaaaagaagtgaagaaataaaaagaaaaaagacattacatactgtgtccacaccctctgcagtgggatataaatgctccctagaggaaggagacccacagctctgtggcttggagaatttagactctgtcttcagccaggcactccctccctccctcccagcactatgccctacaacttctgcctgcccagcctgagctgccgcaccagctgctcctcccggccctgcgtgccccccagctgccacagctgcaccctgcccggggcctgcaacatccccgccaatgtgagcaactgcaactggttctgcgagggctccttcaatggtagcgagaaggagactatgcagttcctgaacgaccgcctggccagctacctggagaaagtgcgtcagctggagcgggacaacgcggagctggagaacctcatccgggagcggtctcagcagcaggagc

SEQ ID NO: 6179 - DNA, 467 bp, Homo sapiens
  MAP TO AC005774.1; EXPRESSED IN PLACENTA, SIGNAL = 1.1; EXPRESSED IN LUNG, SIGNAL = 1.3; EXPRESSED IN HEART, SIGNAL = 1.4; EXPRESSED IN FETAL LIVER, SIGNAL = 1.2; EXPRESSED IN BONE MARROW, SIGNAL = 1.6; EXPRESSED IN ADULT LIVER, SIGNAL =   1; EXPRESSED IN BRAIN, SIGNAL = 1.2
gttttcggcattagctgtgggctttcctgaggagtgagtgatgcaccattgagttaaagtggcttcctctgacatggggcaattttctggagaagggaacagctgtactgttagcaaccaacattcacagcagctcggcatgaatgcatcagacactcactgggatcgacatcgttttttgattctttgaccatttcctgaatgaaggaacaaggctggtggaagaaatggtttgtctgtattatcaaccttcagctcgtctctcatcccttagagcccaatttgcacgtaccttttccctctcctttcctgttttccccccattttccttccaagctttctcatggttggtagataagtgataccaatccaatacatgtttgaccacctcacaccatggagtctgagaaggtgaagaaagcgtgatgatggaccttctcagactccaagttagaccctaggtggaa

SEQ ID NO: 6180 - DNA, 493 bp, Homo sapiens
  MAP TO AC005668.1; EXPRESSED IN LUNG, SIGNAL = 5.7; EXPRESSED IN HELA, SIGNAL = 5.5; EXPRESSED IN ADULT LIVER, SIGNAL = 5.1; EXPRESSED IN PLACENTA, SIGNAL = 8.7; EXPRESSED IN HEART, SIGNAL = 5.3; EXPRESSED IN FETAL LIVER, SIGNAL = 5.2; EXPRESSED IN BRAIN, SIGNAL = 6.5; EXPRESSED IN BONE MARROW, SIGNAL = 5.6
cctagcacattgcttgagccatatgtttgagatgtggattctttactcccaaacagctccagtaccatagtcagtttactttccaaatgtccatttatgtgacatcaacagtaggaatggctaggaagcaggagatggaggtgataggcccggatactctcttgctgtgtgaccttagatgacttggatttcctgtctgaacctcaacattctcacttgtaaagcacatggagtcattgagttgtcatgcaaaccaaaggagatgacagagacaagagtgctggaagttaggtggccagatctgctcacccactgtctgccatgaggtcaaggtcaggcttggtgggaggttccttccaccctgggcaccaaagcccaagattgacatctggagcctcagtacatcatcatgggctctgccaaggagaagaatgttcattggttccaggattgagtggaccccaacagcatctccctcaaggagcacagagtc

SEQ ID NO: 6181 - DNA, 472 bp, Homo sapiens
  MAP TO AC005803.1; EXPRESSED IN PLACENTA, SIGNAL = 3.3; EXPRESSED IN LUNG, SIGNAL =   4; EXPRESSED IN HELA, SIGNAL = 3.9; EXPRESSED IN FETAL LIVER, SIGNAL = 3.9; EXPRESSED IN ADULT LIVER, SIGNAL = 3.5; EXPRESSED IN HEART, SIGNAL = 3.6; EXPRESSED IN BRAIN, SIGNAL = 4.5; EXPRESSED IN BONE MARROW, SIGNAL = 4.3
caacctggtcctcccctgccagaggccgcctgccagagccccactgggctagcatcaaataaagaccagagaggtctagacactgcctggggatcccacagcattggaagcagggtgggcggtcccctaaccaggagtgacactggggttgggtacaacgagagggaccggggtggggggcacctccatccaggttcccggcaggggtggtgggtcacactcaccacctgcaggagggagaggtagcccagacccacgttgtcgtagttgaccttgacattgagccagcggacctggcctgtgtgcatgaggctctcgcactcagacttgttgttgacctcggagatgtcgaacctctcagaggtggtggtgttgatgcagtagtagaacttgccggcaaacaggttgacacccatgatgctgaagatcagccagaagatgaggcagacaagcagcacattcatgatggagg

SEQ ID NO: 6182 - DNA, 459 bp, Homo sapiens
  MAP TO AC005058.1; EXPRESSED IN PLACENTA, SIGNAL =   2; EXPRESSED IN LUNG, SIGNAL = 2.4; EXPRESSED IN BRAIN, SIGNAL = 2.1; EXPRESSED IN HELA, SIGNAL = 1.9; EXPRESSED IN HEART, SIGNAL =   2; EXPRESSED IN FETAL LIVER, SIGNAL = 1.9; EXPRESSED IN BONE MARROW, SIGNAL = 1.9; EXPRESSED IN ADULT LIVER, SIGNAL = 1.9
gctccattttgagcttccctcaaacaaagtatgagcaaaaatgtttagtcacatgaagcctccattttgccagctgcacacttccaaaaatttattcacccaaaggtcagaagcggtgagttctggagttctttatggtgtcctgggaatgcctttcaagtctctggctgctcacaatatttttgtgtgtgctgaactgttatctaaaacgaagtatttcctaatttcagcctactctgagaaccttcagcttttaaagagcttgctgtataaaaaacacaacaggcctctgtaattctacttcaggtgcgatctggacaccatgaagcactgcaaattctctaaggggatgcccgttaatgtcaactggatggttatcttgtaggtttgttgttcttaagcccaaacttaactgttaccatggaaataaaacacaaaaggagttgtccatcctggaaa

SEQ ID NO: 6183 - DNA, 395 bp, Homo sapiens
  MAP TO AC004067.1; EXPRESSED IN PLACENTA, SIGNAL = 1.4; EXPRESSED IN LUNG, SIGNAL = 1.5; EXPRESSED IN BRAIN, SIGNAL = 1.3; EXPRESSED IN ADULT LIVER, SIGNAL = 1.4; EXPRESSED IN HELA, SIGNAL = 1.8; EXPRESSED IN HEART, SIGNAL = 1.6; EXPRESSED IN FETAL LIVER, SIGNAL = 1.5; EXPRESSED IN BONE MARROW, SIGNAL = 1.3
tgctcttcagatccacactttgttgtttactgtgactctctttgttgaaaagtacacttgaactgcttttcaaatgtatattacacctttgtttacatgtttgtacaccagcttccttaccctgtggatcctaagataatatttggaaagagaattggggaccgaaagatttacacaccctgcgggaacaatgtggtgactggcttgtttcccttgtgtcttttctcagaaaaaccaagtaatgagcacactgctgagatggaacacatgaaatctttggttcacagactatttacaatcttgcatttagaagagtctcagaaaaagagagagcaccatttactggagaaaattgaccacctgaaggaacagctgcagccccttgaacaggttag

SEQ ID NO: 6184 - DNA, 449 bp, Homo sapiens
  MAP TO AC005189.1; EXPRESSED IN PLACENTA, SIGNAL = 3.2; EXPRESSED IN ADULT LIVER, SIGNAL = 2.4; EXPRESSED IN BONE MARROW, SIGNAL = 5.5; EXPRESSED IN BRAIN, SIGNAL = 2.2; EXPRESSED IN FETAL LIVER, SIGNAL =   2; EXPRESSED IN HEART, SIGNAL = 2.1; EXPRESSED IN LUNG, SIGNAL = 2.7; EXPRESSED IN HELA, SIGNAL =   2
atgatttctcctacagcgcctagtacataataggcaaacaataagtattgctgaaattgagcaatttagtttgggtggccccattaaagaaacctagcataatactctttgggagctaaattttcctgaatgctttctgcctgctgcagctcagctggagctctgagcgggctgagggccttctgcttgctagctgtcccacattcccccatgactgccacccttagagggctactctcctgccccagccgctgcactgggaggtgtacggactgctggggctttggctcttcgaagactgcagctcccccatgctctagaagagtcagaaggccttgggttcccctcctgcttctgctcctggttagtcaaggctatcactgcctattatgtgctaggcattataggagaaatcatggagaacgaattcctcaccttccaatgagctc

SEQ ID NO: 6185 - DNA, 462 bp, Homo sapiens
  MAP TO AC004079.1; EXPRESSED IN FETAL LIVER, SIGNAL = 3.4; EXPRESSED IN ADULT LIVER, SIGNAL = 2.9; EXPRESSED IN PLACENTA, SIGNAL = 3.1; EXPRESSED IN LUNG, SIGNAL = 3.1; EXPRESSED IN HEART, SIGNAL = 3.3; EXPRESSED IN BRAIN, SIGNAL =   3; EXPRESSED IN BONE MARROW, SIGNAL = 2.9; EXPRESSED IN HELA, SIGNAL =   3
aaggaaagggcaggaagaacctaaaaaaaaaaaaaaaaaaaagcaaccaaagaaaaaaggtgggtggggggagactctcctggcgcgtagccccaagcccactatcacaggtgggtgagcttgggtgcttcctgaattcttccctgagaaggatggtggccggtaaggtccgtgtaggtggggtgcggctccccaggccccggcccgtggtggtggccgctgcccagcggcccggcacccccatagtccatggcgcccgaggcagcgtgggggaggtgagttagaccaaagagggctggcccggagttgctcatgggctccacatagctgccccccacgaagacggggcttccctgtatgtgtggggtcccatagctgccgttgccctgcaggccatgagcgtgcgggtcatagtcgggggtgccccctgcgcccgcccctgccgccgtgtagcgcttctgt

SEQ ID NO: 6186 - DNA, 486 bp, Homo sapiens
  MAP TO AC005155.1; EXPRESSED IN PLACENTA, SIGNAL = 1.4; EXPRESSED IN LUNG, SIGNAL = 1.5; EXPRESSED IN FETAL LIVER, SIGNAL = 1.2; EXPRESSED IN BRAIN, SIGNAL = 1.3; EXPRESSED IN BONE MARROW, SIGNAL = 1.2; EXPRESSED IN ADULT LIVER, SIGNAL = 1.4; EXPRESSED IN HEART, SIGNAL = 1.3
caataacataaatgaccgattaacacatatttgtctgttacacgtgttatatactgtattcttacaataaagtaagctagagaaaaaattttaagaaaatcatagagaaaataaaaattggctgtttttaaatggaagtggatcatcatgaaggtcttcatcctcatcgtctttatgttgagtagcctgagggggaggaggaagagaagttgatcttgctgtcttaggggtgacagagatggaagaaaatctatgtgtaaatggacttcagcagttcacacctttgttgttcaagagtcagctggcattatctcttgaatttttaaaacagcttgaagaagaaagcatcactttaatcccattttgtagaggagagacagttggcaaggtcacccagtggcacacgggtggggctgggatcaaacctgggccaactgaactcagaggtggtcctgctcccctgccggcaggtgatcaagtcatgca

SEQ ID NO: 6187 - DNA, 455 bp, Homo sapiens
  MAP TO AC005344.1; EXPRESSED IN BRAIN, SIGNAL = 1.8; EXPRESSED IN ADULT LIVER, SIGNAL = 1.6; EXPRESSED IN PLACENTA, SIGNAL = 1.9; EXPRESSED IN LUNG, SIGNAL = 1.7; EXPRESSED IN HELA, SIGNAL =   2; EXPRESSED IN HEART, SIGNAL = 1.9; EXPRESSED IN BONE MARROW, SIGNAL = 1.6; EXPRESSED IN FETAL LIVER, SIGNAL = 1.7
tgtccagggatactgggaagtgtggtccagtgccgtgcccaggaggaagagcaggtgtggtgcacgtcagccatgtccccactccacggagcagcccgttcaccctggggcgtcaggagaggctctgtcagaggggattttgccagggagatgtggggtgtggggtgctggatgtggggtccaggagagcaggggcatgagaagagcagcaacccaagcaaggaagaggaaaaggcctggatgtgtcttcagatagagacagactgaagcgccggcccacactcaccagcagcgtggctctgggcttggtccttaggtgtcccaggtgtctgtctccgcacatcttcccaggccttctccagcgtaccggcatcacctggggactggccctctgcagtcacgctggctccaggctcaccgggagtcacgttctctggctgtgactttccttttgc

SEQ ID NO: 6188 - DNA, 467 bp, Homo sapiens
  MAP TO AC005548.1; EXPRESSED IN PLACENTA, SIGNAL = 3.2; EXPRESSED IN BRAIN, SIGNAL = 3.1; EXPRESSED IN ADULT LIVER, SIGNAL = 2.8; EXPRESSED IN LUNG, SIGNAL = 3.2; EXPRESSED IN HELA, SIGNAL = 3.4; EXPRESSED IN HEART, SIGNAL = 3.1; EXPRESSED IN FETAL LIVER, SIGNAL = 3.1; EXPRESSED IN BONE MARROW, SIGNAL = 2.8
tggctcacatatctgatcaagccttggaatagttatcaggggctttctcgattctttgcttctgtctccaggcctcccaacctgtggttaaaaatgaggttgcgtcagtgtgaattggatactcaatgctgctgactcctggtctctctacttgctccttgtaaccttcccaaagccccactggaagtgctcaggtcctcagagtgttcacagatagccctcctaagtccttcttccctgagcttcttgtcgatgtctgtggcaatgtggcagcttgaatgaagtgctaccccaccactgctaaggctgccgtggatttccacacagaatgctgctgctgctcccagcacgctatctcccagttcagccaggactgcagcgccctcaagacagtacagccaggttgtgtcactgatccccgtggcattgatctcagcatgtgagctgggctgtctcctgtggttttt

SEQ ID NO: 6189 - DNA, 487 bp, Homo sapiens
  MAP TO AC005352.1; EXPRESSED IN LUNG, SIGNAL =  10; EXPRESSED IN HELA, SIGNAL = 9.3; EXPRESSED IN FETAL LIVER, SIGNAL = 9.1; EXPRESSED IN PLACENTA, SIGNAL =  11; EXPRESSED IN HEART, SIGNAL =  11; EXPRESSED IN BRAIN, SIGNAL =  10; EXPRESSED IN BONE MARROW, SIGNAL = 7.8; EXPRESSED IN ADULT LIVER, SIGNAL = 8.4
taagtagggtttggggagggagtacagacacatatatatgattaattgtagggtggccatataatttatcatccaaaactggataattttgagggtaaaaagaattataattatactaggacaagaggtgaaacctggtctcaggcacatgattatccaatttaataccagcagtgtctttaaattatggaagctttgtaagattttaatatctgatatgttttatatttctttgtttttatttaataaggctattgactattctaataattttattcttcctgatgaactttacattaatattattaaattcacatatctctgtgttgggatttttttcttggaactgagttacatttggagcagaaataacgccgttcaggaatatgatgtatggcattggtcagaaaggacatttttaagaaacattatatatatcttcatttcatttaaaaaatctttcagaacatttgatgatttcttcatc

SEQ ID NO: 6190 - DNA, 458 bp, Homo sapiens
  MAP TO AC005664.1; EXPRESSED IN PLACENTA, SIGNAL = 5.8; EXPRESSED IN BRAIN, SIGNAL = 5.9; EXPRESSED IN ADULT LIVER, SIGNAL = 5.9; EXPRESSED IN LUNG, SIGNAL = 5.4; EXPRESSED IN HELA, SIGNAL = 5.2; EXPRESSED IN HEART, SIGNAL = 5.6; EXPRESSED IN FETAL LIVER, SIGNAL = 8.1; EXPRESSED IN BONE MARROW, SIGNAL = 5.2
atgcagacaccacagagcccacagacaggagcctagggtgctgcacccaggcaggttcttgcaaggacaggaagacaagcctttcagccacaccaacagtggaggtgcacagccccttgctcacaagtacaactaggaactatgaacaattatggccttcattagaaaaacaaagctcatgggtcccaggaggcaagaagggaagagtccttcaaaaactcaccaacggattcatctttgcacacctcgactttggccttcacctgccccagggccccaggggctgcctcagcccctagtgggtctttctcgtccgggggccccgggtcagcacccatagagtcaggctcatccaggggaaactccagctctgcagatcggctcaggggcttgacgggggacacatccccactaggggtgaggtcactgctttgctcccgttcctcgttgtccttcat

SEQ ID NO: 6191 - DNA, 463 bp, Homo sapiens
  MAP TO AC005317.1; EXPRESSED IN PLACENTA, SIGNAL = 1.6; EXPRESSED IN LUNG, SIGNAL = 1.6; EXPRESSED IN FETAL LIVER, SIGNAL = 2.2; EXPRESSED IN BRAIN, SIGNAL = 1.5; EXPRESSED IN BONE MARROW, SIGNAL = 1.8; EXPRESSED IN ADULT LIVER, SIGNAL = 1.5; EXPRESSED IN HELA, SIGNAL = 3.2; EXPRESSED IN HEART, SIGNAL = 2.4
tcaccacctagctccagggttatttatcagaccagagatagcacatctaatgttgcattttgaggtgtcagccacttaggccaattttcggggggaagcattagaaaaggatgctgctgttcaattaattttcccagttttgttaatttagatggacttaatttgtaacgccaatgaatcattttctttagccttatagataagaattatttgctggttatgaacaactttataagttatccatcaacactcaagagtatttaatttacttattttctcctacaggattatctgctgtgttgtattcagcattgtttggcctggtataagaatacagtcatacccttacagcagggagaggaggaagaggaggaggaagaggcattctacgaagacctagatgatatattggagtccattactaatagaatgattaagagtgagctggaagactttgaactgg

SEQ ID NO: 6192 - DNA, 456 bp, Homo sapiens
  MAP TO AC002038.1; EXPRESSED IN BONE MARROW, SIGNAL =   2; EXPRESSED IN PLACENTA, SIGNAL = 2.1; EXPRESSED IN LUNG, SIGNAL = 2.3; EXPRESSED IN HELA, SIGNAL = 2.1; EXPRESSED IN FETAL LIVER, SIGNAL = 1.8; EXPRESSED IN ADULT LIVER, SIGNAL = 2.1; EXPRESSED IN HEART, SIGNAL = 1.9; EXPRESSED IN BRAIN, SIGNAL = 2.2
ggaatagagggagaggctgcaacctgtgctcagcccaacattttaaacaacgtctgtataaaattttagccagcactaaacaatgcatggaaagttttatcaccattaaattgcattcactcaaatttgaaattcttctaaacaatgtttgttataaatttattataaactacttgtacttataaaacactacttgattaaaaagatgcttttaaattaattttcattcttctttcagttttgttctaggtgctgtctctcctgctgttgttgttctttacacgatggtgttgcaagaaaatggatatggtgttgaggaagacattccaaccttactaatggctgctagcagtatggatgacattctggctctcactggattcaatacatgcttgagcatagtcttctcctcgggtaaacaagaaaatataacaaccaccagatcattcatgacct

SEQ ID NO: 6193 - DNA, 459 bp, Homo sapiens
  MAP TO AC002041.1; EXPRESSED IN PLACENTA, SIGNAL = 2.1; EXPRESSED IN HEART, SIGNAL = 1.8; EXPRESSED IN FETAL LIVER, SIGNAL = 2.1; EXPRESSED IN BRAIN, SIGNAL = 2.3; EXPRESSED IN LUNG, SIGNAL = 2.6; EXPRESSED IN HELA, SIGNAL = 2.3; EXPRESSED IN BONE MARROW, SIGNAL = 2.2; EXPRESSED IN ADULT LIVER, SIGNAL = 2.2
ccaggacagtgataggctgccgaacccaggagcaaggctgacctggcgcagcccctggggctggccccaggactctccgagggcagacaagggcaggcagggtccaggagggactgccaagaaacaccctggtcccctctcagggccattcccctggagccgggcaacatgagggagacctgggggatgggatgggcttggcccagaggtgctggactcactcccagaactcgatgacaggggaccggcggtcagcaagctggtcacaagtgaggttggccaggctggcactggcacagtcttcatggcggaagatctccacacagtcgggagtgttccaggtgtggccacatgtggcccagggcagcgtggtggtaaaggacttgaccaggtaatagaagccccaggccagcaccatgatgtagtaggtgttgcagtagaagacgatcaccatggagg

SEQ ID NO: 6194 - DNA, 464 bp, Homo sapiens
  MAP TO AC004668.1; EXPRESSED IN BONE MARROW, SIGNAL = 6.6; EXPRESSED IN PLACENTA, SIGNAL =  11; EXPRESSED IN LUNG, SIGNAL = 6.2; EXPRESSED IN HELA, SIGNAL = 8.4; EXPRESSED IN FETAL LIVER, SIGNAL = 5.6; EXPRESSED IN BRAIN, SIGNAL = 6.8; EXPRESSED IN ADULT LIVER, SIGNAL =  28; EXPRESSED IN HEART, SIGNAL = 7.7
aaaaatagcttaaggaacaaaaggagaaacggcataaagatgagactacaaacgggactactgggaagaagttatatccaaaactggtgtgcatatctcatgcactgtaagttaaagtgtcaactggtacaatctccatggagtgtagtttggcacttacaaaatcagaactccacttctagaatttatcctacaatttgtacttgtgcacttggtaaaagttacataaacaagattattcatttttttaaatgtttattttatgtacaaagaactatcatggttttccattgggtagatgccttggataatcctttgaaggaagatcacttagtccaacttaatgaaaccaatatccttcccatactgacaaaaacactggcggcacatattgaggccatatttccggatcagaccgtgccggtttgaacagacgcgacaagagcgagaaccctggccgaatt

SEQ ID NO: 6195 - DNA, 459 bp, Homo sapiens
  MAP TO AC005858.1; EXPRESSED IN LUNG, SIGNAL = 7.6; EXPRESSED IN HEART, SIGNAL = 4.7; EXPRESSED IN FETAL LIVER, SIGNAL = 5.1; EXPRESSED IN BRAIN, SIGNAL = 5.7; EXPRESSED IN BONE MARROW, SIGNAL =   6; EXPRESSED IN HELA, SIGNAL = 5.3; EXPRESSED IN PLACENTA, SIGNAL = 5.9; EXPRESSED IN ADULT LIVER, SIGNAL = 5.7
aaacagcaaactgtggtcccaaaagtagtcagaggtggagttaggacctgaacccagctctgctacttctaatctctatatctgtaatcatcacattatctggacattatcttatacaaaatctgcaaagtttaaattttaagcacctagaagacaggctgagaatttcatgtattctttcaacatccttgttcttttcttatttatttatttatttatttatttatttatttatttatttacttacttacttattggtggtgcgtgttatgggactgcattgtgttggtctccacagtaccagttctcatcagatgctagtcatcttccatttttgctctctccatgctatggtctgccctttccagccctacttggctcaggaggctgatcttgaggactgtattccctggccttccttgctggtcgacttcttgttgaagttgggcactgagaacc

SEQ ID NO: 6196 - DNA, 465 bp, Homo sapiens
  MAP TO AC004856.1; EXPRESSED IN HELA, SIGNAL = 2.6; EXPRESSED IN HEART, SIGNAL =   4; EXPRESSED IN BRAIN, SIGNAL = 2.3; EXPRESSED IN PLACENTA, SIGNAL = 2.5; EXPRESSED IN LUNG, SIGNAL = 2.5; EXPRESSED IN FETAL LIVER, SIGNAL = 2.5; EXPRESSED IN BONE MARROW, SIGNAL = 2.4; EXPRESSED IN ADULT LIVER, SIGNAL = 2.4
agctcagacacgcctaatcctggctccacccagtggtctttccctacctgccctggcagctgaagacagaaaatacaatctcttgggagcgctatggtccaacccatcacctgagaagcccaaatacctattcaggcaaacttaggacaagcttgtttcagctgatgctctcttaaaagtgccacctcttggctggaggccaactaactgctagcacaaccaacattcaagaaaacccatgcactaaacaaaactacaactaaagaccctcacacagtctacctcacttccctactacctcgaccagagcaagtgctgggatccatggctgagagacctgaagacagatcatgtcacaggactctttgcagatactccccagtaccaggtcagagtccagtagctccactgggtggctagacctagaaaagcaataacaatcactgcagtccagctctcagtgag

SEQ ID NO: 6197 - DNA, 448 bp, Homo sapiens
  MAP TO AC005056.1; EXPRESSED IN BRAIN, SIGNAL =  22; EXPRESSED IN ADULT LIVER, SIGNAL =  16; EXPRESSED IN BONE MARROW, SIGNAL =  15; EXPRESSED IN PLACENTA, SIGNAL =  16; EXPRESSED IN LUNG, SIGNAL =  14; EXPRESSED IN HELA, SIGNAL =  12; EXPRESSED IN HEART, SIGNAL =  11; EXPRESSED IN FETAL LIVER, SIGNAL =  16
gctaagggctaggaacatggagttgaaaaagacacggttcctgccccccagagaacactgatagccagaaggtcaattggaaaatatgatactgattagaagctaataaggagattggtatagcccaaggaagagaagatgaggggatgagacgtggtcaagggtatgggcagatggttatggtgttagggagaatgcaaaaattttggcaatagtctcaatatttctctctaatacacacacacacacacacacacacacacacacacacacagcccagctcacctggaaccgcagcacctgggatcccagcacctgggacaactggaatcccagctcctgggacaccaacacctggaacgccagctcctgggacaccaactactcccgggccaaagcctggcccaccaggcactaagcctgcagcagctcctgtggaagaaaaagc

SEQ ID NO: 6198 - DNA, 474 bp, Homo sapiens
  MAP TO AC004770.1; EXPRESSED IN LUNG, SIGNAL = 6.9; EXPRESSED IN PLACENTA, SIGNAL = 6.6; EXPRESSED IN HEART, SIGNAL =   7; EXPRESSED IN FETAL LIVER, SIGNAL = 6.9; EXPRESSED IN BRAIN, SIGNAL =   7; EXPRESSED IN BONE MARROW, SIGNAL = 6.7; EXPRESSED IN ADULT LIVER, SIGNAL = 6.2; EXPRESSED IN HELA, SIGNAL = 6.3
ctaccccatgttccaaccccagcccctcagacagccctgactcgcaggcccagctacctggaggggcactaaacaggccagacagaaacatcagcgtcagcagggactgggaaaggctgcccaccctccaaggaggccctccctggatccccacagcaccccagcaggctaagaggctaaggatgaactcctttagagaagacagtctcatggctctctgacctgggactgcccaccaaagccccacctggcctggcagcttggcttggcctccaggaacctacccatcagtgtctaccaggtcctcctctgtgcgcaggctcagcacgtacagtgtggacatggacaccacgctggagccacagaaaagggtgaccgttagagctggagccaccatccagtgccctctctctaggacaaggctgtggtccttgctcctgaggctgggctcccaggtgatgcctacaaaatggg

SEQ ID NO: 6199 - DNA, 493 bp, Homo sapiens
  MAP TO AC004674.1; EXPRESSED IN LUNG, SIGNAL = 3.6; EXPRESSED IN HELA, SIGNAL = 3.7; EXPRESSED IN BRAIN, SIGNAL = 4.2; EXPRESSED IN BONE MARROW, SIGNAL = 3.6; EXPRESSED IN ADULT LIVER, SIGNAL = 2.9; EXPRESSED IN PLACENTA, SIGNAL = 3.4; EXPRESSED IN HEART, SIGNAL = 3.5; EXPRESSED IN FETAL LIVER, SIGNAL = 3.5
aaacagcccagatttgcttgctgcctctctgacttctgatttgatctttgttctcaggctgcccagccacatgatttaccttggtcctagatcacctccaagttcaccaggccatacagggtcttgaggaatgcaggtacctaaacccctcctctctttttgggagaattgccaagtcagggaatgagtggagtgtttgctaataattccggaaaggcttctctaggtgcaagtatttgcattcattccagttactttccttcattttttaaggcccttgattctgagtattggcaagggtgttatgcaaagctgttgctttggtgatgttggtttggacaatcacttaagtgctggtgttctattcctcacaataaatggaagtgtgaacattgcgatcttgggctccagtgaccaagaggagagcagacgctcctctccacaggttcctatcagagatacttagagcttagagttggggaaactgacccag

SEQ ID NO: 6200 - DNA, 475 bp, Homo sapiens
  MAP TO AC000380.1; EXPRESSED IN PLACENTA, SIGNAL = 2.6; EXPRESSED IN ADULT LIVER, SIGNAL = 4.5; EXPRESSED IN LUNG, SIGNAL = 3.8; EXPRESSED IN HEART, SIGNAL = 3.3; EXPRESSED IN FETAL LIVER, SIGNAL = 3.1; EXPRESSED IN BRAIN, SIGNAL = 3.4; EXPRESSED IN HELA, SIGNAL =   3; EXPRESSED IN BONE MARROW, SIGNAL = 3.3
cactcactgtgatgggcagctgccccacggccgcgcccagggactcgttgaccgagcagtggatgattctgtcagagacaatctggatgtcgcagcttacttggcctatcttgacccggtactcgtgactctggagccccaggctgtcctgctccttctgtgggtgcaaagggggaggatgctcatggggaagtgctcccgaggcccacggctgaggctggctcgcttgcccccgcctaccccggcccctttggtgctcacgtggataacgagggtgagaggctccccggggtggtgcttgatccacttctccctcttggccgtagagaactgtgggttggggaggtagtccaggcggaacctgctgccccgctgtgcctcctcggggtccagtagctcctcagccacagccacctcgtctgcgtaggcccgcccattgatgaagaagtccactggcgctgatgcgttgctcagg

SEQ ID NO: 6201 - DNA, 449 bp, Homo sapiens
  MAP TO AC005809.1; EXPRESSED IN PLACENTA, SIGNAL = 4.1; EXPRESSED IN LUNG, SIGNAL = 4.5; EXPRESSED IN FETAL LIVER, SIGNAL =  66; EXPRESSED IN BRAIN, SIGNAL = 5.3; EXPRESSED IN ADULT LIVER, SIGNAL = 8.4; EXPRESSED IN HELA, SIGNAL = 4.1; EXPRESSED IN HEART, SIGNAL = 6.4; EXPRESSED IN BONE MARROW, SIGNAL = 5.1
gtttgaagatgctgctgtgcttcctcagcccgatggagggggccgaggagagtagcctgtttcggggaggcggggcacggggactgggtcaggagaagccccagggggacgtggaaccgagagattttcgggatggaacctgatggaaacgtccgtggtcaggaggaggctgcaggatggtggcgccgggctgcagacttgcggcagttttgctcacttccgattgctggccatctctgggggggcgcccccgtgggcggggtcttgggtgggtagagcaatcaggggacggtgacgtttggcctccctgaacgcctcgagctccttggcgagcacgtgaccccggcgggcacgcaggagggcaggcaggcccctgcgcaggcgctgggtggactgcttccaggtgtcatattggaagaacttgcccacggggtatctggggaagttgt

SEQ ID NO: 6202 - DNA, 458 bp, Homo sapiens
  MAP TO AC004812.1; EXPRESSED IN PLACENTA, SIGNAL = 3.8; EXPRESSED IN LUNG, SIGNAL = 4.4; EXPRESSED IN HELA, SIGNAL = 4.5; EXPRESSED IN FETAL LIVER, SIGNAL = 4.6; EXPRESSED IN BRAIN, SIGNAL = 5.4; EXPRESSED IN BONE MARROW, SIGNAL = 4.5; EXPRESSED IN ADULT LIVER, SIGNAL = 4.3; EXPRESSED IN HEART, SIGNAL = 4.8
tcaggacaagaagtccaggcttcagtggccaaactcccatctcttggcactgacaactataaaaacaaacagatggcttccaccattaggggcctggtgggcaactggttcccctcaaaatggccttgcttccactgtttcccaaccctgctcctcgggaaagtggttttctccactaagcttgctatcctggctcctccctctggtgcacagtcaactgcatcagcttctcctgagcaggactgtaccaattctcagggggccacaacttttacctcttacctgggaacacctgctttggagcctataccagaagactgcagagagtgtagaaggttcttagcagtggcttctggctgggcctcagccaactgctggatggctgcctgcaaggccctgcgggaggctgcatctctagggggagaggcaaaggaaagggtgaacatgcagacctcagg

SEQ ID NO: 6203 - DNA, 475 bp, Homo sapiens
  MAP TO AC003664.1; EXPRESSED IN PLACENTA, SIGNAL = 1.7; EXPRESSED IN LUNG, SIGNAL = 1.9; EXPRESSED IN HEART, SIGNAL = 1.7; EXPRESSED IN FETAL LIVER, SIGNAL = 1.6; EXPRESSED IN BRAIN, SIGNAL = 1.7; EXPRESSED IN ADULT LIVER, SIGNAL = 1.5; EXPRESSED IN BONE MARROW, SIGNAL = 1.7
taagacatccttgggggaacatctctgcatcttctctacacggccaagattccctgtaacctggggggttctcaccagagctacttacaggtggctagataatctgtaagatctttttcttctccttctcctcctcctcctcctcctcctccttcttcttcttcttcttcttcttctcctcctcctcctctttctcctcttccttcttcttcttcttcttcttcttctcctcctcctcctcctcctcctcctcctccttcttcttcttcttcttcttcttcttcttcttctcctcctcctcctctttctcctcttccttctcctcctcctccttctccttctccttcttcctcttcttctgttttttgagacaggatcttgctctgtctcccaggctgaagagggcagtggcgccccttcctcttccccttccccttccccctccactgcctcctcctcctcctcttcctcttcc

SEQ ID NO: 6204 - DNA, 446 bp, Homo sapiens
  MAP TO AC005923.2; EXPRESSED IN FETAL LIVER, SIGNAL =  15; EXPRESSED IN BRAIN, SIGNAL =  15; EXPRESSED IN BONE MARROW, SIGNAL =  15; EXPRESSED IN PLACENTA, SIGNAL =  16; EXPRESSED IN HELA, SIGNAL =  14; EXPRESSED IN HEART, SIGNAL =  12; EXPRESSED IN ADULT LIVER, SIGNAL =  15; EXPRESSED IN LUNG, SIGNAL =  16
tcttgccgtctactcatccccctcccatcccacttgccctgcgctcctcattagcaaccccaggacccctgcctctcctgactgcccctggccgccccacaggtggggctgggcctgatccacttcggcttcgtggtcacctacctgtcagaacctcttgtccgaggctataccacagctgcagctgtgcaggtcttcgtctcacagctcaagtatgtgtttggcctccatctgagcagccactctgggccactgtccctcatctatgtgagtgagggtagggggagggaggggtaggtgtgccccatggccttgagtgctagctgtgacctggcctctcctcagacagtgctggaggtctgctggaagctgccccagagcaaggttggcaccgtggtcactgcagctgtggctggggtggtgctcgtggtggtgaagctgttgaa

SEQ ID NO: 6205 - DNA, 468 bp, Homo sapiens
  MAP TO AC005477.1; EXPRESSED IN BONE MARROW, SIGNAL = 1.9; EXPRESSED IN PLACENTA, SIGNAL = 1.9; EXPRESSED IN LUNG, SIGNAL = 1.9; EXPRESSED IN HELA, SIGNAL = 1.9; EXPRESSED IN FETAL LIVER, SIGNAL = 2.1; EXPRESSED IN BRAIN, SIGNAL = 2.3; EXPRESSED IN ADULT LIVER, SIGNAL = 1.9; EXPRESSED IN HEART, SIGNAL = 1.9
ctgactcagcacagtgcctcccacccccgaaatgttgatattttctgcagcacaaaccctggctctcttcccttcttgctgcctgaaaaatctcatctctccttctggcttcattaaccatatgcaccaagggttaacctttttgaggacacagacattttgaaaagttgatacaaagctagctcttcagaacaatgcacatgcattatgattttaatataatttctgaagttcataggccttcttaattttatctatgtccttctaggctatgaagccctgaccctctatgccaatgagtgttcaaacctgtatctcaaatctgatcactctctggaggtgaagcctgctgtatacaactgcgctctggacttcccacaggcatctcaaactcaccatgcccaagtgtgaatttaaccttctcacagctcctcttctcatctatcacaagtaagtggtgcccacatc

SEQ ID NO: 6206 - DNA, 477 bp, Homo sapiens
  MAP TO AC004691.1; EXPRESSED IN LUNG, SIGNAL =   8; EXPRESSED IN HELA, SIGNAL = 6.9; EXPRESSED IN ADULT LIVER, SIGNAL = 6.8; EXPRESSED IN PLACENTA, SIGNAL = 7.5; EXPRESSED IN HEART, SIGNAL = 4.8; EXPRESSED IN FETAL LIVER, SIGNAL = 7.3; EXPRESSED IN BRAIN, SIGNAL = 7.7; EXPRESSED IN BONE MARROW, SIGNAL = 7.2
atgagggggcgagtgataccgggtctcaggtctgtatggcagaggccctgcgagcagcagcaggtggggtggcagggcagggatggccctgggaaacagcccagtggcctgagcagcgtgaggggctcccagcatcagacacaaacgtgatcttcagcagggcctctctgaggtcagccctgccttgagtcagacagaaaaatgcccggacccctttccctggggacggcatttcacatcaggcctctccctcatccaggttggctgcttcctgaagaccccgaggttccccatctgggtggtttgcagtgagagccacttcagcatcctctttagcctgcagccggggctcctgcgtgactggaggactgagaggctctttgacttgtactactacgatggcctggccaaccagcaggagcagatccggctgaccattggtgcgggccctcacccccccacccacccaaccctgtc

SEQ ID NO: 6207 - DNA, 493 bp, Homo sapiens
  MAP TO AC004828.2; EXPRESSED IN PLACENTA, SIGNAL = 1.9; EXPRESSED IN LUNG, SIGNAL = 2.2; EXPRESSED IN HELA, SIGNAL =   2; EXPRESSED IN FETAL LIVER, SIGNAL = 1.9; EXPRESSED IN ADULT LIVER, SIGNAL = 2.1; EXPRESSED IN HEART, SIGNAL = 1.8; EXPRESSED IN BRAIN, SIGNAL = 2.1; EXPRESSED IN BONE MARROW, SIGNAL = 2.3
tggagctgggagtttctctctgcagagctgcctggagggggatgagtgagctgttgacttcttggctctcattagctcttccttggcttttggcaggggaaggaacagggggatggaaggagggggcgagggaggctgagtggcagctggctcccagagcttcccgctccccatctgacttgcctgctgcattccttggcaggcaggcaggacaggaaagcctgtcgcagagatgccacccatcacatgccaagccttctgcagcttccggcccttcctgccgcaattccaaggagcaccttggcaaagctaaacttcgatgctctcttaggaggtggatgaacgcctggtcctcctctcccttctcctccgtggcctccagtgcttgctctggcaccagcaaccccattttctatctatctatctttggagcccaaggctggagctgatgaagctctcaagagggcaggtaaggtttcaactgagcctccaa

SEQ ID NO: 6208 - DNA, 459 bp, Homo sapiens
  MAP TO AC006083.1; EXPRESSED IN PLACENTA, SIGNAL = 1.7; EXPRESSED IN HEART, SIGNAL = 1.4; EXPRESSED IN BONE MARROW, SIGNAL = 1.5; EXPRESSED IN ADULT LIVER, SIGNAL = 1.4; EXPRESSED IN FETAL LIVER, SIGNAL = 1.4; EXPRESSED IN LUNG, SIGNAL = 1.6; EXPRESSED IN BRAIN, SIGNAL = 1.4
cctttatgggggtaccaaggttgtctgataagacttcaggcaacctccaggaggtacagagtaatcagaagcacaaaagtttgactagttagggagaaaaagcacaatttagacatatttctatctaatggcggcaggtctgaagtctgtggtattcctaggtgggaggacaaactcatcacagagactgaagccttgaggattagctttcagaatcaagatggccccatcttcaactttaccatggaagcaatatggtggcttaccttcctgccccccgtgttgatgcgaagaggtgtcagaaaggggtcgaagatcatgtgactggtctctatgttgactggcgactgccgtttccccacagagcaaagattccaagctgagttcaccaatccccagaaagaaggaactagaaacaaaaagaaattatagaattaggctgagtagcaggttggggaa

SEQ ID NO: 6209 - DNA, 491 bp, Homo sapiens
  MAP TO AC002465.1; EXPRESSED IN HEART, SIGNAL = 2.9; EXPRESSED IN LUNG, SIGNAL = 0.69; EXPRESSED IN ADULT LIVER, SIGNAL = 0.42
ccagtggtatgttttgcagcagtagatatctgcacaaggttttcatttcagattaggttttcatgtacctaaagtacaaaaatgggaaaaactagtcattgctattaaaaggaggtgattttccttggggaatagagaaaaagagcatgagacatgcctctggaatactgggccccttcaggttttttatctgggcacaggtcatgtgggtgtgtccatttgtgaaaattcattgtgctgtacacatggaatgtgggcactcttctgcatttcatatttcaataacaagaagaaggtggtagaggaagaggagaaggggagggaggagaaagaaggggaagaggaagaagggaaagaggaagaggaggaggaagacaaggaggaggaagagaagaggaagaggagaaagaggaggagaggaaggaggagggggaggaggagaaagaagaaaaaggaagaggaggaggaagagaaggagaaagcaatggtgg

SEQ ID NO: 6210 - DNA, 484 bp, Homo sapiens
  MAP TO AC004125.1; EXPRESSED IN PLACENTA, SIGNAL = 1.9; EXPRESSED IN LUNG, SIGNAL = 1.7; EXPRESSED IN HEART, SIGNAL = 2.4; EXPRESSED IN BRAIN, SIGNAL = 1.7; EXPRESSED IN HELA, SIGNAL = 1.9; EXPRESSED IN FETAL LIVER, SIGNAL = 2.1; EXPRESSED IN BONE MARROW, SIGNAL = 1.9; EXPRESSED IN ADULT LIVER, SIGNAL =   2
tccattccatcacagacacctgactcttgggaacatctggatgaaggtttgtgtagacatgatcattcagatctcagccactgaggacgtgggctcccatctaagccaagaagttattgtcccttgaatttcaaggttctagagctgttaagaaattatttgaaatcttatctgttggaagagccagaagcttagctctagtctcagctctgcccttaactttctctgcaccctgaaataaatcatgccctttgctggggagtggcactgttttcttctttccagaaggagaggatgggtctagatgacctcaatggtcctccaactctgatgttcatcctctggttctctttagccttgcccctctacttgacagccaatgaagagcacagacttgggagccacactgcctacatttgaatcttgcctctccacacccgatggctgtaaatctttgaagaagctactttgagctctcagggcc

SEQ ID NO: 6211 - DNA, 473 bp, Homo sapiens
  MAP TO AC003689.1; EXPRESSED IN LUNG, SIGNAL = 3.4; EXPRESSED IN FETAL LIVER, SIGNAL =   4; EXPRESSED IN BRAIN, SIGNAL = 2.6; EXPRESSED IN BONE MARROW, SIGNAL =   3; EXPRESSED IN ADULT LIVER, SIGNAL = 3.2; EXPRESSED IN PLACENTA, SIGNAL = 4.2; EXPRESSED IN HEART, SIGNAL = 3.5; EXPRESSED IN HELA, SIGNAL = 2.6
ctgcatggaataagctcgcttaaaaaaaaatcaactttgatgagagataatgtacgtacaataaaatacacccattttaagtggacagttggatgagttttgacaaatacccatgcaacgacttaaattaagatatagaacctctcctcaccccatcaagtgcctcccgccctgtgcgaccacactccctgccccaaccccacacaaccactgtcactgacactgtccctatagcttaccgttgtcatttccagaatacgataaaaatgaaattgcacgctgcacactcgtttccgccttcttccctcacagtcatggtctgggagtccacactgtgttagcagtggtttgctccttttgtattgcagagaaatgcggatacacatgtagatgtacatatatcgccattcatctctttctccattagtggacatcagggtggtttccagtttggggctattaacgagcagtgc

SEQ ID NO: 6212 - DNA, 448 bp, Homo sapiens
  MAP TO AC002123.1; EXPRESSED IN LUNG, SIGNAL = 4.3; EXPRESSED IN HEART, SIGNAL = 2.9; EXPRESSED IN FETAL LIVER, SIGNAL = 3.6; EXPRESSED IN BRAIN, SIGNAL = 3.6; EXPRESSED IN BONE MARROW, SIGNAL = 2.9; EXPRESSED IN HELA, SIGNAL = 2.9; EXPRESSED IN PLACENTA, SIGNAL = 3.3; EXPRESSED IN ADULT LIVER, SIGNAL = 3.3
ccctgtgatgagaaagggtgtgtcatgtttgagaaaggaaagggtgcccaagaggctgttgtgttgaaaggttgagggaagggatggcttgtcatttggttggagagattggcagaaacacatcataagggccctgtaattttcaacatgctatgcttcagatgtctatgaaacacacagatgtggacatgaagtaagcagctggatgtctaaacctgggtttcattggcctgaatgtatcaatttggagtgatcagaatgtgggtgttgttaaagtcatggtaatagatatgattttctaggcagaagaagaagaagaaaaaaggacagagttccgaggtattcagaaccagggaggaaccagcagaggagatggagcaaatgcgtccggcaaagtcagaggaagaggtggagaaggcagtgtaagacgaggctcaggaacaactgt

SEQ ID NO: 6213 - DNA, 473 bp, Homo sapiens
  MAP TO AC002045.1; EXPRESSED IN BONE MARROW, SIGNAL = 8.8; EXPRESSED IN PLACENTA, SIGNAL = 5.2; EXPRESSED IN LUNG, SIGNAL = 6.8; EXPRESSED IN HELA, SIGNAL =  13; EXPRESSED IN HEART, SIGNAL = 6.5; EXPRESSED IN FETAL LIVER, SIGNAL =  14; EXPRESSED IN ADULT LIVER, SIGNAL =  13; EXPRESSED IN BRAIN, SIGNAL = 3.3
cgccttttcctcccttattccgaggagacttccctgggcctgactcccggtcctgtccccagcgccccgcggcctctggagccccttcagtgaccaagatacagagatcaggacgcctttgcgccgccccaggtgcccgcccctagctggctctgcttgggccgcgagggaaggtgaggtcgggggcggagccggggcgtgacagccggggtgtgtgtccgccgggcttggtgcctccggtggccctgcagcaccgtcccacctctgccaccctccgatggggccgctacctgtgtgcctgccaatcatgctgctcctgctactgccgtcgctgctgctgctgctgcttctacctggccccgggtccggcgagggtgagtgaggaaggggctttcccggaactcaggcgttccggtattcctccagcccttcctagggacccagcagccctgcctcccatccctctccaagtt

SEQ ID NO: 6214 - DNA, 484 bp, Homo sapiens
  MAP TO AC003101.1; EXPRESSED IN PLACENTA, SIGNAL = 1.8; EXPRESSED IN HEART, SIGNAL = 1.8; EXPRESSED IN BRAIN, SIGNAL = 2.5; EXPRESSED IN BONE MARROW, SIGNAL = 1.7; EXPRESSED IN ADULT LIVER, SIGNAL = 1.6; EXPRESSED IN LUNG, SIGNAL = 1.9; EXPRESSED IN HELA, SIGNAL = 1.7; EXPRESSED IN FETAL LIVER, SIGNAL = 1.7
acctactgttccgcggtatgagagaccacatgattctgccattcgggtcgccatgtcatccctgggggcctctcctagcgtgcccacctcggctcctccggggcaaggtcatccaggctacacagatgctcagggtcctccttgccaggggctgcaaggggagcgagctgaacccgaggaaggtcgtgcttcgtgcagggccagcgagggaaggtcacctcccggcgccccgagcctggccccatgccccaggctccccgcgtcttcctcggagcgctggccccgtcccagtccccgcccccggccgcgccgcccttcttggcttgcgccctggtccccaccaaccccgcccgagcccccacggaccctgcccggcccgacggaaatgacccggccagggtcacacacggcccctgcccgctccgctgcggccatctccgcttccgcttccgcttccgccgaggcttctttccgactcaggcac

SEQ ID NO: 6215 - DNA, 489 bp, Homo sapiens
  MAP TO AC005332.1; EXPRESSED IN PLACENTA, SIGNAL = 1.8; EXPRESSED IN HELA, SIGNAL = 2.4; EXPRESSED IN HEART, SIGNAL =   2; EXPRESSED IN BONE MARROW, SIGNAL = 1.9; EXPRESSED IN ADULT LIVER, SIGNAL = 2.2; EXPRESSED IN BRAIN, SIGNAL = 1.8; EXPRESSED IN FETAL LIVER, SIGNAL = 2.1; EXPRESSED IN LUNG, SIGNAL =   2
gacttttgcaacaggcttgagataatttatagaagcctcccggaggctatgttctctatttttttttttaatttttaagcagtaataaatggcaaaactacaggagcagtcaactatgaagactgagaagcctaggaatgaaattcagtactgatcaagtaaaagttacttcagagttaatgacagacaccaacgatacatcgatactgcaccaaatggtaacaggtatgacagaaatcaatcatcggccgcccacacacacgagtgggaaggtgacctcactgtccccaaatacagaatggcctcacctacctcctaccttcttctcatgctgttcacctctcccttggctcagcaccccttgccagttctcccaaggtcctctctgccagttgaaggcttccctgatcgccatcctcctcaatcccccaggactcacaggttgaaagagtcgcagccaagagttagggaacctgaccatgagccaat

SEQ ID NO: 6216 - DNA, 460 bp, Homo sapiens
  MAP TO AC005539.1; EXPRESSED IN LUNG, SIGNAL = 1.1; EXPRESSED IN FETAL LIVER, SIGNAL = 1.3; EXPRESSED IN BRAIN, SIGNAL = 0.93; EXPRESSED IN BONE MARROW, SIGNAL = 0.96; EXPRESSED IN ADULT LIVER, SIGNAL = 1.2; EXPRESSED IN HEART, SIGNAL = 1.3; EXPRESSED IN PLACENTA, SIGNAL = 1.3
tgttcaatgtgttcttggaggattaaatccaccctcaatataaattcattctgctgctcattatgtccttgtgtttctatgctttagtaagtaaaaaaggctgtttcatttcctttttaacccacaaatattaattttcttaagtagagttgttaatataaattatgggtttgaataacaaagagttgctggcatttttctgtttccttcacagtttataaattgttctcaccttcataaaaatcataggtacacattgtatgtccaacgagggttgggaagttggggatttctttgctacagttgaacagttcttcagacagttctttgtccagttcagtacttcgggtgacaatgttgtccaaaatgacctgttcaaaccggggcttaaagaaggagtctacagctatatccgttattacaacagtccctggtgcaatccctgcaatgtgggaataaa

SEQ ID NO: 6217 - DNA, 421 bp, Homo sapiens
  MAP TO AC002068.1; EXPRESSED IN PLACENTA, SIGNAL = 6.6; EXPRESSED IN HELA, SIGNAL = 5.9; EXPRESSED IN HEART, SIGNAL = 5.9; EXPRESSED IN FETAL LIVER, SIGNAL = 5.8; EXPRESSED IN ADULT LIVER, SIGNAL = 6.5; EXPRESSED IN LUNG, SIGNAL = 6.9; EXPRESSED IN BRAIN, SIGNAL =   7; EXPRESSED IN BONE MARROW, SIGNAL = 5.9
ggccttcaccactcatacttggattattaaagtaccattctgagtggccttcattttattcttaacagtatctatcctgggcttcatcttttcttactaatccttttggcttgactgcattctaaagtaatataaaactcacaaaaactcatcacaaaactgttccaaagctaaacatttattctttcagagactgtagatctcaaagtgaatataaaaatatttattctgtaaggagcattattttctttacagacactccaactgatgggttacaaggttacaaagcactgagtgtcagaagccttggaggctttttaggctacatagcagtgtatatcacagagaacatcacagattttgttgttgttgttgttccttttatagttatgaagtctactgcaagcagaatcacaaggtc

SEQ ID NO: 6218 - DNA, 444 bp, Homo sapiens
  MAP TO AC005746.1; EXPRESSED IN LUNG, SIGNAL = 3.4; EXPRESSED IN PLACENTA, SIGNAL = 3.1; EXPRESSED IN HELA, SIGNAL = 3.4; EXPRESSED IN HEART, SIGNAL = 2.5; EXPRESSED IN FETAL LIVER, SIGNAL = 2.9; EXPRESSED IN BRAIN, SIGNAL = 2.9; EXPRESSED IN BONE MARROW, SIGNAL =   3; EXPRESSED IN ADULT LIVER, SIGNAL = 2.9
cttggctggctctgacaccgtgtctctgctctaattactaggcttctgtcctatccctgaggtcaagttccccaatctgggtattgggcccttgccttgatgggctttagttcttaggaacaactgtgccctacttaccttgccaactactactctcccaccccacccaaatcggtcttgtctcgctgaattctcaaggtgctattgaggcctcactgccagttgcccctgatggtgctactaccccactgacccaggtctctacgccgagccctctcctagagtgacctcacctcaccgtcaatgaagccctccatgttgccatgagctgcattttcctggtccaggccccaaacaccaggaactgtctggttctcccggcttgactcagcccagccctacaaagcaggtgtgtgggaaaggcttgtttcccagtaaaggcaa

SEQ ID NO: 6219 - DNA, 490 bp, Homo sapiens
  MAP TO AC002477.1; EXPRESSED IN LUNG, SIGNAL = 0.92; EXPRESSED IN BRAIN, SIGNAL = 0.92; EXPRESSED IN ADULT LIVER, SIGNAL = 1.2; EXPRESSED IN PLACENTA, SIGNAL = 2.5; EXPRESSED IN HEART, SIGNAL = 1.6; EXPRESSED IN FETAL LIVER, SIGNAL = 1.3; EXPRESSED IN BONE MARROW, SIGNAL = 1.1
tataccgtcgctcttccctcccattatcatctcacagctctgacctaaacccttcccgtttggggagtcccctcttttcctcacccccacccaggatttggccgggaggggctctccccatttcgggtgaatggatgaaccaggatgatgcgacttccattcaggcgaagagatagaaggagaacctgagaaagaaagggggcagccccattcccagccatcctccccgcgctgcggactcgtcccgccctctcccgggccagcggccgaccgggcaccttgctcagcgcttctttcttctccttgttgcgatcctgcttatcttcccccttggagctgtcccccgaggtcccaccaccgctgcctgtggccccggcgggggttaacagggttactcgcttctccttaggcctgtgctccttctcttccttcatggctacgtcccccgctgaagcggcttggccggaacggggttaccccgggcacaaac

SEQ ID NO: 6220 - DNA, 455 bp, Homo sapiens
  MAP TO AC000062.1; EXPRESSED IN PLACENTA, SIGNAL = 2.5; EXPRESSED IN HELA, SIGNAL = 2.6; EXPRESSED IN HEART, SIGNAL =   2; EXPRESSED IN FETAL LIVER, SIGNAL = 2.4; EXPRESSED IN ADULT LIVER, SIGNAL = 2.6; EXPRESSED IN LUNG, SIGNAL = 1.9; EXPRESSED IN BRAIN, SIGNAL = 2.3; EXPRESSED IN BONE MARROW, SIGNAL = 2.6
atctcaaacatgccctccacagtcggtgaaatctcccctgttgttttcttataatgcaacaagaaaaaacagtgacagaaacttaattttcataagattgctctacactcttgtggcttttaaattattttctcatactcatctacatgcaattcagtcttaactatctgaaagacttatggatgtattccactacaataattgggcctttccttttgtcatgacaatattgtctcttacagagaatgaacattggtttacgggcattcttggtcatagctgatagcttgcagcagaaagatggggaacctcccatgccggttacaggagccgttcttccttcaggaaacacgttaagagtaaagaaaacatatttgagtaaaacactaactgaagaggaagccaaaatgataggtgagtttcagaagtgcataagaactaagccttattaagcc

SEQ ID NO: 6221 - DNA, 365 bp, Homo sapiens
  MAP TO AC003663.1; EXPRESSED IN PLACENTA, SIGNAL =   3; EXPRESSED IN LUNG, SIGNAL = 3.3; EXPRESSED IN FETAL LIVER, SIGNAL =   4; EXPRESSED IN BRAIN, SIGNAL = 3.6; EXPRESSED IN BONE MARROW, SIGNAL = 3.5; EXPRESSED IN ADULT LIVER, SIGNAL = 3.1; EXPRESSED IN HELA, SIGNAL = 3.3; EXPRESSED IN HEART, SIGNAL = 3.3
attgaaaagtgacggttggggaagaaaaaaaatctcggcctgtttctgttactgtagtagctagcacttatgaattggcaaagtttcagagaccctccctcccctatgtcagatactacaataccatacaggattaaaggtgtaatatgcagatcaagacctagagattaaatacagacttcaggtaggctgctgcttggaatacttattatttttatacttattttttaatatatttccaggaagaggaagatcaaaacgttgtgccagaaactacctctgaaggctacactttccaagttcaggatggggctcctgggacctttaacttttagatcatgtagctgaggcataaatttgttgtg

SEQ ID NO: 6222 - DNA, 489 bp, Homo sapiens
  MAP TO AC005837.1; EXPRESSED IN PLACENTA, SIGNAL = 8.2; EXPRESSED IN HEART, SIGNAL = 3.2; EXPRESSED IN ADULT LIVER, SIGNAL = 5.7; EXPRESSED IN LUNG, SIGNAL = 3.7; EXPRESSED IN FETAL LIVER, SIGNAL = 8.1; EXPRESSED IN BRAIN, SIGNAL = 2.7; EXPRESSED IN BONE MARROW, SIGNAL = 6.6; EXPRESSED IN HELA, SIGNAL =   4
gctgcaatctcatgatcaaacttctacagattagaagttgcttcttatgcatgcaccaagagggtttcttgagatggaatctactcctctgaacactgttgaaatgaaaacagcccccactggctgctctgaaaagccatctttgcattgttcctcgtctggctccttggttcctcctccgtggactccagcagctttatcaccagagtcctcgaattctcgattcctttttaatcccctgtatcagatcaccggcatgccccatcatgtcagatgcagccatagacaccagctccgagatcaccaccaaggacttaaaggagaagaaggaagttgtggaggaggcggaaatggaagagatgcctctgctaatgggaacactaatgaggaaaattgggagcaggaggttgacaatgaggtagatgaagaagaggaagaaggtgatggtgaggaagaggatggagatgaagacgaggaagctgagtttgc

SEQ ID NO: 6223 - DNA, 473 bp, Homo sapiens
  MAP TO AC005877.2; EXPRESSED IN BRAIN, SIGNAL = 1.5; EXPRESSED IN ADULT LIVER, SIGNAL = 1.3; EXPRESSED IN LUNG, SIGNAL = 1.7; EXPRESSED IN FETAL LIVER, SIGNAL = 1.4; EXPRESSED IN BONE MARROW, SIGNAL = 1.4; EXPRESSED IN PLACENTA, SIGNAL = 1.6; EXPRESSED IN HEART, SIGNAL = 1.7
tcatatgtttacttgccatcgtgtatctttggtgaggtgtctgttgaggtctttcactcatttttaaaccaggtcattttcttattgttgaggtttaagggttctttatgtattttggataacagccctttatcaggtgggtctttggcaaatattttctcacagtctgtagcttgtcttttcattcttttgacagtgtgtcttgcagcaaggaaatttctatttttaatgaaattcagcttatttattctttttttaatgaatcatgcctttggtgttgtatctaaaaagccattgccaaactcaatgtcatctagatcttctcctatgttatcttcttcagcttttgtagttttgcattttacattgaagtcaatgatccattttgagttaatacttgtgaagaatgtaaggtctgtgtctaaattcatctatttatttatttttgcatatggatggccagttgttgcaac

SEQ ID NO: 6224 - DNA, 482 bp, Homo sapiens
  MAP TO AC005939.1; EXPRESSED IN PLACENTA, SIGNAL = 2.5; EXPRESSED IN LUNG, SIGNAL = 2.2; EXPRESSED IN HELA, SIGNAL = 1.8; EXPRESSED IN HEART, SIGNAL = 1.7; EXPRESSED IN FETAL LIVER, SIGNAL = 1.7; EXPRESSED IN BRAIN, SIGNAL = 2.1; EXPRESSED IN BONE MARROW, SIGNAL = 1.9; EXPRESSED IN ADULT LIVER, SIGNAL = 1.9
ttgagtgtgtgcctacccagctgggctgtgacaacactgggcttggccccaaccttgctccatgatcagagtgggcacctggagtggagagaggccagactgtgggagcaggcacttatgaacctgttgctggggggcaagggggtccttcctggggccccaagagcacagaagtgtctggatccacagctgtgctcggataggctgcagctgcacccacacttggggagttcctgtccagccaacttagaagggcagggctccctcttgtccctggctcccacagggtctgtggagtgtacagctctgaccatgcctctgaaatcaaaatgggcactgacagcagggagaaaccaggcaatgggagcaggcacttccaagcttgtggggggaagggggggacttcccaggccccccaaagctcagagactccaaagtctggagcccaccagggcatcttcagtggaacttgaggaggacga

SEQ ID NO: 6225 - DNA, 371 bp, Homo sapiens
  MAP TO AC002081.1; EXPRESSED IN PLACENTA, SIGNAL = 1.2; EXPRESSED IN LUNG, SIGNAL = 1.4; EXPRESSED IN HEART, SIGNAL = 1.3; EXPRESSED IN FETAL LIVER, SIGNAL = 1.4; EXPRESSED IN BRAIN, SIGNAL = 1.2; EXPRESSED IN ADULT LIVER, SIGNAL = 1.4; EXPRESSED IN BONE MARROW, SIGNAL = 1.2
cgcaagaagggagaaaacagaaatggtaagtagaaagtcttatttcagaataaatagcaacctcatagctcccagagaaacattaaggagaacgcttgaatttctctattaaaatgtgctttcatggggatacctgaaatgcagacccacttacctgattgtttttactcccaggcccgcatggaatacaagcctctttgccatagacctgatgtatggacaggtaggtgtcaggtggacattccttgcactggttggtttctttctcaatgtagtggcctggagggcaggggacacacgatgaacccgactgttcagaaccgagggcacaggcacggcatgaggacgccaccccatcaactgcattagtg

SEQ ID NO: 6226 - DNA, 484 bp, Homo sapiens
  MAP TO AC005747.1; EXPRESSED IN PLACENTA, SIGNAL = 0.72; EXPRESSED IN HEART, SIGNAL = 1.4; EXPRESSED IN FETAL LIVER, SIGNAL = 1.1; EXPRESSED IN BRAIN, SIGNAL = 0.9; EXPRESSED IN ADULT LIVER, SIGNAL = 1.1; EXPRESSED IN LUNG, SIGNAL = 0.79; EXPRESSED IN BONE MARROW, SIGNAL = 1.1
tcaatatcagcatctcggagcaccacgctctcagagccagtggcccgcatcccccgctccacccacagatccactccctctgcagcagctgcagcaggggacccccagcccggagcgaccccggcaccgcccagccagaaggggagaggggagactgaccatgacgatctccagcacttcattcttgctgatggtcccgttaccgtccacgtcgtagagggagaaggcccactccagcttctggttggtcttgcccgcggtggtcatgtgcagggcgatgacgtactccttgaagtccagggtgccgtcgaggttggaatcgaagctgcggaacacatgctgggcgtaggccttggggtcggtgtcggggaagaacttggcgtagatgctctggaactgctgctgggtgatgcggccggtgggacagtccttcaggaaggactggtaccaggagcacagctcctcctccgagaacttggtgttc

SEQ ID NO: 6227 - DNA, 484 bp, Homo sapiens
  MAP TO AC004526.1; EXPRESSED IN LUNG, SIGNAL = 9.7; EXPRESSED IN FETAL LIVER, SIGNAL = 8.1; EXPRESSED IN PLACENTA, SIGNAL = 8.3; EXPRESSED IN HELA, SIGNAL = 7.6; EXPRESSED IN BRAIN, SIGNAL = 8.6; EXPRESSED IN BONE MARROW, SIGNAL = 7.7; EXPRESSED IN ADULT LIVER, SIGNAL = 9.2; EXPRESSED IN HEART, SIGNAL = 8.1
ttttccagccatttcttagaatctttagagtgaaatatagaaacgtttgccatttctcaaaagataaactctaccattcaagacagttatcttgaagcttgtgtaaaaattaatcatatatattatatacagcattgtaaataggtagccaaaacttttgtgtaggcgaatagtaattctctatgatgtttatgttagtattttaagtatctactaaagaaagctgttgaattttagaagtaacattgaaatagttaggtgaagtgattatccaggtgtttgatcacgttaattccctatcttgctgcagaaactcagaggatttcctcatcacaacagcacccacatttacgtaaagtttcagtgtctgaatcaaatgttctcttggatgaagaagtacttactgatccgaagatccaggcgctgcttcttactgttctagtaaggatttcccctttttgagtcccccaccctcaaattttta

SEQ ID NO: 6228 - DNA, 419 bp, Homo sapiens
  MAP TO AC003669.1; EXPRESSED IN PLACENTA, SIGNAL =   3; EXPRESSED IN LUNG, SIGNAL = 2.8; EXPRESSED IN HEART, SIGNAL = 2.9; EXPRESSED IN FETAL LIVER, SIGNAL = 3.2; EXPRESSED IN BRAIN, SIGNAL =   3; EXPRESSED IN BONE MARROW, SIGNAL = 2.9; EXPRESSED IN ADULT LIVER, SIGNAL = 2.7; EXPRESSED IN HELA, SIGNAL = 2.9
gctgagctttggaagtttggggttttttttcctcccctgttgcaaattcttgtggtttgggttgggtgttgaagagtgcttgcccggcaggcctctctacttcaagatgactacacttagattctgaaacagggtgaagagtgaatggatcacggtggccttttctctttttttcttttttttaatttaacttttccttttttgctgtctagtcaacctcatcagtcttctgcttcttggtatcaacgttgtcatcctcagcatcttcaactgcccatttgcccatagcatcctcagctgccacatcttcatcttcatcctcttcctcaccatcaccttcttcctcctctttttcctccccatattcttcctattcttcttctacctcattgtcagcctcctgtttcccattttcctca

SEQ ID NO: 6229 - DNA, 360 bp, Homo sapiens
  MAP TO AC005950.1; EXPRESSED IN ADULT LIVER, SIGNAL = 4.1; EXPRESSED IN HEART, SIGNAL = 5.2; EXPRESSED IN BRAIN, SIGNAL = 4.1; EXPRESSED IN LUNG, SIGNAL = 3.5; EXPRESSED IN FETAL LIVER, SIGNAL = 4.4; EXPRESSED IN BONE MARROW, SIGNAL = 4.1; EXPRESSED IN PLACENTA, SIGNAL =   4; EXPRESSED IN HELA, SIGNAL = 4.2
tgtgccacagaacagactccccggcccctccctgctcgagaggtgaccaaggcccagggtctcccagcgagcaagaggccattgaactgttgttggctgtgcagtgccctgccctcggggaggcggcctctaagaagcacacaccaccagcaggaaccgggcagacagaggtgggggatggaaagcaggggaagtggccacagccaaaccaggagggggaagggagggggcctcaccaaggagaccctcacctggggcctggagaatgagaagggtctggaggctaaggagaggggtggatgctccaggaggcagggccagcccatgtgagggtcctgaggtaggaaccagaggaaaccg

SEQ ID NO: 6230 - DNA, 464 bp, Homo sapiens
  MAP TO AC004580.2; EXPRESSED IN BRAIN, SIGNAL = 1.4; EXPRESSED IN ADULT LIVER, SIGNAL = 1.4; EXPRESSED IN LUNG, SIGNAL = 1.3; EXPRESSED IN FETAL LIVER, SIGNAL = 1.4; EXPRESSED IN BONE MARROW, SIGNAL = 1.5; EXPRESSED IN PLACENTA, SIGNAL = 1.7; EXPRESSED IN HEART, SIGNAL = 1.4
gaggccacctcctatgtcacagtcctgctgaagccaccttggagagaggctgtcggaagcccatggcccaggccaggggtgagtccggccaacccttgtttctgaaggggccgtcctgtggtacatcagccccgccctgccgggttccaagcagcttctcctcgcagctctcagaaacatcagtgtggccagagctcagcatgtagggcagattccccaggcctcatgccaagacgtaaatcttggcaaccccggttttcccactgtcctttagctgctcaggacagcatgatgctgcttctggacacacatgtttatttggcaaaagcaaatattcaccaggggcctttctcgacaggagaaaaaacggcagaagcatcctcggttcagccggtgtggtgcccttgtctttcttctcctctccatgggtctgctctagagccccgctgtcctccatgtgttta

SEQ ID NO: 6231 - DNA, 483 bp, Homo sapiens
  MAP TO AC005754.1; EXPRESSED IN BONE MARROW, SIGNAL = 1.9; EXPRESSED IN PLACENTA, SIGNAL = 1.6; EXPRESSED IN LUNG, SIGNAL = 1.8; EXPRESSED IN HELA, SIGNAL =   2; EXPRESSED IN FETAL LIVER, SIGNAL = 2.2; EXPRESSED IN ADULT LIVER, SIGNAL =   2; EXPRESSED IN HEART, SIGNAL = 1.7; EXPRESSED IN BRAIN, SIGNAL = 2.3
cagtggagccacacagctcctcccggtccagtttttcatttagcagtaaatcatgggtctgtggatcaaactgcaaatgttgtctgttccctttgaaaacaacccgagcgccccgcgaagccagctcccccaccctcagtcccaggtcctttgtcaagttggccacaaacgtgccactttctgtctcctccaatacggaatactgaatcgattcagaacccacctctccccaaagcatcaataaaatgaagaaagccacttgccttttcttgttctgtactttagtttgcatcatgtctattatgtctgaatacggaagaaaaatccttttcagctcccaatcaccacatctaccgtcgaccctctcggatgtctttgcagagatttttaaattcgttcttacaacttgtctggcgacgactgccttcccggacacatctatctcagctttagctgtaaacgtggtctgtatttttacttggc

SEQ ID NO: 6232 - DNA, 482 bp, Homo sapiens
  MAP TO AC004241.1; EXPRESSED IN PLACENTA, SIGNAL = 7.9; EXPRESSED IN HELA, SIGNAL = 6.3; EXPRESSED IN HEART, SIGNAL = 6.9; EXPRESSED IN BRAIN, SIGNAL = 7.9; EXPRESSED IN ADULT LIVER, SIGNAL = 7.6; EXPRESSED IN LUNG, SIGNAL = 8.4; EXPRESSED IN FETAL LIVER, SIGNAL = 7.4; EXPRESSED IN BONE MARROW, SIGNAL = 7.2
atagagtccttgccccaaccctctccccctaccctgtgcctttccctggattcctcaggcagccccctgagcactctcccacccgcagatcccacaccctgaccagctggggcccactgtgggctctgctgaggggctggacctggtgagtgccaaggacctggcaggccagctgacggaccacgactggagcctcttcaacagtatccaccaggtatgggaggcagagctgggggaggagagcaggcggcggggcgcccggctcggctcagcactcgctgacctctcctgctgaccccacccaggtggagctgatccactatgtgctgggcccccagcatctgcgggatgtcaccaccgccaacctggagcgcttcatgcgccgcttcaatgagctgcagtactgggtggccaccgagctgtgtctctgccccgtgcccggcccccgggcccagctgctcaggaagttcattaagctggcg

SEQ ID NO: 6233 - DNA, 464 bp, Homo sapiens
  MAP TO AC005875.1; EXPRESSED IN PLACENTA, SIGNAL =  21; EXPRESSED IN LUNG, SIGNAL =  29; EXPRESSED IN HELA, SIGNAL =  27; EXPRESSED IN HEART, SIGNAL =  23; EXPRESSED IN FETAL LIVER, SIGNAL =  26; EXPRESSED IN ADULT LIVER, SIGNAL =  23; EXPRESSED IN BRAIN, SIGNAL =  32; EXPRESSED IN BONE MARROW, SIGNAL =  28
aaaattaaaattgttcaaaagcctgatttttgctggcaaagtttatccatgagaacatagcaattagccccttacccctccaaaagaaaccctacaaccctaaaaccaatccaaattgtgtaatttagaagaaataggttttcagtgcctacgactgaagagttcattaaggttttgcagctggaggttttaaaaaatcccacttttcgaaactatctgacgatcaagggcacagagactaacgtaatgctgattctcactggcgcaaacagcttgtggattgcataggccaccacaaaggtacttgtgcctgctgccatttttgactgtacgagggactctttaaatccgagtttcagcaggactgcagacatgtccacaccacttgacacaaccatgtaaaatatgaccaaggaaatgaatgagattccagtgtacaacgacacgccaacagtgtcatattc

SEQ ID NO: 6234 - DNA, 438 bp, Homo sapiens
  MAP TO AC005722.1; EXPRESSED IN LUNG, SIGNAL = 4.7; EXPRESSED IN HELA, SIGNAL = 4.7; EXPRESSED IN BRAIN, SIGNAL = 4.6; EXPRESSED IN BONE MARROW, SIGNAL = 4.5; EXPRESSED IN ADULT LIVER, SIGNAL = 4.5; EXPRESSED IN PLACENTA, SIGNAL = 4.1; EXPRESSED IN HEART, SIGNAL = 3.8; EXPRESSED IN FETAL LIVER, SIGNAL = 4.6
cttcaggagagggaggcaagtacatgcggataagtggtacgatatatttttaagtatcatttttggaaaacatttcagaagtctttatgcaaacacttttaaaagaaaggttttctaaaggaaagcttttccaaagagatttttttgaaaccttagatggaattggacttcatgcccacttttgtgggggaaaaaaaaaaattccttagtctagtcactattctgacttgcatttgattattagaccagttttaattttatgttgttaattttagtcccttccagatatgcagcatattcaggaagaaaacttatcttccccaccattgggtcctcccaactatctacaagtttccaaagattctgccagtactagtagcaagaactcttcttgtgacacggatgactttgttttggtgccacacaacatctcgtcag

SEQ ID NO: 6235 - DNA, 374 bp, Homo sapiens
  MAP TO AC006080.1; EXPRESSED IN HEART, SIGNAL = 2.7; EXPRESSED IN BRAIN, SIGNAL = 3.2; EXPRESSED IN ADULT LIVER, SIGNAL = 5.2; EXPRESSED IN PLACENTA, SIGNAL = 3.5; EXPRESSED IN BONE MARROW, SIGNAL = 3.5; EXPRESSED IN FETAL LIVER, SIGNAL = 4.4; EXPRESSED IN LUNG, SIGNAL = 3.5; EXPRESSED IN HELA, SIGNAL = 3.4
cacagcctagggaaaagcaggaaggccttgttttctggagaggcttacagctgggacattggtgggggtggggggacccaaaagtgtagatgtccccagccagaaactcccctacccactctacccccgacatcccccatggaacagaataagcccagagactggccatagcctactcagttttcctgggaatgcctggaggggaggactcagcagactgacttacttggaccccagctgagccaggacctcctctaagcagatgacattttccctcctgactgtctctcccctgatgagattttttgacaggtggcccatctgtcctccagcatctccatggtcatcaactgggaggagctgaatgaggcatt

SEQ ID NO: 6236 - DNA, 447 bp, Homo sapiens
  MAP TO AC005971.5; EXPRESSED IN PLACENTA, SIGNAL = 2.7; EXPRESSED IN LUNG, SIGNAL = 2.9; EXPRESSED IN BONE MARROW, SIGNAL = 2.5; EXPRESSED IN HELA, SIGNAL = 2.5; EXPRESSED IN ADULT LIVER, SIGNAL = 2.5; EXPRESSED IN HEART, SIGNAL = 2.2; EXPRESSED IN FETAL LIVER, SIGNAL =   3; EXPRESSED IN BRAIN, SIGNAL = 2.9
ttgaatgttgtctagccttggccaaacctggctcagggagtgtgattcccatctggcagttgaggaaagtgagtcagagggctgaagcggtaggctggagccagtgctttccgagccagctggcagcctgtgggtctcatcactgaagccataagctgtggcatatcctttggaagccctaatgtgtagcgtgatgatgcctgcaggtgggggcttatccaggagccggtacaccatctggtctcacccatactgaggatccccctttgtctgtgccactttctcgtaggaattgccccccactgcctggatgagggcactgtgcggagtatggtcactgaggaattcaatggcagcgattgggagaaggccatgaaagagcacaagaccatcaagaacatgtctaaagagtgagcttctgcctctcctgccctgaaaaggaggaat

SEQ ID NO: 6237 - DNA, 467 bp, Homo sapiens
  MAP TO AC006088.1; EXPRESSED IN ADULT LIVER, SIGNAL = 2.2; EXPRESSED IN HEART, SIGNAL = 5.9; EXPRESSED IN FETAL LIVER, SIGNAL =   2; EXPRESSED IN BRAIN, SIGNAL = 2.7; EXPRESSED IN BONE MARROW, SIGNAL = 1.4; EXPRESSED IN PLACENTA, SIGNAL = 1.5; EXPRESSED IN LUNG, SIGNAL = 2.2; EXPRESSED IN HELA, SIGNAL = 2.3
ggagcattgcttgttgtcacagttgtatggctggttgcttgaacagtagccagtggaagacctagtagaatgtgtagagaatctgggtgccctagtcaaaaaccagcgtcggtatttaagttgggatgtggtattcatcttgtgaccagttctctacttctgtcctagggtacaaacattgctgctgggaaagctatgggagtggtggtagcaactggagttaacaccgaaattggcaagatccgggatgaaatggtggcaacagaacaggagagaacaccccttcagcaaaaactagatgaatttggggaacagctttccaaagtcatctcccttatttgcattgcagtctggatcataaatattgggcacttcaatgacccggttcatggagggtcctggatcagaggtgctatttactactttaaaattgcagtggccctggctgtagcagccattcctgaagg

SEQ ID NO: 6238 - DNA, 449 bp, Homo sapiens
  MAP TO AC003084.1; EXPRESSED IN BONE MARROW, SIGNAL = 3.6; EXPRESSED IN PLACENTA, SIGNAL = 3.8; EXPRESSED IN LUNG, SIGNAL = 3.9; EXPRESSED IN HELA, SIGNAL =   4; EXPRESSED IN FETAL LIVER, SIGNAL = 4.6; EXPRESSED IN ADULT LIVER, SIGNAL = 3.8; EXPRESSED IN HEART, SIGNAL = 5.5; EXPRESSED IN BRAIN, SIGNAL = 3.2
ggtttctcatttagaggactgggaaattagtggcaccattagccaggataaaaaatacaagagtaagagaagatttataaactctggaagtaatagaccatagaatagaatagatatgttatatataacaacaaattttgaaaatatttgtaacagacccagattttttttatcaaagtgagaaaatataatttttaaatcttttgaaactgaattctaccctgctctcctctctctggtgttgacaacctcatttaccttctctctgggcagcctcaccatttctgcagctataaagatgaaggagagtgggccaatgatggtggtgggctatcacaactgctacaaccccaacaacttcaattcaagtcacaagcactactaagggagtgagcgccacttgtctcctatgtgaaggaccagtcctagtgataatgctgaccgcagtt

SEQ ID NO: 6239 - DNA, 456 bp, Homo sapiens
  MAP TO AC004455.1; EXPRESSED IN BONE MARROW, SIGNAL = 1.1; EXPRESSED IN PLACENTA, SIGNAL = 1.2; EXPRESSED IN LUNG, SIGNAL = 1.4; EXPRESSED IN FETAL LIVER, SIGNAL = 1.2; EXPRESSED IN ADULT LIVER, SIGNAL = 1.3; EXPRESSED IN HEART, SIGNAL = 1.3; EXPRESSED IN BRAIN, SIGNAL = 1.3
catcttccttccagcctgtcctttagccctccaaggagaaggtctttgttacccctccccatccaggacaccctctctcccctgccacttcctcccctggacactgaaattctccataagtatacattgtctggcgctataggctgtggctctttctttctcctctttacattggactaggggagaaaacccatcttttggaaccggagagcaaattaatgtacagaggaaacacatgaactaatacttttagatgagctcctaccatgtgcactcacaagggagcattttaagggttctgatggtggagttctgggagccctgggaacagacaccaggaacgcggcagctgatctgccacggagtcaagaggatcttccgggaggctctgtcatttctgtaaatcaaggggttaggaagacaggggagaggagagggaaatggaatgcgaaggta

SEQ ID NO: 6240 - DNA, 470 bp, Homo sapiens
  MAP TO AC004534.1; EXPRESSED IN PLACENTA, SIGNAL =  11; EXPRESSED IN HELA, SIGNAL = 9.6; EXPRESSED IN BRAIN, SIGNAL =  11; EXPRESSED IN ADULT LIVER, SIGNAL =  13; EXPRESSED IN HEART, SIGNAL = 9.1; EXPRESSED IN LUNG, SIGNAL =  12; EXPRESSED IN FETAL LIVER, SIGNAL = 9.7; EXPRESSED IN BONE MARROW, SIGNAL =  11
caagctgaggaatttcaggtgtttattattatcatgccttcaacttattttcaaatagttcagaatgtaatgcacatacactcatactcacatattatattgtttggagatttgtccctgcccaaatctcatgttgaattgtaatctctgatgctggaggaagggcctggtgggaggtgtttgggttatgagggtggatccctcgtggcttggtgctgtctttgagatagtgagttctctcaagatctggtcatttaaaagtgcatggcaccttccccacaatctctctcttgctcctgatttccctgtggtgagtgcctgcttctgccttgccttctgccatgggtaaaagcttcccgaggccttcccagaagcagatgctgacatgatgcttcctgtaccgcctgcagaaccataagcccaattcaacctcttttctttgtaaattacccagcctcagcaatgcaaga

SEQ ID NO: 6241 - DNA, 492 bp, Homo sapiens
  MAP TO AC005725.1; EXPRESSED IN PLACENTA, SIGNAL = 3.3; EXPRESSED IN LUNG, SIGNAL = 3.8; EXPRESSED IN HELA, SIGNAL = 3.2; EXPRESSED IN HEART, SIGNAL = 2.9; EXPRESSED IN FETAL LIVER, SIGNAL = 3.1; EXPRESSED IN BRAIN, SIGNAL =   3; EXPRESSED IN ADULT LIVER, SIGNAL = 3.4; EXPRESSED IN BONE MARROW, SIGNAL = 2.9
ggcagggcattatctcccaataaatgcaggtaattactggaggtgtcatgtattagcactttactattcacatgagagtgaagccctttattaaaaccacctcagagaggccaactgagagcactttattccaggcttctgcaacctaaacttgagtgagtggacagagccaatgggctatttgcaggtccatctatcctcagccccgaagtaactgagcagggcttaagtttgttatcctgagaagctgttccatcaaactgaagtcgtattccgaaaactgtcccctcgtggtatcacatgctacttccttgagaatcctccctttaccttgtacataggtctccattgtttcctcacttgtacttttttctttatctagcagaaccatttgacgattgggtcctgatgggaaaaaaatacaatttacttggttcaagagattatgggaataaatgaaggatgtggtttctagaaaccagccaggtggga

SEQ ID NO: 6242 - DNA, 468 bp, Homo sapiens
  MAP TO AC003964.1; EXPRESSED IN PLACENTA, SIGNAL = 2.8; EXPRESSED IN LUNG, SIGNAL = 3.2; EXPRESSED IN HELA, SIGNAL = 2.8; EXPRESSED IN HEART, SIGNAL = 2.4; EXPRESSED IN FETAL LIVER, SIGNAL = 2.5; EXPRESSED IN ADULT LIVER, SIGNAL = 2.5; EXPRESSED IN BRAIN, SIGNAL = 2.5; EXPRESSED IN BONE MARROW, SIGNAL = 2.4
gcaagcagtgttttcctaaccaggttccttctgtattaactgaactttaatgaagatgaattcatcaaccattttttttctgaagtagtttaggaaaagctggacagatgtttaatttctttaacctttatcaattttcagaaagataagtttgtgtcttaccaaccttgaaaggtgaccaatgagatttcgttgttgtggttgtggttgtttttaaactctctaggaactcatggttggttgtatactggatacattttaatcaattatgactattcttacttgatgttcaaattactcaaatttggcttgggtgggtaggggaagggctccttcatgttgatgcctgtgtcattttttaaaatgtaattcaacagtctgatagctttcacacattctggcataatatgcacctgtttcattgtgtatattttcttcccagggctcacatccccctgattttagtgg

SEQ ID NO: 6243 - DNA, 396 bp, Homo sapiens
  MAP TO AC004079.1; EXPRESSED IN FETAL LIVER, SIGNAL = 2.2; EXPRESSED IN BONE MARROW, SIGNAL = 2.2; EXPRESSED IN ADULT LIVER, SIGNAL = 2.3; EXPRESSED IN HELA, SIGNAL = 2.3; EXPRESSED IN PLACENTA, SIGNAL =   2; EXPRESSED IN LUNG, SIGNAL = 2.1; EXPRESSED IN HEART, SIGNAL = 2.2; EXPRESSED IN BRAIN, SIGNAL = 1.9
ctgagctgggcaaaagaaaggtccgaatttgcctggtaatattgccacaacttgaaagtggatgattttcctcctaaagcctcctttgctcccagcttcagaagcaaactctgcaagggtacgagtgtggcaaaaagagaaatggagatttctctcttttgctgcaatcccaaggcgtcaacggcgggtccttctcaaaggaaggtgttaaaaatataagtagtatgtttaaactgtcaaggagccaaagtgtcaccttagagcaaaaacaaagccaggggaaaagggagaaatcaaaaagcactccgggccagggtggcctcatgcataccaatggtttttgtcatttatggctgggcaagatttatgactcggcgccccaaagctgtaaacaga

SEQ ID NO: 6244 - DNA, 469 bp, Homo sapiens
  MAP TO AC005683.2; EXPRESSED IN HELA, SIGNAL = 2.2; EXPRESSED IN FETAL LIVER, SIGNAL = 2.2; EXPRESSED IN PLACENTA, SIGNAL = 2.2; EXPRESSED IN LUNG, SIGNAL = 2.4; EXPRESSED IN HEART, SIGNAL = 2.2; EXPRESSED IN BRAIN, SIGNAL = 2.2; EXPRESSED IN BONE MARROW, SIGNAL = 2.2; EXPRESSED IN ADULT LIVER, SIGNAL = 2.5
gtcagcaaactccagatgggaagcaagcactggtgctccgtttccaggatggtccctaaccctcaaaggcaattcccttcaggggcctctaaattcatgggacaattaccaagaaggggatgaaaaagagagcggcacagggctccttaaatgtctattaatgttttggatagtttctgcacccccctcattctctcattattttggatcaggggagatcaacacacagtgggggcatgcagggttcactttgaacttagctgttgaagacttagcatccacccatgtggccactcagcagaagctgcagatgggccagctgcagaaggccaggggcagggcacagctgtacctttgcagggtcatcgtgcagaaagctgtgcagaggccccgctggctcatcatcttttagttatgagatgtccaaatggtaatccactttcagcttggccaccagatgtcgagaaag

SEQ ID NO: 6245 - DNA, 494 bp, Homo sapiens
  MAP TO AC004464.1; EXPRESSED IN LUNG, SIGNAL = 8.5; EXPRESSED IN HELA, SIGNAL =  12; EXPRESSED IN BONE MARROW, SIGNAL = 9.7; EXPRESSED IN ADULT LIVER, SIGNAL =  10; EXPRESSED IN PLACENTA, SIGNAL =  11; EXPRESSED IN HEART, SIGNAL = 9.5; EXPRESSED IN FETAL LIVER, SIGNAL =  10; EXPRESSED IN BRAIN, SIGNAL = 9.1
tgtgtgtgtgtggtgcagtgtatgaatgtgtgtggtgtatgtgtgtgtatctggatgtgtgtgtagtgtgtgtgtgcgcgtgcacgtgcatgcttgtgcatcctaccacaactgattcccttgttggcaataatttcttctctatcagaagtggcggtagtgatgcctctcactcatatgctccacgaaggctgtcacagaggataccctagcacatgcagatgactacccctcccaagccctggttccatccagaagtgaggtgagccatcaatgagacaggaccatccactgggcaggagtgataagcaggtggagggctccaaagccaagagcagcctgtatgttattggagaaagagttggccttaaaagagagaagaaaactgacgttggagctgcagaaacacatctccttttaggtacaaagcaaggaaggcaaagacagtgtgtctgggcatttggggaggcaggtctgcctcttggtcaacaggt

SEQ ID NO: 6246 - DNA, 429 bp, Homo sapiens
  MAP TO AC005821.1; EXPRESSED IN ADULT LIVER, SIGNAL = 2.7; EXPRESSED IN PLACENTA, SIGNAL = 2.8; EXPRESSED IN LUNG, SIGNAL = 2.8; EXPRESSED IN HELA, SIGNAL = 3.2; EXPRESSED IN HEART, SIGNAL = 2.8; EXPRESSED IN BRAIN, SIGNAL = 2.8; EXPRESSED IN BONE MARROW, SIGNAL = 2.7; EXPRESSED IN FETAL LIVER, SIGNAL = 2.9
aaccttgtgcctcaccactctcccagttgaggtacttgaggggcgagttgtccgaccactgccagcctccgctcgtgtccaagtcattcaagccgatccacagggtggagctgtacccagtgaggaggcctgacagcaaggagggacactgaacaggggatccccagccccagcctcccccgctccccatcgccctctccccaacccacaagcggaaagggcccgggccctccagaggcacgagcaggcatcaggccccggctcaccgttgatgtaggtctgctcgtggatctccgtgatgctcagcagatccgcaccctgctgctcgcagctggcccaggcctccctccacgacagcgtggactggaagttaaactggtagcagctgtcagtcagctggtccttgtcccagaaggtctcgcagtcgtt

SEQ ID NO: 6247 - DNA, 473 bp, Homo sapiens
  MAP TO AC004131.1; EXPRESSED IN PLACENTA, SIGNAL = 4.5; EXPRESSED IN LUNG, SIGNAL = 5.6; EXPRESSED IN HELA, SIGNAL = 5.4; EXPRESSED IN FETAL LIVER, SIGNAL =   5; EXPRESSED IN BONE MARROW, SIGNAL = 5.4; EXPRESSED IN ADULT LIVER, SIGNAL =   5; EXPRESSED IN HEART, SIGNAL = 5.4; EXPRESSED IN BRAIN, SIGNAL = 5.8
caccagcatcaggcacagcgccaggcccaccagctgccagcccgcggggcccgtgccatgccgcaccagcctccgcacgcgccatgcctggctcagcaggcaggagaagcagagcgcaaagaggacgccccagaggaagcggcggacagagcagatggtctcgtcctcctggatgatgaaggcaaacgtcagcccaaagaggcccagggtccccaggaggaacagaaagtggaggcccacagggctcttcttctccttctccttgatgaagggcagccgcaccaggaggatgagcatcaggagcagtgtgatcagggcgcccgccccggccaccgcctccaccacaatgccccagatggcgtccaggtcgcacagggacacgtactgagggaggaggtccagcccacagcctcgggatgtgctggcgttttcagaggccaccgaggtgatcacgaagagcaggaggaaggtga

SEQ ID NO: 6248 - DNA, 461 bp, Homo sapiens
  MAP TO AC004582.1; EXPRESSED IN PLACENTA, SIGNAL = 2.7; EXPRESSED IN LUNG, SIGNAL = 2.3; EXPRESSED IN HELA, SIGNAL = 3.1; EXPRESSED IN FETAL LIVER, SIGNAL = 2.5; EXPRESSED IN BONE MARROW, SIGNAL = 2.3; EXPRESSED IN ADULT LIVER, SIGNAL = 2.2; EXPRESSED IN HEART, SIGNAL = 2.4; EXPRESSED IN BRAIN, SIGNAL = 2.3
tttttccaactcacacctgcttaaaaacttattaaacttattaagtttttaagcaggcatctttttgcccatagaattaaatatataaatgctttaccctggaacatctgaggaggaggccctctgtgatgatctgatcctaaccttttctaagcctgttccccttagccaaactgaagtattcctactttcctaaacaagcctgaagttttttgcttcctcaatactttggtcattattttattttagaaatcctactacacctatttcaatgtgtactattcctacctttttgaggtccaaatcacatggatctcttttacgtttttctctttgtgcccataggctaaaatcaaactttttctgctctgatccctctagtacttctctcagctggtatttcggttcccctcggcctggttcacacatcttttgtcagctccttgagagcatagcctgtg

SEQ ID NO: 6249 - DNA, 495 bp, Homo sapiens
  MAP TO AC004084.1; EXPRESSED IN PLACENTA, SIGNAL = 1.5; EXPRESSED IN ADULT LIVER, SIGNAL = 1.8; EXPRESSED IN LUNG, SIGNAL = 1.9; EXPRESSED IN HEART, SIGNAL = 1.7; EXPRESSED IN FETAL LIVER, SIGNAL = 1.6; EXPRESSED IN BRAIN, SIGNAL = 2.1; EXPRESSED IN BONE MARROW, SIGNAL = 1.7
aaatgtccgcgtctatccagcaagcatccatggagtagtccggagaattgtgggttagcaagacactgggtggcgtcaggcactggagggatgggggaacagccatgcagaagatcccaggcagagccaaggcagagatgcagggggatggtggggggcctactggggacggctaagtggtggggggacaccagtgatccaagggctgggggcatctagaggccagggttccagttacccacagtgcccaggatctgtgggagtagtggatgggggagtagtggatgggcaagggtcaagctgaaaaacaagagccgtcaccctcaccctcccatgcccccactgtggctccatcctggctcctggttctcatcagccgagccggggccctttccccggctgggggtggccatggcgccagaagccacgacaggtttacgttccagccgcagctgcactggccccatcccaagtcccctcgcttgcacacacatt

SEQ ID NO: 6250 - DNA, 480 bp, Homo sapiens
  MAP TO AC005691.1; EXPRESSED IN PLACENTA, SIGNAL =  16; EXPRESSED IN BONE MARROW, SIGNAL =  17; EXPRESSED IN ADULT LIVER, SIGNAL =  21; EXPRESSED IN LUNG, SIGNAL =  18; EXPRESSED IN HELA, SIGNAL =  19; EXPRESSED IN HEART, SIGNAL =  29; EXPRESSED IN FETAL LIVER, SIGNAL =  21; EXPRESSED IN BRAIN, SIGNAL =  24
cacactgaggattgataaaggttgatacaacttggagtgagaacttttaccaagatgaagctaaaagagcctgaccttggaatttcagacaaggggcaggcagggaagagtgttctgggggccagttggggttaggaaaatctgagttctgcacccacaggtaaataaggctcccgacactgcccctttgtgctgggacagagcccatacctaccttaaagggggtggtgcctggctccagtcctgccagcgtgctgctgtccaccatgtgtgccactcggggatcgcccacccgcatgaagtcactgactaggtcggtgacctccaccagccagtccgggcctaacatggtgaccacctggtcagtgccctcggatgatgtcgtgtggaactgggtgaagacctgcagggtggcatgctggtactgcagggtgcagccacggcttgcactctgccgccgctcctcctcctcctcatcct

SEQ ID NO: 6251 - DNA, 457 bp, Homo sapiens
  MAP TO AC004467.1; EXPRESSED IN PLACENTA, SIGNAL = 2.1; EXPRESSED IN LUNG, SIGNAL = 2.5; EXPRESSED IN HELA, SIGNAL = 2.4; EXPRESSED IN HEART, SIGNAL = 1.8; EXPRESSED IN FETAL LIVER, SIGNAL = 1.8; EXPRESSED IN ADULT LIVER, SIGNAL = 1.7; EXPRESSED IN BRAIN, SIGNAL = 1.7; EXPRESSED IN BONE MARROW, SIGNAL = 1.7
ggtgatgagtaatgccagggaaggggggagaagaaagtaagggaaattgagttaccttttttttttttttacctggattacagttatttttctaggtattacacttctcgaggtctaatttggctttatatctttcatagaatcttgctggtaaattgctaaagcaatgggcaaatgagtgaaggcatgaaatgggaattgccttgataatccctttcttaagacaattgagaggaggcctttcctctgtgcctgaatagtatgggctccccttttatttgagtacctctttttgccttgcttagtgttggagccggaggaacagctgggcaccttgcagctcctcatataccttctacctccctgcaactgcgacaccctccaccgcctgctacagttcctctccatcgtggccaggcatgccgatgacaacatcagcaaagatgggcaagaggta

SEQ ID NO: 6252 - DNA, 449 bp, Homo sapiens
  MAP TO AC005736.1; EXPRESSED IN LUNG, SIGNAL = 1.3; EXPRESSED IN BRAIN, SIGNAL = 1.6; EXPRESSED IN BONE MARROW, SIGNAL = 1.8; EXPRESSED IN PLACENTA, SIGNAL = 1.3; EXPRESSED IN HEART, SIGNAL = 9.3; EXPRESSED IN FETAL LIVER, SIGNAL = 1.3; EXPRESSED IN ADULT LIVER, SIGNAL = 1.3
aagcctgcctttctaccgagttagtgagtttcctacaggccgggatggtttcccattatttgctgcttttttgtatttcttccaggatctgactttgaagcctggcaaatagatgttaattgaataagttatttaagtaaaatggggagaggaaaaaaaagaaatatctagtaacatacaaaagatcgttttccaaaagctaactcaagtttcttgaaaggaaacctttccaattctcagagctttgagagaccatcttacttccatgtatgtttggctgttgcttttttgtttgtttttggaatgtcctgctttagggagagctgccatcagtagaagcatgaggaatggatcccttgttctattttttaaaaaataattaaagaactctaaatgaagataatgttgaagaaaattggattcttcttcttcttcttcttcttcttctt

SEQ ID NO: 6253 - DNA, 473 bp, Homo sapiens
  MAP TO AC004584.1; EXPRESSED IN LUNG, SIGNAL = 2.7; EXPRESSED IN BRAIN, SIGNAL = 2.6; EXPRESSED IN BONE MARROW, SIGNAL = 2.2; EXPRESSED IN PLACENTA, SIGNAL = 2.8; EXPRESSED IN HELA, SIGNAL = 2.5; EXPRESSED IN HEART, SIGNAL = 2.4; EXPRESSED IN FETAL LIVER, SIGNAL = 2.4; EXPRESSED IN ADULT LIVER, SIGNAL = 2.8
tacataggccattttgccagaaagagtcttttgtctttaagtgatgtgacattttttcattgactgatggtagttacattttgtagagtcatctcagtatataactatgtcctggagatgtgtttataaattgctcactctagctttctctcttgttcttttgacagagttaaattagaagagagaggagttgctgagaattctgtagtcatcagtaatggtgacattaatttatctcttagaaaagcaaagaagcgggcatttcagttagaggagggtgaagaaactgaaccagattgcaaatattcaaagaagcattggaagagtcgagagaacaataacaataatgagaaggtcttggatctggaaccaaaagctgtcacagatcagactgtcagcaaaaaaaacaagagaaaaaataaagcaacctgtggcacagtgggtgatgataacgaagaggccaaaagaaaatc

SEQ ID NO: 6254 - DNA, 481 bp, Homo sapiens
  MAP TO AC005859.1; EXPRESSED IN LUNG, SIGNAL = 1.9; EXPRESSED IN HELA, SIGNAL = 1.8; EXPRESSED IN BRAIN, SIGNAL = 1.8; EXPRESSED IN BONE MARROW, SIGNAL = 2.1; EXPRESSED IN ADULT LIVER, SIGNAL = 1.8; EXPRESSED IN PLACENTA, SIGNAL = 1.8; EXPRESSED IN HEART, SIGNAL = 1.7; EXPRESSED IN FETAL LIVER, SIGNAL = 1.9
cgttagtgggtagaggccagggatgctgttgaattttcccataatgcgtaggacagcccccgtgacaaagaattatcctggctcaagtgccaaggttgatagtccccgatttaatggaatacaaagtgttttgctcatgcttgagtgatcctatcttaggttaataaatgtgagtgaaatttgttgcatttttcttttacggagcacactttgtgcttttaccattcatactaggggagagtattccaagaatatttgcatacccttaatttttatcttctgctgttctacaggctgctgtcagctggagccaccaaagtgtatgctatccttacccatgggatcttctctggaccagctatttccagaataaataatgccgcctttgaggctgttgtcgtcacaaacacaattccgcaagaggacaaaatgaaacactgcaccaagattcaggtactgtctatacaccaaaggcagccaa

SEQ ID NO: 6255 - DNA, 478 bp, Homo sapiens
  MAP TO AC004472.1; EXPRESSED IN PLACENTA, SIGNAL = 3.4; EXPRESSED IN LUNG, SIGNAL = 4.1; EXPRESSED IN HELA, SIGNAL = 3.6; EXPRESSED IN FETAL LIVER, SIGNAL = 3.5; EXPRESSED IN BRAIN, SIGNAL = 3.5; EXPRESSED IN BONE MARROW, SIGNAL = 3.6; EXPRESSED IN ADULT LIVER, SIGNAL = 3.3; EXPRESSED IN HEART, SIGNAL = 3.4
ccacaaattcttggctcgaccacccaccatggatgccagaggactcagccagggagaggagtggcaaacaggtgtctcttcagggcaacgatgaaaaagcccagctagccttgtacataaaagcaacccaattccaagcctcagggcatatgcaccattgtgccgtggggggtttgttgtggctgaagtgccaaggcggggcattgtgagtagcttaggtggaagcagctggccctcccagtgaagctggacaaccaggagcaggatgaatgagcccaaaaggaagggggtggccctggcctcagctacaacaaaactatcagagaagaacacagccaagcgaaacagcaggagtaacaggacgggcccagggatgggaaacagggttgccaggggcctcttggacccccagccagcccaggctttccacagaaaagggaggaatgagctcactgcagccacagcccctagaagcact

SEQ ID NO: 6256 - DNA, 447 bp, Homo sapiens
  MAP TO AC005831.1; EXPRESSED IN PLACENTA, SIGNAL = 1.3; EXPRESSED IN ADULT LIVER, SIGNAL = 1.3; EXPRESSED IN LUNG, SIGNAL = 1.3; EXPRESSED IN HEART, SIGNAL = 1.5; EXPRESSED IN FETAL LIVER, SIGNAL = 1.4; EXPRESSED IN BRAIN, SIGNAL = 1.6; EXPRESSED IN BONE MARROW, SIGNAL = 1.3
attttccccttgtcctgagcttttgctaattaagaggtagttgctaagagattcctggacacactggtgtatggctctgtgcttccttctcatcccctcttgttctttttcagcctcactccaacccaccacacccacttctctctcccattttctatgttcaggttctgaaaaagacttcaagaaactgactaatcgcgatggctgcccctgacgggagggtagtctccagaccccagagacttggtcaggggtctggccaggggccaaaggggagtggagcctgcctgcatcccctggacagcctggagcagaaggagactcaggagcaaacgtcgggccagctagtcatgctgaggaaggcacaggagttctttcagacctgtgatgctgaaggcaagggcttcatcgccaggaaggatatgcaggtaagtggggtcccaggta

SEQ ID NO: 6257 - DNA, 456 bp, Homo sapiens
  MAP TO AC004549.1; EXPRESSED IN HELA, SIGNAL =  15; EXPRESSED IN HEART, SIGNAL =  13; EXPRESSED IN BRAIN, SIGNAL =  15; EXPRESSED IN BONE MARROW, SIGNAL =  14; EXPRESSED IN PLACENTA, SIGNAL =  15; EXPRESSED IN LUNG, SIGNAL =  17; EXPRESSED IN FETAL LIVER, SIGNAL =  14; EXPRESSED IN ADULT LIVER, SIGNAL =  15
ctctcttgactgccaggctcccacgtaggtgagcagaggggaaagccccggcagcagcggtggcgggtgagcacttccttgagggcacctgtgtgcacacaggggtgaggcccacgcactctaatgcaggagaggggagtgtctccccccagcccatacgctcgctttaaaatcaagaaagggctgctgccttccatgaagcttgccctgtttccatgtggttatgccaagcatgcagcacctctgttaccttgtatctctttttacatccaggaactgggcaggcaaaaggcttctcttcccctccattcatgcacatggagctgaggatggcttcggagctgatggcactctctgtggtccaggactcatcgctgtccgactcctcatagtccacctcctcctcgtcatactcgctgcctgcaggacaagagaagtgcaaggactgtcaggagc

SEQ ID NO: 6258 - DNA, 481 bp, Homo sapiens
  MAP TO AC004106.1; EXPRESSED IN LUNG, SIGNAL = 4.1; EXPRESSED IN FETAL LIVER, SIGNAL =   3; EXPRESSED IN BRAIN, SIGNAL = 3.7; EXPRESSED IN BONE MARROW, SIGNAL = 3.2; EXPRESSED IN HELA, SIGNAL = 3.2; EXPRESSED IN PLACENTA, SIGNAL = 3.8; EXPRESSED IN HEART, SIGNAL = 3.3; EXPRESSED IN ADULT LIVER, SIGNAL = 3.2
tgcattagttttcagtatagaagggtccataaaagaagtcaaaagcagtcttgaataattggcccttctgccagattgtctagtgtcaatttgttttctggcactgcttcacctcagttttcttcctcatcaccttgcactggtttggaaggactcatccccatcaaattggcttttgttaactactctggtgtgtctgttagctcttgaatttcttcaagatatcttgagacccttcaccccgacccccctgcacttttcccccccccccatatttacaatctctttcacgatttccttgattggctctgtcttaagtccaatgatgccatgcacaatatctggacacatttttttctccagcaggactttgttttgggcttgatgattttcatggctttttctataacaacaatagcatcttcaatggtataatctttacacactttcttgatactctctgtattagggttctctccca

SEQ ID NO: 6259 - DNA, 457 bp, Homo sapiens
  MAP TO AC005697.1; EXPRESSED IN LUNG, SIGNAL =  15; EXPRESSED IN HELA, SIGNAL =  14; EXPRESSED IN FETAL LIVER, SIGNAL =  22; EXPRESSED IN BRAIN, SIGNAL =  26; EXPRESSED IN PLACENTA, SIGNAL =  18; EXPRESSED IN HEART, SIGNAL =  19; EXPRESSED IN BONE MARROW, SIGNAL =  18; EXPRESSED IN ADULT LIVER, SIGNAL =  19
taaaatccaggctcctgtccatggcctgcaaggcccctctcgatctggcccctacctacccctcatctgcacctctcaccacccacagcctagtccaggcaaactgagccctgtatggcacactccacaacagcccatgctgtgtttgcctgttatggtctcagcactggggcagaatgtctggcatggagtagatgtacttactcattggggttctccagagaaacagaacctataggagggagggtgtgtgtgtgtgtgtgtgtgtgtgtgtgtgtgtgtgtgtgtgtgtcagagagagacagaggtttattaccatgaactggctcatgcaattatggagattggcaagtccaaaatctgcagagccaatgtcccagttcaagcacaaaggctggaagctgctgtagaaccaggaagagctgatgtcccagtttgaaagccacaggcaagagaa

SEQ ID NO: 6260 - DNA, 460 bp, Homo sapiens
  MAP TO AC004596.1; EXPRESSED IN PLACENTA, SIGNAL = 1.2; EXPRESSED IN LUNG, SIGNAL = 1.4; EXPRESSED IN FETAL LIVER, SIGNAL = 1.8; EXPRESSED IN BONE MARROW, SIGNAL = 1.3; EXPRESSED IN ADULT LIVER, SIGNAL = 1.2; EXPRESSED IN HEART, SIGNAL = 1.3; EXPRESSED IN BRAIN, SIGNAL = 1.3
caagggaaacgattttgagggctgctctgaatggtccctctagcagcttggagaggctgaagtgcttgaacaggggagcgttgcggacagacttcccagtggagttgctgagtgggaactgttaaggcagttggaacaggaaggtgacccacagcaccaggtctcaaggggggtcgtggagtcctacattggatgacaggatctagagactcatcctgggcggacatgatacccgctttgtggatggcaggcacaggccccttctggcaagatccactcagatcaactacccgggcttttttagccaatactgaaccctcccgctgctgggcaggcaggattggtatggcctcactgctgactccacattccagctccatgccaggctcctccaactccatgcttgccaggactttatcaaattcgtcttgttcaggcccctcaaagccaccaacttgct

SEQ ID NO: 6261 - DNA, 473 bp, Homo sapiens; identical to SEQ ID NO: 5591
  MAP TO AC004514.1; EXPRESSED IN ADULT LIVER, SIGNAL = 1.5; EXPRESSED IN PLACENTA, SIGNAL = 1.6; EXPRESSED IN HEART, SIGNAL = 1.6; EXPRESSED IN FETAL LIVER, SIGNAL = 1.4; EXPRESSED IN BRAIN, SIGNAL = 1.8; EXPRESSED IN BONE MARROW, SIGNAL = 1.4; EXPRESSED IN LUNG, SIGNAL = 1.7; EXPRESSED IN HELA, SIGNAL = 1.7

SEQ ID NO: 6262 - DNA, 459 bp, Homo sapiens
  MAP TO AC004148.1; EXPRESSED IN PLACENTA, SIGNAL = 3.8; EXPRESSED IN LUNG, SIGNAL = 3.6; EXPRESSED IN HELA, SIGNAL = 3.7; EXPRESSED IN FETAL LIVER, SIGNAL = 3.7; EXPRESSED IN ADULT LIVER, SIGNAL =   4; EXPRESSED IN HEART, SIGNAL = 4.4; EXPRESSED IN BRAIN, SIGNAL = 3.9; EXPRESSED IN BONE MARROW, SIGNAL = 3.4
agagactcttgaggtccaccccttgatgctgaaaccacctaatgtggctcagcatcttagggtgagaatatggttccagtcttactgacctattgtattcttcttatttttgacacttacctctcttctcgacaataactgagatcttctagttgtttctttttttggtcacataataatttgaccctttaaaaacaaaaagaaatagagtttattcagaagccaggtctaggctaccatacagcatcagctaccagccagggatcgatggtttgtgaacacaggacatcatacctccgctgaatctcctcctttgccaagtcctgtttgagaatgtactgctctctgaacacctgggtggctctgctgaggagctgaaggcattcttcaggaggaggggctatgtccttttcagaagctcttaaaaacaaagtttctacctttattttccttagctga

SEQ ID NO: 6263 - DNA, 378 bp, Homo sapiens
  MAP TO AC005670.1; EXPRESSED IN PLACENTA, SIGNAL = 3.7; EXPRESSED IN LUNG, SIGNAL = 3.8; EXPRESSED IN HELA, SIGNAL =   4; EXPRESSED IN HEART, SIGNAL = 4.1; EXPRESSED IN FETAL LIVER, SIGNAL =   4; EXPRESSED IN ADULT LIVER, SIGNAL = 3.9; EXPRESSED IN BRAIN, SIGNAL = 4.4; EXPRESSED IN BONE MARROW, SIGNAL = 3.9
cagcaccatttgtggaaaagacttttctttccacttagcgttgctctggtaccttgatcaaaaatcagtcgacgacatgagagtggctctatttctggctgatattgctttctgtgtattctgggcatgaccaagagaatgtctgttggcaaagctccatctcctgatgccattcacccactcttggtaaagcgacttgatgtttgtttttttttctgttctcttctgccccaggggactcagaagaagatccttgacattgccaacatgctgggcttgtccaacacagtgatgcggctcatcgagaagcgggctttccaggacaagtactttatgataggtgggatgctgctgacctgtgtggtcatgttcctcgtg

SEQ ID NO: 6264 - DNA, 470 bp, Homo sapiens
  MAP TO AC005865.1; EXPRESSED IN LUNG, SIGNAL =  14; EXPRESSED IN FETAL LIVER, SIGNAL =  14; EXPRESSED IN BONE MARROW, SIGNAL =  13; EXPRESSED IN PLACENTA, SIGNAL =  13; EXPRESSED IN HELA, SIGNAL =  10; EXPRESSED IN HEART, SIGNAL =  13; EXPRESSED IN BRAIN, SIGNAL =  16; EXPRESSED IN ADULT LIVER, SIGNAL =  15
gacctggtgggaggtaattgaatcatgggggcgggtcccccatgctgttctcatgagtgagttctcatgagatctgatggttttgtaaggggctttcccccctttgcttggcacttctctctctcctgccaccttgtttgcttccccttccaccatgattgtaagtttcctgaggcctcaccagccatgctgaaccatgagtcagttaaacctctctcctttataaataacccagtcttgtgtatttcttcatagcagcatgagaatggactaatacacccctcagccatggccctgtcccccagcagatcctgacagccaagaggggtagaggtgccccgaaagccgtggggagtcccatgccattcagcatctcaagaagcggtgcagcagagaaaccagctacgaggtccctcacctgtttttcctcaaatggcaagcccaggaagggggcagaggccacgttcagt

SEQ ID NO: 6265 - DNA, 455 bp, Homo sapiens
  MAP TO AC004491.1; EXPRESSED IN LUNG, SIGNAL = 2.4; EXPRESSED IN BRAIN, SIGNAL = 2.3; EXPRESSED IN BONE MARROW, SIGNAL = 2.1; EXPRESSED IN PLACENTA, SIGNAL = 2.4; EXPRESSED IN HELA, SIGNAL = 2.2; EXPRESSED IN HEART, SIGNAL =   2; EXPRESSED IN FETAL LIVER, SIGNAL = 2.2; EXPRESSED IN ADULT LIVER, SIGNAL = 2.2
ggatccacagaaggctcttgagcaggggaggaacatgacacaaatgaccctctgttctcctgaatgagttacttctccagtgtgctaaggaaagtggggaacaccgtgggagtcaccgcctcccagtatgaatccagtgcaactgacaaggacctggcctaagcactggcttgtggaaagaagtttcttcctaaaccagcggctacaaggcacctgtaagctctgcctgagcttgccaggactgtcccagacccttctcctgcagctctgggggggctcacaagagctctcaggcactgtcatcatcgtgccccagttccccaagcaacacttcatcatagtggctgtacccatgaggcagagcccactctatggtttggggcccattgccgagtctgtggcaaggcttcttgggggctcattctgggttctaaggcaacctgtaggtcccccag

SEQ ID NO: 6266 - DNA, 459 bp, Homo sapiens
  MAP TO AC005809.1; EXPRESSED IN LUNG, SIGNAL = 1.2; EXPRESSED IN BONE MARROW, SIGNAL = 1.5; EXPRESSED IN PLACENTA, SIGNAL =   1; EXPRESSED IN HEART, SIGNAL = 1.4; EXPRESSED IN FETAL LIVER, SIGNAL = 1.3; EXPRESSED IN BRAIN, SIGNAL = 1.4; EXPRESSED IN ADULT LIVER, SIGNAL = 1.2
gatggaccatggcctgagggtgggcacaaccctgacccctctccctgtgtctcatccacttgctcttgccacctggatgggcacaaaaaacccgatggccgtggagatccaggagaacccctagaagagcctcgggcaccccctcacccacgatgaccatagagggccaggggaacccagaggaacctcaggcacccctcaacccatgacggccgtggagggccaggggaactcagaggagcctcaggcacctcctcaacccatgacccatgacggctgtggagggccaggagaagccccagagcagccgcaggcacctcctccccacagtggctgtggagggccaggagaaccctgaggagccccgggtgcccgccgcccacagcgatgccctgacccctggcttcttgaggaccaccttcccatcccctggtagatgctaaaagggaggacactggc

SEQ ID NO: 6267 - DNA, 456 bp, Homo sapiens
  MAP TO AC004552.1; EXPRESSED IN LUNG, SIGNAL =   8; EXPRESSED IN PLACENTA, SIGNAL =   4; EXPRESSED IN HEART, SIGNAL = 7.6; EXPRESSED IN FETAL LIVER, SIGNAL =  14; EXPRESSED IN BRAIN, SIGNAL = 3.9; EXPRESSED IN BONE MARROW, SIGNAL = 6.8; EXPRESSED IN ADULT LIVER, SIGNAL =  17; EXPRESSED IN HELA, SIGNAL = 9.5
atgcttcctatatggcctgcagaactgtgagccaattaaacctcttttttttttttttttaagtacaatttccattttatttttctccagagaatagcctgtcttcagtctttaagaactcagctccttacatgggctttggtgggggacgtggggcagcacccgcaggtctaaatcggggtgggggtgttcggtccttgcgggcttcacgagatcgattcctgactactttgctgtgaattgcacaactcacacagtaatgtagcttcacatacagcttgggaagcacataggcatcgaagacgctcgcttcagaaatgtccctgattgctgcggcctccactatgtttcgaatgacgaatttcttaatggccttgtccttgggcacgcatcgggcacatttagtgcagcgaataggctgcacgtggccgcggccctttttggcacgaccattgt

SEQ ID NO: 6268 - DNA, 477 bp, Homo sapiens
  MAP TO AC005746.1; EXPRESSED IN LUNG, SIGNAL = 1.4; EXPRESSED IN FETAL LIVER, SIGNAL = 1.5; EXPRESSED IN BRAIN, SIGNAL = 1.4; EXPRESSED IN BONE MARROW, SIGNAL = 1.6; EXPRESSED IN ADULT LIVER, SIGNAL = 1.4; EXPRESSED IN PLACENTA, SIGNAL = 1.4; EXPRESSED IN HEART, SIGNAL = 1.4
tggtgttgatcatggcaatcctgcatgtggtattccacgtgggaggggcagttccactgggagctcccctttacacagggtttcccaacaccagagctcctcagacggatagccactggagtgctaactaaagaaaccaacagcaaaaacaaacatatgcccacaaacgattccagagaagctctgcaccaacaggtgctggtcctgaccaaatcaggctagaagtctgatgacacctttacctgttccggatcccacgacgtcccggctaggtgactcggccatggcgtcggcaagtcgctcccggaggccctcctccgtgtgctccatggaggacatgtgccgcagcccgaagccctcaggccagctcccgcacacctccagcagggtcacgctcctgtcaaaggtacctgtggcacacacgggacatctgacgttgagtccacaccttcagggagcaggccattcttgtctacc

SEQ ID NO: 6269 - DNA, 455 bp, Homo sapiens
  MAP TO AC004159.1; EXPRESSED IN LUNG, SIGNAL = 5.2; EXPRESSED IN HELA, SIGNAL = 4.6; EXPRESSED IN BRAIN, SIGNAL = 6.6; EXPRESSED IN BONE MARROW, SIGNAL = 4.8; EXPRESSED IN ADULT LIVER, SIGNAL = 4.7; EXPRESSED IN PLACENTA, SIGNAL = 4.7; EXPRESSED IN HEART, SIGNAL = 4.4; EXPRESSED IN FETAL LIVER, SIGNAL = 4.6
gaagccccacttgttggagatatggatcttctgccatccagggaacttgaacttggccctgcgtaaggcttcaatcacatggtccttgttctgaagcttagtgcggataaacatgatgacttgaccaatgtggaccctggccacagtaccctggggttttccaaaggcccctcacatacccatctggagcctttcagccccagcacagggctacatcttgttgatgcagatgacatggatgggatggagctacactcggatgtgaaagccatctctgccccaacttttcaccatgtacttattggcacaaatacggacagcctccagggcttcagaagacagcagctcatattcatcagacaccatgtggccacagagtgggaactcatccacttttgccttctttcgacccaaagatacagatctcagcagaaacgagactttgggtatggctg

SEQ ID NO: 6270 - DNA, 472 bp, Homo sapiens
  MAP TO AC004592.1; EXPRESSED IN LUNG, SIGNAL = 1.8; EXPRESSED IN BRAIN, SIGNAL = 1.6; EXPRESSED IN BONE MARROW, SIGNAL = 1.5; EXPRESSED IN ADULT LIVER, SIGNAL = 1.5; EXPRESSED IN PLACENTA, SIGNAL = 1.6; EXPRESSED IN HEART, SIGNAL = 1.6; EXPRESSED IN FETAL LIVER, SIGNAL = 1.8
gaccatgcaggtgagtgttggattctcctctccataattctccccatctctcacccagttctggaccctaggttgggaagaggtgattctgaaacctgagacaggtggggagccctggcagtaaagaggacctgtgtttggctaccagcttgaaagccaatttgaggcaagcctcataaaactgtactctgcattgaatagaaacggttgccaggcacctctaaaagaacctaatgcatatcttggtctaacagaacagatccatgaagagaaggcttgggatagcaacctcactacagtcttttttgatgccagaaaaccacggaagggcctcctcaagttttctgtgcccctgaacagggccaagaagaagctgagagggctagtaaacccagagaaatctaacagagaagaaagaggattcaccgtgaccttagtggacaaggtgagtacaggtctctcggtagatgca

SEQ ID NO: 6271 - DNA, 311 bp, Homo sapiens
  MAP TO AC005751.1; EXPRESSED IN LUNG, SIGNAL = 4.1; EXPRESSED IN FETAL LIVER, SIGNAL = 5.5; EXPRESSED IN BONE MARROW, SIGNAL = 4.1; EXPRESSED IN PLACENTA, SIGNAL = 3.7; EXPRESSED IN HELA, SIGNAL = 4.1; EXPRESSED IN HEART, SIGNAL = 4.1; EXPRESSED IN BRAIN, SIGNAL = 3.5; EXPRESSED IN ADULT LIVER, SIGNAL = 4.6
ggtcacagacagctcacagctcccctgcaggaaatctggggaataaatattccaatgtcaccctctttcctttctccatctctgctagtgctctccatcagccaaaccctccaggaagccagaggaaaagaaacccactgttgtaaagaaacccatttttgccattgaaagtaagagcaaaaaccacagttacttttgcatcaacctaatagttcgtccaaactgacgagcaagcacctccatctctgctggtgctctccattgtccaaacccaccaggaagcacctccgtctctgctggtgctctccatt

SEQ ID NO: 6272 - DNA, 365 bp, Homo sapiens
  MAP TO AC004125.1; EXPRESSED IN PLACENTA, SIGNAL = 4.4; EXPRESSED IN LUNG, SIGNAL = 4.5; EXPRESSED IN HEART, SIGNAL = 4.6; EXPRESSED IN BRAIN, SIGNAL = 4.7; EXPRESSED IN BONE MARROW, SIGNAL = 4.1; EXPRESSED IN ADULT LIVER, SIGNAL = 4.6; EXPRESSED IN HELA, SIGNAL = 4.7; EXPRESSED IN FETAL LIVER, SIGNAL = 4.9
tagggatttacatggcctgcccacaccatgaactaagtcagtttgccctgagagtctacaactttccatcttgttctccttctgtaaatttgtcctctgaacttgcagctcttccagacctgcatagcaactgtctttcttgcagaaaacaaaattaaacctcttccttaccagacacccagctgtgcacaaaaacttaatcaattacagttgagattagagctgcaaagaagctgctcacgggactgtggcgatactaccgttatctctgaagacactcctgaaccattctctggagaggaaggtctgggcttgctgggatgtgtgctcatcctgcaggtatttcaggactagagactcccccg

SEQ ID NO: 6273 - DNA, 471 bp, Homo sapiens; identical to SEQ ID NO: 5214
  MAP TO AC004231.1; EXPRESSED IN LUNG, SIGNAL = 2.6; EXPRESSED IN PLACENTA, SIGNAL = 2.4; EXPRESSED IN HEART, SIGNAL =   2; EXPRESSED IN FETAL LIVER, SIGNAL = 2.3; EXPRESSED IN BRAIN, SIGNAL = 2.5; EXPRESSED IN BONE MARROW, SIGNAL = 2.3; EXPRESSED IN ADULT LIVER, SIGNAL = 2.5; EXPRESSED IN HELA, SIGNAL = 2.4

SEQ ID NO: 6274 - DNA, 397 bp, Homo sapiens
  MAP TO AC004056.1; EXPRESSED IN LUNG, SIGNAL = 1.5; EXPRESSED IN HELA, SIGNAL = 1.7; EXPRESSED IN BRAIN, SIGNAL = 1.6; EXPRESSED IN BONE MARROW, SIGNAL = 1.6; EXPRESSED IN ADULT LIVER, SIGNAL = 2.3; EXPRESSED IN PLACENTA, SIGNAL = 1.6; EXPRESSED IN HEART, SIGNAL = 1.6; EXPRESSED IN FETAL LIVER, SIGNAL = 1.6
tcctcagagacttcacatggcttttctttcaatcttaggagacagtgagttaaaaggaaacgtaaactggatacaaatgctgcatttctttctccctttccttaagagagagggaaataatatgagaaagtggtaaaaattatggttaaaagaaaaatgaaaagatctggctcttggtcaacaggcaaaagacaaaccttcatctaaagtgatataaatagttattacatacatcataagctccagccttgatctgctgatagagtctgtgttggtcttcatcccagaagggtggataccccacaagtagaatatagagaatgacacctggaggagaatataatgttaacacaatttaagtcatatagacaacagtaaattaaatgtggctgatcca
